United States Patent Application Publication US 2023/0026259 A1 - sequence listing, part 68

SEQ ID NO: 167655 - DNA, 2555 bp, Homo sapiens
  Payload ID: 12982
  Gene Symbol: GALNT11
  Gene Name: polypeptide N-acetylgalactosaminyltransferase 11
  Uniprot ID: Q8NCW6
  ENST ID: ENST00000415421
  CDS Start-End: 356-964
attactcttcccctcccctgccagagggatctctctgggatcttttaccttagtgcctggtggagttcctggaggtaaagcccacagaagtgtgggtctcgcacctcctgagactgcttccccgagtttctcactctcactagtccacaccgagcatccagcaccagcttatggctctggcagtttctgctccaggtctatagtgagcgagagctgctactttttacttgggcattcattcaaagtgttgaagaataacagcctctaccatcccttattcactggctcatcagctgtcccaggttttgctcttctaggaaattgacaatggcccttcagctatgctaggtctataatgggaagtgtcacagttcggtatttctgttatgggtgcctttttacatctgcgacctggacagttttgctttttgtttatttcaacttcagtgaagtgactcagccacttaagaatgtgcccgtcaaggggtctgggccccacggaccatctccaaaaaaattctatccccgtttcactcgaggcccaagtcgagtgctcgagccacagttcaaagcaaacaaaattgacgatgtgatagacagtcgtgttgaagatccagaagaaggccacttgaaattctcttctgaattaggtatgatttttaatgaacgcgatcaagagttgagagacttgggctatcagaaacatgcttttaatatgcttatcagtgaccgcttgggctaccacagagatgtgccagacacaaggaatgcagcatgtaaagaaaagttctacccacctgacctgccagctgctagtgttgttatctgtttctataatgaagcgttttctgccttgcttcggacagtgcacagtgtcatagaccgcacgccagcacacctgcttcatgagatcatccttgtggatgatgatagtgactttggtaaggaatgctgcacctggtaacattggatccaggctgtcagtcactacagcactgacaaacactaacacagctgaactttcaagtacgtggtaggtggggatcctacacgtgcagtcacagctgggctgaccacaaataagtctgaagaaatccattatctttgtaacctgcttataaactatgctacccaaatttgggccgtgaaattttttccgtggcttactttaaaaaacacacctctttttatttgaaataactgtaggttcacaggaagttacaaagacggcctatgtacctttatccagttgctccatcataaaattcccctgtcagaaccaggaatccacattggtacagtgtgtgtggtccagggtcattctgtcacacaggtggactcccacaaccctcactgcaatgatacagaactgtttcctcacccggagggcccttgtgctgcctctttctagtcacacctcctgctttcctctactcttccccagtccctgaaaccacgactctatgattttgtttccatctctgattttgttatttcaagaatgtcatataaatggaatcacacggtatgtgaccttttgagatgggcttttttcatttggcatgatgccttggcttatgcttctctattaagtctcttacactgatcgtccccagataaaagtggattgcattctgatagctcctcaatgatctctgaatgccagtattttatgattcactacatattctatattctgtacgcctttcttaattcaacatagactcttgctaagaatggctttgtgtacccaaacaggatagaaggctttttattacactgctcattcagctctcagtgaccttgcaagaaaggctggaagcccattttatagagggagaaatataaaaagtaatttgctcagaccccatagctgttaagtagtagagtggaaatgagacctctggtctgcatagctccaagccttctgctcttttcatgacagcaggctgcaggaacacagtggtacaggtgtatgccagtgactttttcatgcactcgagcgtttattaagtaccacttgtatcaacatcagagttggtataccagtatacttaaatatagaaggtaaagaaatggagagagtcatgggagcaaaattctcaaaccttggccaaaaacaaacaaacaaaaaacctaataaataaatctgagtctggaccacgtagaagattggttacatactgatttctagaatttatggttggtttttgtttttttttaagtcaacttgtattttggttttcactttgtggctattttacctaaaaggaaaaattcataatttgaggtggtttgtatattaactatggaaagaattactgcttattatcttacacgatctttcaagttattctgaaatatacaggtgaatgacatagaattccttaaaaaatatttagcaaccttggaagaaagatgctaaattaataaaaggacatattcaatgctgttcttgttattcttggtaggggcaatagaagttgtttcttaactattttgaaatggactaagacttaataaattcctttgtaataaaaggcatttatatctca

SEQ ID NO: 167656 - DNA, 717 bp, Homo sapiens
  Payload ID: 12982
  Gene Symbol: GALNT11
  Gene Name: polypeptide N-acetylgalactosaminyltransferase 11
  ENST ID: ENST00000447796
  CDS Start-End: 238-717
attaacccacaggcctgaggttttcattgttgaaccctttttaaaaactcagtactatccatacatcttcttgtatttgaatatccgttaactgtacgcatagtggtcctacttggtggtttggaaaacagtgattctgtatttggtggatggtttaaagtatactgaagtgtctaacatatttattcttcttttttaggaaattgacaatggcccttcagctatgctaggtctataatgggaagtgtcacagttcggtatttctgttatgggtgcctttttacatctgcgacctggacagttttgctttttgtttatttcaacttcagtgaagtgactcagccacttaagaatgtgcccgtcaaggggtctgggccccacggaccatctccaaaaaaattctatccccgtttcactcgaggcccaagtcgagtgctcgagccacagttcaaagcaaacaaaattgacgatgtgatagacagtcgtgttgaagatccagaagaaggccacttgaaattctcttctgaattaggtatgatttttaatgaacgcgatcaagagttgagagacttgggctatcagaaacatgcttttaatatgcttatcagtgaccgcttgggctaccacagagatgtgccagacacaaggaatgcagcatgtaaagaaaagttctacccacctgacctgccagctgctagtgttgttatctgtttctat

SEQ ID NO: 167657 - DNA, 521 bp, Homo sapiens
  Payload ID: 12982
  Gene Symbol: GALNT11
  Gene Name: polypeptide N-acetylgalactosaminyltransferase 11
  ENST ID: ENST00000446096
  CDS Start-End: 182-521
agcgcctgcgcgacgcctggctgctgggccccggggcagttcagcccgcgccgctcctgcgggtcggactggggctgtggcgggagagaagatgccgcagcccgagtcccagaaggcggcgatcctgggctgcgggcaaggcggaaattgacaatggcccttcagctatgctaggtctataatgggaagtgtcacagttcggtatttctgttatgggtgcctttttacatctgcgacctggacagttttgctttttgtttatttcaacttcagtgaagtgactcagccacttaagaatgtgcccgtcaaggggtctgggccccacggaccatctccaaaaaaattctatccccgtttcactcgaggcccaagtcgagtgctcgagccacagttcaaagcaaacaaaattgacgatgtgatagacagtcgtgttgaagatccagaagaaggccacttgaaattctcttctgaattagatgtaaagaaaagttctacccacctgacctgccagctgctagtgt

SEQ ID NO: 167658 - DNA, 2747 bp, Homo sapiens
  Payload ID: 12982
  Gene Symbol: GALNT11
  Gene Name: polypeptide N-acetylgalactosaminyltransferase 11
  Uniprot ID: Q8NCW6
  ENST ID: ENST00000434507
  CDS Start-End: 438-2264
attttgagttgattttcacatagaggtgggaggctagtttcattcctctgcatatgaatatccagttttcccagtatcatctattgaagatactgtcctttccccaagggatctctctgggatcttttaccttagtgcctggtggagttcctggaggtaaagcccacagaagtgtgggtctcgcacctcctgagactgcttccccgagtttctcactctcactagtccacaccgagcatccagcaccagcttatggctctggcagtttctgctccaggtctatagtgagcgagagctgctactttttacttgggcattcattcaaagtgttgaagaataacagcctctaccatcccttattcactggctcatcagctgtcccaggttttgctcttctaggaaattgacaatggcccttcagctatgctaggtctataatgggaagtgtcacagttcggtatttctgttatgggtgcctttttacatctgcgacctggacagttttgctttttgtttatttcaacttcagtgaagtgactcagccacttaagaatgtgcccgtcaaggggtctgggccccacggaccatctccaaaaaaattctatccccgtttcactcgaggcccaagtcgagtgctcgagccacagttcaaagcaaacaaaattgacgatgtgatagacagtcgtgttgaagatccagaagaaggccacttgaaattctcttctgaattaggtatgatttttaatgaacgcgatcaagagttgagagacttgggctatcagaaacatgcttttaatatgcttatcagtgaccgcttgggctaccacagagatgtgccagacacaaggaatgcagcatgtaaagaaaagttctacccacctgacctgccagctgctagtgttgttatctgtttctataatgaagcgttttctgccttgcttcggacagtgcacagtgtcatagaccgcacgccagcacacctgcttcatgagatcatccttgtggatgatgatagtgactttgatgatttgaaaggagaactagatgaatatgtccaaaaatacctccctggaaaaattaaagtcataagaaatacaaagcgtgaggggttgattcgagggagaatgattggcgcggcccacgcgacaggagaagtccttgtgttcctggacagccactgtgaagtgaatgtgatgtggctgcagcccttgctggccgccatccgtgaggaccggcacaccgtggtgtgcccagtgattgacatcatcagcgccgacacgctggcctacagctcgtcccctgtcgtccgcggagggttcaactggggactgcacttcaaatgggatcttgtccccctttctgagctaggacgagcggagggagccactgcaccaataaagtcaccaacaatggctggaggtttgtttgccatgaacagacagtatttccatgaacttggacagtatgatagtggcatggatatctggggaggagaaaatttggaaatatcatttcggatctggatgtgtggcggtaagctcttcatcatcccttgctctagagtaggacacattttccgaaaaaggcgaccatatggatctcccgaaggccaggacaccatgacacacaactctttgcggctggcacatgtctggttggatgaatacaaggagcagtatttttccttaagacctgacctgaagacgaaaagctatggcaatatcagtgagcgtgtggaactgagaaagaagttgggctgtaaatcatttaaatggtatttggataatgtatacccagagatgcagatatctgggtcccacgccaaaccccaacaacccatttttgtcaatagagggccaaaacgacccaaagtccttcaacgtggaaggctctatcacctccagaccaacaaatgcctggtggcccagggccgcccaagtcagaagggaggtctcgtggtgcttaaggcctgtgactacagtgacccaaatcagatctggatctataatgaagagcatgaattggttttaaatagtctcctttgtctagatatgtcagagactcgctcatcagacccgccacggctcatgaaatgccacgggtcaggaggatcccagcagtggacctttgggaaaaacaatcggctataccaggtgtcggttggacagtgcctgagagcagtggatcccctgggtcagaagggctctgtcgccatggcgatctgcgatggctcctcttcacagcagtggcatttggaaggttaaggtggatgctgtggtgggaacgttgcttcatcaggcgttgcctccggtgtggagtttggggctttaggaaagcctgggttgggtggagcagaaccatcttggagaagatgacagttccctgtcctcccggagatgcctgggtgtgttagcagaggtgacacgtgtctgacagagacgggagctctgagtgtccacgggtgaagaagtgagtgtccacgggtgaagaagtgagtatgtttcacctggacattaaggtgatgtttgagctgctgttaaggaatttcttgcttatagaggcaaaccacagtatcattttaactctagaattgggcttgtacagaaggataaaacccaggaaaatggatatttctattcagatttatttatgcctctttttaatcccctttaatgatgcagtggtttttatctgatcaggaacttgtcatgatttcctttcttagacttcataggagatagtgcttt

SEQ ID NO: 167659 - DNA, 2735 bp, Homo sapiens
  Payload ID: 12983
  Gene Symbol: GALNT12
  Gene Name: polypeptide N-acetylgalactosaminyltransferase 12
  Uniprot ID: Q8IXK2
  ENST ID: ENST00000375011
  CDS Start-End: 1-1746
atgtgggggcgcacggcgcggcggcgctgcccgcgggaactgcggcgcggccgggaggcgctgttggtgctcctggcgctactggcgttggccgggctgggctcggtgctgcgggcgcagcgtggggccggggccggggctgccgagccgggacccccgcgcaccccgcgccccgggcggcgcgagccggtcatgccgcggccgccggtgccggcgaacgcgctgggcgcgcggggcgaggcggtgcggctgcagctgcagggcgaggagctgcggctgcaggaggagagcgtgcggctgcaccagattaacatctacctcagcgaccgcatctcactgcaccgccgcctgcccgagcgctggaacccgctgtgcaaagagaagaaatatgattatgataatttgcccaggacatctgttatcatagcattttataatgaagcctggtcaactctccttcggacagtttacagtgtccttgagacatccccggatatcctgctagaagaagtgatccttgtagatgactacagtgatagagagcacctgaaggagcgcttggccaatgagctttcgggactgcccaaggtgcgcctgatccgcgccaacaagagagagggcctggtgcgagcccggctgctgggggcgtctgcggcgaggggcgatgttctgaccttcctggactgtcactgtgagtgccacgaagggtggctggagccgctgctgcagaggatccatgaagaggagtcggcagtggtgtgcccggtgattgatgtgatcgactggaacaccttcgaatacctggggaactccggggagccccagatcggcggtttcgactggaggctggtgttcacgtggcacacagttcctgagagggagaggatacggatgcaatcccccgtcgatgtcatcaggtctccaacaatggctggtgggctgtttgctgtgagtaagaaatattttgaatatctggggtcttatgatacaggaatggaagtttggggaggagaaaacctcgaattttcctttaggatctggcagtgtggtggggttctggaaacacacccatgttcccatgttggccatgttttccccaagcaagctccctactcccgcaacaaggctctggccaacagtgttcgtgcagctgaagtatggatggatgaatttaaagagctctactaccatcgcaacccccgtgcccgcttggaaccttttggggatgtgacagagaggaagcagctccgggacaagctccagtgtaaagacttcaagtggttcttggagactgtgtatccagaactgcatgtgcctgaggacaggcctggcttcttcgggatgctccagaacaaaggactaacagactactgctttgactataaccctcccgatgaaaaccagattgtgggacaccaggtcattctgtacctctgtcatgggatgggccagaatcagtttttcgagtacacgtcccagaaagaaatacgctataacacccaccagcctgagggctgcattgctgtggaagcaggaatggatacccttatcatgcatctctgcgaagaaactgccccagagaatcagaagttcatcttgcaggaggatggatctttatttcacgaacagtccaagaaatgtgtccaggctgcgaggaaggagtcgagtgacagtttcgttccactcttacgagactgcaccaactcggatcatcagaaatggttcttcaaagagcgcatgttatgaagcctcgtgtatcaaggagcccatcgaaggagactgtggagccaggactctgcccaacaaagacttagctaagcagtgaccagaacccaccaaaaactaggctgcattgctttgaagaggcaatcattttgccatttgtgaaagttgtgttggatttagtaaaaatgtgaataagctttgtacttattttgagaactttttaaatgttccaaaataccctattttcaaagggtaatcgtaagatgttaacccttggtatttagaaaattaaaaccttataatatttttctatcaagatgtatattttacagtcgtgccttttactctcattagcaaaaaagataaagattttattttggtatttacaagaattcccaggtacgaagatatctgcatgggtggaaatcaggttcaagcaacgtactttgcattaactgataatacctcagctgcggggttaaagttttcccagtatagagagactgtcactaggaacattgtattgatttattcaggtcattgagatcttctagatgtattttaaaaagaatgctttttggttatgtgttgctaccacagttaacactccataatgttcatgtcagccaaagaggactaaccaaagctgaaatctcagagaacaatttgctttactaagctgagtcaacttgagagcgaacttctaacaatgccgcactgtagtgtggctggttctaccactatgactttaaaacatgtttatatcatttttaatttttatgatacggtagtgtcagggagaaatgtaatgttctatatgaaattcctttttcaagtttgttcattaataacagttattaatttaaatcagcgttagagtttgtgctgctgcaactgctgtgaaaatttctctgagtaattctgatttgtgaatgatcccagaccaaccctgagattttgtcaacctgattaagtcaatatgaatgattaaaaagatgtgagaacactga

SEQ ID NO: 167660 - DNA, 550 bp, Homo sapiens
  Payload ID: 12983
  Gene Symbol: GALNT12
  Gene Name: polypeptide N-acetylgalactosaminyltransferase 12
  ENST ID: ENST00000610463
  CDS Start-End: 1-95
agattaacatctacctcagcgaccgcatctcactgcaccgccgcctgcccgagcgctggaacccgctagcacctgaaggagcgcttggccaatgagctttcgggactgcccaaggtgcgcctgatccgcgccaacaagagagagggcctggtgcgagcccggctgctgggggcgtctgcggcgaggggcgatgttctgaccttcctggactgtcactgtgagtgccacgaagggtggctggagccgctgctgcagaggatccatgaagaggagtcggcagtggtgtgcccggtgattgatgtgatcgactggaacaccttcgaatacctggggaactccggggagccccagatcggcggtttcgactggaggctggtgttcacgtggcacacagttcctgagagggagaggatacggatgcaatcccccgtcgatgtcatcaggtctccaacaatggctggtgggctgtttgctgtgagtaagaaatattttgaatatctggggtcttatgatacaggaatggaagtttggggaggagaaaacctcgaat

SEQ ID NO: 167661 - DNA, 5536 bp, Homo sapiens
  Payload ID: 12984
  Gene Symbol: GALNT13
  Gene Name: polypeptide N-acetylgalactosaminyltransferase 13
  Uniprot ID: Q8IUC8
  ENST ID: ENST00000392825
  CDS Start-End: 568-2238
gggagaagtgaccaggcggcggcggctctgctgaggtgacaacgtgctagcagccctcgctcgctctgggcgcctcctcggcctcagcgtccgctctggccgcgctcgaggagcccttcagcccgccgctgcgctatgaaggcccctctctggggctggccgaggctggagccggctccctctgctcgcgggcaagtgtgaagagagaggcgcgggcgggagccggggctgcgcgcggcgctcgcgggccggcgcgggttccaggtgagcgcggactcggcgagccccgcactcggcgcggccggccggcgcctgctgggcttgatctgaggctgaatcccgtgtgtggaccgccgttccctcttcgcgggatcgttggccaggatagcagatgcatttttgtagaagcattttgaggatgaatgtttgcaaatcattttgaaattgccaagtgccacatacatggaatgtatcctgctttcatcttggagttcacctgtgtggcttggatttatcacagtagcatttgtcttcaatctgtgtgttaactagaaatcaaggaaagacatgaggagatttgtctactgcaaggtggttctagccacttcgctgatgtgggttcttgttgatgtcttcttactgctgtacttcagtgaatgtaacaaatgtgatgacaagaaggagagatctctgctgcctgcattgagggctgttatttcaagaaaccaagaagggccaggagaaatgggaaaagctgtgttgattcctaaagatgaccaggagaaaatgaaagagctgtttaaaatcaatcagtttaaccttatggccagtgatttgattgcccttaatagaagtctgccagatgtaagattagaaggatgtaagacaaaagtctaccctgatgaacttccaaacacaagtgtagtcattgtgtttcataatgaagcttggagcactctccttagaactgtttacagtgtgataaatcgttccccacactatctactctcagaggtcatcttggtagatgatgccagtgaaagagattttctcaagttgacattagagaattacgtgaaaaatttagaagtgccagtaaaaattattaggatggaagaacgctctgggttaatacgtgcccgtcttcgaggagcagctgcttcaaaagggcaggtcataacttttcttgatgcacactgtgaatgcacgttaggatggctggagcctttgctggcaagaataaaggaagacaggaaaacggttgtctgccctatcattgatgtgattagtgatgatacttttgaatatatggctgggtcagacatgacttatgggggttttaactggaaactgaatttccgctggtatcctgttccccaaagagaaatggacaggaggaaaggagacagaacattacctgtcaggacccctactatggctggtggcctattttctattgacagaaactactttgaagagataggaacttacgatgcaggaatggatatctggggtggagagaatcttgaaatgtcttttaggatttggcaatgtggaggctccttggagattgttacttgctcccatgttggtcatgtttttcggaaggcaactccatacacttttcctggtggcactggtcatgtcatcaacaagaacaacaggagactggcagaagtttggatggatgaatttaaagatttcttctacatcatatccccaggtgttgtcaaagtggattatggagatgtgtcagtcagaaaaacactaagagaaaatctgaagtgtaagcccttttcttggtacctagaaaacatctatccggactcccagatcccaagacgttattactcacttggtgagataagaaatgttgaaaccaatcagtgtttagacaacatgggccgcaaggaaaatgaaaaagtgggtatattcaactgtcatggtatgggaggaaatcaggtattttcttacactgctgacaaagaaatccgaaccgatgacttgtgcttggatgtttctagactcaatggacctgtaatcatgttaaaatgccaccatatgagaggaaatcagttatgggaatatgatgctgagagactcacgttgcgacatgttaacagtaaccaatgtctcgatgaaccttctgaagaagacaaaatggtgcctacaatgcaggactgtagtggaagcagatcccaacagtggctgctaaggaacatgaccttgggcacatgaagatcatgtcctccaagccatgaaagtgtctacgcttttgtttttccattatttcaattgggggaaaatattaactttgctgaattgaaagttttaaaaatccttttagtattctaaaacacaattgtttctaattcgtttctagaaatgtttgcttatttccctactaaaatttgtatctgatcaaagcacataagaatataaataatagcaaactactattaaacaacagaacaacttgtaaaacaaattgtgtttgctttaagaaaaatgtttattgcactcatgtcatagggttaattggaggttattttatttttggttgtcatggtgattgaaagagataatgtaaatgccttataaaatcttcattatgaaatattatcagttgctttataaactcactctttttatggatccttcatggaaacatgtttgatttctgtgtctacaacagggccacatattaaattacttctgaatggtgaattcatcttacaaaatgttccaagttttggacaaggaaaaacattacattggatattgaattcatggagcctttacagaagcatcacatttaaaccaatgtgaattcaaaaaagagaaggaaactttttaaattcaatttagagtacataaaaaaagaaatccgcgaagcattgaggggaacaagatgagtctaatccgcagcacttcgatcactgtgagagaactcaaagtgggttgcaatcattcctaacacaggctgaaactaaacaatcttgctcctagagtttatgttggatactcaattcttaaccaaaatcttggtctccacaaactctaccatcccttttctcttcactctatagacagtggcatgccattgatgctgtacagaattgcaggtgaaagggagaattttagacttaatttttaactctattgcacttaaagattttagttaggttaccactgtcattttcattttctatgttaaagaatacctttcagtgctgtgctccagtatctaaaaattttatcaccaggggaataaactcaatacacattcattaaacttttgttgtaattaaactgctatatattgtttgccatatattatggcccaaggaatatagttataatcaggctacattcacattttcttttctcatcttaaaaccctttatgttcaaaatacattagcagaggccatgaaagtgaaaaaaaatcagatttttgctagtaagtttttatatttgacatcattttaaatgctcaaagagttgccctatatatgcatgttatccattataaatgcactcagcagctaagagaaatttgagaggaaaagtggaagaagtgttttctggagcagaagattccacttctttggtcctcatctttacttaaaaagctcttatagaaaggattaatcattttgactgcatacaaactatgtctctgacatgcacatacactgctttataatgaaaatgaggacactttctgatggtcagtaaaatcttaaatgatttttgccactggtattccttcctcttttgactttttattggtacaactgtagggaagaatctacaacctggagcatttcaggtttgctctttaaatatagacacccctcaccatgagctctctgtgaatccgtgaatttcctaaaattgtaagcaaaatgttgaatatcagggcatttttttttctgaggtgggagtatgtcactcacagcaaacttggaaagaaggctatgactcccaagaggcagtgaaccattgccttaaattaatagcagcctctcaagtccattgaggcctcatgtaaaattcccatttttcatctttacactccttttctcccctcatttcctcttctccttactaaggtaaaaagaccctgcacagcattattacttaagttgaaaaagcttcaactctcaaggactcatgtataccatatgttccacttattgctttgttagtcaaaatgcatgttatgtagaaaatggtcaatggcaaatttttataaatacagctaccccatcaaagctgaacttgaaacgttttagcagaattttaaatatgtgaaagttcattgtggtcatggtgagaaaactaaaactacatgagtttcatgttagaaaagaatttttaaacaatcttcagatggcttgaacacgtgccattatagtatctaacaaaaagtggcataaaatattacaaaacatccaacactagaaagcaatgactaacatttaatttgtttacaaaaatgtttattgtcttcagtacaaaaagttaaaaccatgattggattcataatgcacttgtcttatcccttatttatggagctagactgacatatttcaaaccaatctcttctgtggtcttctccatctcagttaatgcaacttcaaccttccagatgctcaggtcaaaaactgaaagttgcttttgactcctctatttctgtttcaactctcgtctaatccaacagcaaatccccttgatgctacctttgaaatataactagaaaagaatgacttgccaccatatccactaggtgtcactacctctaacctttttaatcgcaatatgcttattatttagttccctaatttcccagtccttgtcttgaacaatcttttctcagtacaacagccatagtgattctgttaaccatgaatttgattgtgtcacttccctgctcacaatcttccaatgacttctccctccggtggccttcaaggtcctttatgagtgttacccctctacacgtccacaccactcaccacacatacatacacatgcacacacacacacatgcaattctacctttttctaacaccatctcttatctctcattattctgcctcttacttaccctattatggctcccaagaaagttcctgctttagtgttttgttccctctgccccagagagctccccttagtgatctcagttcaaatattatcttatcagtaagacaaacccttctcccatctgccttccctatcccctgtacctgacaatctatgagtttgcttctttatttctgtctatacttccccctccccagccccaaacatgcccatcacatgccctagaaggtaagtcccatgaaggcaggggctttgtcagttttgttcatttggtatttctggcatatatattctctaaatatttcttgaattaatgaactgaaaaatgtgtgttaaagttgctaagtgtaactgtatcatactttttttgtattttaaattttaaaataaaggctaatatatttagacaggatttccaaaaa

SEQ ID NO: 167662 - DNA, 2591 bp, Homo sapiens
  Payload ID: 12984
  Gene Symbol: GALNT13
  Gene Name: polypeptide N-acetylgalactosaminyltransferase 13
  Uniprot ID: Q8IUC8
  ENST ID: ENST00000409237
  CDS Start-End: 1-1686
atgaggagatttgtctactgcaaggtggttctagccacttcgctgatgtgggttcttgttgatgtcttcttactgctgtacttcagtgaatgtaacaaatgtgatgacaagaaggagagatctctgctgcctgcattgagggctgttatttcaagaaaccaagaagggccaggagaaatgggaaaagctgtgttgattcctaaagatgaccaggagaaaatgaaagagctgtttaaaatcaatcagtttaaccttatggccagtgatttgattgcccttaatagaagtctgccagatgtaagattagaaggatgtaagacaaaagtctaccctgatgaacttccaaacacaagtgtagtcattgtgtttcataatgaagcttggagcactctccttagaactgtttacagtgtgataaatcgttccccacactatctactctcagaggtcatcttggtagatgatgccagtgaaagagattttctcaagttgacattagagaattacgtgaaaaatttagaagtgccagtaaaaattattaggatggaagaacgctctgggttaatacgtgcccgtcttcgaggagcagctgcttcaaaagggcaggtcataacttttcttgatgcacactgtgaatgcacgttaggatggctggagcctttgctggcaagaataaaggaagacaggaaaacggttgtctgccctatcattgatgtgattagtgatgatacttttgaatatatggctgggtcagacatgacttatgggggttttaactggaaactgaatttccgctggtatcctgttccccaaagagaaatggacaggaggaaaggagacagaacattacctgtcaggacccctactatggctggtggcctattttctattgacagaaactactttgaagagataggaacttacgatgcaggaatggatatctggggtggagagaatcttgaaatgtcttttaggatttggcaatgtggaggctccttggagattgttacttgctcccatgttggtcatgtttttcggaaggcaactccatacacttttcctggtggcactggtcatgtcatcaacaagaacaacaggagactggcagaagtttggatggatgaatttaaagatttcttctacatcatatccccaggtgttgtcaaagtggattatggagatgtgtcagtcagaaaaacactaagagaaaatctgaagtgtaagcccttttcttggtacctagaaaacatctatccggactcccagatcccaagacgttattactcacttggtgagataagaaatgttgaaaccaatcagtgtttagacaacatgggccgcaaggaaaatgaaaaagtgggtatattcaactgtcatggtatgggaggaaatcaggtattttcttacactgctgacaaagaaatccgaaccgatgacttgtgcttggatgtttctagactcaatggacctgtaatcatgttaaaatgccaccatatgagaggaaatcagttatgggaatatgatgctgagtcttgtctctcagtgaacaaagtagctgatggctcccagcatcctactgtggaaacctgtaatgatagcactttgcaaaaatggctactaagaaactatacaagaatggaaatttttagaaatatttttgggaattctactgattacattctctaatgatttttggagagactcacgttgcgacatgttaacagtaaccaatgtctcgatgaaccttctgaagaagacaaaatggtgcctacaatgcaggactgtagtggaagcagatcccaacagtggctgctaaggaacatgaccttgggcacatgaagatcatgtcctccaagccatgaaagtgtctacgcttttgtttttccattatttcaattgggggaaaatattaactttgctgaattgaaagttttaaaaatccttttagtattctaaaacacaattgtttctaattcgtttctagaaatgtttgcttatttccctactaaaatttgtatctgatcaaagcacataagaatataaataatagcaaactactattaaacaacagaacaacttgtaaaacaaattgtgtttgctttaagaaaaatgtttattgcactcatgtcatagggttaattggaggttattttatttttggttgtcatggtgattgaaagagataatgtaaatgccttataaaatcttcattatgaaatattatcagttgctttataaactcactctttttatggatccttcatggaaacatgtttgatttctgtgtctacaacagggccacatattaaattacttctgaatggtgaattcatcttacaaaatgttccaagttttggacaaggaaaaacattacattggatattgaattcatggagcctttacagaagcatcacatttaaaccaatgtgaattcaaaaaagagaaggaaactttttaaattcaatttagagtacataaaaaaagaaatccgcgaagcattgaggggaacaagatgagtctaatccgcagcacttcgatcactgtgagagaactcaaagtgggttgcaatcattcctaacacaggctgaaac

SEQ ID NO: 167663 - DNA, 1642 bp, Homo sapiens
  Payload ID: 12984
  Gene Symbol: GALNT13
  Gene Name: polypeptide N-acetylgalactosaminyltransferase 13
  ENST ID: ENST00000431076
  CDS Start-End: 1-169
tatttcaagaaaccaagaagggccaggagaaatgggaaaagctgtgttgattcctaaagatgaccaggagaaaatgaaagagctgtttaaaatcaatcagtttaaccttatggccagtgatttgattgcccttaatagaagtctgccagatgtaagattagaaggctaatagaccatgagaacagcattagtgtacatccagatgacagaagagattgtaaaagaagtggagaagactttctgactttccctgctttcgtgacagtaaatattgtcttcttgcttttatatgacataaagatgtaagacaaaagtctaccctgatgaacttccaaacacaagtgtagtcattgtgtttcataatgaagcttggagcactctccttagaactgtttacagtgtgataaatcgttccccacactatctactctcagaggtcatcttggtagatgatgccagtgaaagagattttctcaagttgacattagagaattacgtgaaaaatttagaagtgccagtaaaaattattaggatggaagaacgctctgggttaatacgtgcccgtcttcgaggagcagctgcttcaaaagggcaggtcataacttttcttgatgcacactgtgaatgcacgttaggatggctggagcctttgctggcaagaataaaggaagacaggaaaacggttgtctgccctatcattgatgtgattagtgatgatacttttgaatatatggctgggtcagacatgacttatgggggttttaactggaaactgaatttccgctggtatcctgttccccaaagagaaatggacaggaggaaaggagacagaacattacctgtcaggacccctactatggctggtggcctattttctattgacagaaactactttgaagagataggaacttacgatgcaggaatggatatctggggtggagagaatcttgaaatgtcttttaggatttggcaatgtggaggctccttggagattgttacttgctcccatgttggtcatgtttttcggaaggcaactccatacacttttcctggtggcactggtcatgtcatcaacaagaacaacaggagactggcagaagtttggatggatgaatttaaagatttcttctacatcatatccccaggtgttgtcaaagtggattatggagatgtgtcagtcagaaaaacactaagagaaaatctgaagtgtaagcccttttcttggtacctagaaaacatctatccggactcccagatcccaagacgttattactcacttggtgagataagaaatgttgaaaccaatcagtgtttagacaacatgggccgcaaggaaaatgaaaaagtgggtatattcaactgtcatggtatgggaggaaatcaggtaaactctccctttttatcagcttcatgttttagagggaaaatattgttaaaactatcagtggagaccatggctcacatgttaataactataaactgagcttaataaataaatgtacactcaaatctagaactaatttggctattttattgtcccaaggatcttaaaggagagctgaaaaattaaaataaaaagagcaacactttcagtgtgcctacagttaatgaagatatccaaatattttagacacatctcatt

SEQ ID NO: 167664 - DNA, 528 bp, Homo sapiens
  Payload ID: 12984
  Gene Symbol: GALNT13
  Gene Name: polypeptide N-acetylgalactosaminyltransferase 13
  ENST ID: ENST00000422126
  CDS Start-End: 1-138
ttagacaacatgggccgcaaggaaaatgaaaaagtgggtatattcaactgtcatggtatgggaggaaatcagactcaatggacctgtaatcatgttaaaatgccaccatatgagaggaaatcagttatgggaatatgatgctgagagactcacgttgcgacatgttaacagtaaccaatgtctcgatgaaccttctgaagaagacaaaatggtgcctacaatgcaggactgtagtggaagcagatcccaacagtggctgctaaggaacatgaccttgggcacatgaagatcatgtcctccaagccatgaaagtgtctacgcttttgtttttccattatttcaattgggggaaaatattaactttgctgaattgaaagttttaaaaatccttttagtattctaaaacacaattgtttctaattcgtttctagaaatgtttgcttatttccctactaaaatttgtatctgatcaaagcacataagaatataaataatagcaaactactattaaacaacagaacaacttgt

SEQ ID NO: 167665 - DNA, 668 bp, Homo sapiens
  Payload ID: 12984
  Gene Symbol: GALNT13
  Gene Name: polypeptide N-acetylgalactosaminyltransferase 13
  ENST ID: ENST00000453715
  CDS Start-End: 1-321
gtattttcttacactgctgacaaagaaatccgaaccgatgacttgtgcttggatgtttctagactcaatggacctgtaatcatgttaaaatgccaccatatgagaggaaatcagttatgggaatatgatgctgagacccacactcttcttcatataatcacccagtcttgtctctcagtgaacaaagtagctgatggctcccagcatcctactgtggaaacctgtaatgatagcactttgcaaaaatggctactaagaaactatacaagaatggaaatttttagaaatatttttgggaattctactgattacattctctaatgatttttggagagactcacgttgcgacatgttaacagtaaccaatgtctcgatgaaccttctgaagaagacaaaatggtgcctacaatgcaggactgtagtggaagcagatcccaacagtggctgctaaggaacatgaccttgggcacatgaagatcatgtcctccaagccatgaaagtgtctacgcttttgtttttccattatttcaattgggggaaaatattaactttgctgaattgaaagttttaaaaatccttttagtattctaaaacacaattgtttctaattcgtttctagaaatgtttgcttatttccctactaaaatttgtatctgatcaaagcacat

SEQ ID NO: 167666 - DNA, 606 bp, Homo sapiens
  Payload ID: 12984
  Gene Symbol: GALNT13
  Gene Name: polypeptide N-acetylgalactosaminyltransferase 13
  ENST ID: ENST00000450838
  CDS Start-End: 1-427
catatccccaggtgttgtcaaagtggattatggagatgtgtcagtcagaaaaacactaagagaaaatctgaagtgtaagcccttttcttggtacctagaaaacatctatccggactcccagatcccaagacgttattactcacttggtgaggtattttcttacactgctgacaaagaaatccgaaccgatgacttgtgcttggatgtttctagactcaatggacctgtaatcatgttaaaatgccaccatatgagaggaaatcagttatgggaatatgatgctgagagactcacgttgcgacatgttaacagtaaccaatgtctcgatgaaccttctgaagaagacaaaatggtgcctacaatgcaggactgtagtggaagcagatcccaacagtggctgctaaggaacatgaccttgggcacatgaagatcatgtcctccaagccatgaaagtgtctacgcttttgtttttccattatttcaattgggggaaaatattaactttgctgaattgaaagttttaaaaatccttttagtattctaaaacacaattgtttctaattcgtttctagaaatgtttgcttatttccctactaaaatttgtat

SEQ ID NO: 167667 - DNA, 510 bp, Homo sapiens
  Payload ID: 12984
  Gene Symbol: GALNT13
  Gene Name: polypeptide N-acetylgalactosaminyltransferase 13
  ENST ID: ENST00000434213
  CDS Start-End: 453-510
aacgtgctagcagccctcgctcgctctgggcgcctcctcggcctcagcgtccgctctggccgcgctcgaggagcccttcagcccgccgctgcgctatgaaggcccctctctggggctggccgaggctggagccggctccctctgctcgcgggcaagtgtgaagagagaggcgcgggcgggagccggggctgcgcgcggcgctcgcgggccggcgcgggttccagatgcatttttgtagaagcattttgaggatgaatgtttgcaaatcattttgaaattgccaagtgccacatacaatttaattggatttgagggaaatacaggctgcaatggtgggaatagttaaaatggaatgtatcctgctttcatcttggagttcacctgtgtggcttggatttatcacagtagcatttgtcttcaatctgtgtgttaactagaaatcaaggaaagacatgaggagatttgtctactgcaaggtggttctagccacttcgctgatgtgggttcttg

SEQ ID NO: 167668 - DNA, 2733 bp, Homo sapiens
  Payload ID: 12985
  Gene Symbol: GALNT14
  Gene Name: polypeptide N-acetylgalactosaminyltransferase 14
  Uniprot ID: Q96FL9
  ENST ID: ENST00000349752
  CDS Start-End: 641-2299
ggcatcccgagtgcaccgctcccgccccgccccgccttgccccaacccacgatggtctgggagctgcgcccagggcttggcgctggcggccccgcaacagcaccgagcgtttcggtcggcgggcggcggtagcgccccctctcagagccccgctcactcccacctgggctcgctccgagtcggcctgtctgtcgggcccgccctccccgctcactccctccgccctcgtgctcctcccggggtgcttggcacagcctcggattcctccctctcgctgctcgagtcagtttccctatcggcggcagcgggcaaggcggcggcggcggcggcggcagccgcggtggcggcgtggggaacatctcggcagccaccgcgcttctcccgctggagcgggcgtccagcttggctgccctcggtccttccctgccacgtttcgggtcgccctgcaccccccacccaggctcgcttctcttcgaagcgggaagggcgccttgcaggatcctgccgcccctccaaccggatcctgggtctagagctccccagagcgaggcgctcgccaggactcctgccccgccaaccctgaccgccggggggtgcccccgggacgtagcgccgcggagaggaagcggcaaaggggaccatgcggcgcctgactcgtcggctggttctgccagtcttcggggtgctctggatcacggtgctgctgttcttctgggtaaccaagaggaagttggaggtgccgacgggacctgaagtgcagacccctaagccttcggacgctgactgggacgacctgtgggaccagtttgatgagcggcggtatctgaatgccaaaaagtggcgcgttggtgacgacccctataagctgtatgctttcaaccagcgggagagtgagcggatctccagcaatcgggccatcccggacactcgccatctgagatgcacactgctggtgtattgcacggaccttccacccactagcatcatcatcaccttccacaacgaggcccgctccacgctgctcaggaccatccgcagtgtattaaaccgcacccctacgcatctgatccgggaaatcatattagtggatgacttcagcaatgaccctgatgactgtaaacagctcatcaagttgcccaaggtgaaatgcttgcgcaataatgaacggcaaggtctggtccggtcccggattcggggcgctgacatcgcccagggcaccactctgactttcctcgacagccactgtgaggtgaacagggactggctccagcctctgttgcacagggtcaaagaggactacacgcgggtggtgtgccctgtgatcgatatcattaacctggacaccttcacctacatcgagtctgcctcggagctcagaggggggtttgactggagcctccacttccagtgggagcagctctccccagagcagaaggctcggcgcctggaccccacggagcccatcaggactcctatcatagctggagggctcttcgtgatcgacaaagcttggtttgattacctggggaaatatgatatggacatggacatctggggtggggagaactttgaaatctccttccgagtgtggatgtgcgggggcagcctagagatcgtcccctgcagccgagtggggcacgtcttccggaagaagcacccctacgttttccctgatggaaatgccaacacgtatataaagaacaccaagcggacagctgaagtgtggatggatgaatacaagcaatactattacgctgcccggccattcgccctggagaggcccttcgggaatgttgagagcagattggacctgaggaagaatctgcgctgccagagcttcaagtggtacctggagaatatctaccctgaactcagcatccccaaggagtcctccatccagaagggcaatatccgacagagacagaagtgcctggaatctcaaaggcagaacaaccaagaaaccccaaacctaaagttgagcccctgtgccaaggtcaaaggcgaagatgcaaagtcccaggtatgggccttcacatacacccagcagatcctccaggaggagctgtgcctgtcagtcatcaccttgttccctggcgccccagtggttcttgtcctttgcaagaatggagatgaccgacagcaatggaccaaaactggttcccacatcgagcacatagcatcccacctctgcctcgatacagatatgttcggtgatggcaccgagaacggcaaggaaatcgtcgtcaacccatgtgagtcctcactcatgagccagcactgggacatggtgagctcttgaggacccctgccagaagcagcaagggccatggggtggtgcttccctggaccagaacagactggaaactgggcagcaagcagcctgcaaccacctcagacatcctggactgggaggtggaggcagagccccccaggacaggagcaactgtctcagggaggacagaggaaaacatcacaagccaatggggctcaaagacaaatcccacatgttctcaaggccgttaagttccagtcctggccagtcattccctgattggtatctggagacagaaacctaatgggaagtgtttattgttccttttcctacaaaggaagcagtctctggaggccagaaagaaaagccttctttttcactaggccaggactacattgagagatgaagaatggaggttgtttccaaaagaaataaagagaaacttagaagttgtctctgga

SEQ ID NO: 167669 - DNA, 2169 bp, Homo sapiens
  Payload ID: 12985
  Gene Symbol: GALNT14
  Gene Name: polypeptide N-acetylgalactosaminyltransferase 14
  Uniprot ID: Q96FL9
  ENST ID: ENST00000324589
  CDS Start-End: 62-1735
ctgaccgccggggggtgcccccgggacgtagcgccgcggagaggaagcggcaaaggggaccatgcggcgcctgactcgtcggctggttctgccagtcttcggggtgctctggatcacggtgctgctgttcttctgggtaaccaagaggaagttggaggtgccgacgggacctgaagtgcagacccctaaggtttggtccttgtttttcaaggtggctgggatgagcccttgggcgcctcaggtgcctgtatcacccactcctccctaccaaagagggcatcttcctacaggaggacaccttgctgtatgtcatttcccatgtctcttgcaagaagctcagttccatttgcagactcaggtctttcttcaagtcagatgcacactgctggtgtattgcacggaccttccacccactagcatcatcatcaccttccacaacgaggcccgctccacgctgctcaggaccatccgcagtgtattaaaccgcacccctacgcatctgatccgggaaatcatattagtggatgacttcagcaatgaccctgatgactgtaaacagctcatcaagttgcccaaggtgaaatgcttgcgcaataatgaacggcaaggtctggtccggtcccggattcggggcgctgacatcgcccagggcaccactctgactttcctcgacagccactgtgaggtgaacagggactggctccagcctctgttgcacagggtcaaagaggactacacgcgggtggtgtgccctgtgatcgatatcattaacctggacaccttcacctacatcgagtctgcctcggagctcagaggggggtttgactggagcctccacttccagtgggagcagctctccccagagcagaaggctcggcgcctggaccccacggagcccatcaggactcctatcatagctggagggctcttcgtgatcgacaaagcttggtttgattacctggggaaatatgatatggacatggacatctggggtggggagaactttgaaatctccttccgagtgtggatgtgcgggggcagcctagagatcgtcccctgcagccgagtggggcacgtcttccggaagaagcacccctacgttttccctgatggaaatgccaacacgtatataaagaacaccaagcggacagctgaagtgtggatggatgaatacaagcaatactattacgctgcccggccattcgccctggagaggcccttcgggaatgttgagagcagattggacctgaggaagaatctgcgctgccagagcttcaagtggtacctggagaatatctaccctgaactcagcatccccaaggagtcctccatccagaagggcaatatccgacagagacagaagtgcctggaatctcaaaggcagaacaaccaagaaaccccaaacctaaagttgagcccctgtgccaaggtcaaaggcgaagatgcaaagtcccaggtatgggccttcacatacacccagcagatcctccaggaggagctgtgcctgtcagtcatcaccttgttccctggcgccccagtggttcttgtcctttgcaagaatggagatgaccgacagcaatggaccaaaactggttcccacatcgagcacatagcatcccacctctgcctcgatacagatatgttcggtgatggcaccgagaacggcaaggaaatcgtcgtcaacccatgtgagtcctcactcatgagccagcactgggacatggtgagctcttgaggacccctgccagaagcagcaagggccatggggtggtgcttccctggaccagaacagactggaaactgggcagcaagcagcctgcaaccacctcagacatcctggactgggaggtggaggcagagccccccaggacaggagcaactgtctcagggaggacagaggaaaacatcacaagccaatggggctcaaagacaaatcccacatgttctcaaggccgttaagttccagtcctggccagtcattccctgattggtatctggagacagaaacctaatgggaagtgtttattgttccttttcctacaaaggaagcagtctctggaggccagaaagaaaagccttctttttcactaggccaggactacattgagagatgaagaatggaggttgtttccaaaagaaataaagagaaacttagaagttgtctctgga

SEQ ID NO: 167670 - DNA, 2496 bp, Homo sapiens
  Payload ID: 12985
  Gene Symbol: GALNT14
  Gene Name: polypeptide N-acetylgalactosaminyltransferase 14
  Uniprot ID: Q96FL9
  ENST ID: ENST00000406653
  CDS Start-End: 465-2063
actgaaaaattagctggtgcctgtatttcaggcttattgtttcctaggatctcagggagatcaggccacgtggtctgtggattaattaaggcacccagataattggctattaatagatggccaattgatggctgccagctgggtgctgaattgactaatgtccttatggtgggcaggtggtctttatcagaagaggagctagctgaaagactttactaattaaagggtgaatcaggaaaagaagataagaggtagcttttttccccaccacttggtgtgatgttttacagtttacaaagcatttatatccacagttgcctcatttgatccttactgcgactttgtgaggtttggtccttgtttttcaaggtggctgggatgagcccttgggcgcctcaggtgcctgtatcacccactcctccctaccaaagagggcatcttcctacaggaggacaccttgctgtatgtcatttcccatgtctcttgcaagaagctcagttccatttgcagactcaggtctttcttcaagtcagccttcggacgctgactgggacgacctgtgggaccagtttgatgagcggcggtatctgaatgccaaaaagtggcgcgttggtgacgacccctataagctgtatgctttcaaccagcgggagagtgagcggatctccagcaatcgggccatcccggacactcgccatctgagatgcacactgctggtgtattgcacggaccttccacccactagcatcatcatcaccttccacaacgaggcccgctccacgctgctcaggaccatccgcagtgtattaaaccgcacccctacgcatctgatccgggaaatcatattagtggatgacttcagcaatgaccctgatgactgtaaacagctcatcaagttgcccaaggtgaaatgcttgcgcaataatgaacggcaaggtctggtccggtcccggattcggggcgctgacatcgcccagggcaccactctgactttcctcgacagccactgtgaggtgaacagggactggctccagcctctgttgcacagggtcaaagaggactacacgcgggtggtgtgccctgtgatcgatatcattaacctggacaccttcacctacatcgagtctgcctcggagctcagaggggggtttgactggagcctccacttccagtgggagcagctctccccagagcagaaggctcggcgcctggaccccacggagcccatcaggactcctatcatagctggagggctcttcgtgatcgacaaagcttggtttgattacctggggaaatatgatatggacatggacatctggggtggggagaactttgaaatctccttccgagtgtggatgtgcgggggcagcctagagatcgtcccctgcagccgagtggggcacgtcttccggaagaagcacccctacgttttccctgatggaaatgccaacacgtatataaagaacaccaagcggacagctgaagtgtggatggatgaatacaagcaatactattacgctgcccggccattcgccctggagaggcccttcgggaatgttgagagcagattggacctgaggaagaatctgcgctgccagagcttcaagtggtacctggagaatatctaccctgaactcagcatccccaaggagtcctccatccagaagggcaatatccgacagagacagaagtgcctggaatctcaaaggcagaacaaccaagaaaccccaaacctaaagttgagcccctgtgccaaggtcaaaggcgaagatgcaaagtcccaggtatgggccttcacatacacccagcagatcctccaggaggagctgtgcctgtcagtcatcaccttgttccctggcgccccagtggttcttgtcctttgcaagaatggagatgaccgacagcaatggaccaaaactggttcccacatcgagcacatagcatcccacctctgcctcgatacagatatgttcggtgatggcaccgagaacggcaaggaaatcgtcgtcaacccatgtgagtcctcactcatgagccagcactgggacatggtgagctcttgaggacccctgccagaagcagcaagggccatggggtggtgcttccctggaccagaacagactggaaactgggcagcaagcagcctgcaaccacctcagacatcctggactgggaggtggaggcagagccccccaggacaggagcaactgtctcagggaggacagaggaaaacatcacaagccaatggggctcaaagacaaatcccacatgttctcaaggccgttaagttccagtcctggccagtcattccctgattggtatctggagacagaaacctaatgggaagtgtttattgttccttttcctacaaaggaagcagtctctggaggccagaaagaaaagccttctttttcactaggccaggactacattgagagatgaagaatggaggttgtttccaaaagaaataaagagaaacttagaagttgtctctgg

SEQ ID NO: 167671 - DNA, 735 bp, Homo sapiens
  Payload ID: 12985
  Gene Symbol: GALNT14
  Gene Name: polypeptide N-acetylgalactosaminyltransferase 14
  ENST ID: ENST00000424136
  CDS Start-End: 1-116
cagtcttcggggtgctctggatcacggtgctgctgttcttctgggtaaccaagaggaagttggaggtgccgacgggacctgaagtgcagacccctaagggttcttcccaaagttagtgcagcctacacccaggattgaacaaagacagcttggaagttagaagcaagatggagtctgttagccttcggacgctgactgggacgacctgtgggaccagtttgatgagcggcggtatctgaatgccaaaaagtggcgcgttggtgacgacccctataagctgtatgctttcaaccagcgggagagtgagcggatctccagcaatcgggccatcccggacactcgccatctgagatgcacactgctggtgtattgcacggaccttccacccactagcatcatcatcaccttccacaacgaggcccgctccacgctgctcaggaccatccgcagtgtattaaaccgcacccctacgcatctgatccgggaaatcatattagtggatgacttcagcaatgaccctgatgactgtaaacagctcatcaagttgcccaaggtgaaatgcttgcgcaataatgaacggcaaggtctggtccggtcccggattcggggcgctgacatcgcccagggcaccactctgactttcctcgacagccactgtgaggtgaacagggactggctccagcctctgttgcacagggtcaaagaggactacacgcgggtggtgtgccctgtgat

SEQ ID NO: 167672 - DNA, 982 bp, Homo sapiens
  Payload ID: 12985
  Gene Symbol: GALNT14
  Gene Name: polypeptide N-acetylgalactosaminyltransferase 14
  ENST ID: ENST00000455477
  CDS Start-End: 1-212
cagtcttcggggtgctctggatcacggtgctgctgttcttctgggtaaccaagaggaagttggaggtgccgacgggacctgaagtgcagacccctaaggtttggtccttgtttttcaaggtggctgggatgagcccttgggcgcctcaggtgcctgtatcacccactcctccctaccaaagagggcatcttcctacagccttcggacgctgactgggacgacctgtgggaccagtttgatgagcggcggtatctgaatgccaaaaagtggcgcgttggtgacgacccctataagctgtatgctttcaaccagcgggagagtgagcggatctccagcaatcgggccatcccggacactcgccatctgagatgcacactgctggtgtattgcacggaccttccacccactagcatcatcatcaccttccacaacgaggcccgctccacgctgctcaggaccatccgcagtgtattaaaccgcacccctacgcatctgatccgggaaatcatattagtggatgacttcagcaatgaccctgatgactgtaaacagctcatcaagttgcccaaggtgaaatgcttgcgcaataatgaacggcaaggtctggtccggtcccggattcggggcgctgacatcgcccagggcaccactctgactttcctcgacagccactgtgaggtgaacagggactggctccagcctctgttgcacagggtcaaagagaaatctccttccgagtgtggatgtgcgggggcagcctagagatcgtcccctgcagccgagtggggcacgtcttccggaagaagcacccctacgttttccctgatggaaatgccaacacgtatataaagaacaccaagcggacagctgaagtgtggatggatgaatacaagcaatactattacgctgcccggccattcgccctggagaggcccttcgggaatgttgagagcagattggacctgaggaagaatctgcgctg

SEQ ID NO: 167673 - DNA, 1619 bp, Homo sapiens
  Payload ID: 12985
  Gene Symbol: GALNT14
  Gene Name: polypeptide N-acetylgalactosaminyltransferase 14
  ENST ID: ENST00000430167
  CDS Start-End: 418-1619
cctcgtgctcctcccggggtgcttggcacagcctcggattcctccctctcgctgctcgagtcagtttccctatcggcggcagcgggcaaggcggcggcggcggcggcggcagccgcggtggcggcgtggggaacatctcggcagccaccgcgcttctcccgctggagcgggcgtccagcttggctgccctcggtccttccctgccacgtttcgggtcgccctgcaccccccacccaggctcgcttctcttcgaagcgggaagggcgccttgcaggatcctgccgcccctccaaccggatcctgggtctagagctccccagagcgaggcgctcgccaggactcctgccccgccaaccctgaccgccggggggtgcccccgggacgtagcgccgcggagaggaagcggcaaaggggaccatgcggcgcctgactcgtcggctggttctgccagtcttcggggtgctctggatcacggtgctgctgttcttctgggtaaccaagaggaagttggaggtgccgacgggacctgaagtgcagacccctaagccttcggacgctgactgggacgacctgtgggaccagtttgatgagcggcggtatctgaatgccaaaaagtggcgcgttggtgacgacccctataagctgtatgctttcaaccagcgggagagtgagcggatctccagcaatcgggccatcccggacactcgccatctgagtgtattaaaccgcacccctacgcatctgatccgggaaatcatattagtggatgacttcagcaatgaccctgatgactgtaaacagctcatcaagttgcccaaggtgaaatgcttgcgcaataatgaacggcaaggtctggtccggtcccggattcggggcgctgacatcgcccagggcaccactctgactttcctcgacagccactgtgaggtgaacagggactggctccagcctctgttgcacagggtcaaagaggactacacgcgggtggtgtgccctgtgatcgatatcattaacctggacaccttcacctacatcgagtctgcctcggagctcagaggggggtttgactggagcctccacttccagtgggagcagctctccccagagcagaaggctcggcgcctggaccccacggagcccatcaggactcctatcatagctggagggctcttcgtgatcgacaaagcttggtttgattacctggggaaatatgatatggacatggacatctggggtggggagaactttgaaatctccttccgagtgtggatgtgcgggggcagcctagagatcgtcccctgcagccgagtggggcacgtcttccggaagaagcacccctacgttttccctgatggaaatgccaacacgtatataaagaacaccaagcggacagctgaagtgtggatggatgaatacaagcaatactattacgctgcccggccattcgccctggagaggcccttcgggaatgttgagagcagattggacctgaggaagaatctgcgctgccagagcttcaagtggtacctggagaatatctaccctgaactcagcatccccaaggagtcctccatccagaagggcaatatccgacagagacagaagtgcctggaatctca

SEQ ID NO: 167674 - DNA, 4669 bp, Homo sapiens
  Payload ID: 12986
  Gene Symbol: GALNT15
  Gene Name: polypeptide N-acetylgalactosaminyltransferase 15
  Uniprot ID: Q8N3T1
  ENST ID: ENST00000339732
  CDS Start-End: 504-2423
gaaaggaaaccaggcactgcctgccggctttacatctgttgatctgacctgactggaagcgtccaaagagggacggctgtcagccctgcttgactgagaacccaccagctcatcccagacacctcatagcaacctatttatacaaagggggaaagaaacacctgagcagaatggaatcattatttttttcccaaggagaaaaccggggtaaagggagggaagcaattcaatttgaagtccctgtgaatgggctttcagaaggcaattaaagaaatccactcagagaggacttggggtgaaacttgggtcctgtggttttctgattgtaagtggaagcaggtcttgcacacgctgttggcaaatgtcaggaccaggttaagtgactggcagaaaaacttccaggtggaacaagcaacccaggttctgctgcaagcttgaaggagcctggagcgggagaaagctaacttgaacatgacctgttgcatttggcaagttctagcaacatgctcctaaggaagcgatacaggcacagaccatgcagactccagttcctcctgctgctcctgatgctgggatgcgtcctgatgatggtggcgatgttgcaccctccccaccacaccctgcaccagactgtcacagcccaagccagcaagcacagccctgaagccaggtaccgcctggactttggggaatcccaggattgggtactggaagctgaggatgagggtgaagagtacagccctctggagggcctgccaccctttatctcactgcgggaggatcagctgctggtggccgtggccttaccccaggccagaaggaaccagagccagggcaggagaggtgggagctaccgcctcatcaagcagccaaggaggcaggataaggaagccccaaagagggactggggggctgatgaggacggggaggtgtctgaagaagaggagttgaccccgttcagcctggacccacgtggcctccaggaggcactcagtgcccgcatccccctccagagggctctgcccgaggtgcggcacccactgtgtctgcagcagcaccctcaggacagcctgcccacagccagcgtcatcctctgtttccatgatgaggcctggtccactctcctgcggactgtacacagcatcctcgacacagtgcccagggccttcctgaaggagatcatcctcgtggacgacctcagccagcaaggacaactcaagtctgctctcagcgaatatgtggccaggctggagggggtgaagttactcaggagcaacaagaggctgggtgccatcagggcccggatgctgggggccaccagagccaccggggatgtgctcgtcttcatggatgcccactgcgagtgccacccaggctggctggagcccctcctcagcagaatagctggtgacaggagccgagtggtatctccggtgatagatgtgattgactggaagactttccagtattacccctcaaaggacctgcagcgtggggtgttggactggaagctggatttccactgggaacctttgccagagcatgtgaggaaggccctccagtcccccataagccccatcaggagccctgtggtgcccggagaggtggtggccatggacagacattacttccaaaacactggagcgtatgactctcttatgtcgctgcgaggtggtgaaaacctcgaactgtctttcaaggcctggctctgtggtggctctgttgaaatccttccctgctctcgggtaggacacatctaccaaaatcaggattcccattcccccctcgaccaggaggccaccctgaggaacagggttcgcattgctgagacctggctggggtcattcaaagaaaccttctacaagcatagcccagaggccttctccttgagcaaggctgagaagccagactgcatggaacgcttgcagctgcaaaggagactgggttgtcggacattccactggtttctggctaatgtctaccctgagctgtacccatctgaacccaggcccagtttctctggaaagctccacaacactggacttgggctctgtgcagactgccaggcagaaggggacatcctgggctgtcccatggtgttggctccttgcagtgacagccggcagcaacagtacctgcagcacaccagcaggaaggagattcactttggcagcccacagcacctgtgctttgctgtcaggcaggagcaggtgattcttcagaactgcacggaggaaggcctggccatccaccagcagcactgggacttccaggagaatgggatgattgtccacattctttctgggaaatgcatggaagctgtggtgcaagaaaacaataaagatttgtacctgcgtccgtgtgatggaaaagcccgccagcagtggcgttttgaccagatcaatgctgtggatgaacgatgaatgtcaatgtcagaaggaaaagagaattttggccatcaaaatccagctccaagtgaacttaaagagcttatatatttcatgaagctgatccttttgtgtgtgtgctcctggtgttaggagagaaaaaagctctatgaaagaatataggaagtttctccttttcacaccttatttcattgactgctggctgctttaaaaaaaaaaaaaaaggatccattgtaccgttgtcttcatcactgggaaatgattattacatagtacagaagattctttgtttttctccactgagcacttaacaattgctttctctctggcctggacattctctggcagcacctccaggatacataaattcaatggatcaatttatttgtcttcaaatggccttaacttggattgtctgtttggccaaccatgaaaattaaagagtgaagcagatgtaatggcctgacattccaaaaactctgaattgggtttattagcacaaatgttgtgttcatttgttgagccatatctcagaagaaggaaagggagctacagaaaggaggtttaggattgcagagaagatgcaagagcactttggcccaattctccagctcaacccagcagctgaaaagcttcaagagatctaggaaaagacattttcatgttaatgagaatttccaccattgtagagaatttccttcctactgagaatctacctctattccccctgccctagctcttctctaacttggttaaccataaccataaccagattcccttgcaatcgatttctctttagtcgttggtgttagaagtaccagcacaatttgagcattcccattaacaaaggtgttcacagttgagaaactctcctgccgggcgcggtggctcatgcctgtaattccagcactttgggaggcagagttgggaggatcacctgatgtcaggggtttgagaccagcctggtcaacattgcaaaaccttgtctctactaaaaatacaaaaattagctgggcatggtggcgcatacctgtaatcccagctacttgggaggctgaggcaagagaatcgcttgaacccaggaggcagaggttgcagtgagctgagatcatgccattgcactccaacctgggtgacagagtgagactccatctcaaaaaaaaaaaaaaagagagaaactctcctgatgccctgttacagggtttgcactgactggagcagaaacagcaacctttctaaaaaagcaaacctttttcctgggaggaaaatgccagagcctgagccaaaattcttatgacaggtaacatttgggtgttaatgtccatgagagctgacagggccatctctgagcccatataactgtctggaacccccaaatgtgtccacaggttgaatgtccatgagtgtgggaagaacacggctcatctggagcacagctgaggctagtaagagctaaatgactttccttgctatgacttggcttacctgaattagctgtaagagttgccgaatgggatgggttctgctatttaataaacagcattcatattcatttttccccagatggagttacctacctttccacatggtcagcttagaaatcttcccctaaagatgctaatctcctttgggctgtctcagaacacagtatccttcaaataagaaaaactgagtgggaagtgcagtgtttccaaacaatacctatcataactacgtattcattgtctacctgctaagtcaagggttcactgcatttctccttcctcagaatacactctggacctgtgctgtctaatatggtagccactaacaaaatgtggccattttgatggaaatccattaaaatcaaagaaaatttaaaactcaattcctcaattgggctggccacatttcaaatgctcactacccacctgtggctagggtctacttctactgtattggcgagcatggatatagaacatttcatcacagttctgttggaccaatctagatagattcattatcccatctagagaagagactttagtcactgtcttcttgcttcagacccatctatatttaaaacaaatttccctaaatcctgagactgagacggagctacaaattctcagatggcgaccgtgtaaatggtattagcggctgaagaaaaaaaatttttcaagacctctgttttttaactgaactttatcattggcattgtgggtctttgaagttgctgggataaattaatataattaaataaaagactgaatttaattgca

SEQ ID NO: 167675 - DNA, 572 bp, Homo sapiens
  Payload ID: 12986
  Gene Symbol: GALNT15
  Gene Name: polypeptide N-acetylgalactosaminyltransferase 15
  ENST ID: ENST00000430410
  CDS Start-End: 1-426
gctctgcccgaggtgcggcacccactgtgtctgcagcagcaccctcaggacagcctgcccacagccagcgtcatcctctgtttccatgatgaggcctggtccactctcctgcggactgtacacagcatcctcgacacagtgcccagggccttcctgaaggagatcatcctcgtggacgacctcagccagcaaggtagccacggctttcctccaggctcgtctgggacaactcaagtctgctctcagcgaatatgtggccaggctggagggggtgaagttactcaggagcaacaagaggctgggtgccatcagggcccggatgctgggggccaccagagccaccggggatgtgctcgtcttcatggatgcccactgcgagtgccacccaggctggctggagcccctcctcagcagaatagctggtgacaggagccgagtggtatctccggtgatagatgtgattgactggaagactttccagtattacccctcaaaggacctgcagcgtggggtgttggactggaagctggatttccactgggaacctttgccagagcatgtgaggaaggccc

SEQ ID NO: 167676 - DNA, 2416 bp, Homo sapiens
  Payload ID: 12986
  Gene Symbol: GALNT15
  Gene Name: polypeptide N-acetylgalactosaminyltransferase 15
  ENST ID: ENST00000437509
  CDS Start-End: 444-2297
gtccaaagagggacggctgtcagccctgcttgactgagaacccaccagctcatcccagacacctcatagcaacctatttatacaaagggggaaagaaacacctgagcagaatggaatcattatttttttcccaaggagaaaaccggggtaaagggagggaagcaattcaatttgaagtccctgtgaatgggctttcagaaggcaattaaagaaatccactcagagaggacttggggtgaaacttgggtcctgtggttttctgattgtaagtggaagcaggtcttgcacacgctgttggcaaatgtcaggaccaggttaagtgactggcagaaaaacttccaggtggaacaagcaacccaggttctgctgcaagcttgaaggagcctggagcgggagaaagctaacttgaacatgacctgttgcatttggcaagttctagcaacatgctcctaaggaagcgatacaggcacagaccatgcagactccagttcctcctgctgctcctgatgctgggatgcgtcctgatgatggtggcgatgttgcaccctccccaccacaccctgcaccagactgtcacagcccaagccagcaagcacagccctgaagccaggtaccgcctggactttggggaatcccaggattgggtactggaagctgaggatgagggtgaagagtacagccctctggagggcctgccaccctttatctcactgcgggaggatcagctgctggtggccgtggccttaccccaggccagaaggaaccagagccagggcaggagaggtgggagctaccgcctcatcaagcagccaaggaggcaggataaggaagccccaaagagggactggggggctgatgaggacggggaggtgtctgaagaagaggagttgaccccgttcagcctggacccacgtggcctccaggaggcactcagtgcccgcatccccctccagagggctctgcccgaggtgcggcacccactgtgtctgcagcagcaccctcaggacagcctgcccacagccagcgtcatcctctgtttccatgatgaggcctggtccactctcctgcggactgtacacagcatcctcgacacagtgcccagggccttcctgaaggagatcatcctcgtggacgacctcagccagcaaggacaactcaagtctgctctcagcgaatatgtggccaggctggagggggtgaagttactcaggagcaacaagaggctgggtgccatcagggcccggatgctgggggccaccagagccaccggggatgtgctcgtcttcatggatgcccactgcgagtgccacccaggctggctggagcccctcctcagcagaatagctggtgacaggagccgagtggtatctccggtgatagatgtgattgactggaagactttccagtattacccctcaaaggacctgcagcgtggggtgttggactggaagctggatttccactgggaacctttgccagagcatgtgaggaaggccctccagtcccccataagccccatcaggagccctgtggtgcccggagaggtggtggccatggacagacattacttccaaaacactggagcgtatgactctcttatgtcgctgcgaggtggtgaaaacctcgaactgtctttcaaggcctggctctgtggtggctctgttgaaatccttccctgctctcgggtaggacacatctaccaaaatcaggattcccattcccccctcgaccaggaggccaccctgaggaacagggttcgcattgctgagacctggctggggtcattcaaagaaaccttctacaagcatagcccagaggccttctccttgagcaaggctgagaagccagactgcatggaacgcttgcagctgcaaaggagactgggttgtcggacattccactggtttctggctaatgtctaccctgagctgtacccatctgaacccaggcccagtttctctggaaagctccacaacactggacttgggctctgtgcagactgccaggcagaaggggacatcctgggctgtcccatggtgttggctccttgcagtgacagccggcagcaacagtacctgcagcacaccagcaggaaggagattcactttggcagcccacagcacctgtgctttgctgtcaggcaggagcaggtgattcttcagaactgcacggaggaaggcctggccatccaccagcagcactgggacttccaggaggatgagaacagggccaactctgctgctgctgaagcttatcaaaggcctttaacttttcagcagattgtgaacaatgggtaggacatcatttgcttcattcagagatcctcaagaaggcactgccgatcactctcctctaggcacagatcaagggtggcattgtttaatgtcttatttaaataaaatccagaaaaactgga

SEQ ID NO: 167677 - DNA, 2775 bp, Homo sapiens
  Payload ID: 12986
  Gene Symbol: GALNT15
  Gene Name: polypeptide N-acetylgalactosaminyltransferase 15
  ENST ID: ENST00000617544
  CDS Start-End: 22-612
caggctgagaagccagactgcatggaacgcttgcagctgcaaaggagactgggttgtcggacattccactggtttctggctaatgtctaccctgagctgtacccatctgaacccaggcccagtttctctggaaagctccacaacactggacttgggctctgtgcagactgccaggcagaaggggacatcctgggctgtcccatggtgttggctccttgcagtgacagccggcagcaacagtacctgcagcacaccagcaggaaggagattcactttggcagcccacagcacctgtgctttgctgtcaggcaggagcaggtgattcttcagaactgcacggaggaaggcctggccatccaccagcagcactgggacttccaggagaatgggatgattgtccacattctttctgggaaatgcatggaagctgtggtgcaagaaaacaataaagatttgtacctgcgtccgtgtgatgaaaagcccgccagcagtggcgttttgaccagatcaatgctgtggatgaacgatgaatgtcaatgtcagaaggaaaagagaattttggccatcaaaatccagctccaagtgaacttaaagagcttatatatttcatgaagctgatccttttgtgtgtgtgctcctggtgttaggagagaaaaaagctctatgaaagaatataggaagtttctccttttcacaccttatttcattgactgctggctgctttaaaaaaaaaaaaaaaggatccattgtaccgttgtcttcatcactgggaaatgattattacatagtacagaagattctttgtttttctccactgagcacttaacaattgctttctctctggcctggacattctctggcagcacctccaggatacataaattcaatggatcaatttatttgtcttcaaatggccttaacttggattgtctgtttggccaaccatgaaaattaaagagtgaagcagatgtaatggcctgacattccaaaaactctgaattgggtttattagcacaaatgttgtgttcatttgttgagccatatctcagaagaaggaaagggagctacagaaaggaggtttaggattgcagagaagatgcaagagcactttggcccaattctccagctcaacccagcagctgaaaagcttcaagagatctaggaaaagacattttcatgttaatgagaatttccaccattgtagagaatttccttcctactgagaatctacctctattccccctgccctagctcttctctaacttggttaaccataaccataaccagattcccttgcaatcgatttctctttagtcgttggtgttagaagtaccagcacaatttgagcattcccattaacaaaggtgttcacagttgagaaactctcctgccgggcgcggtggctcatgcctgtaattccagcactttgggaggcagagttgggaggatcacctgatgtcaggggtttgagaccagcctggtcaacattgcaaaaccttgtctctactaaaaatacaaaaattagctgggcatggtggcgcatacctgtaatcccagctacttgggaggctgaggcaagagaatcgcttgaacccaggaggcagaggttgcagtgagctgagatcatgccattgcactccaacctgggtgacagagtgagactccatctcaaaaaaaaaaaaaaagagagaaactctcctgatgccctgttacagggtttgcactgactggagcagaaacagcaacctttctaaaaaagcaaacctttttcctgggaggaaaatgccagagcctgagccaaaattcttatgacaggtaacatttgggtgttaatgtccatgagagctgacagggccatctctgagcccatataactgtctggaacccccaaatgtgtccacaggttgaatgtccatgagtgtgggaagaacacggctcatctggagcacagctgaggctagtaagagctaaatgactttccttgctatgacttggcttacctgaattagctgtaagagttgccgaatgggatgggttctgctatttaataaacagcattcatattcatttttccccagatggagttacctacctttccacatggtcagcttagaaatcttcccctaaagatgctaatctcctttgggctgtctcagaacacagtatccttcaaataagaaaaactgagtgggaagtgcagtgtttccaaacaatacctatcataactacgtattcattgtctacctgctaagtcaagggttcactgcatttctccttcctcagaatacactctggacctgtgctgtctaatatggtagccactaacaaaatgtggccattttgatggaaatccattaaaatcaaagaaaatttaaaactcaattcctcaattgggctggccacatttcaaatgctcactacccacctgtggctagggtctacttctactgtattggcgagcatggatatagaacatttcatcacagttctgttggaccaatctagatagattcattatcccatctagagaagagactttagtcactgtcttcttgcttcagacccatctatatttaaaacaaatttccctaaatcctgagactgagacggagctacaaattctcagatggcgaccgtgtaaatggtattagcggctgaagaaaaaaaatttttcaagacctctgttttttaactgaactttatcattggcattgtgggtctttgaagttgctgggataaattaatataattaaataaaagactgaatttaattgc

SEQ ID NO: 167678 - DNA, 5708 bp, Homo sapiens
  Payload ID: 12987
  Gene Symbol: GALNT16
  Gene Name: polypeptide N-acetylgalactosaminyltransferase 16
  Uniprot ID: Q8N428
  ENST ID: ENST00000337827
  CDS Start-End: 328-2004
actcggcgcgcttctctcccagtgcgcagtggcctggtgggtcagccggcggcggctggagcgcggggccggccctgcgcacgaatgaatgggcgcccgggggacgcgcgcgctcggggctgaagggcattaggaccgtgaggatcgctccgcgatcctgtctctccctatcacccccccgcccccccacctctctcctttttctgctctgcaggactgagcagctaggcgcgagcgaaaacaaacagctggggctgcgagcgcccccgccccggccccgagagcacgccggcccagtcccccacctggggcgcccgtctgcccaccatgaggaagatccgcgccaatgccatcgccatcctgaccgtagcctggatcctgggcactttctactacttatggcaggacaaccgagcccacgcagcatcctccggcggccggggcgcgcagagggcaggcaggaggtcggagcagctccgcgaggaccgcaccatcccgctcattgtgacaggaactccctcgaaaggctttgatgagaaggcctacctgtcggccaagcagctgaaggctggagaggacccctacagacagcacgccttcaaccagctggagagtgacaagctgagcccagaccggcccatccgggacacccgccattacagctgcccatctgtgtcctactcctcggacctgccagccaccagcgtcatcatcaccttccacaatgaggcccgttccaccctgctgcgcacagtgaagagtgtcctgaaccgaactcctgccaacttgatccaggagatcattttagtggatgacttcagctcagatccggaagactgtctactcctgaccaggatccccaaggtcaagtgcctgcgcaatgatcggcgggaagggctgatccggtcccgagtgcgtggggcggacgtggctgcagctaccgttctcacctttctggatagccactgcgaagtgaacaccgagtggctgccgcccatgctgcagcgggtgaaggaggaccacacccgcgtggtgagtcccatcattgatgtcatcagtctggataattttgcctaccttgcagcatctgctgaccttcgtggagggttcgactggagcctgcatttcaagtgggagcagatccctcttgagcagaagatgacccggacagaccccaccaggcccataaggacgcctgtcatagctggaggaatcttcgtgatcgacaagtcctggtttaaccacttgggaaagtatgatgcccagatggacatctgggggggagagaattttgagctctccttcagggtgtggatgtgtggtggcagtctggagatcgtcccctgcagccgggtgggccatgtcttcaggaaacggcacccctacaacttccctgagggtaatgccctcacctacatcaggaatactaagcgcactgcagaagtgtggatggatgaatacaagcaatactactatgaggcccggccctcggccatcgggaaggccttcggcagtgtggctacgcggatagagcagaggaagaagatgaactgcaagtccttccgctggtacctggagaacgtctacccagagctcacggtccccgtgaaggaagcactccccggcatcattaagcagggggtgaactgcttagaatctcagggccagaacacagctggtgacttcctgcttggaatggggatctgcagagggtctgccaagaacccgcagcccgcccaggcatggctgttcagtgaccacctcatccagcagcaggggaagtgcctggctgccacctccaccttaatgtcctcccctggatccccagtcatactgcagatgtgcaaccctagagaaggcaagcagaaatggaggagaaaaggatctttcatccagcattcagtcagtggcctctgcctggagacaaagcctgcccagctggtgaccagcaagtgtcaggctgacgcccaggcccagcagtggcagctgttgccacacacatgacggagggattttcttgaagggtcagctattgcactgtgctgggaggctggctgtggctcctgtttgtgaagagaactcccagttccttttcacagccgctgagaacacatccacacatctaccccacggccttgtcttggaactgctcctgctatccccacaccctgcttcctcaccccactggctcttgggcaaatgactgttggtaccaggaccctgggggtctcccctacaaagcagaccagcctggggcagatatacctaccacaggagccccctgtctttcataggccaaggatccacatacccatagagttcatggattctagagggtctaggaatctcttgaaattgtccctaaaatactgcatgtgtgtgcatacatgcattttcctggggaaaaagtccatggcttctaaaagaggtccctgatccccaaagggcctgaacctctgctctggattgaagccactgtctgcccaagctgccaccccctaatcttcctccctggcgtgctcaaactgccatcgcctgctccctccacacggcccttggggtcagcagccaagtgtctgtggtccgcagcacctgctctggagggctctccagcagtttcgcctcctgactctcaccagcgtcctctcggcagcactcccgtgcccaagtgcacccctctggacttgccagcgcaggccccttcgctcccagggccatgctttgcctgtcctctgtcgtgatgtttcttccgcagccaggtgcagcctcagatcccctgttcatctgggaagcctcctgccacagcttaggacagaactgggcccagggcaaaggcctctccccagaggatggactagaaggcctgggccacactcgggcatggacctttggggctggggagccggggctgcgcctgttgaatgtaagaggactgctgaccagagggccttcaagagggtctctctgtcctttgctgtggtcagatcaggctctgcacttatcagccggtcctttgtggcaacgcagccctgttctgtttttgcttttcctcttcttgaccaaagcatgtgccactagctgtccttgaggacctcgtctttatgaaacacacacctggaataaaaccacttcttacatgtccacatgcaccagcgccttcctttctgcctccaggcctagcccttcagcacaccctcccccgcctcgtggggaaagtccgggcctcctttctgtaaaagtgaaactgaacatgctcaagtctagccctgtcctgcacctggtagcttgctcgtcggcctccatgccctgtggtgccccaggaactcctgactgctctggtgggggccaacaggtggccctactgcaagggcaggccttggaccaaaaccaggaatcagcacaggtcaggtggagcccaggctcctgtggcctcattatgggattctacttggggcttagaaatggaaagcaaattgcttctccaaataggtattgccctgccgccgtgcttgcctttagccagccctctctccttccctgtgagccaggcctgtcccctcggagctgccctcccctgctctaccacacaagaaggcagtggtacaaattcaggcaggacatacttcctgggtaaaaacagcaaaataattctgaaaagagtcttaccagaccagctttgcttgattgggtagcagatgctctgcctaatgttcccatggaaaccaatggaaaacccccaccatgtctgtgatcagaagctgaacctacccaggtaaaaataaacgctgcttcaacatacatatgaactgcagctggcaggccagcacaccactagcctctcctggacgcaaccatttctgccctcagccccactttgccgtggggctgctgatctggagttacccagaacttctgacccctgggcctgaggagcctggagcaaagccctagctggctgcagagaatacaccttggctacaatgtccagcttggtctgggcttaggagcaagtcactgtaaaagaccttggctgcagcctccattcccccatccacccctccgtcctctcagggagcacagcccaccacccaccgcctactcagggctccctcctggcgcgctgagccccatttccactctccatctattttcaccctcagccttggagggctctggtgcttgcttctcctgagtcaggctctctcctcttgcttgctctcctccaaacctacctctcccaaagcccattttctgtgccacccagttttttccctaggagataaggctgtcagcctttagccaggccctggaggaatcagcaaaagccccaggctgggtattaacagttacgtcactggcaggagagtcccccgaaagcctatgggcagggcagcagaagggacttctgcaccagggccagactcccatttgtacagcagggagctgttcctgaggatccctgggcctctgtgacttggcttcagtttttacaagggctgttccccctggcccctcaggaaggctgtctccatctgcagttgggagaaataacctggacaatatgactgtcgtcccagggttccagcaccccaaggcctgcgggggatgtctcccagcactgcatggggtgtggtccttctcccaccagggaacaggaaaggaaacctggaagggaaaggctggcatttataacgtctgtaatttcattgccaacaatgttctcagtgtgtttggtatttgtgtgtccctgtgatggtctgagtcagtgctcctccagaaggagggggcaacccagccagcttctctaatgggaagaggtcttcactgccaggcacttaggaaagacctggagatggatcaggggagggcctactctcctgggcttgcagctgggctgtctgagtagccgacctggactgaggctccagagccatctgaggacaatttctcctgcttaattcagccctgtgaagcgtggagaagagtgtactaggggtgcggactcttgggtctttaagacccattcaagccaggcgcagtggctcacacctgtaatcccaaatattcaggaggctgaattgggagggtcctttgaacccaggggagttcgagaccagcctgggcaacatagcgagaccctatctctataaataaaaattcaaatcaacttcaaaaaatacccattcagctggatccctcactactctgccatttgccagctgtgagctctttttttttttttttttttgagacagagtgttgctctgtcacccaggctggagagcagtggcatgatctccacttactgcaagctctgcctcctgggttcacgccattctcctgcctcagcctcccgagtagctgggactacaggcgcccaccaccatgcccagctaattttttttgtatttttagtagagacagggtttcaccgtgttacccaggatggtctccatctcctgacctcgtgatccacccgcctcggcctcccaaagtgctgggattacaggcgtgagccactgcgcctgactgagctcttgaataagttatttcatctctcagccttgatttctttacctgttaaatggggtactcatagccgtaaaggatttttttgtgaagcctgatcgcaaagcatctggccctttccaaatgcttaatcaatatgtcattactattattaataaacattttctgagtgcctgcta

SEQ ID NO: 167679 - DNA, 2270 bp, Homo sapiens
  Payload ID: 12987
  Gene Symbol: GALNT16
  Gene Name: polypeptide N-acetylgalactosaminyltransferase 16
  Uniprot ID: Q8N428
  ENST ID: ENST00000448469
  CDS Start-End: 91-1767
aaaacaaacagctggggctgcgagcgcccccgccccggccccgagagcacgccggcccagtcccccacctggggcgcccgtctgcccaccatgaggaagatccgcgccaatgccatcgccatcctgaccgtagcctggatcctgggcactttctactacttatggcaggacaaccgagcccacgcagcatcctccggcggccggggcgcgcagagggcaggcaggaggtcggagcagctccgcgaggaccgcaccatcccgctcattgtgacaggaactccctcgaaaggctttgatgagaaggcctacctgtcggccaagcagctgaaggctggagaggacccctacagacagcacgccttcaaccagctggagagtgacaagctgagcccagaccggcccatccgggacacccgccattacagctgcccatctgtgtcctactcctcggacctgccagccaccagcgtcatcatcaccttccacaatgaggcccgttccaccctgctgcgcacagtgaagagtgtcctgaaccgaactcctgccaacttgatccaggagatcattttagtggatgacttcagctcagatccggaagactgtctactcctgaccaggatccccaaggtcaagtgcctgcgcaatgatcggcgggaagggctgatccggtcccgagtgcgtggggcggacgtggctgcagctaccgttctcacctttctggatagccactgcgaagtgaacaccgagtggctgccgcccatgctgcagcgggtgaaggaggaccacacccgcgtggtgagtcccatcattgatgtcatcagtctggataattttgcctaccttgcagcatctgctgaccttcgtggagggttcgactggagcctgcatttcaagtgggagcagatccctcttgagcagaagatgacccggacagaccccaccaggcccataaggacgcctgtcatagctggaggaatcttcgtgatcgacaagtcctggtttaaccacttgggaaagtatgatgcccagatggacatctgggggggagagaattttgagctctccttcagggtgtggatgtgtggtggcagtctggagatcgtcccctgcagccgggtgggccatgtcttcaggaaacggcacccctacaacttccctgagggtaatgccctcacctacatcaggaatactaagcgcactgcagaagtgtggatggatgaatacaagcaatactactatgaggcccggccctcggccatcgggaaggccttcggcagtgtggctacgcggatagagcagaggaagaagatgaactgcaagtccttccgctggtacctggagaacgtctacccagagctcacggtccccgtgaaggaagcactccccggcatcattaagcagggggtgaactgcttagaatctcagggccagaacacagctggtgacttcctgcttggaatggggatctgcagagggtctgccaagaacccgcagcccgcccaggcatggctgttcagtgaccacctcatccagcagcaggggaagtgcctggctgccacctccaccttaatgtcctcccctggatccccagtcatactgcagatgtgcaaccctagagaaggcaagcagaaatggaggagaaaaggatctttcatccagcattcagtcagtggcctctgcctggagacaaagcctgcccagctggtgaccagcaagtgtcaggctgacgcccaggcccagcagtggcagctgttgccacacacatgacggtagccctggggcctcctgtaccttttgcatgagacttcgggaccggaagggggttagggtgggggagtgcaaagtgggctgttcccatctcctcacatttctgccaggaccatcagcaaatacccaccatgacacacgttctccaaagcttgttctaggagggcgcaggcgggcacgccccgatgccctcagtgctgtcctggccttgccccgggagaggagatggtcagggtgctggactgttgctgggtagagactgagtaggtgcccctggccctttgtcctctcccttggcgcttcttggggctgggacaatagtgtgtggtctctcccttgttgcccggagaaagcaaggacagaagcccacacaggggtcttttgggtcatgaggcccagctgtgcaggcaggcagggccaggggaaattgggcagcatggatggagaggctgaaggctgggaagagggaaggggagaggggcagcctgcaggggtagctgaag

SEQ ID NO: 167680 - DNA, 1629 bp, Homo sapiens
  Payload ID: 12987
  Gene Symbol: GALNT16
  Gene Name: polypeptide N-acetylgalactosaminyltransferase 16
  Uniprot ID: Q8N428
  ENST ID: ENST00000553669
  CDS Start-End: 1-1629
atgaggaagatccgcgccaatgccatcgccatcctgaccgtagcctggatcctgggcactttctactacttatggcaggacaaccgagcccacgcagcatcctccggcggccggggcgcgcagagggcaggcaggaggtcggagcagctccgcgaggaccgcaccatcccgctcattgtgacaggaactccctcgaaaggctttgatgagaaggcctacctgtcggccaagcagctgaaggctggagaggacccctacagacagcacgccttcaaccagctggagagtgacaagctgagcccagaccggcccatccgggacacccgccattacagctgcccatctgtgtcctactcctcggacctgccagccaccagcgtcatcatcaccttccacaatgaggcccgttccaccctgctgcgcacagtgaagagtgtcctgaaccgaactcctgccaacttgatccaggagatcattttagtggatgacttcagctcagatccggaagactgtctactcctgaccaggatccccaaggtcaagtgcctgcgcaatgatcggcgggaagggctgatccggtcccgagtgcgtggggcggacgtggctgcagctaccgttctcacctttctggatagccactgcgaagtgaacaccgagtggctgccgcccatgctgcagcgggtgaaggaggaccacacccgcgtggtgagtcccatcattgatgtcatcagtctggataattttgcctaccttgcagcatctgctgaccttcgtggagggttcgactggagcctgcatttcaagtgggagcagatccctcttgagcagaagatgacccggacagaccccaccaggcccataaggacgcctgtcatagctggaggaatcttcgtgatcgacaagtcctggtttaaccacttgggaaagtatgatgcccagatggacatctgggggggagagaattttgagctctccttcagggtgtggatgtgtggtggcagtctggagatcgtcccctgcagccgggtgggccatgtcttcaggaaacggcacccctacaacttccctgagggtaatgccctcacctacatcaggaatactaagcgcactgcagaagtgtggatggatgaatacaagcaatactactatgaggcccggccctcggccatcgggaaggccttcggcagtgtggctacgcggatagagcagaggaagaagatgaactgcaagtccttccgctggtacctggagaacgtctacccagagctcacggtccccgtgaaggaagcactccccggcatcattaagcagggggtgaactgcttagaatctcagggccagaacacagctggtgacttcctgcttggaatggggatctgcagagggtctgccaagaacccgcagcccgcccaggcatggctgttcagtgaccacctcatccagcagcaggggaagtgcctggctgccacctccaccttaatgtcctcccctggatccccagtcatactgcagatgtgcaaccctagagaaggcaagcaggtgagtctccttgcctctggcccagaggcccagcagcccgaggggccatgcctcagggtggcagaccttggcaggagagcccctgattga

SEQ ID NO: 167681 - DNA, 5548 bp, Homo sapiens
  Payload ID: 12987
  Gene Symbol: GALNT16
  Gene Name: polypeptide N-acetylgalactosaminyltransferase 16
  Uniprot ID: Q8N428
  ENST ID: ENST00000553471
  CDS Start-End: 118-1746
gcaggactgagcagctaggcgcgagcgaaaacaaacagctggggctgcgagcgcccccgccccggccccgagagcacgccggcccagtcccccacctggggcgcccgtctgcccaccatgaggaagatccgcgccaatgccatcgccatcctgaccgtagcctggatcctgggcactttctactacttatggcaggacaaccgagcccacgcagcatcctccggcggccggggcgcgcagagggcaggcaggaggtcggagcagctccgcgaggaccgcaccatcccgctcattgtgacaggaactccctcgaaaggctttgatgagaaggcctacctgtcggccaagcagctgaaggctggagaggacccctacagacagcacgccttcaaccagctggagagtgacaagctgagcccagaccggcccatccgggacacccgccattacagctgcccatctgtgtcctactcctcggacctgccagccaccagcgtcatcatcaccttccacaatgaggcccgttccaccctgctgcgcacagtgaagagtgtcctgaaccgaactcctgccaacttgatccaggagatcattttagtggatgacttcagctcagatccggaagactgtctactcctgaccaggatccccaaggtcaagtgcctgcgcaatgatcggcgggaagggctgatccggtcccgagtgcgtggggcggacgtggctgcagctaccgttctcacctttctggatagccactgcgaagtgaacaccgagtggctgccgcccatgctgcagcgggtgaaggaggaccacacccgcgtggtgagtcccatcattgatgtcatcagtctggataattttgcctaccttgcagcatctgctgaccttcgtggagggttcgactggagcctgcatttcaagtgggagcagatccctcttgagcagaagatgacccggacagaccccaccaggcccataaggacgcctgtcatagctggaggaatcttcgtgatcgacaagtcctggtttaaccacttgggaaagtatgatgcccagatggacatctgggggggagagaattttgagctctccttcagggtgtggatgtgtggtggcagtctggagatcgtcccctgcagccgggtgggccatgtcttcaggaaacggcacccctacaacttccctgagggtaatgccctcacctacatcaggaatactaagcgcactgcagaagtgtggatggatgaatacaagcaatactactatgaggcccggccctcggccatcgggaaggccttcggcagtgtggctacgcggatagagcagaggaagaagatgaactgcaagtccttccgctggtacctggagaacgtctacccagagctcacggtccccgtgaaggaagcactccccggcatcattaagcagggggtgaactgcttagaatctcagggccagaacacagctggtgacttcctgcttggaatggggatctgcagagggtctgccaagaacccgcagcccgcccaggcatggctgttcagtgaccacctcatccagcagcaggggaagtgcctggctgccacctccaccttaatgtcctcccctggatccccagtcatactgcagatgtgcaaccctagagaaggcaagcaggtgagtctccttgcctctggcccagaggcccagcagcccgaggggccatgcctcagggtggcagaccttggcaggagagcccctgattgactcaaataagcccttcagagcgaggatctgtggggagggggagcaaagtctacatctaggtcaagccaattattctgcccatgaggaaatacttctttgggtaattatttgtttaatgccatcctgccaggctgtgagctccatgaaggcagggaccacttgtcttgttaacactgtatccctagctcctgacaaccaccacagttcaaataagtgttagcttttactgacagtctgtgctagaagtttgaaatagatcatctcatctaatcctcccagccacccagtgacgtgggttctagtactacctccattttataagtgagtaagctgaggctcgctgaatctaaagaatatatgtcagatcacacagctgagaaggggtggagctgggattcaaacccaggtcagtgacttctaggcccacagtcttaacccagcacatagtagatgttcaataagtatttcttgactgttggcagactagggaaactgagctccagacacagtgatgtccaagctggcatgaccagcctcacgtgagcactgctttttccattgatccgacactctcacccacactgtcaccactaatcctgggagacaggtcagggtcaaggaagaaagtgatgcacagagaggtggagtcacttgctcagggtacacagcaaccagtgacagtggatttccagaatccagccagctctcttctgtgctactcccttcctgtcttggagggctccctcaccacccagggaatgggacccaaggcccagaggctgctccagcacttcccctgctcaccctcctcagaagccctccctgtgcctgccactggctagcctgcctcagtcggtgcaagcagtgaggagggtgcctgggtctctgatttggcctgcatggttttcctcctacccctttttctttgcttgggtcagcacgttttttaaaggatgaacagcagtttgctgtgccattctggaaagcagccacagcctctccctccggcctgtgtgtgtctgagggatctgtgtgcccagcccacttgctggacctgtgggacactttaagcgcttttggatggtggggggatgcagcccaccctcggccctgccctgcagtggggctggtgcagtgtctcctgcacctagagcacccacctctctgagggcaaatccttgagcccacgcccaccccctcccactgaggaattatctccgagcaaagcctccactcaattgcccctctggggctgaatcacacatttccccctttgtgctgacccagcctacggggtgtgtaggtatctccttggccccattcattctgcccctgcaagtcctgccaggctcccgatggcattctgggtgcctgtgcccctcttctcccaggaggacaggatgagccagctatcccactgccaatgccttctggaatccgggccgtccttcttggtcccctgctggtcctatttccaaggctagctgggtttcctgtatccgagaggctcctgtgcctcagacctggtgtgatggagtcagcaggccccagctcagtcttccctccccctcccttcactcagtctcctcacttataaaataaggggctccctcccctgcttacctcacaaggaatccgcaagaaccaagatgtggagatgggacagtgggtgatgtgacattgtttctcagacaagcccagaattgagtggcctggagagtcaagaagccctgagattgtgcctaatagcactgataagaagtgagaatcccgctgtttggggagcacttcctaatgattgggtgattcagtcattcgttcatcttaaaacaaaatgacggctgggtgcagtggctcatgcctgtaatcccagcactttgggaggctgagatgggtggatcatgaggtcaggagttcgagaccagcctgaccaaaatggtgaaaccccgtctctactaaaaacacaaaaattagccgggcgtggtggcgcgcgtctgtaatcccagctactcaggaggctgagacaggagaatcgcttgaacccgggaggcagaggtagcagtgagccgagatcgtgtcactgcactcctgcctgggtgacagagcgagactcagtctcaaacaaacaaaatgtcactgggtgcctaccttgtgccagagaatgtacagatcatgttggccacaaggatgaacggacatggtccttgacccccagggaatttgcactttagtggaagagaaagaagggagtaagacactatattacagaaggctagatgctgaggtagctccaagcaccacgactccctggggtgaggatggccatactctctccagctgggcattgctggaggtttggcctacatgaggtaaatgtcaaggactagaagagcatgaagaaacaggaggggggatccaaaggcccttgacctttaggctctctgcgggggccatgtgggcccagagaggctgggtctcagccctacccatcacgtccttgcattcccactgggagcccaggctccgcccctgccttccaccctgtgtgcacatccccccgcagccctagccctatccctgcagctgggtgggctcatctctctcccctcagctgctccctgtccaccaactgccctcagagccctctgggcttcctccacatggtcacaagcactcctgcctctaatcgaagacacggtgaatgagagaagatggaagaggggaggtggttgcaatgggaggcaaataggagagaaacccaaactagacctatcttactattattcttccctgagccttgaaacctgggtctctgcctctcatcccttctcataaatgttccaagcaacactccatcctccacccaggcacttccgtaatgttctacaggagcaactcttctcccccttgtcaaacccggggtcggggaggcaccaggaggtgaaggcactgaccaggagcccctgcatgactctgtgatgcgagacctccagtctcccaccaccctgctggccccacacttcatccctacaaagaaggcagcttcccactagggggtgtagattactggcctcacaggtcagaagcttaggaagaataaatcttgtttacagaaataaaagatttacctaggccaggactgacaagctcaagtgcctacagggagctggtgggaaaaccccaataggagaaaagtcgggaccaggcaggaactatggtgacctgcagaacaagagccccatctaaggcagagggcaaatcctcagccccagcaactgatgccatgtaagaaactgggtccaataactacatagaagctggaaatgcagatttgcacgtggcaaccaagctaaattgtaaataaacacaggggacttctgctttgcctcctcctctgatctggacaggaacttctgcaaactacagaaaagcaagagccctgctgggaagggcagggcttaaagctggtgttagaggcaggatgggggcagcctcttacataggaacacacagcctgatttaaatgaggggcatgactgggcatggtagctcatgcctgtaatcccagtgctttggaaggccaagacaggtggatcacttgaggtgagacgttctagctagaccagcctgggcaacatagcaagacccaggctctgcacttatcagccggtcctttgtggcaacgcagccctgttctgtttttgcttttcctcttcttgaccaaagcatgtgccactagctgtccttgaggacctcgtctttatgaaacacacacctggaataaaaccacttcttacatgtc

SEQ ID NO: 167682 - DNA, 2504 bp, Homo sapiens
  Payload ID: 12988
  Gene Symbol: GALNT18
  Gene Name: polypeptide N-acetylgalactosaminyltransferase 18
  Uniprot ID: Q6P9A2
  ENST ID: ENST00000227756
  CDS Start-End: 413-2236
gctgttctcctagcagcgcgggccggtcggaccgccaaggcagccggcgctggcgatgggaagcggcgtggccgccgacacaggcagtggcaaagtttcccagacgtacacatctggacgcgcggctgccggctacccgtgacccctctaggaagggttcagggatttttaatttggaaaaaaatccacctggtttcctttgtcaaggtctctccgggtggccagcggcaggagctgcaaacttgggcacggcggctacaccggcagcggaccgggctttggagaacctcgggactcaggtgctgaggtgcccagcggctccggacgtgctacggggtgcgagcgcgggggagttcggggcgcacgacaaggaagggcccccgggagctctatatggaggaaggagcccagaatggtgtgcaccaggaagaccaaaactttggtgtccacttgcgtgatcctgagcggcatgactaacatcatctgcctgctctacgtgggctgggtcaccaactacatcgccagcgtgtatgtgcgggggcaggagccggcgcccgacaagaagctggaggaagacaaaggggacactctgaagattattgagcggctggaccacctggagaatgtcatcaagcagcacattcaagaggctcctgccaagcctgaggaggcagaggccgagcccttcacagactcctctctgtttgcacactggggccaggagctcagccccgaaggccggcgcgtggccctgaagcaattccagtactacggctacaacgcctacctcagcgaccgcctgcccctggaccggcccctgcctgacctcagacccagtgggtgccgtaacctctcatttcctgacagcctgccagaggtgagcatcgtgttcatcttcgtcaatgaagcgctttcagtgctgctgcgctccatccactcggccatggaacgcacgcccccacatctgctcaaggagatcattctggtggatgacaacagcagtaacgaggaactgaaggagaagctgaccgaatatgtggacaaggtgaacagccagaagccaggcttcatcaaagtcgtgcgtcacagcaagcaggaaggcctcatccgctccagggtcagtggctggagggcggccactgcccctgtggtggcactctttgatgcccacgtggagttcaatgtgggctgggctgaacctgtactcacccgcatcaaggagaaccggaagcggatcatctcgccatcctttgataacatcaaatatgacaactttgagatagaagagtacccgctggctgcccagggctttgactgggagctgtggtgccgctacctaaatccccccaaggcctggtggaagctggagaactccacagcgccaatcaggagccctgccctcattggctgcttcattgtggaccggcagtacttccaggagatcggcctgctggacgaaggcatggaagtctacgggggcgagaatgtggagcttgggatcagggtgtggcagtgtggcgggagtgtggaggtcctgccctgctcacggattgcccacattgagcgagcccacaagccctacacagaggacctcaccgcccatgtccgcaggaacgctctcagggtggctgaagtctggatggatgaatttaaaagccacgtctacatggcatggaacataccgcaggaggactcaggaattgacattggggacatcactgcaaggaaggctctcaggaaacagctgcagtgcaagaccttccggtggtacctggtcagcgtgtacccagagatgaggatgtactccgacatcattgcctatggagtgctgcagaattctctgaagactgatttgtgtcttgaccaggggccagatacagagaatgtccccatcatgtacatctgccatgggatgacgcctcagaacgtgtactacacgagcagtcagcagatccatgtgggcattctgagccccaccgtggatgatgatgacaaccgatgcctggtggacgtcaacagccggccccggctcatcgaatgcagctacgccaaagccaagaggatgaagcttcactggcagttctctcagggaggacccatccagaaccgcaagtctaagcgctgtctggagctgcaggagaatagcgacctggagttcggcttccagctggtgttgcagaagtgctcgggccagcactggagcatcaccaacgtcctgaggagcctcgcgtcctgacccaccggggccacttccggctgcctctttgctactgtgtagcacctgctgcaacgttgcctgctgtccacgtggggttgtttggagtctggggaaccaggttagtgggcccccaagaagagctttttatttcctattcaattttcatggagtttatagaaagatgctgattggtaggtgatggtatgatatcaaactattttgcagttgtaaataggggacagatggaaaatatttataactgacaataaaatattattaagaaaag

SEQ ID NO: 167683 - DNA, 4454 bp, Homo sapiens
  Payload ID: 12989
  Gene Symbol: GALNT2
  Gene Name: polypeptide N-acetylgalactosaminyltransferase 2
  Uniprot ID: Q10471
  ENST ID: ENST00000366672
  CDS Start-End: 73-1788
ccaccgcgcccgcggccggcccaggcagcactcgcgagcagcggcggccccgccggcggccgagttgggagaatgcggcggcgctcgcggatgctgctctgcttcgccttcctgtgggtgctgggcatcgcctactacatgtactcggggggcggctctgcgctggccgggggcgcgggcggcggcgccggcaggaaggaggactggaatgaaattgaccccattaaaaagaaagaccttcatcacagcaatggagaagagaaagcacaaagcatggagaccctccctccagggaaagtacggtggccagactttaaccaggaagcttatgttggagggacgatggtccgctccgggcaggacccttacgcccgcaacaagttcaaccaggtggagagtgataagcttcgaatggacagagccatccctgacacccggcatgaccagtgtcagcggaagcagtggcgggtggatctgccggccaccagcgtggtgatcacgtttcacaatgaagccaggtcggccctactcaggaccgtggtcagcgtgcttaagaaaagcccgccccatctcataaaagaaatcatcttggtggatgactacagcaatgatcctgaggacggggctctcttggggaaaattgagaaagtgcgagttcttagaaatgatcgacgagaaggcctcatgcgctcacgggttcggggggccgatgctgcccaagccaaggtcctgaccttcctggacagtcactgcgagtgtaatgagcactggctggagcccctcctggaaagggtggcggaggacaggactcgggttgtgtcacccatcatcgatgtcattaatatggacaactttcagtatgtgggggcatctgctgacttgaagggcggttttgattggaacttggtattcaagtgggattacatgacgcctgagcagagaaggtcccggcaggggaacccagtcgcccctataaaaacccccatgattgctggtgggctgtttgtgatggataagttctattttgaagaactggggaagtacgacatgatgatggatgtgtggggaggagagaacctagagatctcgttccgcgtgtggcagtgtggtggcagcctggagatcatcccgtgcagccgtgtgggacacgtgttccggaagcagcacccctacacgttcccgggtggcagtggcactgtctttgcccgaaacacccgccgggcagcagaggtctggatggatgaatacaaaaatttctattatgcagcagtgccttctgctagaaacgttccttatggaaatattcagagcagattggagcttaggaagaaactcagctgcaagcctttcaaatggtaccttgaaaatgtctatccagagttaagggttccagaccatcaggatatagcttttggggccttgcagcagggaactaactgcctcgacactttgggacactttgctgatggtgtggttggagtttatgaatgtcacaatgctgggggaaaccaggaatgggccttgacgaaggagaagtcggtgaagcacatggatttgtgccttactgtggtggaccgggcaccgggctctcttataaagctgcagggctgccgagaaaatgacagcagacagaaatgggaacagatcgagggcaactccaagctgaggcacgtgggcagcaacctgtgcctggacagtcgcacggccaagagcgggggcctaagcgtggaggtgtgtggcccggccctttcgcagcagtggaagttcacgctcaacctgcagcagtaggagggtccgggaggccctgccgtcctgtctcctgcaccattgggtggagtctggtgatcacattattgattatgtttcttaaactttccgcgaaactaatatacctcagtattccatcatggtctgaaagtcaaacttcggcaaggcacggacgactgtgcagacacagcagcggcaagaagcgagaactgccctccccctcctctcggtgcagcccagccgggcccccttccccaggccggagcgcccctcttccttccagctttcacttctgccggctccgcaactgagtgacacccagcgacaaccgactggggagtggtagaagcaactgaacggatgcgtgcgagctgaggacagggcgggaggagggggcacacatgccccaggggagcgaggagaactcttgaaatctccattttcaatcccttcgaaatcacgtatggtttccacaaagccgagtcgtgtcacgtggcaggtttacgtcaatagtccctctctctgctcctccattcgcaagtgtcttcctgggccagactcccctccacctcatgtacttgctatattgaggatgaagttttctatggtgggacactaaatataaagctatatagagaaagaatgtacggtcagttccctatggtttctgtagatcatcgtcatcttgtatattccccacaaagccgttcgcagcttccgggagaaggggccagagcccggtggggccagtttctcacagagggaggaggtggcctttgtcccctggagcccgatcagccagttggtgctactgctgtggccagctggggggcttcctccagaccaccggcctcggccccggcatccctgttgggcgtcagcctgagagtccctactgtgcgtcagaatccaccttgcgtgctgtgcgtatctgtgaacctggagcggttacttattttgacagatatcactttgggtctttttacattaaatttcttttctctaaggaatataagacataccccatagctctgtgtgagccagcaataccgctgccccctggcgacagggcagaccaatgatgccaggcagctgtcacacgctagtattggcttcattgtgatctgagccctgcacgctgggccttcagaattaatggccagcagtgtcagggatgagcccgtcagccagggcacaggcctggctcacagtcctgcacacctgctggcctggggagctccagccaggcagcgagtcctgccccgcccgcagctccctcccacaccccgcctggccaagatgactgcttcagggggctttggggaaagaattaggaagggtcagaaccaaacaatacctgctcatttacactgaggattcagggcgggagacaggagccttggggtcctgttaaaccacagacagttatgaactgaaagtcataacggggagaggtgcctggcttctacctgggtgctcaggaatgttcctcgtcacccctgccactctgtggtcggtgccctgcttcctcctccactcctggccgccttctccagcgccgcacacacagatgctcagtctcagagaggctggcacggcctggcagtctgagaaaagcgtcagttaggcacacctgcaggcccctcggtgggacagcggcggccttggagttaggagccaccctgggaggttgtgccggtgccatgctcctccctgtgtcttgtatgaaaggggccactgtgtgtcttcctccccggcgggagccccacatgtgtgcactgtaggacagcggccccgaggtggaagcctggctggagggctgccctataggtcttctcttcccgcctcccctgccatgcaaccagatgtgttgtgagtgggcagcgtgcccccacgctggagtaactccgcacgcttctgtctttcacggtgggcgctcggggggagcctgaggaaaacccccttaggtacctgtgcgaggctgtggagtgcaggccagagcagggtgtgcgtagcccccagcacccaggttcttctgtcagaccctgtgacctgcgagctgctactactgtaaggagggaaatggatgaatctggctcgttttaaaatcacgttttctgacgaatcctttgccccttcacctttaccccgcccgcacccctaggccctctcagccttcctatcatcccacgtgtctacccagacccttgtgcggcccatgccctgggggcggcgtcctgtccctgagctgggaggcggctttggatggtccgggcgtcaagagcaggggtgggccggggaggggtcctttgcggtgagctatgtttacatgacacagtgtgccaaagtgacttactgcggttgcgttagtttttaatcatcaggactatctcaccctcccactcctgtttttaaaactcagaattctttcctaagagcccttcgagcaaagcgtgccgaagttagttgtcttctctgtgctggtcctttcttatgtcctcataaaagctcagatgatggtatctgtgagtatgttttgcaaattcaaaatatagtttggtaatttttttttccagttgatttttaaaaagaactgctgtacagagcttgtactttgtccattttatagatggaaaccatccttgaaaattgtttaacttaaataaagagaagatactttctagata

SEQ ID NO: 167684 - DNA, 3868 bp, Homo sapiens
  Payload ID: 12990
  Gene Symbol: GALNT3
  Gene Name: polypeptide N-acetylgalactosaminyltransferase 3
  Uniprot ID: Q14435
  ENST ID: ENST00000392701
  CDS Start-End: 777-2678
gctgaaccctgcccgaagaaaccacatgagccagcagttgctgccctcccgaagtggtcctcggaggcagcgcaccccttcattttggcgaaccgaggaggaagggaggaaccgtgtgggggaaatctagaacttctggttccccaaggacccagcagactgtgttctggctacaaggtgatcactgccaccaggtcagtgcaggattcctccaatgtagatgggccgggagccacaacttgcgcggagcagcagcctcgccgaccactcagagagaagccgcgcgacagccaggcttggcccggacggcgcccccaccctgcgcgcgcgatccaaggttctcacctggagcgctcaggtagggctggggcggggcgggaggctggcgcgcaggcgcggaagtggggcctcgcccctgccgacgtcgcaggctggagctcacctgggagactccaagtggaagccgagcctcggttctgcctctccaggcaacgcgggaggcccagcgggaaggcaggaggcggcggcggaggaggagctctactgagccgcaactgtggcgacagcaaccggagtcgcagccgccgccacctgcacctggcgcctagcccacgtccagcgcctgcccggccgccgcttcccgccaccctgccctgcccacccgccaggtactaccattaaagataccttcttctcagcaaatctatgataaaaaatataagtaacagaagaagaaataactgttatttgtcaagtgacaagcttttaatgtcagaatggctcacctaaagcgactagtaaaattacacattaaaagacattaccataaaaagttctggaagcttggtgcagtaatttttttctttataatagttttggttttaatgcaaagagaagtaagtgttcaatattccaaagaggaatcaaggatggaaaggaacatgaaaaacaaaaacaagatgttggatttaatgctagaagctgtaaacaatattaaggatgccatgccaaaaatgcaaataggagcacctgtcaggcaaaacattgatgctggtgagagaccttgtttgcaaggatattatacagcagcagaattgaagcctgtccttgaccgtccacctcaggattcaaatgcacctggtgcttctggtaaagcattcaagacaaccaatttaagtgttgaagagcaaaaggaaaaggaacgtggggaagctaaacactgctttaatgctttcgcaagtgacaggatttctttgcaccgagatcttggaccagacactcgacctcctgaatgtattgaacaaaaatttaagcgctgccctcccctgcccaccaccagtgtcataatagtttttcataatgaagcgtggtccacgttgcttagaactgtccacagtgtgctctattcttcacctgcaatactgctgaaggaaatcattttggtggatgatgctagtgtagatgagtacttacatgataaactagatgaatatgtaaaacaattttctatagtaaaaatagtcagacaaagagaaagaaaaggtctgatcactgctcggttgctaggagcaacagtcgcaacagctgaaacgctcacatttttagatgctcactgtgagtgtttctatggttggctagaacctctgttggccagaatagctgagaactacacggctgtcgtaagtccagatattgcatccatagatctgaacacgtttgaattcaacaaaccttctccttatggaagtaaccataaccgtggaaattttgactggagtctttcatttggctgggagtcgcttcctgatcatgagaagcaaagaaggaaagatgaaacctacccaattaaaacacccacttttgcaggaggacttttttccatatcaaaagaatattttgagtatattggaagctatgatgaagaaatggaaatctggggaggtgaaaatatagaaatgtctttcagagtatggcaatgtggtgggcagttggagattatgccttgctctgttgttggacatgtttttcgcagcaaaagccctcatagctttccaaaaggcactcaggtgattgctagaaaccaagttcgccttgcagaagtctggatggatgaatacaaggaaatattttataggagaaatacagatgcagcaaaaattgttaaacaaaaagcatttggtgatctttcaaaaagatttgaaataaaacaccgccttcagtgtaaaaattttacatggtatctgaacaacatttatccagaggtgtatgtgccagaccttaatcctgttatatctggatacattaaaagcgttggtcagcctctatgtctggatgttggagaaaacaatcaaggaggcaaaccattaattatgtatacatgtcatggacttgggggaaaccagtactttgaatactctgctcaacatgaaattcggcacaacatccagaaggaattatgtcttcatgctgctcaaggtctcgttcagctgaaggcatgtacctacaaaggtcacaagacagttgtcactggagagcagatatgggagatccagaaggatcaacttctatacaatccattcttaaaaatgtgcctttcagcaaatggagagcatccaagtttagtgtcatgcaacccatcagatccactccaaaaatggatacttagccaaaatgattaagtgttccttaaaattaagttgaaaaaggaaatattctttctcataaaactgtgactaggcatacactgtagtttttgaaaattatgcaaaagcagctaaatgtaacttattccaagtgcatttttcttatttatatctttatgtagcactactacagaaattctgcaagtttctgtttcaaagcacaataactagtaataccaaagactatttcaaaatgtccagatgtaggggaagagatgtttacagtatgatgaaaataattttccaagtaaagtgatgtttgtgtgttttgtacacttagggatatatatatatagctacattcacacactcacaatttaaaatatttcccctagttttttggggggataggaagaaagatttgttactgtatttttttaactacataaaaatagatcaataaatgtcagcattggcctctgtgtacaaaccaagagcttttacagatccagaatttattagtttaaaatgcaggtgaacttttttttgcgtttggtttacttgtctgtcaaatgtttccttaaacatgaaactgaataaggagaagagtatttttaacacttaaatttcttggcaaattttaaaacattttttagtctgtaatacactccacttgaagcacttaagtcttccttaaatgacttttcttaagtaatgatactgtgtgttttcccaaagcacttttaaaaaaatttttataaattactatctgttgaaaaggtgtccttttcctttcttctagtatttttttcttaccaaaattcactaatcttgaatgtttgtgatattaaatttcaaatgcagaatacttgactcatttaaagctaaattttgttactgattcaattataattgtaatggatttttgactttgtaatggattcttttcatcaaaaagccttatttttttatctatgtggaaaacacaataaaaaatcctcaacactattgtaatcatttggttaagtttttttcctcttttgggtaaaatctgtaattgataataggtgggggaaaatgaattttgtatgctgaatttctaagcgcctattgtttgtaaaaccatcagatatttcttatggcacaaaaaatgaggaatagcaaaattcctgtgttcaatatttagaaaattttgtattaatttctgataaagttccttaagcatc

SEQ ID NO: 167685 - DNA, 2107 bp, Homo sapiens
  Payload ID: 12990
  Gene Symbol: GALNT3
  Gene Name: polypeptide N-acetylgalactosaminyltransferase 3
  ENST ID: ENST00000409882
  CDS Start-End: 14-1129
actgtaagtatatatgtatggatatggttgtaacattttccctccctctccctctaatttaaaaggtgagtgtttctatggttggctagaacctctgttggccagaatagctgagaactacacggctgtcgtaagtccagatattgcatccatagatctgaacacgtttgaattcaacaaaccttctccttatggaagtaaccataaccgtggaaattttgactggagtctttcatttggctgggagtcgcttcctgatcatgagaagcaaagaaggaaagatgaaacctacccaattaaaacacccacttttgcaggaggacttttttccatatcaaaagaatattttgagtatattggaagctatgatgaagaaatggaaatctggggaggtgaaaatatagaaatgtctttcagagtatggcaatgtggtgggcagttggagattatgccttgctctgttgttggacatgtttttcgcagcaaaagccctcatagctttccaaaaggcactcaggtgattgctagaaaccaagttcgccttgcagaagtctggatggatgaatacaaggaaatattttataggagaaatacagatgcagcaaaaattgttaaacaaaaagcatttggtgatctttcaaaaagatttgaaataaaacaccgccttcagtgtaaaaattttacatggtatctgaacaacatttatccagaggtgtatgtgccagaccttaatcctgttatatctggatacattaaaagcgttggtcagcctctatgtctggatgttggagaaaacaatcaaggaggcaaaccattaattatgtatacatgtcatggacttgggggaaaccagtactttgaatactctgctcaacatgaaattcggcacaacatccagaaggaattatgtcttcatgctgctcaaggtctcgttcagctgaaggcatgtacctacaaaggtcacaagacagttgtcactggagagcagatatgggagatccagaaggatcaacttctatacaatccattcttaaaaatgtgcctttcagcaaatggagagcatccaagtttagtgtcatgcaacccatcagatccactccaaaaatggatacttagccaaaatgattaagtgttccttaaaattaagttgaaaaaggaaatattctttctcataaaactgtgactaggcatacactgtagtttttgaaaattatgcaaaagcagctaaatgtaacttattccaagtgcatttttcttatttatatctttatgtagcactactacagaaattctgcaagtttctgtttcaaagcacaataactagtaataccaaagactatttcaaaatgtccagatgtaggggaagagatgtttacagtatgatgaaaataattttccaagtaaagtgatgtttgtgtgttttgtacacttagggatatatatatatagctacattcacacactcacaatttaaaatatttcccctagttttttggggggataggaagaaagatttgttactgtatttttttaactacataaaaatagatcaataaatgtcagcattggcctctgtgtacaaaccaagagcttttacagatccagaatttattagtttaaaatgcaggtgaacttttttttgcgtttggtttacttgtctgtcaaatgtttccttaaacatgaaactgaataaggagaagagtatttttaacacttaaatttcttggcaaattttaaaacattttttagtctgtaatacactccacttgaagcacttaagtcttccttaaatgacttttcttaagtaatgatactgtgtgttttcccaaagcacttttaaaaaaatttttataaattactatctgttgaaaaggtgtccttttcctttcttctagtatttttttcttaccaaaattcactaatcttgaatgtttgtgatattaaatttcaaatgcagaatacttgactcatttaaagctaaattttgttactgattcaattataattgtaatggatttttgactttgtaatggattcttttcatcaaaaagccttatttttttatctatgtggaaaacacaataaaaaatcctcaacactattgtaa

SEQ ID NO: 167686 - DNA, 799 bp, Homo sapiens
  Payload ID: 12990
  Gene Symbol: GALNT3
  Gene Name: polypeptide N-acetylgalactosaminyltransferase 3
  ENST ID: ENST00000437849
  CDS Start-End: 1-270
gtccacagtgtgctctattcttcacctgcaatactgctgaaggaaatcattttggtggatgatgctagtgtagatgagtacttacatgataaactagatgaatatgtaaaacaattttctatagtaaaaatagtcagacaaagagaaagaaaaggtctgatcactgctcggttgctaggagcaacagtcgcaacagctgaaacgctcacatttttagatgctcactcgttttcaactggcgattatagcaatgacagcccaagcaggtgagtgtttctatggttggctagaacctctgttggccagaatagctgagaactacacggctgtcgtaagtccagatattgcatccatagatctgaacacgtttgaattcaacaaaccttctccttatggaagtaaccataaccgtggaaattttgactggagtctttcatttggctgggagtcgcttcctgatcatgagaagcaaagaaggaaagatgaaacctacccaattaaaacacccacttttgcaggaggacttttttccatatcaaaagaatattttgagtatattggaagctatgatgaagaaatggaaatctggggaggtgaaaatatagaaatgtctttcagagtatggcaatgtggtgggcagttggagattatgccttgctctgttgttggacatgtttttcgcagcaaaagccctcatagctttccaaaaggcactcaggtgattgctagaaaccaagttcgccttgcagaagtctggatggatgaatacaaggaaatattttataggagaaatacagat

SEQ ID NO: 167687 - DNA, 540 bp, Homo sapiens
  Payload ID: 12990
  Gene Symbol: GALNT3
  Gene Name: polypeptide N-acetylgalactosaminyltransferase 3
  ENST ID: ENST00000431484
  CDS Start-End: 271-540
agcagttgctgccctcccgaagtggtcctcggaggcagcgcaccccttcattttggcgaaccgaggaggaagggaggaaccgtgtgggggaaatctagaacttctggttccccaaggacccagcagactgtgttctggctacaaggtgatcactgccaccaggtactaccattaaagataccttcttctcagcaaatctatgataaaaaatataagtaacagaagaagaaataactgttatttgtcaagtgacaagcttttaatgtcagaatggctcacctaaagcgactagtaaaattacacattaaaagacattaccataaaaagttctggaagcttggtgcagtaatttttttctttataatagttttggttttaatgcaaagagaagtaagtgttcaatattccaaagaggaatcaaggatggaaaggaacatgaaaaacaaaaacaagatgttggatttaatgctagaagctgtaaacaatattaaggatgccatgccaaaaatgcaaataggagcacctgtcaggcaaaacatt

SEQ ID NO: 167688 - DNA, 570 bp, Homo sapiens
  Payload ID: 12990
  Gene Symbol: GALNT3
  Gene Name: polypeptide N-acetylgalactosaminyltransferase 3
  ENST ID: ENST00000447156
  CDS Start-End: 536-570
actggctatcgcggctcatagtatgtaatcgtttcctaaaaagtcctatttttcttttcctttgctcctgttgtcccatattagggtttaataaacttgctgtcctgttcttagggtcaattgcaagcaatattttatcaaaccaaattctgcttttttaactttatgacttctataggctccctacagacacttcaagtaaagctaatgaattctctttttactattagatcttgtatttctgtgagctattaaaactagctgttatataacaacaaattaaatgctgttgattttcttgtttttaggggttccttcaggagtcacaagtactattgggttggaaaatctgggagaataatagtttacttactgatgaaactgctgtattatcattcattaagctggagcagatcacagtttgagggtactaccattaaagataccttcttctcagcaaatctatgataaaaaatataagtaacagaagaagaaataactgttatttgtcaagtgacaagcttttaatgtcagaatggctcacctaaagcgactagtaaaattacacat

SEQ ID NO: 167689 - DNA, 1954 bp, Homo sapiens
  Payload ID: 12990
  Gene Symbol: GALNT3
  Gene Name: polypeptide N-acetylgalactosaminyltransferase 3
  ENST ID: ENST00000412248
  CDS Start-End: 563-1954
acatgagccagcagttgctgccctcccgaagtggtcctcggaggcagcgcaccccttcattttggcgaaccgaggaggaagggaggaaccgtgtgggggaaatctagaacttctggttccccaaggacccagcagactgtgttctggctacaaggtgatcactgccaccaggtcagtgcaggattcctccaatgtagatgggccgggagccacaacttgcgcggagcagcagcctcgccgaccactcagagagaagccgcgcgacagccaggcttggcccggacggcgcccccaccctgcgcgcgcgatccaaggttctcacctggagcgctcaggggttccttcaggagtcacaagtactattgggttggaaaatctgggagaataatagtttacttactgatgaaactgctgtattatcattcattaagctggagcagatcacagtttgagggtactaccattaaagataccttcttctcagcaaatctatgataaaaaatataagtaacagaagaagaaataactgttatttgtcaagtgacaagcttttaatgtcagaatggctcacctaaagcgactagtaaaattacacattaaaagacattaccataaaaagttctggaagcttggtgcagtaatttttttctttataatagttttggttttaatgcaaagagaagtaagtgttcaatattccaaagaggaatcaaggatggaaaggaacatgaaaaacaaaaacaagatgttggatttaatgctagaagctgtaaacaatattaaggatgccatgccaaaaatgcaaataggagcacctgtcaggcaaaacattgatgctggtgagagaccttgtttgcaaggatattatacagcagcagaattgaagcctgtccttgaccgtccacctcaggattcaaatgcacctggtgcttctggtaaagcattcaagacaaccaatttaagtgttgaagagcaaaaggaaaaggaacgtggggaagctaaacactgctttaatgctttcgcaagtgacaggatttctttgcaccgagatcttggaccagacactcgacctcctgaatgtattgaacaaaaatttaagcgctgccctcccctgcccaccaccagtgtcataatagtttttcataatgaagcgtggtccacgttgcttagaactgtccacagtgtgctctattcttcacctgcaatactgctgaaggaaatcattttggtggatgatgctagtgtagatgagtacttacatgataaactagatgaatatgtaaaacaattttctatagtaaaaatagtcagacaaagagaaagaaaaggtctgatcactgctcggttgctaggagcaacagtcgcaacagctgaaacgctcacatttttagatgctcactgtgagtgtttctatggttggctagaacctctgttggccagaatagctgagaactacacggctgtcgtaagtccagatattgcatccatagatctgaacacgtttgaattcaacaaaccttctccttatggaagtaaccataaccgtggaaattttgactggagtctttcatttggctgggagtcgcttcctgatcatgagaagcaaagaaggaaagatgaaacctacccaattaaaacacccacttttgcaggaggacttttttccatatcaaaagaatattttgagtatattggaagctatgatgaagaaatggaaatctggggaggtgaaaatatagaaatgtctttcagagtatggcaatgtggtgggcagttggagattatgccttgctctgttgttggacatgtttttcgcagcaaaagccctcatagctttccaaaaggcactcaggtgattgctagaaaccaagttcgccttgcagaagtctggatggatgaatacaaggaaatattttataggagaaatacagatgcagcaaaaattgttaaacaa

SEQ ID NO: 167690 - DNA, 559 bp, Homo sapiens
  Payload ID: 12990
  Gene Symbol: GALNT3
  Gene Name: polypeptide N-acetylgalactosaminyltransferase 3
  ENST ID: ENST00000414977
  CDS Start-End: 388-559
agtgtgtcggttgcccctggagagatcccgaaaggggcgccctgggccaaggggcaggtggcgcctcgggggggagcccggtcacaccctctcgcccacggtgcccccgccagtccctatggggcggcccctgaggagctggacggagaccaaagacctggggttccttcaggagtcacaagtactattgggttggaaaatctgggagaataatagtttacttactgatgaaactgctgtattatcattcattaagctggagcagatcacagtttgagggtactaccattaaagataccttcttctcagcaaatctatgataaaaaatataagtaacagaagaagaaataactgttatttgtcaagtgacaagcttttaatgtcagaatggctcacctaaagcgactagtaaaattacacattaaaagacattaccataaaaagttctggaagcttggtgcagtaatttttttctttataatagttttggttttaatgcaaagagaagtaagtgttcaatattccaaagaggaatcaaggatggaaaggaacatgaaaa

SEQ ID NO: 167691 - DNA, 536 bp, Homo sapiens
  Payload ID: 12990
  Gene Symbol: GALNT3
  Gene Name: polypeptide N-acetylgalactosaminyltransferase 3
  ENST ID: ENST00000422973
  CDS Start-End: 461-536
agctcacctgggagactccaagtggaagccgagcctcggttctgcctctccaggcaacgcgggaggcccagcgggaaggcaggaggcggcggcggaggaggagctctactgagccgcaactgtggcgacagcaaccggagtcgcagccgccgccacctgcacctggcgcctagcccacgtccagcgcctgcccggccgccgcttcccgccaccctgccctgcccacccgccaggggttccttcaggagtcacaagtactattgggttggaaaatctgggagaataatagtttacttactgatgaaactgctgtattatcattcattaagctggagcagatcacagtttgagggtactaccattaaagataccttcttctcagcaaatctatgataaaaaatataagtaacagaagaagaaataactgttatttgtcaagtgacaagcttttaatgtcagaatggctcacctaaagcgactagtaaaattacacattaaaagacattaccataaaaagttctggaagcttggtgcag

SEQ ID NO: 167692 - DNA, 5399 bp, Homo sapiens
  Payload ID: 12991
  Gene Symbol: GALNT4
  Gene Name: polypeptide N-acetylgalactosaminyltransferase 4
  Uniprot ID: Q8N4A0
  ENST ID: ENST00000529983
  CDS Start-End: 258-1994
gttggctggagagtttgtgaaaagttgtgagccgagcaggaggaagtagggagagaggagttgggctgtgccggaggccgaggaccgagagggctcaggtgacccctggaaagcctgggtggctggaaaggagcctagcgcctgcatgaaaggaagaacctgctgggaagtacctgagctcgagctgtgggttccgccgcccttcccctgcgtggtggcttggtggccgcgtctgcgcctcagccctgagaatccggatggcggtgaggtggacttgggcaggcaagagctgcctgctgctggcgtttttaacagtggcctatatcttcgtggagctcttggtctctacttttcatgcctccgcaggagccggccgtgccagggagctggggtcaagaaggctctcagacctccagaaaaatacggaggatttgtctcgaccgctttataagaagccccctgcagattcccgtgcacttggggagtgggggaaagccagcaaactccagctcaacgaggatgaactgaagcagcaagaagaactcattgagagatacgccatcaatatttacctcagtgacaggatttccctgcatcgacacatagaggataaaagaatgtatgagtgtaagtcccagaagttcaactataggacacttcctaccacctctgttatcattgctttctataacgaagcctggtcgactttgctccgtaccattcacagtgttttagaaacttctcctgcagttcttttgaaagagatcatcttggtggatgacttgagtgacagagtttatttgaagacacaacttgaaacttacatcagcaatcttgatagagtacgcttgattaggaccaataagcgagaggggctggttagggcccgtctgattggggccactttcgccactggggacgtcctcactttcctggattgtcactgtgagtgtaattccggttggctggaaccgcttttggaaaggattgggagagatgaaacagcagttgtgtgtcctgttatagacacaattgattggaatacttttgaattctatatgcagataggggagcccatgattggtgggtttgactggcgtttaacatttcagtggcattctgtccccaaacaggaaagggacaggcggatatcaagaattgaccccatcagatcacctaccatggctggaggactgtttgctgtcagcaagaaatattttcagtaccttggaacgtatgacacaggaatggaagtgtggggaggtgaaaaccttgagctgtcttttagggtgtggcagtgtggtggcaaattggagatccacccgtgttcccacgtgggccatgtgttccccaagcgggcaccatatgctcgccccaatttcctacagaatactgctcgggcagcagaagtttggatggatgaatacaaagagcacttctacaatagaaaccctccagcaagaaaagaagcttatggtgatatttctgaaagaaaattactacgagagcggttgagatgcaagagctttgactggtatttgaaaaacgtttttcctaatttacatgttccagaggatagaccaggctggcatggggctattcgcagtagagggatctcgtctgaatgtttagattataattctcctgacaacaaccccacaggtgctaacctttcactgtttggatgccatggtcaaggaggcaatcaattctttgaatatacttcaaacaaagaaataaggtttaattctgtgacagagttatgtgcagaggtacctgagcaaaaaaattatgtgggaatgcaaaattgtcccaaagatgggttccctgtaccagcaaacattatttggcattttaaagaagatggaactatttttcacccacactcaggactgtgtcttagtgcttatcggacaccggagggccgacctgatgtacaaatgagaacttgtgatgctctagataaaaatcaaatttggagttttgagaaatagagcacaacagcactttcgtcatgagctgacagtagtgtcaagaaagtcaaagagccttaagagcctcagtgaagattgtattttattttatcaaaagccacctagcagtcatctgtggagcactggaaagctggggttcattttggtatatcacactgaaactgggtacccagagtgctgctgtttaatatttcacaatgccttacttattggttgttttatataagagttttgtcaatatggtctcttcttaaaagaagttgactatgaattgaaacacacaaaacatttaagtgccagacttaatattaaagaatgtaaaggtccaagtaaaatgaggtatgatttatgttgatgtgtaagttcaccgcacatcccactttttaacaaaactcatgaatgtgcagtttgagccattgctattttgattacatagaatttgtatttcttttttagccagcacattaaattttagattttattttttaatctaatttttttctaatcaaaaagaaaattgagcttaaggcaaaaggcctggttttagagatatgtgtaattggaagagggcatttgtttgagtgtgagtttggaggcctttttaacatgcagacatacccatatttaaatgaaatggggagatatttacattccgtactttgtaaacttgagctattggacttcactgatgtatatattaatacctcagattcctctgattttgtaagctgtcttctctgtgaacgtgtttgtgtgtgtagggcattttctgattgcacttccttaagttatgaatgtactagaaagggactcatccagaatactatgcctccctttgttaatgcttaatcatttaaagtaaacacaattgaagcctctctgaagttaaacccaactatgtttattaaaatgtgtgaaactgaaagtgggctaggttctaccaaggctgtggaactctcctacgagttctgctgatcaggaaatttaagaatttatcttaaaaatgcaaggaaaaaagactgccttggcaattgtgaatggtgctttcaatctcctagcaccgagcctggcacttaggcagctttcagtaagtgggtgaatgaatgactgaatgaatgaatgaatggctcagctgaggaatgtaactttggtcaagttattatgatgtgtttgggcttagttttctcattggtaaaatgtgggtgctggattggatcttaaagatcccttccagctctgaaatgctgattgtacagtatattcttcccagattgactcactgtgcaatctttacaatactttttatcttttcacttttgacataggtaatgttgttgagcagttgagcaatgttcagtccagttgtgaagctggagaagagaaatgggttttaaaaattaagtgaggggaggccgggtgcggtggctcacgcatgtaatcccagcactttgggaggccaaggcaggtggatcacgaggtcaggagatccagaccatcctggctaacatggtgaaacctcgtctctactaaaaatacaaaaaattagccagctgtggtggcgggcgcctgtagtcccagctactcaggaggctgaggcaggagaatggcgtgaacctgtgaggcagagcttacagtgagccgagatcgtgccactgcactccagcctgggcgacagagcaagactctgtctcaaaaaaaaaaaataataataaaataagtgagctgaactcacctgaagtggtttacttctgtgggttaagaagttctagtcagtgttcatagtcgtttcgttttgataattgttgaaccaattttgtttttaaaacctttagactctgaaagtaatattttgactaagaatgtaaatatttccaaactaaattactcgggaagtaaacgctttttttaaaagtatttttactggttttataccaatattatatgcagaaatcacaggatgaatttagaattaaatctcaattagttcactttggcctagatttatgaaaaatgcatgcctcgtaaagagtccactgtattcacgagtaaagttgcttttagtgttcacttgatgacttggagagtaggaattttgcaaaatctgaatttaaggaaattctttaggataaccatttcaaaaaataaaattgctatgcaatcttgaatattttctcttttgcctcgtaaaatgaaaatgcattcacagtttctgtaaattatttagcagccttaaagtttatcaaaaaattgtccagattccacgtgcagcatgcttggccctgcatttaatttaagaaggattaataataatgctctgaatttttcgaaagggattctcctaaacccacccacttctcttgcccaggctgctttttaaaaatatttttttattttttacttatttttaaattttctctttttatttatttttggttttcttgttagccacctgttatatgggagaacgaaaattgttatattttgaaagtacttattacattatttttattttagtatcttgatgctcctgtcaaaagggaaatgaggcttttaaaaataaagtaccttaattctttattgactttttgccctaaattgctaggtgtgacccagcaatcttttaggaagagattttacagtggtgctttatttatatcaataatccagtatagttaggctgttcattcctcataatagagtacataacagaaaagtgggactttcacattttcatatttaggcacgttccaatttaattccaaaaatactctgtaattctacatctaaaaaaaccgattccctaattcgaatttattggtaccaaagctctctttggctatagacaattaagagttgaccttttaagttaatgtatatgcttaaaaacagttttaggaaaatatttggtagacaaagagtttcaactttaaatgttcactatgtcatttagtgtccaactttacggataggttgactatctaaataggcatttttagtcattaaaaaaaatctagtcaccaggaggatccctataactcaaaataacttgtttgtaaaagaaaatttgtttacttacccattagtaagttcctgcatattcattataagatggcaaatcaaacttttctaggatgaagacagcttatttttaagttgtatagtcttagttggtttagggtctcaattttaattaataaaatacttggtttttatttgcttgtccttttgaattcctgttttaataattttaaaatgagcacaaagaacgttgaagttcagattaatctcttctgaatgatgtttttttcctctgtgatgagttgtttctgacttttttccttttgtatttgtaatgttgattaagatgtaaaataaaaagtgtgcctgattatttttgcaaataga

SEQ ID NO: 167693 - DNA, 6171 bp, Homo sapiens
  Payload ID: 12992
  Gene Symbol: GALNT5
  Gene Name: polypeptide N-acetylgalactosaminyltransferase 5
  Uniprot ID: Q7Z7M9
  ENST ID: ENST00000259056
  CDS Start-End: 486-3308
gctgaatgaagttttctgggtaatggcatgaaatgttttccttatgagaagtggtgttgagttacagcgtgcagacggagaacggggaggagagaaacggcagtctcaatctggcccccaccttttcttgggcttgtaggaaggtggacatgggctcccggagacaagacaagtgatatgttgaactgttcggtggctggaatcaactgctcctggagtgacctaaggccagtgtttatcagaacttagccagggccagccaagcaggcacagatgctctgctatgaaatgccacgcaggcagagactgacaagcggtaggaactgagctttccccttggactgctgcttcctgctgtgttcaggggagggggtcactttctggcaactctgctgctgctgctgctgctgctgctacttcagcttcctctccactcaaggtaagcaggctaagggagggcaggctgctagggaaagctttgtaccatgaacaggatccgaaagtttttccgaggaagtgggcgagtcttggcatttatctttgtagcttctgtcatctggctcctctttgacatggcagctctccgcctctcattcagtgagatcaacactcgggtcatcaaggaagacattgtgaggagggagcggataggattcagagttcagccagaccaaggaaaaattttttacagcagcataaaagagatgaaacctcccctaaggggacatgggaaaggggcatggggcaaagagaatgttagaaaaactgaggagagtgtgctcaaggttgaggtggacttggaccaaacccagagggaaagaaaaatgcagaatgccctgggaaggggcaaggttgtgccgttgtggcatcctgcacatctgcagaccctccctgtgactcctaacaagcagaagacagacgggagaggcaccaaacctgaagcctcctctcaccaggggacaccaaagcaaacgacagctcagggggctccaaagacctcattcatagcagcaaaaggaactcaggtagtcaaaatatcagtacacatgggacgtgtcagtttaaaacaggagccccggaagagtcatagtcccagcagtgacacatcaaaactagcagctgaaagggacttgaatgtgaccatcagtcttagtactgatagaccaaagcagcgatcacaggcagtagcaaacgagagggcacaccctgccagcacagcagtgccgaagtctggggaagccatggccttaaacaaaactaagactcagagcaaagaagtcaatgcaaataaacacaaagccaatacgagtcttccttttcctaagttcactgtcaattcaaatcgcttaaggaagcaatctattaatgagacacctttgggaagtttgtcaaaggatgatggagctagaggggctcatgggaagaaactcaatttctctgaaagccatcttgtgattataaccaaagaggaagagcaaaaggcagaccccaaagaggtctctaattctaaaaccaaaacaatatttcctaaagtattgggtaaaagccaaagtaaacacatttccaggaatagaagtgagatgtcttcctcttcacttgctccacatagagtgccactgtcccaaactaaccatgctttaactggagggctagagccagcaaaaatcaacataactgccaaagccccctctacagaatacaaccagagtcatataaaagcccttttacctgaagacagtggaacgcaccaggtgttaagaattgatgtgacactttctccaagggaccccaaagctccagggcagtttgggcgtcctgtagttgtcccccatggaaaggagaaggaggcagaaagaagatggaaagaaggaaacttcaatgtctaccttagcgatttgatcccagtggatagagccattgaagacaccagacctgctggatgtgcagagcagctagttcacaataacctcccaaccaccagtgtcatcatgtgctttgtggatgaagtgtggtccactctcctgagatctgttcacagtgtcatcaatcgctctcctccacacctcatcaaggagattctgctggtagatgacttcagcaccaaagactatctaaaagataatttggataaatacatgtcccagtttccaaaagttcggattcttcgcctcaaagagagacatggcttaataagggccaggctggcaggagcacagaatgcaacaggtgatgtgttgacatttttagattctcatgtggaatgtaacgttggttggttggaacctcttctggaaagagtttatttaagtagaaagaaagtggcctgtccagtaatcgaagtcatcaatgataaggatatgagttacatgacagtggataactttcaaagaggcatctttgtgtggcccatgaactttggttggagaacaattcctccagatgtcattgcaaaaaacagaattaaagaaactgatacaataaggtgccctgtcatggctggtggattgttttctattgacaaaagttacttttttgaacttggaacatacgaccctggccttgatgtttggggtggggaaaatatggagctctcattcaaggtgtggatgtgtggtggtgaaattgagatcattccctgctcccgagtgggccatatattcagaaatgacaatccatattccttccccaaagaccggatgaagacagtggagcggaacttggtgcgggttgccgaggtctggctggatgagtataaggagctgttctatggccacggagaccacctcatcgaccaagggctagatgttggcaacctcacccagcaaagggagctgcgaaagaaactgaagtgcaaaagtttcaaatggtacttggagaatgtctttcctgacttaagggctcccattgtgagagctagtggtgtgcttattaatgtggctttgggtaaatgcatttccattgaaaacactacagtcattctggaagactgcgatgggagcaaagagcttcaacaatttaattacacctggttaagacttattaaatgtggagaatggtgtatagcccccatccctgataaaggagccgtaaggctgcacccttgtgataacagaaacaaagggctaaaatggctgcataaatcaacatcagtctttcatccagaactggtgaatcacattgtttttgaaaacaatcagcaattattatgcttggaaggaaatttttctcaaaagatcctgaaagtagctgcctgtgacccagtgaagccatatcaaaagtggaaatttgaaaaatattatgaagcctgaagtgtaactgatgtttttatatagtaaacccattaaatactgtgaaaataacactgaacttggaaactatatttctcagcggtagtttaaattttcaattttaataacatttgaatggaagattttttataaatcacaatatttggaataccaaaagatgactcaggaaaacagtccaacattggactgaagtccttcttcggaactgggtggcctttgaattgcctgctttccaccctatgctagacctcatcatgcaaatttccctgtgaaagctaacaggtaactggaaatgaagacagaaggacttgagaaagcatgaggatattcccaatgactatgtttggtaataatcagctcttctggcccacaagtaggaatgatcaatgagaacttaacttagtcctttatttggggattttttcatcaaacaaaaatttcttgagttcttatggctagaagacctcagatgcccacagctgtcacgtttgtgaaatccctccagactacatgcatgcttacctaacagtttgaaatagtattgatctactgctggtaaccctgcttgatggcagcattttgatctaaattacataatggtttttcccaatctgaatcagtggaaaaaaatttaagtgaggaagaagaggccttcaaatgcttatttaattctaggtatgaacactatttcagttcattttgtgcttttaaaactacagttttaaagatttatgataccaataacttcctagattcatgtggattttttttaaggcaatgaaaaaaggctggattataacacactgtagtaatcaaaaatgcatttaagcattgaatgcactctagtgcagggccaagtaagaggagttgaaatgagtaaagcagaaatagagctgctgaaagtttcttttatataaaaataataaaatactactttagatatagtagcattcacagggatgaaatatgcgaaaaatgggttctaaaatatttcaaagggaaaatgaagtgaaggaaacatcatgaaaggggaaaggaatgaggtaaacaagtcttaggaagagagttaagaaaaaattccgctggacttggccaaagaaagaaggggatctagtatctctatgaaggaaaaaagagtaaagccctcagtgtgaacccagtgagaacactgacaaatttgggaaaagttaaatactgatttcatccaaataaagcctctaatcttaagcataccaatactttggcataccagaagacaccttagaaatcaggatagcctttgcattcattttggtaagaaaactgatgctgagaggataaattacctaaaaatcttaaaacccaggcaagttagtcaaagaatcaagattagaattcaggtttccagagacagggctcattctaatgcctcaggtcactggcccgaacaaatctgcttcacagaattccttagaaagagatacacaattctttgctgggattgggtccctggaggacaaccatactatattcttgttaatatgttttttctttttttaaatttaaacttttgttcagttgagatgattgtgaaactaggtatctttcattctgactcctagtttaacatttaattttgactcccaatgagttacgtaaaagcaaaactataactaagaatgggaaaaagaactatttctgcacatttgtaacatatttaagatgttttcttcatataattgaaaactgcagatgagtaagagaatgactaggaaatgagatacagttatatgacacataatgatgttttagtcaacaatgaaccacatatttgacattggtcccaaaagattatattaataatatggtatctttagtgtgcttttctatgtttagacacacaaatactcaccatgatgttacaatagcctacagtgttcaatacagtaacatgcacaagtttgtaacctaggagcaacagggattccatatagcctaggtgtgtagtaggctacctacaccatctaggtttgtgtaagtacactctgatattcacacaatgatgaaattgcctaatgacacatttctcagaatgtatttgtgttattaaatgatgcatgactctaattcttttcaaaacagagccatatggggcaagggggatggggggacgcaagtcagttgtcaaaagactaattgagttactgacaaactgaacatgctaggtgcctcatgtaattcttcatgtaactaaaaaatgttgagaggtttttttcccccgggtatataggctctctttttatccgaaaatagtttccacaaagaagtcaactctgttctgaaaaaaaatgaattgcattttgaatacacttatctttgggtatatcaactaaaggaagttggatttttttccttaacagaaacttctgcagtcctctcagttcacatcctttctgactttaccctgacaaacttattatataaagctatatttaaatctatattgtcaatataacaaaggattgtttttgaacatcacaaatttgttcttggatagaattttatacattgcttttcatcatatatttgctcagttactctaagaagcaaggaactgatcactagttgggaatctatatgggcctaaacttgagtgtattgatttattattacatctactaccaacattttcttaagcatagccttctaaattttttcaggagattagaataaaggtatacatgctactcggtcttctggtaattctagtgataaacctttggatgagacaggtcctaatcagcactgaattcttcaataggaggctgtgttacaggagctacagatttttccctggattagcttaggtcattgcctttacttt

SEQ ID NO: 167694 - DNA, 2809 bp, Homo sapiens
  Payload ID: 12993
  Gene Symbol: GALNT6
  Gene Name: polypeptide N-acetylgalactosaminyltransferase 6
  Uniprot ID: Q8NCL4
  ENST ID: ENST00000356317
  CDS Start-End: 315-2183
ggtccctcctgccttcgctctctgctggtcgcggtggcctgtagctcctccctcggtaggacccccctccaccttggcgcttacgagatgaatgaggagcccagacctctggaacttggagggttgttcagattcccaggctgacaaaaaggagaaacagcttttacttgcatccagggccaatcatcgcagacccagacgtctgcagagggctgaggccccagcttgtggccaccacaacgtatcaagctatctccagggttgggctcaggactcagagctgacgcagctggggtgccccttggttctggaggatgaggctcctccgcagacgccacatgcccctgcgcctggccatggtgggctgcgcctttgtgctcttcctcttcctcctgcatagggatgtgagcagcagagaggaggccacagagaagccgtggctgaagtccctggtgagccggaaggatcacgtcctggacctcatgctggaggccatgaacaaccttagagattcaatgcccaagctccaaatcagggctccagaagcccagcagactctgttctccataaaccagtcctgcctccctgggttctataccccagctgaactgaagcccttctgggaacggccaccacaggaccccaatgcccctggggcagatggaaaagcatttcagaagagcaagtggacccccctggagacccaggaaaaggaagaaggctataagaagcactgtttcaatgcctttgccagcgaccggatctccctgcagaggtccctggggccagacacccgaccacctgagtgtgtggaccagaagttccggcgctgccccccactggccaccaccagcgtgatcattgtgttccacaacgaagcctggtccacactgctgcgaacagtgtacagcgtcctacacaccacccctgccatcttgctcaaggagatcatactggtggatgatgccagcacagaggagcacctaaaggagaagctggagcagtacgtgaagcagctgcaggtggtgagggtggtgcggcaggaggagcggaaggggctgatcaccgcccggctgctgggggccagcgtggcacaggcggaggtgctcacgttcctggatgcccactgtgagtgcttccacggctggctggagcccctcctggctcgaatcgctgaggacaagacagtggtggtgagcccagacatcgtcaccatcgaccttaatacttttgagttcgccaagcccgtccagaggggcagagtccatagccgaggcaactttgactggagcctgaccttcggctgggaaacacttcctccacatgagaagcagaggcgcaaggatgaaacctaccccatcaaatccccgacgtttgctggtggcctcttctccatctccaagtcctactttgagcacatcggtacctatgataatcagatggagatctggggaggggagaacgtggaaatgtccttccgggtgtggcagtgtgggggccagctggagatcatcccctgctctgtcgtaggccatgtgttccggaccaagagcccccacaccttccccaagggcactagtgtcattgctcgcaatcaagtgcgcctggcagaggtctggatggacagctacaagaagattttctataggagaaatctgcaggcagcaaagatggcccaagagaaatccttcggtgacatttcggaacgactgcagctgagggaacaactgcactgtcacaacttttcctggtacctgcacaatgtctacccagagatgtttgttcctgacctgacgcccaccttctatggtgccatcaagaacctcggcaccaaccaatgcctggatgtgggtgagaacaaccgcggggggaagcccctcatcatgtactcctgccacggccttggcggcaaccagtactttgagtacacaactcagagggaccttcgccacaacatcgcaaagcagctgtgtctacatgtcagcaagggtgctctgggccttgggagctgtcacttcactggcaagaatagccaggtccccaaggacgaggaatgggaattggcccaggatcagctcatcaggaactcaggatctggtacctgcctgacatcccaggacaaaaagccagccatggccccctgcaatcccagtgacccccatcagttgtggctctttgtctaggacccagatcatccccagagagagcccccacaagctcctcaggaaacaggattgctgatgtctgggaacctgatcaccagcttctctggaggccgtaaagatggatttctaaacccactgggtggcaaggcaggaccttcctaatccttgcaacaacattgggcccattttctttccttcacaccgatggaagagaccattaggacatatatttagcctagcgttttcctgttctagaaatagaggctcccaaagtagggaaggcagctgggggagggttcagggcagcaatgctgagttcaagaaaagtacttcaggctgggcacagtggctcatgcctgaaatcctagcactttgggaagacaatgtgggagaatggcttgagcccaggagttcaagaccggcctgagcaacatagtgaggatcccatctctacgcccaccctccccccggcaaaaaaaaaaagctgggtatggtggcttatgcctgtagtcgcagctactcagaaggctgaggtgggaggattgcttgttccccggaggttgaagctacagtgagccttgattgtgtcactgcactccagcctgggcaacaggtaagactctgtctcaaaaaaaaacaaaaaa

SEQ ID NO: 167695 - DNA, 5207 bp, Homo sapiens
  Payload ID: 12993
  Gene Symbol: GALNT6
  Gene Name: polypeptide N-acetylgalactosaminyltransferase 6
  Uniprot ID: Q8NCL4
  ENST ID: ENST00000543196
  CDS Start-End: 207-2075
aacaggccctgctgtgagggaccacgaggcagtgccaggatgaaagagttggagtaacctaggtgattctgagtgaatcagtcaggaggccttcctggagggggctgaggccccagcttgtggccaccacaacgtatcaagctatctccagggttgggctcaggactcagagctgacgcagctggggtgccccttggttctggaggatgaggctcctccgcagacgccacatgcccctgcgcctggccatggtgggctgcgcctttgtgctcttcctcttcctcctgcatagggatgtgagcagcagagaggaggccacagagaagccgtggctgaagtccctggtgagccggaaggatcacgtcctggacctcatgctggaggccatgaacaaccttagagattcaatgcccaagctccaaatcagggctccagaagcccagcagactctgttctccataaaccagtcctgcctccctgggttctataccccagctgaactgaagcccttctgggaacggccaccacaggaccccaatgcccctggggcagatggaaaagcatttcagaagagcaagtggacccccctggagacccaggaaaaggaagaaggctataagaagcactgtttcaatgcctttgccagcgaccggatctccctgcagaggtccctggggccagacacccgaccacctgagtgtgtggaccagaagttccggcgctgccccccactggccaccaccagcgtgatcattgtgttccacaacgaagcctggtccacactgctgcgaacagtgtacagcgtcctacacaccacccctgccatcttgctcaaggagatcatactggtggatgatgccagcacagaggagcacctaaaggagaagctggagcagtacgtgaagcagctgcaggtggtgagggtggtgcggcaggaggagcggaaggggctgatcaccgcccggctgctgggggccagcgtggcacaggcggaggtgctcacgttcctggatgcccactgtgagtgcttccacggctggctggagcccctcctggctcgaatcgctgaggacaagacagtggtggtgagcccagacatcgtcaccatcgaccttaatacttttgagttcgccaagcccgtccagaggggcagagtccatagccgaggcaactttgactggagcctgaccttcggctgggaaacacttcctccacatgagaagcagaggcgcaaggatgaaacctaccccatcaaatccccgacgtttgctggtggcctcttctccatctccaagtcctactttgagcacatcggtacctatgataatcagatggagatctggggaggggagaacgtggaaatgtccttccgggtgtggcagtgtgggggccagctggagatcatcccctgctctgtcgtaggccatgtgttccggaccaagagcccccacaccttccccaagggcactagtgtcattgctcgcaatcaagtgcgcctggcagaggtctggatggacagctacaagaagattttctataggagaaatctgcaggcagcaaagatggcccaagagaaatccttcggtgacatttcggaacgactgcagctgagggaacaactgcactgtcacaacttttcctggtacctgcacaatgtctacccagagatgtttgttcctgacctgacgcccaccttctatggtgccatcaagaacctcggcaccaaccaatgcctggatgtgggtgagaacaaccgcggggggaagcccctcatcatgtactcctgccacggccttggcggcaaccagtactttgagtacacaactcagagggaccttcgccacaacatcgcaaagcagctgtgtctacatgtcagcaagggtgctctgggccttgggagctgtcacttcactggcaagaatagccaggtccccaaggacgaggaatgggaattggcccaggatcagctcatcaggaactcaggatctggtacctgcctgacatcccaggacaaaaagccagccatggccccctgcaatcccagtgacccccatcagttgtggctctttgtctaggacccagatcatccccagagagagcccccacaagctcctcaggaaacaggattgctgatgtctgggaacctgatcaccagcttctctggaggccgtaaagatggatttctaaacccactgggtggcaaggcaggaccttcctaatccttgcaacaacattgggcccattttctttccttcacaccgatggaagagaccattaggacatatatttagcctagcgttttcctgttctagaaatagaggctcccaaagtagggaaggcagctgggggagggttcagggcagcaatgctgagttcaagaaaagtacttcaggctgggcacagtggctcatgcctgaaatcctagcactttgggaagacaatgtgggagaatggcttgagcccaggagttcaagaccggcctgagcaacatagtgaggatcccatctctacgcccaccctccccccggcaaaaaaaaaaagctgggtatggtggcttatgcctgtagtcgcagctactcagaaggctgaggtgggaggattgcttgttccccggaggttgaagctacagtgagccttgattgtgtcactgcactccagcctgggcaacaggtaagactctgtctcaaaaaaaaacaaaaaagaagaagaaaagtacttctacagccatgtcctattccttgatcatccaaagcacctgcagagtccagtgaaatgatatattctggctgggcacagtggctcacacctgtaatcctagcactttgggaggccaaggcaggtggatcacctgaggtcagaagtttgaaaccagcctggactacatggtgaaactccatctctactaaaagtacaaaaattagctgggcatgatggcacgcacctgcagtcccagctacttgggaggctgaggcaggagaatcactcgaacccaggaggcagaggttgcagtgagccaagacagcaccattgcaccccagcctgagcaacaagagcgaaactccatctcaggaaaaaaaaaaaaaaaaaaagtatattctaacagacagatcagaggtctaagagatcctcccttgctattattacctgaagtctgtagaactgtttacagatatctccttgacaggtgtcctttatcttactttatctgtacagtaatcctgtgagaaagacaggacagaaaccactgtgcctattttacagatacgaaaactgagacacaggtaaaggggcttgtctgtagtcccatagctagcagatggctggagccaagactgaggctcgttcttcaatgctgagccagggctccttccgctgcaccacaagaacgctagaccactcgccaccagccttctcattccctcttcctccattctaatcatttctagctggctggcctccacagagcataggaaaacagccagggccgggcacggtggctcatgcctgtaatctcaacactctgggaggccgagccgggtggataacctgaggtcaggaattcgagaccagcctggccaacatggtaaaaccccatctctactaaaaatataaaaattagccaggcatggtggcgcacacctgtaatcccagctactcaagaggctgaggcaggagaattgcttaaatctgggaggcggaagttgcagtgagccaagatcgcgccactgaactccagcctaggcaacaagagcaaaactccatctccaaaaaaaagaaaggaaaaacagggccaggtagccattgtggagagagcacacttaggaatcctgggatgttagtgttaaaagaaagctcctggagccagtgattctcaggtttgtcccagaacccttttttctaagccccatataaaaggtagattaaaaaaacaaagtagcatgagtgaaattgagagagggacaggtaatgccttccagcccctaacttctaacaatctggaagcacaacgtgaaaatcacgtagcccaaccctatcattttcatattatgaaactgagtccaggtaagtgaatctgtccaaggtcacccagcaaggtatcagtagccctgagggtaaggactctgataaggctcgggagggtcctggaaagcctgaggcggcaggaagagtgtgcagagttgagcgtgtctggaaggctgatccactgctgggcccacatcaaagcccccatggggagcagacccgactgcacatggctcttttgctggaagaagagcatggctgcgcagaggactaaaatttcatctgggaaggcttcttttgactgtcagtagcaggatgtcaccagatgagggtgctatgggaccacagctgtctttgttcccattgcaactcaaccctgcgggaggccgcctacatccctgagagccttctggagcctacagaggagacattggccagccaaaaggaaaggagtggccagggtacgacctggagtagggaagggaaaaagttcccggaaagaagagaattggatgagaggtctcagtggaaataaaggttttctggcattggtcaaggaaactcgcgttgtgttctcttacctgtgttgtcccttagctgaatcagttgatttgggctatgaagaaccacacacatctgaaaagttctgttacagccactgtctcatgtccccaaacattctctggccctaaatctagcttatgtattgtgtcaagcacgtggagacgtgagacgtcaaacgaggtcctgtccccgtggaactcacacgctaaatgtaagcaaatcatagcaagcctggagatgctccaagaggtgctggatgagttagaaggagcaattccttccacttagggaatcagataaggcctcacaaagatggcaatgtttgacctaagacctcggaagatgagtcctcagatgggaagggctcaataagcagagttgttacacaggcagcagcctggcaggagcaaagccacagaggacatgtggccccagtgggtctgagaaacccagaggacattggggtgagggagtgactggtgtagaagctggaagatcagagttacatcatgaatttcaggggccctaggcactttagccttcacggagctcttgctccattcaaaaaaaaattaatgttatgactatgttggtataaagatgaatgtaatccaggctga

SEQ ID NO: 167696 - DNA, 582 bp, Homo sapiens
  Payload ID: 12993
  Gene Symbol: GALNT6
  Gene Name: polypeptide N-acetylgalactosaminyltransferase 6
  ENST ID: ENST00000605617
  CDS Start-End: 377-582
gtccggtggggaaacccgggagccaccccgcggcgcggctgcggctttgcctcggcgcgacagttgttcagattcccaggctgacaaaaaggagaaacagcttttacttgcatccagggccaatcatcgcagacccagacgtctgcagaggggaaaataaaagaagcaaaaacaggccctgctgtgagggaccacgaggcagtgccaggatgaaagagttggagtaacctaggtgattctgagtgaatcagtcaggaggccttcctggagggggctgaggccccagcttgtggccaccacaacgtatcaagctatctccagggttgggctcaggactcagagctgacgcagctggggtgccccttggttctggaggatgaggctcctccgcagacgccacatgcccctgcgcctggccatggtgggctgcgcctttgtgctcttcctcttcctcctgcatagggatgtgagcagcagagaggaggccacagagaagccgtggctgaagtccctggtgagccggaaggatcacgtcctggacctcatgctggaggccatgaacaaccttagagattcaatgcc

SEQ ID NO: 167697 - DNA, 538 bp, Homo sapiens
  Payload ID: 12993
  Gene Symbol: GALNT6
  Gene Name: polypeptide N-acetylgalactosaminyltransferase 6
  ENST ID: ENST00000604426
  CDS Start-End: 303-538
gttgctaaggccccaaaagattgcagcacacgaggcagcgccggagaggaccactgagcagcacgggccctggcgggggaaaataaaagaagcaaaaacaggccctgctgtgagggaccacgaggcagtgccaggatgaaagagttggagtaacctaggtgattctgagtgaatcagtcaggaggccttcctggagggggctgaggccccagcttgtggccaccacaacgtatcaagctatctccagggttgggctcaggactcagagctgacgcagctggggtgccccttggttctggaggatgaggctcctccgcagacgccacatgcccctgcgcctggccatggtgggctgcgcctttgtgctcttcctcttcctcctgcatagggatgtgagcagcagagaggaggccacagagaagccgtggctgaagtccctggtgagccggaaggatcacgtcctggacctcatgctggaggccatgaacaaccttagagattcaatgcccaagctccaaatcagggctccagaagccca

SEQ ID NO: 167698 - DNA, 697 bp, Homo sapiens
  Payload ID: 12993
  Gene Symbol: GALNT6
  Gene Name: polypeptide N-acetylgalactosaminyltransferase 6
  ENST ID: ENST00000603563
  CDS Start-End: 532-697
ggaacttggaggggtgagagggggacaagccagagccagggctccacaccctcttcccctcacccacccatgccctgcattccttctgtgccccgtctccccagatcgggccaccccatgtgctctggtacggcaactcttgcagagaggtttcctcctgccctgccacgttgcgcctgagcagaaggggacagcaaggagaagcctcgctggtggagttgttcagattcccaggctgacaaaaaggagaaacagcttttacttgcatccagggccaatcatcgcagacccagacgtctgcagaggggaaaataaaagaagcaaaaacaggccctgctgtgagggaccacgaggcagtgccaggatgaaagagttggagtaacctaggtgattctgagtgaatcagtcaggaggccttcctggagggggctgaggccccagcttgtggccaccacaacgtatcaagctatctccagggttgggctcaggactcagagctgacgcagctggggtgccccttggttctggaggatgaggctcctccgcagacgccacatgcccctgcgcctggccatggtgggctgcgcctttgtgctcttcctcttcctcctgcatagggatgtgagcagcagagaggaggccacagagaagccgtggctgaagtccctggtgagccggaaggatcacgtcctggacc

SEQ ID NO: 167699 - DNA, 626 bp, Homo sapiens
  Payload ID: 12993
  Gene Symbol: GALNT6
  Gene Name: polypeptide N-acetylgalactosaminyltransferase 6
  ENST ID: ENST00000605138
  CDS Start-End: 509-626
gcggctgcggctttgcctcggcgcgacagttgttcagattcccaggctgacaaaaaggagaaacagcttttacttgcatccagggccaatcatcgcagacccagacgtctgcagaggggaaaataaaagaagcaaaaacaggccctgctgtgagggaccacgaggcagtgccaggatgaaagagttggagtaacctaggtgattctgaaccattgcaggtactgtgccttctgcctgaaatgtgctcacctcgcctcgctgactcctactcgccagttagtgttcggcccatttctgcccccgtgagatttcttcacagatgttgccctcccccatttgctgagtttcctgcatgccggctccttcagcactcaagggtacctctttgattctgcttctcacagggctgaggccccagcttgtggccaccacaacgtatcaagctatctccagggttgggctcaggactcagagctgacgcagctggggtgccccttggttctggaggatgaggctcctccgcagacgccacatgcccctgcgcctggccatggtgggctgcgcctttgtgctcttcctcttcctcctgcatagggatgtgagcagcagagaggaggccacagaga

SEQ ID NO: 167700 - DNA, 581 bp, Homo sapiens
  Payload ID: 12993
  Gene Symbol: GALNT6
  Gene Name: polypeptide N-acetylgalactosaminyltransferase 6
  ENST ID: ENST00000603188
  CDS Start-End: 394-581
taaaatgaaggggctgggccaggctggtccctcctgccttcgctctctgctggtcgcggtggcctgtagctcctccctcgttgttcagattcccaggctgacaaaaaggagaaacagcttttacttgcatccagggccaatcatcgcagacccagacgtctgcagaggggaaaataaaagaagcaaaaacaggccctgctgtgagggaccacgaggcagtgccaggatgaaagagttggagtaacctaggtgattctgagtgaatcagtcaggaggccttcctggagggggctgaggccccagcttgtggccaccacaacgtatcaagctatctccagggttgggctcaggactcagagctgacgcagctggggtgccccttggttctggaggatgaggctcctccgcagacgccacatgcccctgcgcctggccatggtgggctgcgcctttgtgctcttcctcttcctcctgcatagggatgtgagcagcagagaggaggccacagagaagccgtggctgaagtccctggtgagccggaaggatcacgtcctggacctcatgctggaggccatgaacaa

SEQ ID NO: 167701 - DNA, 567 bp, Homo sapiens
  Payload ID: 12993
  Gene Symbol: GALNT6
  Gene Name: polypeptide N-acetylgalactosaminyltransferase 6
  ENST ID: ENST00000604381
  CDS Start-End: 156-567
aaacccgggagccaccccgcggcgcggctgcggctttgcctcggcgcgacaggctgaggccccagcttgtggccaccacaacgtatcaagctatctccagggttgggctcaggactcagagctgacgcagctggggtgccccttggttctggaggatgaggctcctccgcagacgccacatgcccctgcgcctggccatggtgggctgcgcctttgtgctcttcctcttcctcctgcatagggatgtgagcagcagagaggaggccacagagaagccgtggctgaagtccctggtgagccggaaggatcacgtcctggacctcatgctggaggccatgaacaaccttagagattcaatgcccaagctccaaatcagggctccagaagcccagcagactctgttctccataaaccagtcctgcctccctgggttctataccccagctgaactgaagcccttctgggaacggccaccacaggaccccaatgcccctggggcagatggaaaagcatttcagaagagcaagtggacccccctggagacccaggaaaaggaagaaggctata

SEQ ID NO: 167702 - DNA, 574 bp, Homo sapiens
  Payload ID: 12993
  Gene Symbol: GALNT6
  Gene Name: polypeptide N-acetylgalactosaminyltransferase 6
  ENST ID: ENST00000604506
  CDS Start-End: 505-574
agtaaaatgaaggggctgggccaggctggtccctcctgccttcgctctctgctggtcgcggtggcctgtagctcctccctcgggaaaataaaagaagcaaaaacaggccctgctgtgagggaccacgaggcagtgccaggatgaaagagttggagtaacctaggtgattctgagtgaatcagtcaggaggccttcctggaggggaccattgcaggtactgtgccttctgcctgaaatgtgctcacctcgcctcgctgactcctactcgccagttagtgttcggcccatttctgcccccgtgagatttcttcacagatgttgccctcccccatttgctgagtttcctgcatgccggctccttcagcactcaagggtacctctttgattctgcttctcacagggctgaggccccagcttgtggccaccacaacgtatcaagctatctccagggttgggctcaggactcagagctgacgcagctggggtgccccttggttctggaggatgaggctcctccgcagacgccacatgcccctgcgcctggccatggtgggctgcgcctttgtgctcttcc

SEQ ID NO: 167703 - DNA, 548 bp, Homo sapiens
  Payload ID: 12993
  Gene Symbol: GALNT6
  Gene Name: polypeptide N-acetylgalactosaminyltransferase 6
  ENST ID: ENST00000605055
  CDS Start-End: 480-548
aaacccgggagccaccccgcggcgcggctgcggctttgcctcggcgcgacagatcgggccaccccatgtgctctggtacggcaactcttgcagagaggtttcctcctgccctgccacgttgcgcctgagcagaaggggacagcaaggagaagcctcgctggtggagttgttcagattcccaggctgacaaaaaggagaaacagcttttacttgcatccagggccaatcatcgcagacccagacgtctgcagaggggaaaataaaagaagcaaaaacaggccctgctgtgagggaccacgaggcagtgccaggatgaaagagttggagtaacctaggtgattctgagtgaatcagtcaggaggccttcctggagggggctgaggccccagcttgtggccaccacaacgtatcaagctatctccagggttgggctcaggactcagagctgacgcagctggggtgccccttggttctggaggatgaggctcctccgcagacgccacatgcccctgcgcctggccatggtgggctgcgcctttgtgctcttc

SEQ ID NO: 167704 - DNA, 554 bp, Homo sapiens
  Payload ID: 12993
  Gene Symbol: GALNT6
  Gene Name: polypeptide N-acetylgalactosaminyltransferase 6
  ENST ID: ENST00000604847
  CDS Start-End: 186-554
agtaaaatgaaggggctgggccaggctggtccctcctgccttcgctctctgctggtcgcggtggcctgtagctcctccctcggctgaggccccagcttgtggccaccacaacgtatcaagctatctccagggttgggctcaggactcagagctgacgcagctggggtgccccttggttctggaggatgaggctcctccgcagacgccacatgcccctgcgcctggccatggtgggctgcgcctttgtgctcttcctcttcctcctgcatagggatgtgagcagcagagaggaggccacagagaagccgtggctgaagtccctggtgagccggaaggatcacgtcctggacctcatgctggaggccatgaacaaccttagagattcaatgcccaagctccaaatcagggctccagaagcccagcagactctgttctccataaaccagtcctgcctccctgggttctataccccagctgaactgaagcccttctgggaacggccaccacaggaccccaatgcccctggggcagatggaaaagcatttcagaagagc

SEQ ID NO: 167705 - DNA, 1859 bp, Homo sapiens
  Payload ID: 12993
  Gene Symbol: GALNT6
  Gene Name: polypeptide N-acetylgalactosaminyltransferase 6
  ENST ID: ENST00000603641
  CDS Start-End: 1-1098
atgaggctcctccgcagacgccacatgcccctgcgcctggccatggtgggctgcgcctttgtgctcttcctcttcctcctgcatagggatgtgagcagcagagaggaggccacagagaagccgtggctgaagtccctggtgagccggaaggatcacgtcctggacctcatgctggaggccatgaacaaccttagagattcaatgcccaagctccaaatcagggctccagaagcccagcagactctgttctccataaaccagtcctgcctccctgggttctataccccagctgaactgaagcccttctgggaacggccaccacaggaccccaatgcccctggggcagatggaaaagcatttcagaagagcaagtggacccccctggagacccaggaaaaggaagaaggctataagaagcactgtttcaatgcctttgccagcgaccggatctccctgcagaggtccctggggccagacacccgaccacctgagtgtgtggaccagaagttccggcgctgccccccactggccaccaccagcgtgatcattgtgttccacaacgaagcctggtccacactgctgcgaacagtgtacagcgtcctacacaccacccctgccatcttgctcaaggagatcatactggtggatgatgccagcacagaggagcacctaaaggagaagctggagcagtacgtgaagcagctgcaggtggtgagggtggtgcggcaggaggagcggaaggggctgatcaccgcccggctgctgggggccagcgtggcacaggcggaggtgctcacgttcctggatgcccactgtgagtgcttccacggctggctggagcccctcctggctcgaatcgctgaggacaagacagtggtggtgagcccagacatcgtcaccatcgaccttaatacttttgagttcgccaagcccgtccagaggggcagagtccatagccgaggcaactttgactggagcctgaccttcggctgggaaacacttcctccacatgagaagcagaggcgcaaggatgaaacctaccccatcaagtgtggcagtgtgggggccagctggagatcatcccctgctctgtcgtaggccatgtgttccggaccaagagcccccacaccttccccaagggcactagtgtcattgctcgcaatcaagtgcgcctggcagaggtctggatggacagctacaagaagattttctataggagaaatctgcaggcagcaaagatggcccaagagaaatccttcggtgacatttcggaacgactgcagctgagggaacaactgcactgtcacaacttttcctggtacctgcacaatgtctacccagagatgtttgttcctgacctgacgcccaccttctatggtgccatcaagaacctcggcaccaaccaatgcctggatgtgggtgagaacaaccgcggggggaagcccctcatcatgtactcctgccacggccttggcggcaaccagtactttgagtacacaactcagagggaccttcgccacaacatcgcaaagcagctgtgtctacatgtcagcaagggtgctctgggccttgggagctgtcacttcactggcaagaatagccaggtccccaaggacgaggaatgggaattggcccaggatcagctcatcaggaactcaggatctggtacctgcctgacatcccaggacaaaaagccagccatggccccctgcaatcccagtgacccccatcagttgtggctctttgtctaggacccagatcatccccagagagagcccccacaagctcctcaggaaacaggattgctgatgtctgggaacctgatcaccagcttctctggaggccgtaaagatggattt

SEQ ID NO: 167706 - DNA, 4307 bp, Homo sapiens
  Payload ID: 12994
  Gene Symbol: GALNT7
  Gene Name: polypeptide N-acetylgalactosaminyltransferase 7
  Uniprot ID: Q86SF2
  ENST ID: ENST00000265000
  CDS Start-End: 84-2057
agagccggaggagggggaaggagggaggggagagcggtggcggcggctgcgccgggctgtgagtctctcgccgccggaggaagatgaggctgaagattgggttcatcttacgcagtttgctggtggtgggaagcttcctggggctagtggtcctctggtcttccctgaccccgcggccggacgacccaagcccgctgagcaggatgagggaagacagagatgtcaatgaccccatgcccaaccgaggcggcaatggactagctcctggggaggacagattcaaacctgtggtaccatggcctcatgttgaaggagtagaagtggacttagagtctattagaagaataaacaaggccaaaaatgaacaagagcaccatgctggaggagattcccagaaagatatcatgcagaggcagtatctcacatttaagcctcagacattcacctaccatgatcctgtgcttcgcccagggatcctcggtaactttgaacccaaagaacctgagcctcctggagtggttggtggccctggagagaaagccaagccattggttttgggaccagaattcaaacaagcaattcaagccagcattaaagagtttggatttaacatggtggcaagtgacatgatctcactggaccgcagcgtcaatgacttacgccaagaagaatgcaagtattggcattatgatgaaaacttgctcacttcgagcgttgtcattgtcttccataatgaaggatggtcaaccctcatgagaacagtccacagtgtaattaaaaggactccaaggaaatatttagcagaaattgtgttaattgacgatttcagtaataaagaacacttaaaagaaaaactggatgaatatattaagctgtggaatggcctagtgaaggtatttcgaaatgaaagaagggaaggtttaattcaagcacgaagtattggtgctcagaaggctaaacttggacaggttttgatataccttgatgcccactgtgaggtggcagttaactggtatgcaccacttgtagctcccatatctaaggacagaaccatttgcactgtgccgcttatagatgtcataaatggcaacacatatgaaattataccccaagggggtggtgatgaagatgggtatgcccgaggagcatgggattggagtatgctctggaaacgggtgcctctgacccctcaagagaagagactgagaaagacaaaaactgaaccgtatcggtccccagccatggctgggggattatttgccattgaacgagagttcttctttgaattgggtctctatgatccaggtctccagatttggggtggtgaaaactttgagatctcatacaagatatggcagtgtggtggcaaattattatttgttccttgttctcgtgttggacatatctaccgtcttgagggctggcaaggaaatcctccgcccatttatgttgggtcttctccaactctgaagaattatgttagagttgtggaggtttggtgggatgaatataaagactacttctatgctagtcgtcctgaatcgcaggcattaccatatggggatatatcggagctgaaaaaatttcgagaagatcacaactgcaaaagttttaagtggttcatggaagaaatagcttatgatatcacctcacactaccctttgccacccaaaaatgttgactggggagaaatcagaggcttcgaaactgcttactgcattgatagcatgggaaaaacaaatggaggctttgttgaactaggaccctgccacaggatgggagggaatcagcttttcagaatcaatgaagcaaatcaactcatgcagtatgaccagtgtttgacaaagggagctgatggatcaaaagttatgattacacactgtaatctaaatgaatttaaggaatggcagtacttcaagaacctgcacagatttactcatattccttcaggaaagtgtttagatcgctcagaggtcctgcatcaagtattcatctccaattgtgactccagtaaaacgactcaaaaatgggaaatgaataacatccatagtgtttagagagaaaaaaataaaccaataacctacctactgacaagtaaatttatacaggactgaaaaccgcctgaaacctgctgcaactattgttattaactctgtatagctccaaacctggaacctcctgatcagtttgaaggacattgataaactgtgattttacaataacattatcatctgcagttactgtttacaagactgcttttaccttaaactttgtagatgtttacatctttttgttgtgttttaagatgatgttggtaatttgtgcctttagctctgttttattagacagagttaaagcatgttgtcttctttgggattacactcaggggtctgaaaggcagtttgatttttatttttaacacacttgaaaaaaggttggagtagccagactttcatatataacttggtgattatcaacctgttgtgtctttatttaattttacatctttttgaagcactgccacaggttattagccaaggtggccttccttcacagtcatgctgcttttttgaaaggtgaatttcaacacatttagtgcctctttcatttctcagtatatatttcaagagcttgtgatgaaatctataggatggtaatgatggacttgtcacctgtatggggaatacttttactactcagaaatgaatttatgtgctgccatttgctataaagttgaactttgtatggcttgaaaaagaaatgacaatatggaacatcccaaggctgtcccatagggttggaagttgtgtagcattcactcccttacctactggcattcccagtgccctctgtccatacctacttctaggattgcaaaggagtcttccaactagagaaaaattgtccactgacatttgggatttacttttctccaatacctgccaatacagaaaactattatcagttgttattgttatcccttgaaagcgagggtgacaaaaacaacaaaacaccgttataaacacatcaaaggttcattctgactgaggtaagactttccaagcccttgttagattaggccttataaaacttgtgtgcattataacctaagctgtgcaacctgtgaagccaagagtgaactgatgtttcatttatattttcatccaaatgacattatctgcacgtttttaaaatttaaaaacaaaggactatttaaaaatacagtttattaacaaacgtgaactactttctgttacattaggtgttccctagtgtttcttaatttctttttagaaagtgtatttttattagtatttttccggtgaacagaagatttgtttggatttaaacatttactaagacagtacctattaggaaaaccaaatattgcaaatggtcaattcgattttaatttctcaaaagatactctgttatccagaagattaaaatgcctacattgagtgcttaaaaaaaaaaaaacaactgtgatgatgtgagcagaatggcaagtaagttaagcatttttgatcctgtaatcatggtatcattacaatgaaaggaattcacaaactactgccagaggaagtttgttttttaatttaagagggaaatataacctataaatttgtttcttccaagcttagctcttaaatttggagactcaaagttaaacatcctcaacagagttttatttataattttgaattgtcaatttgtattttgctactgatctgtgatcaaccattttaactttcatctctagggatgtttaacatttataattgcaaaataaaccaactataaaaaaagaaactaagagagaattggtactttaattacttgtgtgtttgcaaataggctccattttccatgttgagtagattataaccttattaactatgcataggcctaagaaaggtggcaatgaactgtgcatgtaaattttaaatgggtactttgtgcaattcgttaaaagaagatactctatgaatatgattctatatattgaaatcagaaaacctaccaaacaaaaacatcagaagctgctgccataatgactattttctactgtaggctgctttggaaataattcccatatccttgctttgtaagttggtaatatcactatgcatttctacacattttataaatttgatttatgcagattttgatacactgtatgtttctgtagaaattgtataaatattcaaaattttattaggataaatttgagaaacttacgtatatcttaattctgggttgcttgttttttaggtgacaaaaataaaatattgtattttaattca

SEQ ID NO: 167707 - DNA, 1567 bp, Homo sapiens
  Payload ID: 12994
  Gene Symbol: GALNT7
  Gene Name: polypeptide N-acetylgalactosaminyltransferase 7
  ENST ID: ENST00000512285
  CDS Start-End: 26-1177
gtgagtctctcgccgccggaggaagatgaggctgaagattgggttcatcttacgcagtttgctggtggtgggaagcttcctggggctagtggtcctctggtcttccctgaccccgcggccggacgacccaagcccgctgagcaggatgagggaagacagagatgtcaatgaccccatgcccaaccgaggcggcaatggactagctcctggggaggacagattcaaacctgtggtaccatggcctcatgttgaaggagtagaagtggacttagagtctattagaagaataaacaaggccaaaaatgaacaagagcaccatgctggaggagattcccagaaagatatcatgcagaggcagtatctcacatttaagcctcagacattcacctaccatgatcctgtgcttcgcccagggatcctcggtaactttgaacccaaagaacctgagcctcctggagtggttggtggccctggagagaaagccaagccattggttttgggaccagaattcaaacaagcaattcaagccagcattaaagagtttggatttaacatggtggcaagtgacatgatctcactggaccgcagcgtcaatgacttacgccaagaagaatgcaagtattggcattatgatgaaaacttgctcacttcgagcgttgtcattgtcttccataatgaaggatggtcaaccctcatgagaacagtccacagtgtaattaaaaggactccaaggaaatatttagcagaaattgtgttaattgacgatttcagtaataaagaacacttaaaagaaaaactggatgaatatattaagctgtggaatggcctagtgaaggtatttcgaaatgaaagaagggaaggtttaattcaagcacgaagtattggtgctcagaaggctaaacttggacaggttttgatataccttgatgcccactgtgaggtggcagttaactggtatgcaccacttgtagctcccatatctaaggacagaactacatgtactgtgcctctaatagattacatagatgggaatgattattccattgaaccacagcaaggtggggatgaagatggttttgccagaggggcctgggactggagtttactatggaaacgtattcctctaagccacaaggaaaaggccaaaagaaaacataaaactgaaccttatcggtaaagactattactttattttcttatgttgaatgtttatctaagttcttttttttttcttccccatgaactcgtataaatgtgtgggtccatacatacgcttccatttgatctttgctgccatcaacacaatacagaaccatttgcactgtgccgcttatagatgtcataaatggcaacacatatgaaattataccccaagggggtggtgatgaagatgggtatgcccgaggagcatgggattggagtatgctctggaaacgggtgcctctgacccctcaagagaagagactgagaaagacaaaaactgaaccgtatcggtaatcactaaatcacttacatatttttcttttctccagttgctgctaacctattaacctcttgccaagctaaa

SEQ ID NO: 167708 - DNA, 1658 bp, Homo sapiens
  Payload ID: 12994
  Gene Symbol: GALNT7
  Gene Name: polypeptide N-acetylgalactosaminyltransferase 7
  ENST ID: ENST00000505308
  CDS Start-End: 1-1364
aaaacttgctcacttcgagcgttgtcattgtcttccataatgaaggatggtcaaccctcatgagaacagtccacagtgtaattaaaaggactccaaggaaatatttagcagaaattgtgttaattgacgatttcagtaataaagaacacttaaaagaaaaactggatgaatatattaagctgtggaatggcctagtgaaggtatttcgaaatgaaagaagggaaggtttaattcaagcacgaagtattggtgctcagaaggctaaacttggacaggttttgatataccttgatgcccactgtgaggtggcagttaactggtatgcaccacttgtagctcccatatctaaggacagaactacatgtactgtgcctctaatagattacatagatgggaatgattattccattgaaccacagcaaggtggggatgaagatggttttgccagaggggcctgggactggagtttactatggaaacgtattcctctaagccacaaggaaaaggccaaaagaaaacataaaactgaaccttatcggtccccagccatggctgggggattatttgccattgaacgagagttcttctttgaattgggtctctatgatccaggtctccagatttggggtggtgaaaactttgagatctcatacaagatatggcagtgtggtggcaaattattatttgttccttgttctcgtgttggacatatctaccgtcttgagggctggcaaggaaatcctccgcccatttatgttgggtcttctccaactctgaagaattatgttagagttgtggaggtttggtgggatgaatataaagactacttctatgctagtcgtcctgaatcgcaggcattaccatatggggatatatcggagctgaaaaaatttcgagaagatcacaactgcaaaagttttaagtggttcatggaagaaatagcttatgatatcacctcacactaccctttgccacccaaaaatgttgactggggagaaatcagaggcttcgaaactgcttactgcattgatagcatgggaaaaacaaatggaggctttgttgaactaggaccctgccacaggatgggagggaatcagcttttcagaatcaatgaagcaaatcaactcatgcagtatgaccagtgtttgacaaagggagctgatggatcaaaagttatgattacacactgtaatctaaatgaatttaaggaatggcagtacttcaagaacctgcacagatttactcatattccttcaggaaagtgtttagatcgctcagaggtcctgcatcaagtattcatctccaattgtgactccagtaaaacgactcaaaaatgggaaatgaataacatccatagtgtttagagagaaaaaaataaaccaataacctacctactgacaagtaaatttatacaggactgaaaaccgcctgaaacctgctgcaactattgttattaactctgtatagctccaaacctggaacctcctgatcagtttgaaggacattgataaactgtgattttacaataacattatcatctgcagttactgtttacaagactgcttttaccttaaactttgtagatgtttacatctttttgttgtgttttaagatgatgttggtaatttgtgcctttagctctgttttattagacagag

SEQ ID NO: 167709 - DNA, 648 bp, Homo sapiens
  Payload ID: 12994
  Gene Symbol: GALNT7
  Gene Name: polypeptide N-acetylgalactosaminyltransferase 7
  ENST ID: ENST00000503213
  CDS Start-End: 1-598
attatttgttccttgttctcgtgttggacatatctaccgtcttgagggctggcaaggaaatcctccgcccatttatgttgggtcttctccaactctgaagaattatgttagagttgtggaggtttggtgggatgaatataaagactacttctatgctagtcgtcctgaatcgcaggcattaccatatggggatatatcggagctgaaaaaatttcgagaagatcacaactgcaaaagttttaagtggttcatggaagaaatagcttatgatatcacctcacactaccctttgccacccaaaaatgttgactggggagaaatcagaggcttcgaaactgcttactgcattgatagcatgggaaaaacaaatggaggctttgttgaactaggaccctgccacaggatgggagggaatcagcttttcagaatcaatgaagcaaatcaactcatgcagtatgaccagtgtttgacaaagggagctgatggatcaaaagttatgattacacactgtaatctaaatgaatttaaggaatggcagtacttcaaggtattctgcattttaacttctgaaatattatatgcttttcattttcagtaacatctagcatgtggaatttagataaataaatcttaaaacctgcattcaaa

SEQ ID NO: 167710 - DNA, 2380 bp, Homo sapiens
  Payload ID: 12995
  Gene Symbol: GALNT8
  Gene Name: polypeptide N-acetylgalactosaminyltransferase 8
  Uniprot ID: Q9NY28
  ENST ID: ENST00000252318
  CDS Start-End: 338-2251
gggagtgggtttcaggaggagccaagatgtttgattatactcctctgcttcaagggagtgttatctccctgagcaacctgtggaaagccgctgagcaacctgtggaaagccgctgagcggttatcctctcggggcataaagacaaagaaggcaataaggagactttgctcctcagaggccacccgtggcttcccatgggtgtctcacacaggggagaccaactcaactggcacctagaactctctttcccacaaaagctaggctggttctgattcttaacctgctccagcagtgacacactcagtcccacagggagtggacgacccccaggaagaagatgatgttttggaggaaactccccaaagccctcttcattgggctgactctggccattgctgtcaatctccttctggtattttctagcaaggggactttacaaaacctgtttacgggtggtctccacagggagcttcctttacatctgaataaacgctacggggcagtgataaagagactctcccacttggaggtggaattgcaggatctgaaagaaagtatgaaattagctctgaggcaacaagaaaatgtgaacagcacactgaagagggcgaaagatgaagtacgccctcttctaaaggcaatggaaaccaaggtgaatgagacaaagaagcacaaaacccaaatgaaactcttcccacactcacagcttttcaggcaatggggcgaggatctttctgaggcccagcagaaggcggcccaggacctcttccggaagtttggttacaacgcgtacctcagcaaccagctgcctctcaatcgcaccatccccgacacgcgagactacagatgtcttcggaagacatatccttcccaactcccatccctcagtgtcattctcatattcgtgaatgaagctctgtccattatacaacgggccatcaccagtatcatcaaccggacgccctctcgattgttgaaggaaatcatcttggtggatgatttcagctcaaatggagaactaaaggtacacttggatgagaagattaagctttacaaccagaagtatccaggactactgaaaataatacggcatcctgaaaggaaaggtcttgctcaagcccgcaacactggctgggaagctgccacagcagacgtggtcgccatcttggatgctcacattgaagtcaatgttgggtgggcagagccaatcttggctcggattcaggaggaccgcactgtgattgtgtctcctgtgtttgacaacattcgttttgacaccttcaaactggataagtatgaactggcagttgatgggtttaactgggaactctggtgccgctacgatgcactgccacaagcctggattgatctgcatgatgtcactgccccagtgaagagtccttcaatcatgggcatcctggctgctaacaggcacttcctgggagagatcgggtctctggatggtggaatgctcatctatggaggagagaacgtggagcttagcctgagggtgtggcagtgtggagggaaggtcgagattttgccctgttcccggattgcccacctagagagacaccacaagccctacgccttggatctcaccgctgccttgaagcgcaatgctctgcgagtggccgaaatctggatggatgagcacaaacacatggtctacttggcctggaacatacctctccagaactctggaatagattttggagacgtttcttccagaatggcactccgggaaaaactgaaatgtaaaacttttgactggtacctgaaaaatgtttatccactcttgaagccactccacaccatcgtgggctatggaagaatgaaaaacctattggatgaaaatgtctgcttggatcagggacccgttccaggcaacacccccatcatgtattactgccatgaattcagctcacagaatgtctactatcacctaactggggagctctatgtgggacaactgattgcagaggccagtgctagtgatcgctgcctgacagaccctggcaaggcggagaagcccaccttagaaccatgctccaaggcagctaagaatagactgcatatatattgggattttaaaccgggaggagctgtcataaacagagataccaagcggtgtctggagatgaagaaggatcttttgggtagccacgtgcttgtgctccagacctgtagcacgcaagtgtgggaaatccagcacactgtcagagactggggtcagaccaacagccagtgatcctcagatggtgctggatctgggtcatcaattcttgcaagtggaatggcttctactcctaacactcccagcttctttctcaatgagaaagaaagcatgtgtatgtctgtttatggcgacttcaggtgg

SEQ ID NO: 167711 - DNA, 5977 bp, Homo sapiens
  Payload ID: 12995
  Gene Symbol: GALNT8
  Gene Name: polypeptide N-acetylgalactosaminyltransferase 8
  ENST ID: ENST00000433855
  CDS Start-End: 867-2456
aagcttactggtgaggcaagtgtgcgtctatttccatggcgccctggctcgcggcagcccctggctgggcgaggggtgtgatgtgggagtggggtgggagggggcagcaggcggggcctgccacgtcacttggagagtgtgtgttgggaaggaagggcagagcggagagccgagccgctgcagctgcggcggcggcagcgaagccttgagccgtggggaggtgggtccccgcgctcgggcgccggggcagccccgggccctctgcgaggcctgcggcgcggctcctagggaggaggtggcggctgtggcggccggaaccgcgaccttggccggacccagccccgcggtggacgcagggcggaggccgagccccgccaggagtctttgccgagccggagggaggcgcatctggcgcttcggtaccagcggcagccgggggtccggagcggctggaggagcgcagtgggaactgggaagagctagcccggctggagggcggacctctgcgtccgggagccgggtctcaggcaccgctgggggcgaagccacgcgtcttttcgggcagccaatttcacacgcgcctgtgtgcggttccgggcatcccagtaagctctagcacccgggcgcgggtaacgggaagcgcagaaccaaatccccagcgcccaggtcacctccccagacccagccttgcagggaccagggctttagggctcacggacccaacggccaggtcagaccgcgaaccgggaggagcgcgggccccaccctaaagagggcgcagccgggagctggggagcgggtgccgcgctccagagattgtgtcgtgggcgccgtcctagtggcggggagcgcacctccgagggggcatgagatcggagaaatcccttacgctggcggcgccgggggaggtccgtgggccggagggagagcaacaggatgcgggagacttcccggaggccggcgggggcgggggctgctgtagtagcgagcggctggtgatcaatatctccgggctgcgctttgagacacaattgcgcaccctgtcgctgtttccggacacgctgctcggagaccctggccggcgagtccgcttcttcgaccccctgaggaacgagtacttcttcgaccgcaaccggcccagcttcgacgccatcctctactactaccagtctgggggccgcctgcggaggccggtcaacgtgcccctggacattttcctggaggagatccgcttctaccagctgggggacgaggccctggcggccttccgggaggacgagggctgcctgcccgaaggtggcgaggacgagaagccgctgccctcccagcccttccagcgccaggtgtggctgctctttgagtacccagagagctctgggccggccaggggcatcgccatcgtctccgtgttggtcattctcatctccatagtcatcttttgcctggagaccttaccccagttccgtgtagatggtcgaggtggaaacaatggtggtgtgagtcgagtctccccagtttccagggggagtcaggaggaagaggaggatgaagacgattcctacacatttcatcatggcatcacccctggggaaatggggaccgggggctcctcctcactcagtactcttgggggctccttctttacagaccccttctttctggtggagacgctgtgcattgtctggttcacttttgagctcctggtgcgcttctccgcctgccctagcaagccggccttcttccggaacatcatgaacatcattgacttggtggctatcttcccctacttcatcaccctgggcactgagctggtgcagcagcaggagcagcaaccagccagtggaggaggcggccagaatgggcagcaggccatgtccctggccatcctccgagtcatccgcctggtccgggtgttccgcatcttcaagctctcccgccactccaaggggctgcagatcctgggcaagaccttgcaggcctccatgagggagctggggctgctcatcttcttcctcttcatcggggtcatcctcttctccagtgccgtctacttcgcagaggctgacgatgacgattcgctttttcccagcatcccggatgccttctggtgggcagtggttacaatgaccacggtaggttacggggacatgtaccccatgactgtggggggaaagatcgtgggctcgctgtgtgccatcgctggggtcctcaccattgccctgcctgtgcccgtcatcgtctccaacttcaactacttctaccaccgggagacggagcaggaggagcaaggccagtatacccacgtcacttgtgggcagcctgcgccggacctgagggcaactgacaacggacttggcaagcctgacttccccgaggctaaccgggaacggagacccagctaccttcctacaccacatcgggcctatgcagagaaaagaatgctcacggaggtctgacccatgcaggcagggcctgcaggaggggagcactgagctaacagtctcttaggcttccttctcatttccactactcactctagcttcagttgacttcttgactctctcccctacacccactacctggcatccaggaccaaatacctggactatcaaccttgttgcttaatccctgcagcattcaaggttaatccatctaagtgacatttttgaaattccagcggtgccacccaatcatgcccagcttctgtcatatgaatgagatatacatttatgtctgaccttccctcaagactgatttttcatgtctgggacttacaatatctcaaggaacagcaatgtcaacaggatggaaaccagccctatctgagtcttcgctccctccttagtgttctttgctttgggtcatgtgcgtttcctagcttcaggctacttggtaactggaagaagctggaggacagaagcagtactcaacttgctgttattccagtgccctgtaacaatcactggtcctcctgcagatgacccttggtagagtctttatttgcatagcctcaaaataggttattcgtttctaaacttggatggaattagagaatacaatcaaactttaccacttggaggacacggggttagtccaggaccaaagaggccaatggatttttcaaagtgtgccccagcacaagaggcactggtgttcggtctacatttagttctccccactctgatcccctgactctccagcttccaggaaggttccttctcagagccaaatactctttgtgcaagtgccttcctgagcagaagaactggagaaagggaaccacagagccaggaggaatgtctgagcagagtcaagcaactggcttgaccacagtctgaagcaaggtgccacttaaacagatactgttttctcaaaggggcagaggaatcgtgttgcagatggcagccttttctccttcattttccccacattttctctggccctctaccttgcttcctgggagtttgatttaggattgctgttgaaggcttcctcaggcaaactccagcttaaagccctagacaggtaaaagcacacattggatggcagcatgggtttcttcccattttatgggcatgaaatatgtggtttagaataaggaacaagcattattcctttgccaacagcctcactctaagaggcttttttgctgagtcaagcaaacacttgcctgctctgccccttggagctgcatttgacctgctctcactggtaaggtgacttggtggcgttcccacttgatttagccattttcttccattgtgagaccactgccatctatccacctgcccacctccccttttgtttctcagtaacattgccatttgttttttgcctttgataaactgtgatgtactgttctgagatcttttgggtgcagttctgaaactgaaaggactgttaacatgtttttaattttatatctatgctttcagactctttgatgataattttttttttaaaaattattctctcgaagagcaacttacgagaggacagccttatgagggtttgcttgagaggcagtgtggcttctgtgactgccagctctaaatctcgatcttgccataactttacagggtaacttgggtccacagtcactctttgtgcctcagtttacccacccattaaatgggaacattactgtcttcccctccctacctcatggggaatgtctgggaagctggggacattgctatgcaaatgtgtgaatcttagtcatggatttgatttttagttatccccatacccccataggcaaggccttcccccagagttcctgctttggatccaaagcctgagaataggccattatggaccattggctccctaaatccctccttggcctcttggactgagcccctcagcctttcttcttacccttcagaaaggagagttctctttagatatgttcagggggatccttccatggctggaggtcaccttgactgggggcttggcttctccaaacctgaaacacagtagaagatagagatgtttatgatgcaaaaacctgctctgaggtcagaaagtgctagttttccaaatctctcccattgctgctggctatctggggaaagaagagaaaagcccattccagaggcagaagggaagctcccagccgagggtaaaagttgagacctgtatgcatgtatctctgtatatgtgtatgtaatcaccctcatcaccatccctgagaaaacattttcttttcaagtcagagcacgcctgaaagggtttgtggagagcccagctcaccagggactctggttgccgtagcaaccttccagactgttctctctatcttctgctttgggcatcaagggagaccaggggactacatcttcccagcttctcaaatgggagcacctcccacatcgtggcttaggggctgggagtgccagggcacggatgtgggacttttggaaaatgtggaggaagcagggcctcaaagcttcctgtctggacttttcttcctagtttccccacccagtcattgaagctgcctcatcttactcctgattcttcagaaatttgaatgttaagcaaccagttaaaccaacgtcagtattaattttttcaagctgtcgaggggagcccttagaggggacaacttcttggagtggcggccaagctgggccttaccaggtgtgatcatagtcttaggtatcatggagttcccatctccgcagaggcaggctcttcccagctccacgagaggcggagaattgcaacttcttcctctctgggaacggcctatctagctcctgggaggaatctcaaagatctttcttcttaagacatcgaagaaaaactgagaggctgtagctcgacctagtttctgtgaagaattttgtcaagtgatccctctcggaccctgagcctctttatttggattttgtgccttgagcaccaagagaatatgcactctgggttgcctggacagctggggtggtgattcacaggaagggtccaagccatcactacacctgactcaagccggaaagagctcccagaggacttcctggagctgccagcctcagcctgagatgcgggatattcgtccccaaggagcgaggagggacagctcgccttctttgcaggaaaaatgctggcaggtggtgcaagcaaggacatctatgcatagaattctgacagcagctggaccctcaacttcttcagaagacgagaaccctgcctggcaccgctggcaggcatctggcctgacaccgctctggaggcctcccacaagcagcaaccaagccagaaaaagttgagaccagacccgttgtccctaaagatggggcccagaatgttggggtgaagctgtaggaacagggtgaaagctggtggtgtgagcaaagagaccagctatggggtggtcaggggattccgggaggtgcatgggtatgttgcagacccccccaggacaagggtggctgtggaagaatggcaaataaacacaaggcaaagtctc

SEQ ID NO: 167712 - DNA, 577 bp, Homo sapiens
  Payload ID: 12995
  Gene Symbol: GALNT8
  Gene Name: polypeptide N-acetylgalactosaminyltransferase 8
  ENST ID: ENST00000542998
  CDS Start-End: 1-485
tttatccactcttgaagccactccacaccatcgtgggctatggaagaatgaaaaacctattggatgaaaatgtctgcttggatcagggacccgttccaggcaacacccccatcatgtattactgccatgaattcagctcacagaatgtctactatcacctaactggggagctctatgtgggacaactgattgcagaggccagtgctagtgatcgctgcctgacagaccctggcaaggcggagaagcccaccttagaaccatgctccaaggcagctaagaatagactgcatatatattgggattttaaaccggaaaaatgctggcaggtggtgcaagcaaggacatctatgcatagaattctgacagcagctggaccctcaacttcttcagaagacgagaaccctgcctggcaccgctggcaggcatctggcctgacaccgctctggaggcctcccacaagcagcaaccaagccagaaaaagttgagaccagacccgttgtccctaaagatggggcccagaatgttggggtgaagctgtaggaacagggtgaaagctggtggtgtgagcaaagagacc

SEQ ID NO: 167713 - DNA, 283 bp, Homo sapiens
  Payload ID: 12995
  Gene Symbol: GALNT8
  Gene Name: polypeptide N-acetylgalactosaminyltransferase 8
  ENST ID: ENST00000535354
  CDS Start-End: 1-266
atgaaaatgtctgcttggatcagggacccgttccaggcaacacccccatcatgtattactgccatgaattcagctcacagaatgtctactatcacctaactggggagctctatgtgggacaactgattgcagaggccagtgctagtgatcgctgcctgacagaccctggcaaggcggagaagcccaccttagaaccatgctccaaggcagctaagaatagactgcatatatattgggattttaaaccgcctaccattactaaataaataattatgcattccaa

SEQ ID NO: 167714 - DNA, 2410 bp, Homo sapiens
  Payload ID: 12996
  Gene Symbol: GALNT9
  Gene Name: polypeptide N-acetylgalactosaminyltransferase 9
  ENST ID: ENST00000328957
  CDS Start-End: 1-1812
atggcggtggccaggaagatccgaactttgctgacggtgaacatcctggtgttcgtgggcatcgtcctgttctccgtgtactgccgcctgcagggccgctcccaggagctcgtgcgcatcgtgagcggcgaccgccgggtgcgcagccgacacgccaaggtgggcacgctgggggaccgtgaggccatcctgcagcgcctggaccacctggaggaggtggtctacaaccagctcaacggccttgccaagcccatcggcctggtggaggggccaggaggcctgggccagggtggcttggcggccaccctgcgtgatgacggccaggaggcggaaggcaagtatgaggagtacggctacaacgctcagctcagcgaccgcatctccctcgatcggagcatccccgactaccggcccagaaagtgcagacagatgagctacgcccaggacctgccccaggtctccgtggtcttcatcttcgtcaatgaggcgctgtcggtcatcctgcgctccgtgcacagcgtggtcaaccacacgccctcccagctcctcaaggaggtcatcctggtggacgacaacagtgacaacgtggaactcaagttcaatctggaccagtacgtcaacaagcggtacccaggcctcgtgaagattgtccgcaacagccggcgggaaggactgatccgcgcgcggctgcagggctggaaggcggccaccgccccagtcgtcggcttctttgatgcccacgtcgagttcaacacgggctgggccgagcccgcactgtcgcggatccgagaggaccggcgtcgcatcgtgctgccagccatcgacaacatcaagtacagcacgtttgaggtgcagcagtatgcgaacgccgcccatggctacaactggggcctctggtgcatgtacatcatccccccgcaggactggctggaccgcggcgacgagtcagcacccatcaggaccccagccatgatcggctgctccttcgtagtggaccgcgagtacttcggagacattgggctgctggaccccggcatggaggtgtatggcggcgagaacgtagaactgggcatgagggtgtggcagtgtggcggcagcatggaggtgctgccctgctcccgcgtggcccacatcgagcgcaccaggaagccctacaacaacgacattgactactatgccaagcgcaacgccctgcgcgccgccgaggtgtggatggatgacttcaagtcccacgtgtacatggcctggaacatccccatgtcgaacccaggggtggacttcggggacgtgtctgagaggctggccctgcgtcagaggctgaagtgtcgcagcttcaagtggtacctggagaacgtgtacccggagatgagggtctacaacaacaccctcacgtacggagaggtgagaaacagcaaagccagtgcctactgtctggaccagggagcggaggacggcgaccgggcgatcctctacccctgccacgggatgtcctcccagctggtgcggtacagcgctgatggactgctgcagctggggcctctgggctccacagccttcttgcctgactccaagtgtctggtggatgacggcacgggccgcatgcccaccctgaagaagtgtgaggatgtggcgcggccaacacagcggctgtgggacttcacccagagtggccccattgtgagccgggccacgggccgctgcctggaggtggagatgtccaaagatgccaactttgggctccggctggtggtacagaggtgctcggggcagaagtggatgatcagaaactggatcaaacacgcacggcactgaccccacctccgcccggacccccacagacctcgggaaggcgctgggccgagccagtgtggctgagtgaccggggtgtgcccggcagacacagcaggacagggctctatgtgcggccaggacagcagaggctgaggggccggggtgtggctgagtgaccagggtgtcacccactgcatctggagtacagcttctcctaggacaggcggctctacccgagggagggcgtctggggacagtgatgccaactcaaacacgtgccttctccacggtatctcctggccaggctgctgggacagccgccgcctctgcatgtaccacagccccccacgccccatagggaggccaagccccggaccatgcaccaggctgcaccctggtgtcttccacccgcaggcctcccatgctccaagcagcctcccccagcacttgcggccgctcagccctccaaccaagacctaagtcacacatcataatgcagctccttgtggtctggtaagaggggtgctggaggacatggacagcgacaaacctgaggccgtgtctaggaggctggcacgactgcttcagcagagaccaaataaagagaggattaggcagc

SEQ ID NO: 167715 - DNA, 1727 bp, Homo sapiens
  Payload ID: 12996
  Gene Symbol: GALNT9
  Gene Name: polypeptide N-acetylgalactosaminyltransferase 9
  Uniprot ID: Q9HCQ5
  ENST ID: ENST00000397325
  CDS Start-End: 279-992
ggcgcttctgaagacgggtgggcagacgatggaggacgaggctctgtcccgcccctgcagagcttccttcgttccggccccttccagcgaagggcagggctccgagcagagacaacagacagaaacccagaaaccacctgccacgatgtgaacctgatgcagaaacgcggttcgctccctcgggatgcaaaggccaacttcagcctggcacggcggcgccgcggactccaccatcccggggaaggagccggacccctgtgtggcagtgtggcggcagcatggaggtgctgccctgctcccgcgtggcccacatcgagcgcaccaggaagccctacaacaacgacattgactactatgccaagcgcaacgccctgcgcgccgccgaggtgtggatggatgacttcaagtcccacgtgtacatggcctggaacatccccatgtcgaacccaggggtggacttcggggacgtgtctgagaggctggccctgcgtcagaggctgaagtgtcgcagcttcaagtggtacctggagaacgtgtacccggagatgagggtctacaacaacaccctcacgtacggagaggtgagaaacagcaaagccagtgcctactgtctggaccagggagcggaggacggcgaccgggcgatcctctacccctgccacgggatgtcctcccagctggtgcggtacagcgctgatggactgctgcagctggggcctctgggctccacagccttcttgcctgactccaagtgtctggtggatgacggcacgggccgcatgcccaccctgaagaagtgtgaggatgtggcgcggccaacacagcggctgtgggacttcacccagagtggccccattgtgagccgggccacgggccgctgcctggaggtggagatgtccaaagatgccaactttgggctccggctggtggtacagaggtgctcggggcagaagtggatgatcagaaactggatcaaacacgcacggcactgaccccacctccgcccggacccccacagacctcgggaaggcgctgggccgagccagtgtggctgagtgaccggggtgtgcccggcagacacagcaggacagggctctatgtgcggccaggacagcagaggctgaggggccggggtgtggctgagtgaccagggtgtcacccactgcatctggagtacagcttctcctaggacaggcggctctacccgagggagggcgtctggggacagtgatgccaactcaaacacgtgccttctccacggtatctcctggccaggctgctgggacagccgccgcctctgcatgtaccacagccccccacgccccatagggaggccaagccccggaccatgcaccaggctgcaccctggtgtcttccacccgcaggcctcccatgctccaagcagcctcccccagcacttgcggccgctcagccctccaaccaagacctaagtcacacatcataatgcagctccttgtggtctggtaagaggggtgctggaggacatggacagcgacaaacctgaggccgtgtctaggaggctggcacgactgcttcagcagagaccaaataaagagaggattaggcagcagcactgtgtgtgtcttcctgggagccgagctgggggttggggcccggtcccacctctttcccaggcacctgggccctgccgcagcccagccccttgcctgttttaataaatacagttttattggcgcccagccaca

SEQ ID NO: 167716 - DNA, 1727 bp, Homo sapiens
  Payload ID: 12996
  Gene Symbol: GALNT9
  Gene Name: polypeptide N-acetylgalactosaminyltransferase 9
  ENST ID: ENST00000411988
  CDS Start-End: 1-1129
catcatccccccgcaggactggctggaccgcggcgacgagtcagcacccatcaggaccccagccatgatcggctgctccttcgtagtggaccgcgagtacttcggagacattgggctgctggaccccggcatggaggtgtatggcggcgagaacgtagaactgggcatgagggaaacagaagggttccagcaagataaggtaaattataaacagaataaaagaggaagaaaaacacggcagagagtgaagaggagcaggtccgaggcccatagagcacagccgagccccggggccacgcacggagcccacagccgagccccggggccacgcacggagcccacagctgagccctggggccacgccaggcccacagcagcactgccagcgactggagtgtggcagtgtggcggcagcatggaggtgctgccctgctcccgcgtggcccacatcgagcgcaccaggaagccctacaacaacgacattgactactatgccaagcgcaacgccctgcgcgccgccgaggtgtggatggatgacttcaagtcccacgtgtacatggcctggaacatccccatgtcgaacccaggggtggacttcggggacgtgtctgagaggctggccctgcgtcagaggctgaagtgtcgcagcttcaagtggtacctggagaacgtgtacccggagatgagggtctacaacaacaccctcacgtacggagaggtgagaaacagcaaagccagtgcctactgtctggaccagggagcggaggacggcgaccgggcgatcctctacccctgccacgggatgtcctcccagctggtgcggtacagcgctgatggactgctgcagctggggcctctgggctccacagccttcttgcctgactccaagtgtctggtggatgacggcacgggccgcatgcccaccctgaagaagtgtgaggatgtggcgcggccaacacagcggctgtgggacttcacccagagtggccccattgtgagccgggccacgggccgctgcctggaggtggagatgtccaaagatgccaactttgggctccggctggtggtacagaggtgctcggggcagaagtggatgatcagaaactggatcaaacacgcacggcactgaccccacctccgcccggacccccacagacctcgggaaggcgctgggccgagccagtgtggctgagtgaccggggtgtgcccggcagacacagcaggacagggctctatgtgcggccaggacagcagaggctgaggggccggggtgtggctgagtgaccagggtgtcacccactgcatctggagtacagcttctcctaggacaggcggctctacccgagggagggcgtctggggacagtgatgccaactcaaacacgtgccttctccacggtatctcctggccaggctgctgggacagccgccgcctctgcatgtaccacagccccccacgccccatagggaggccaagccccggaccatgcaccaggctgcaccctggtgtcttccacccgcaggcctcccatgctccaagcagcctcccccagcacttgcggccgctcagccctccaaccaagacctaagtcacacatcataatgcagctccttgtggtctggtaagaggggtgctggaggacatggacagcgacaaacctgaggccgtgtctaggaggctggcacgactgcttcagcagagaccaaataaagagaggattaggcagc

SEQ ID NO: 167717 - DNA, 624 bp, Homo sapiens
  Payload ID: 12996
  Gene Symbol: GALNT9
  Gene Name: polypeptide N-acetylgalactosaminyltransferase 9
  ENST ID: ENST00000542942
  CDS Start-End: 462-624
aaatcccgaccctagtctggaaggcagaaaggaagccccggctcagggggctggaaaaccccaggcttttctcaggcaggttgtcccacagcagagacaacagacagaaacccagaaaccacctgccacgatgtgaacctgatgcagaaacgcggttcgctccctcgggatgcaaaggccaacttcagcctggcacggcggcgccgcggactccaccatcccggggaaggagccggacccctgtgggtgacgtgggactgtggggcgggggtgtccccggctgggctgagctgagcagcgaggaggctctgggttgccggaccggggtcagggagcctggcgttagctgcgtgctgtgtggtcatctcggcgaggagggagcggctccctcctgccccggactctggatctgtcctgcggtgggcggtgtcggagcagccgtgtggcagtgtggcggcagcatggaggtgctgccctgctcccgcgtggcccacatcgagcgcaccaggaagccctacaacaacgacattgactactatgccaagcgcaacgccctgcgcgccgccgaggtgtggatggatgacttcaagtcccacgtgtacatggcctggaacatccccatgt

SEQ ID NO: 167718 - DNA, 1001 bp, Homo sapiens
  Payload ID: 12996
  Gene Symbol: GALNT9
  Gene Name: polypeptide N-acetylgalactosaminyltransferase 9
  Uniprot ID: Q9HCQ5
  ENST ID: ENST00000541995
  CDS Start-End: 254-967
cctagtctggaaggcagaaaggaagccccggctcagggggctggaaaaccccaggcttttctcaggcaggttgtcccacagcagagacaacagacagaaacccagaaaccacctgccacgatgtgaacctgatgcagaaacgcggttcgctccctcgggatgcaaaggccaacttcagcctggcacggcggcgccgcggactccaccatcccggggaaggagccggacccctgtgtggcagtgtggcggcagcatggaggtgctgccctgctcccgcgtggcccacatcgagcgcaccaggaagccctacaacaacgacattgactactatgccaagcgcaacgccctgcgcgccgccgaggtgtggatggatgacttcaagtcccacgtgtacatggcctggaacatccccatgtcgaacccaggggtggacttcggggacgtgtctgagaggctggccctgcgtcagaggctgaagtgtcgcagcttcaagtggtacctggagaacgtgtacccggagatgagggtctacaacaacaccctcacgtacggagaggtgagaaacagcaaagccagtgcctactgtctggaccagggagcggaggacggcgaccgggcgatcctctacccctgccacgggatgtcctcccagctggtgcggtacagcgctgatggactgctgcagctggggcctctgggctccacagccttcttgcctgactccaagtgtctggtggatgacggcacgggccgcatgcccaccctgaagaagtgtgaggatgtggcgcggccaacacagcggctgtgggacttcacccagagtggccccattgtgagccgggccacgggccgctgcctggaggtggagatgtccaaagatgccaactttgggctccggctggtggtacagaggtgctcggggcagaagtggatgatcagaaactggatcaaacacgcacggcactgaccccacctccgcccggacccccacagacctcggg

SEQ ID NO: 167719 - DNA, 897 bp, Homo sapiens
  Payload ID: 12996
  Gene Symbol: GALNT9
  Gene Name: polypeptide N-acetylgalactosaminyltransferase 9
  ENST ID: ENST00000538356
  CDS Start-End: 608-897
gtgttccccagcgtgaggcccgaggacaggattctgtggtgggtggggggaccgagtcaccgtggcctctgtactgggggtagacaaggaggctgaaactgctggaggtcgtcccagaggccagtgtgccaggcgcttctgaagacgggtgggcagacgatggaggacgaggctctgtcccgcccctgcagagcttccttcgttccggccccttccagcgaagggcagggctccgagcagagacaacagacagaaacccagaaaccacctgccacgatgtgaacctgatgcagaaacgcggttcgctccctcgggatgcaaaggccaacttcagcctggcacggcggcgccgcggactccaccatcccggggaaggagccggacccctgtgggtgacgtgggactgtggggcgggggtgtccccggctgggctgagctgagcagcgaggaggctctgggttgccggaccggggtcagggagcctggcgttagctgcgtgctgtgtggtcatctcggcgaggagggagcggctccctcctgccccggactctggatctgtcctgcggtgggcggtgtcggagcagccgtgtggcagtgtggcggcagcatggaggtgctgccctgctcccgcgtggcccacatcgagcgcaccaggaagccctacaacaacgacattgactactatgccaagcgcaacgccctgcgcgccgccgaggtgtggatggatgacttcaagtcccacgtgtacatggcctggaacatccccatgtcgaacccaggggtggacttcggggacgtgtctgagaggctggccctgcgtcagaggctgaagtgtcgcagcttcaagtggtacctggagaacgtgtacccggagatgagggtctacaacaacaccct

SEQ ID NO: 167720 - DNA, 1719 bp, Homo sapiens
  Payload ID: 12997
  Gene Symbol: GALNTL5
  Gene Name: polypeptide N-acetylgalactosaminyltransferase-like 5
  Uniprot ID: Q7Z4T8
  ENST ID: ENST00000392800
  CDS Start-End: 255-1586
gtgagggggactgtactgccctttgagtactactgtgtggccccgcaacccagcacaaccaggtatctgcttggaacccagccaccataaagcctgctagctaaaaaaaattttacatctctcagttcattcggcacagacccctgcctcattcagctgtgactctgcttggaaaattcatcagttacaaagcagccaatgcaattatctcaagggaaattgaaaaatggacctttgaaaatgctagatttacaatgagaaatgccataattcaaggtttattctatgggtccttgacatttgggatctggacagctctgttattcatatatttgcaccataatcatgtgagcagctggcagaagaaaagccaggagcctctgtcagcttggtcccctggaaaaaaagtgcatcagcaaattatctatggctcagagcaaataccaaaacctcatgtaatagtcaaaaggactgatgaagataaagcaaagtctatgttaggtacagattttaaccatacaaacccagaacttcataaagaacttttaaaatatggatttaatgtgattatcagtagaagcttgggcatcgaaagagaagtgccagataccaggagtaaaatgtgtcttcaaaaacattacccagcccgcctcccgactgccagcattgtcatttgcttctataatgaagaatgtaatgccttgtttcagaccatgtccagtgtcacgaacctcacgccacactattttcttgaagaaattattttggtagatgacatgagcaaagttgatgatttgaaagaaaaactagactatcacctggaaacttttcggggaaaggttaaaataataagaaacaaaaagagagaggggctgattcgagcaaggctgattggagcttctcatgcttcaggggatgttctggtgttcctggacagccactgtgaggtgaacagagtatggctggagcccctgctgcatgccattgccaaggaccccaaaatggtggtgtgccccctgatagatgtcattgatgatagaactctggagtataagccctctcctcttgtaaggggaacttttgattggaacctacaatttaaatgggataatgttttctcttatgagatggatggaccagaaggatctactaaaccaatccggtcacctgcaatgtctggaggaatttttgctatacgtcggcattattttaatgaaattggacagtatgacaaggatatggatttttggggaagagaaaatttggaactttcactaaggatctggatgtgtggaggccaactctttataatcccctgctctcgagtaggacatatcagtaagaaacaaactggaaaaccttctacaatcatcagtgctatgacacataactacctaagactggtgcacgtttggctggatgaatataaggagcagttttttcttcgaaagcctggtctgaaatatgtcacctacggaaatattcgcgagcgtgttgagttaaggaaacgactgggttgcaagtcatttcagtggtatttggataatgtcttcccagagttggaggcatctgtgaacagcctgtgaaaggaaaacaaatcactttcattaataaagggttaaaagtctcctagtcattcaacatagtgtcacaagagtgtaagtttggaacatcgtggaattacgtgaaatgcaattaaaaaaatatgaccagacgtga

SEQ ID NO: 167721 - DNA, 1678 bp, Homo sapiens
  Payload ID: 12997
  Gene Symbol: GALNTL5
  Gene Name: polypeptide N-acetylgalactosaminyltransferase-like 5
  Uniprot ID: Q7Z4T8
  ENST ID: ENST00000431418
  CDS Start-End: 222-1553
gatgtcatcaggctttgtgagggggactgtactgccctttgagtactactgtgtggccccgcaacccagcacaaccagcattgaattctgcatcttttagtgaagaaaataactgaacatggttttcttctgaagacacaaagtccaaaggccaatcacacacctcttacatcgatctcttggaaattgaaaaatggacctttgaaaatgctagatttacaatgagaaatgccataattcaaggtttattctatgggtccttgacatttgggatctggacagctctgttattcatatatttgcaccataatcatgtgagcagctggcagaagaaaagccaggagcctctgtcagcttggtcccctggaaaaaaagtgcatcagcaaattatctatggctcagagcaaataccaaaacctcatgtaatagtcaaaaggactgatgaagataaagcaaagtctatgttaggtacagattttaaccatacaaacccagaacttcataaagaacttttaaaatatggatttaatgtgattatcagtagaagcttgggcatcgaaagagaagtgccagataccaggagtaaaatgtgtcttcaaaaacattacccagcccgcctcccgactgccagcattgtcatttgcttctataatgaagaatgtaatgccttgtttcagaccatgtccagtgtcacgaacctcacgccacactattttcttgaagaaattattttggtagatgacatgagcaaagttgatgatttgaaagaaaaactagactatcacctggaaacttttcggggaaaggttaaaataataagaaacaaaaagagagaggggctgattcgagcaaggctgattggagcttctcatgcttcaggggatgttctggtgttcctggacagccactgtgaggtgaacagagtatggctggagcccctgctgcatgccattgccaaggaccccaaaatggtggtgtgccccctgatagatgtcattgatgatagaactctggagtataagccctctcctcttgtaaggggaacttttgattggaacctacaatttaaatgggataatgttttctcttatgagatggatggaccagaaggatctactaaaccaatccggtcacctgcaatgtctggaggaatttttgctatacgtcggcattattttaatgaaattggacagtatgacaaggatatggatttttggggaagagaaaatttggaactttcactaaggatctggatgtgtggaggccaactctttataatcccctgctctcgagtaggacatatcagtaagaaacaaactggaaaaccttctacaatcatcagtgctatgacacataactacctaagactggtgcacgtttggctggatgaatataaggagcagttttttcttcgaaagcctggtctgaaatatgtcacctacggaaatattcgcgagcgtgttgagttaaggaaacgactgggttgcaagtcatttcagtggtatttggataatgtcttcccagagttggaggcatctgtgaacagcctgtgaaaggaaaacaaatcactttcattaataaagggttaaaagtctcctagtcattcaacatagtgtcacaagagtgtaagtttggaacatcgtggaattacgtgaaatgcaattaaaaaaatatgacc

SEQ ID NO: 167722 - DNA, 2272 bp, Homo sapiens
  Payload ID: 12997
  Gene Symbol: GALNTL5
  Gene Name: polypeptide N-acetylgalactosaminyltransferase-like 5
  ENST ID: ENST00000416269
  CDS Start-End: 328-720
actgtgtggccccgcaacccagcacaaccaggtatctgcttggaacccagccaccataaagcctgctagctaaaaaaaattttacatctctcagttcattcggcacagacccctgcctcattcagctgtgactctgcttggaaaattcatcagttacaaagcagccaatgcaattatctcaaggcattgaattctgcatcttttagtgaagaaaataactgaacatggttttcttctgaagacacaaagtccaaaggccaatcacacacctcttacatcgatctcttggaaattgaaaaatggacctttgaaaatgctagatttacaatgagaaatgccataattcaaggtttattctatgggtccttgacatttgggatctggacagctctgttattcatatatttgcaccataatcatgtgagcagctggcagaagaaaagccaggagcctctgtcagcttggtcccctggaaaaaaagtgcatcagcaaattatctatggctcagagcaaataccaaaacctcatgtaatagtcaaaaggactgatgaagataaagcaaagtctatgttaggtacagattttaaccatacaaacccagaacttcataaagaacttttaaaatatggatttaatgtgattatcagtagaagcttgggcatcgaaagagaagtgccagataccaggagtaaaatatgtactgtcaccttattaccataattatcagttgaaggagtaaagagtcaaaaagatgcaaataaggagaagtgtttgaacgagatgacacaacatccaaggcatttagatggatggttttcttcatattgcttctgcctgcaggtgtcttcaaaaacattacccagcccgcctcccgactgccagcattgtcatttgcttctataatgaagaatgtaatgccttgtttcagaccatgtccagtgtcacgaacctcacgccacactattttcttgaagaaattattttggtagatgacatgagcaaagttgctatgaggagctattaagggcttaatgcaggaaaatgagatgatctaggaattccatgaaagaagcggaatcagaccaactgcagttaaggcctggctcatggcgtcccacttttccctcctcttgctgcctcctacatcctggatgtgagtgaggtgtctggagatctttgagctgagatgctgcccaggcctgcaagtgcagctatgcagcctgtatccctgcctctttctaaaaacaaggaagaagatccctccttctgctgggattaccatgaacctgttcctgttcaacctgcccctgacccagattgctgggacttaggaatttagacctctgagatgatttgaaagaaaaactagactatcacctggaaacttttcggggaaaggttaaaataataagaaacaaaaagagagaggggctgattcgagcaaggctgattggagcttctcatgcttcaggggatgttctggtgttcctggacagccactgtgaggtgaacagagtatggctggagcccctgctgcatgccattgccaaggaccccaaaatggtggtgtgccccctgatagatgtcattgatgatagaactctggagtataagccctctcctcttgtaaggggaacttttgattggaacctacaatttaaatgggataatgttttctcttatgagatggatggaccagaaggatctactaaaccaatccggtcacctgcaatgtctggaggaatttttgctatacgtcggcattattttaatgaaattggacagtatgacaaggatatggatttttggggaagagaaaatttggaactttcactaaggatctggatgtgtggaggccaactctttataatcccctgctctcgagtaggacatatcagtaagaaacaaactggaaaaccttctacaatcatcagtgctatgacacataactacctaagactggtgcacgtttggctggatgaatataaggagcagttttttcttcgaaagcctggtctgaaatatgtcacctacggaaatattcgcgagcgtgttgagttaaggaaacgactgggttgcaagtcatttcagtggtatttggataatgtcttcccagagttggaggcatctgtgaacagcctgtgaaaggaaaacaaatcactttcattaataaagggttaaaagtctcctagtcattcaacatagtgtcacaagagtgtaagtttggaacatcgtggaattacgtgaaatgcaattaaaaaaatatgaccag

SEQ ID NO: 167723 - DNA, 1427 bp, Homo sapiens
  Payload ID: 12997
  Gene Symbol: GALNTL5
  Gene Name: polypeptide N-acetylgalactosaminyltransferase-like 5
  Uniprot ID: Q7Z4T8
  ENST ID: ENST00000448366
  CDS Start-End: 345-746
actgccctttgagtactactgtgtggccccgcaacccagcacaaccaggtatctgcttggaacccagccaccataaagcctgctagctaaaaaaaattttacatctctcagttcattcggcacagacccctgcctcattcagctgtgactctgcttggaaaattcatcagttacaaagcagccaatgcaattatctcaaggcattgaattctgcatcttttagtgaagaaaataactgaacatggttttcttctgaagacacaaagtccaaaggccaatcacacacctcttacatcgatctcttggaaattgaaaaatggacctttgaaaatgctagatttacaatgagaaatgccataattcaaggtttattctatgggtccttgacatttgggatctggacagctctgttattcatatatttgcaccataatcatgtgagcagctggcagaagaaaagccaggagcctctgtcagcttggtcccctggaaaaaaagtgcatcagcaaattatctatggctcagagcaaataccaaaacctcatgtaatagtcaaaaggactgatgaagataaagcaaagtctatgttaggtacagattttaaccatacaaacccagaacttcataaagaacttttaaaatatggatttaatgtgattatcagtagaagcttgggcatcgaaagagaagtgccagataccaggagtaaaatgggatgttctggtgttcctggacagccactgtgaggtgaacagagtatggctggagcccctgctgcatgccattgccaaggaccccaaaatggtggtgtgccccctgatagatgtcattgatgatagaactctggagtataagccctctcctcttgtaaggggaacttttgattggaacctacaatttaaatgggataatgttttctcttatgagatggatggaccagaaggatctactaaaccaatccggtcacctgcaatgtctggaggaatttttgctatacgtcggcattattttaatgaaattggacagtatgacaaggatatggatttttggggaagagaaaatttggaactttcactaaggatctggatgtgtggaggccaactctttataatcccctgctctcgagtaggacatatcagtaagaaacaaactggaaaaccttctacaatcatcagtgctatgacacataactacctaagactggtgcacgtttggctggatgaatataaggagcagttttttcttcgaaagcctggtctgaaatatgtcacctacggaaatattcgcgagcgtgttgagttaaggaaacgactgggttgcaagtcatttcagtggtatttggataatgtcttcccagagttggaggcatctgtgaacagcctgtgaaaggaaaacaaatcactttcattaataaagggttaaaagtc

SEQ ID NO: 167724 - DNA, 1808 bp, Homo sapiens
  Payload ID: 12997
  Gene Symbol: GALNTL5
  Gene Name: polypeptide N-acetylgalactosaminyltransferase-like 5
  ENST ID: ENST00000426341
  CDS Start-End: 332-724
tactactgtgtggccccgcaacccagcacaaccaggtatctgcttggaacccagccaccataaagcctgctagctaaaaaaaattttacatctctcagttcattcggcacagacccctgcctcattcagctgtgactctgcttggaaaattcatcagttacaaagcagccaatgcaattatctcaaggcattgaattctgcatcttttagtgaagaaaataactgaacatggttttcttctgaagacacaaagtccaaaggccaatcacacacctcttacatcgatctcttggaaattgaaaaatggacctttgaaaatgctagatttacaatgagaaatgccataattcaaggtttattctatgggtccttgacatttgggatctggacagctctgttattcatatatttgcaccataatcatgtgagcagctggcagaagaaaagccaggagcctctgtcagcttggtcccctggaaaaaaagtgcatcagcaaattatctatggctcagagcaaataccaaaacctcatgtaatagtcaaaaggactgatgaagataaagcaaagtctatgttaggtacagattttaaccatacaaacccagaacttcataaagaacttttaaaatatggatttaatgtgattatcagtagaagcttgggcatcgaaagagaagtgccagataccaggagtaaaatatgtactgtcaccttattaccataattatcagttgaaggagtaaagagtcaaaaagatgcaaataaggagaagtgtttgaacgagatgacacaacatccaaggcatttagatggatggttttcttcatattgcttctgcctgcaggtgtcttcaaaaacattacccagcccgcctcccgactgccagcattgtcatttgcttctataatgaagaatgtaatgccttgtttcagaccatgtccagtgtcacgaacctcacgccacactattttcttgaagaaattattttggtagatgacatgagcaaagttgatgatttgaaagaaaaactagactatcacctggaaacttttcggggaaaggttaaaataataagaaacaaaaagagagaggggctgattcgagcaaggctgattggagcttctcatgcttcaggggatgttctggtgttcctggacagccactgtgaggtgaacagagtatggctggagcccctgctgcatgccattgccaaggaccccaaaatggtggtgtgccccctgatagatgtcattgatgatagaactctggagtataagccctctcctcttgtaaggggaacttttgattggaacctacaatttaaatgggataatgttttctcttatgagatggatggaccagaaggatctactaaaccaatccggtcacctgcaatgtctggaggaatttttgctatacgtcggcattattttaatgaaattggacagtatgacaaggatatggatttttggggaagagaaaatttggaactttcactaaggatctggatgtgtggaggccaactctttataatcccctgctctcgagtaggacatatcagtaagaaacaaactggaaaaccttctacaatcatcagtgctatgacacataactacctaagactggtgcacgtttggctggatgaatataaggagcagttttttcttcgaaagcctggtctgaaatatgtcacctacggaaatattcgcgagcgtgttgagttaaggaaacgactgggttgcaagtcatttcagtggtatttggataatgtcttcccagagttggaggcatctgtgaacagcctgtga

SEQ ID NO: 167725 - DNA, 1344 bp, Homo sapiens
  Payload ID: 12997
  Gene Symbol: GALNTL5
  Gene Name: polypeptide N-acetylgalactosaminyltransferase-like 5
  Uniprot ID: Q7Z4T8
  ENST ID: ENST00000416062
  CDS Start-End: 248-649
ggactgtactgccctttgagtactactgtgtggccccgcaacccagcacaaccaggtatctgcttggaacccagccaccataaagcctgctagctaaaaaaaattttacatctctcagttcattcggcacagacccctgcctcattcagctgtgactctgcttggaaaattcatcagttacaaagcagccaatgcaattatctcaagggaaattgaaaaatggacctttgaaaatgctagatttacaatgagaaatgccataattcaaggtttattctatgggtccttgacatttgggatctggacagctctgttattcatatatttgcaccataatcatgtgagcagctggcagaagaaaagccaggagcctctgtcagcttggtcccctggaaaaaaagtgcatcagcaaattatctatggctcagagcaaataccaaaacctcatgtaatagtcaaaaggactgatgaagataaagcaaagtctatgttaggtacagattttaaccatacaaacccagaacttcataaagaacttttaaaatatggatttaatgtgattatcagtagaagcttgggcatcgaaagagaagtgccagataccaggagtaaaatgggatgttctggtgttcctggacagccactgtgaggtgaacagagtatggctggagcccctgctgcatgccattgccaaggaccccaaaatggtggtgtgccccctgatagatgtcattgatgatagaactctggagtataagccctctcctcttgtaaggggaacttttgattggaacctacaatttaaatgggataatgttttctcttatgagatggatggaccagaaggatctactaaaccaatccggtcacctgcaatgtctggaggaatttttgctatacgtcggcattattttaatgaaattggacagtatgacaaggatatggatttttggggaagagaaaatttggaactttcactaaggatctggatgtgtggaggccaactctttataatcccctgctctcgagtaggacatatcagtaagaaacaaactggaaaaccttctacaatcatcagtgctatgacacataactacctaagactggtgcacgtttggctggatgaatataaggagcagttttttcttcgaaagcctggtctgaaatatgtcacctacggaaatattcgcgagcgtgttgagttaaggaaacgactgggttgcaagtcatttcagtggtatttggataatgtcttcccagagttggaggcatctgtgaacagcctgtgaaaggaaaacaaatcactttcattaataaagggttaaaagtctcctagtcattcaa

SEQ ID NO: 167726 - DNA, 2097 bp, Homo sapiens
  Payload ID: 12997
  Gene Symbol: GALNTL5
  Gene Name: polypeptide N-acetylgalactosaminyltransferase-like 5
  ENST ID: ENST00000414073
  CDS Start-End: 305-697
acaaccaggtatctgcttggaacccagccaccataaagcctgctagctaaaaaaaattttacatctctcagttcattcggcacagacccctgcctcattcagctgtgactctgcttggaaaattcatcagttacaaagcagccaatgcaattatctcaaggcattgaattctgcatcttttagtgaagaaaataactgaacatggttttcttctgaagacacaaagtccaaaggccaatcacacacctcttacatcgatctcttggaaattgaaaaatggacctttgaaaatgctagatttacaatgagaaatgccataattcaaggtttattctatgggtccttgacatttgggatctggacagctctgttattcatatatttgcaccataatcatgtgagcagctggcagaagaaaagccaggagcctctgtcagcttggtcccctggaaaaaaagtgcatcagcaaattatctatggctcagagcaaataccaaaacctcatgtaatagtcaaaaggactgatgaagataaagcaaagtctatgttaggtacagattttaaccatacaaacccagaacttcataaagaacttttaaaatatggatttaatgtgattatcagtagaagcttgggcatcgaaagagaagtgccagataccaggagtaaaatatgtactgtcaccttattaccataattatcagttgaaggagtaaagagtcaaaaagatgcaaataaggagaagtgtttgaacgagatgacacaacatccaaggcatttagatggatggttttcttcatattgcttctgcctgcaggtgtcttcaaaaacattacccagcccgcctcccgactgccagcattgtcatttgcttctataatgaagaatgtaatgccttgtttcagaccatgtccagtgtcacgaacctcacgccacactattttcttgaagaaattattttggtagatgacatgagcaaagttgctatgaggagctattaagggcttaatgcaggaaaatgagatgatctaggaattccatgaaagaagcggaatcagaccaactgcagttaagaagaagatccctccttctgctgggattaccatgaacctgttcctgttcaacctgcccctgacccagattgctgggacttaggaatttagacctctgagatgatttgaaagaaaaactagactatcacctggaaacttttcggggaaaggttaaaataataagaaacaaaaagagagaggggctgattcgagcaaggctgattggagcttctcatgcttcaggggatgttctggtgttcctggacagccactgtgaggtgaacagagtatggctggagcccctgctgcatgccattgccaaggaccccaaaatggtggtgtgccccctgatagatgtcattgatgatagaactctggagtataagccctctcctcttgtaaggggaacttttgattggaacctacaatttaaatgggataatgttttctcttatgagatggatggaccagaaggatctactaaaccaatccggtcacctgcaatgtctggaggaatttttgctatacgtcggcattattttaatgaaattggacagtatgacaaggatatggatttttggggaagagaaaatttggaactttcactaaggatctggatgtgtggaggccaactctttataatcccctgctctcgagtaggacatatcagtaagaaacaaactggaaaaccttctacaatcatcagtgctatgacacataactacctaagactggtgcacgtttggctggatgaatataaggagcagttttttcttcgaaagcctggtctgaaatatgtcacctacggaaatattcgcgagcgtgttgagttaaggaaacgactgggttgcaagtcatttcagtggtatttggataatgtcttcccagagttggaggcatctgtgaacagcctgtgaaaggaaaacaaatcactttcattaataaagggttaaaagtctcctagtcattcaacatagtgtcacaagagtgtaagtttggaacatcgtggaattacgtgaaatgcaattaaaaaaatatgaccaga

SEQ ID NO: 167727 - DNA, 1763 bp, Homo sapiens
  Payload ID: 12997
  Gene Symbol: GALNTL5
  Gene Name: polypeptide N-acetylgalactosaminyltransferase-like 5
  Uniprot ID: Q7Z4T8
  ENST ID: ENST00000616416
  CDS Start-End: 307-1638
gcacaaccaggtatctgcttggaacccagccaccataaagcctgctagctaaaaaaaattttacatctctcagttcattcggcacagacccctgcctcattcagctgtgactctgcttggaaaattcatcagttacaaagcagccaatgcaattatctcaaggcattgaattctgcatcttttagtgaagaaaataactgaacatggttttcttctgaagacacaaagtccaaaggccaatcacacacctcttacatcgatctcttggaaattgaaaaatggacctttgaaaatgctagatttacaatgagaaatgccataattcaaggtttattctatgggtccttgacatttgggatctggacagctctgttattcatatatttgcaccataatcatgtgagcagctggcagaagaaaagccaggagcctctgtcagcttggtcccctggaaaaaaagtgcatcagcaaattatctatggctcagagcaaataccaaaacctcatgtaatagtcaaaaggactgatgaagataaagcaaagtctatgttaggtacagattttaaccatacaaacccagaacttcataaagaacttttaaaatatggatttaatgtgattatcagtagaagcttgggcatcgaaagagaagtgccagataccaggagtaaaatgtgtcttcaaaaacattacccagcccgcctcccgactgccagcattgtcatttgcttctataatgaagaatgtaatgccttgtttcagaccatgtccagtgtcacgaacctcacgccacactattttcttgaagaaattattttggtagatgacatgagcaaagttgatgatttgaaagaaaaactagactatcacctggaaacttttcggggaaaggttaaaataataagaaacaaaaagagagaggggctgattcgagcaaggctgattggagcttctcatgcttcaggggatgttctggtgttcctggacagccactgtgaggtgaacagagtatggctggagcccctgctgcatgccattgccaaggaccccaaaatggtggtgtgccccctgatagatgtcattgatgatagaactctggagtataagccctctcctcttgtaaggggaacttttgattggaacctacaatttaaatgggataatgttttctcttatgagatggatggaccagaaggatctactaaaccaatccggtcacctgcaatgtctggaggaatttttgctatacgtcggcattattttaatgaaattggacagtatgacaaggatatggatttttggggaagagaaaatttggaactttcactaaggatctggatgtgtggaggccaactctttataatcccctgctctcgagtaggacatatcagtaagaaacaaactggaaaaccttctacaatcatcagtgctatgacacataactacctaagactggtgcacgtttggctggatgaatataaggagcagttttttcttcgaaagcctggtctgaaatatgtcacctacggaaatattcgcgagcgtgttgagttaaggaaacgactgggttgcaagtcatttcagtggtatttggataatgtcttcccagagttggaggcatctgtgaacagcctgtgaaaggaaaacaaatcactttcattaataaagggttaaaagtctcctagtcattcaacatagtgtcacaagagtgtaagtttggaacatcgtggaattacgtgaaatgcaattaaaaaaatatgacc

SEQ ID NO: 167728 - DNA, 3922 bp, Homo sapiens
  Payload ID: 12998
  Gene Symbol: GALNTL6
  Gene Name: polypeptide N-acetylgalactosaminyltransferase-like 6
  Uniprot ID: Q49A17
  ENST ID: ENST00000506823
  CDS Start-End: 658-2463
gcagcgccctcgtccgcttccaagcccagcacagacttcggtttctccgcctccatcccctttacgagaagaggagatcaaaaaatattgccctttaggtgctcgtgatggtcctgtgggttcgttcagttgccagaaaagaatggtaacatgaacagcggagcgtgagagcgtcaccgggggaagggacgagattgatgggcagagcgctcacttctcagaggatcgcattccgaggaccgcgcgaggaagggacgtcgcggcgccaccacttcctggctggactccgctgacatctgtagcctcctttccaccaggttcccggggctcccagccgctgcctgcagaggagcgtgtagacagcgcgcgagggtccggcacttcgtggacctccatccgaaccggagttctgcccggatcccgagtccctggatcccggtggagcccgccggcaagctggctccggagggagttgaacttgagttcagatggccaactccctctgaatcctgcagattggtgctgagcacgcaacaaaagtttgtagcttctcagtttctggtgcttcgcaggggagaggaaaggaatttgacattaaacacaagaagcagtcagggagccatctcctttaacttttcttctctgttaccatttgcaatgaagaggaaacagaagagatttctgcagatgactttgttgttcacggtggctttaattttcctgcctaacgttggtctctggtctctgtacaaggataagcacctggtgaagtcagcggagcccggggagcagcagacatttccactgggcctgggagatgggcaattctattcatggacagatggtttgagaagaaaggactggcatgactatgaaagcattcagaaagaggctatgcgctcagggaaaggtgaacatgggaaaccttacccccttactgaagaggaccatgatgactcagcttacagggaaaatggttttaatattttcgtcagcaacaatattgctctagagaggtctctgccagatattcgtcatgctaactgtaagcataagatgtatctggaaaggctgccaaacaccagcatcattatcccatttcataatgaaggttggacttcactcctgcggaccatacacagtataattaaccgaaccccagggagtctgatagcagaaatcattctagtagatgacttcagtgagagagaacacctgaaggataaattggaagaatacatggcccgattttccaaagtgaggattgttcgcaccaagaaaagagaaggactcatccggacccgtctcctgggggcatctatggccagaggagaagtcctgacattcctggactcccactgcgaggtcaatgtgaactggctgcccccactcctcaaccaaattgcactaaaccacaaaaccatcgtgtgtcccatgatcgatgtcattgaccacaatcacttcgggtatgaggcacaagctggggatgccatgcgaggagccttcgactgggaaatgtactacaaaagaatccccatccctccagagctccagagggcagatcccagcgacccttttgagtctcctgttatggctggaggtctctttgctgtggatcggaaatggttttgggaattgggtggctatgatccaggtttagaaatctggggaggagaacagtatgaaatctcttttaaggtttggatgtgtggaggagaaatgtttgatgttccatgttctagagttggtcatatctacaggaagtacgttccatacaaagttccatctgggacaagcctggcaagaaacctgaagcgggtagctgagacctggatggatgaatttgccgagtacatttaccagcggcggccggagtacaggcatctctccacgggggacatctctgcccagaaggagctgcgcaagcagctcaagtgcaaggacttcaaatggttcatggctgctgtggcctgggacgtgcctaaatactaccctccagtggagcccccgcctgctgcctggggggagatccgaaatgtggcagcaaatctctgtgtggacagcaagcatggagccaccggaacagagctgaggctggacatctgtgtcaaggatggttctgaaagaacatggtctcatgaacagctttttacctttggatggagagaagatattcgacccggtgagccactgcatacccggaaattctgctttgatgcgatctcacacaacagccccgttacactctatgactgtcatggcatgaaggggaaccagctctggggataccggaaggacagaacattattccatcctgtgagcaacagctgcatggattgcaaccccgcagagaagaagattttcatggccagatgtgaccctctctctgagactcagcagtggatttttgaacacattaatatgactgttttagaaaaatttaaccaccatgccaactcctagaaagaagaaaggaagaaagagtgattacctacaggttataaattaaattttagccagcatctgggtcgaaggagtcaggaataacatttcctcgatccaggaaggctggtttaaaaatttgcaaatgccatgtcaaagtaggttgttttgaagaacttcctgcatctgaagaacttggctgagaatctcaccagctgcttctgagaactcgagactagcagttcccttgctggccaagggcaaagataatttagggacttttcaaaacaactgctgagctaataaatcctagcatttctcaggtcaaatcctgcagtagtgagtagctatgaatggatcctattaactgggtgggaggggggtgaaaatggagtgcatgactgctctgacaacctgaggatatcacaggtttagaactagccaagcttaaggggtgagctgtactctttggtgccattctctgactaagaatgggttcagcaggtttaacccttaaaagtgctgcagatgatttcagagtgctcacactattctgttttttttatttttatttttaaatgagggtgcaatatctaatgtaagacttaaattacataatgaaatggacatccagtgttcccattctttcgtttatatttgccatttttttttcagagcaaagtttcttttttatgaaagttcatgctccatgaatccactgaatttctaattcagtgcccttctatgaatccagttaaaaacaaaagcaaaagcaaaaatctatgctatcaagttactccaaagaaagatttcacagaagcagcaaaaccatataagatttaggagagggacttccctgggaaatctatttttacttttctattatttttaaaatcttaaaagtctgatatttgtccagtcataatttttattaagcaaggaaatggagtgagtttgatgtaatttgtttaggagattcttaaacccaaataaatctacactccaagtgatatgtgaaaatggcttagttcacttcaattctgtttagtcagtggtgggagcttagaagtggttttatttgttcgtttgtttgggttttgcttttgttttttatttttttcttgttttttttttgtagtgttgaattaatgatgttcttttatttggaagctcataaaaggaattaccattaataaagtgtttctgacaccattttctgttaatgggacaatatttcggggatgaagaaaggaatgctccgaaaactaaatggaacacttaatccttaaagcaattttttactgttcaataatatcacattgggggaagaaaacacaggtatcaaggtggttcttgggaaaaaagaatcatgtttattatatatctctcaagtttttttggtataaaaatgttttaactttgctttctttttggtttttgtttgaagttggttttcctgttaataaaaatttatataaca

SEQ ID NO: 167729 - DNA, 1755 bp, Homo sapiens
  Payload ID: 12998
  Gene Symbol: GALNTL6
  Gene Name: polypeptide N-acetylgalactosaminyltransferase-like 6
  Uniprot ID: Q49A17
  ENST ID: ENST00000508122
  CDS Start-End: 1-1755
atgagagccaagttcagagccggagctggccaccagaggaatccaagcattagtgcagaccacggagtgcatgagctggtttaccagacatttccactgggcctgggagatgggcaattctattcatggacagatggtttgagaagaaaggactggcatgactatgaaagcattcagaaagaggctatgcgctcagggaaaggtgaacatgggaaaccttacccccttactgaagaggaccatgatgactcagcttacagggaaaatggttttaatattttcgtcagcaacaatattgctctagagaggtctctgccagatattcgtcatgctaactgtaagcataagatgtatctggaaaggctgccaaacaccagcatcattatcccatttcataatgaaggttggacttcactcctgcggaccatacacagtataattaaccgaaccccagggagtctgatagcagaaatcattctagtagatgacttcagtgagagagaacacctgaaggataaattggaagaatacatggcccgattttccaaagtgaggattgttcgcaccaagaaaagagaaggactcatccggacccgtctcctgggggcatctatggccagaggagaagtcctgacattcctggactcccactgcgaggtcaatgtgaactggctgcccccactcctcaaccaaattgcactaaaccacaaaaccatcgtgtgtcccatgatcgatgtcattgaccacaatcacttcgggtatgaggcacaagctggggatgccatgcgaggagccttcgactgggaaatgtactacaaaagaatccccatccctccagagctccagagggcagatcccagcgacccttttgagtctcctgttatggctggaggtctctttgctgtggatcggaaatggttttgggaattgggtggctatgatccaggtttagaaatctggggaggagaacagtatgaaatctcttttaaggtttggatgtgtggaggagaaatgtttgatgttccatgttctagagttggtcatatctacaggaagtacgttccatacaaagttccatctgggacaagcctggcaagaaacctgaagcgggtagctgagacctggatggatgaatttgccgagtacatttaccagcggcggccggagtacaggcatctctccacgggggacatctctgcccagaaggagctgcgcaagcagctcaagtgcaaggacttcaaatggttcatggctgctgtggcctgggacgtgcctaaatactaccctccagtggagcccccgcctgctgcctggggggagatccgaaatgtggcagcaaatctctgtgtggacagcaagcatggagccaccggaacagagctgaggctggacatctgtgtcaaggatggttctgaaagaacatggtctcatgaacagctttttacctttggatggagagaagatattcgacccggtgagccactgcatacccggaaattctgctttgatgcgatctcacacaacagccccgttacactctatgactgtcatggcatgaaggggaaccagctctggggataccggaaggacagaacattattccatcctgtgagcaacagctgcatggattgcaaccccgcagagaagaagattttcatggccagatgtgaccctctctctgagactcagcagtggatttttgaacacattaatatgactgttttagaaaaatttaaccaccatgccaactcctag

SEQ ID NO: 167730 - DNA, 2905 bp, Homo sapiens
  Payload ID: 12998
  Gene Symbol: GALNTL6
  Gene Name: polypeptide N-acetylgalactosaminyltransferase-like 6
  ENST ID: ENST00000511251
  CDS Start-End: 1907-2092
tttctcaagtgagacactagagagagtagaaagggaggaagagatagggcgagaagaaaaggagggagggacagagatgaggacgagaaagaagaaaaaagggaaagagaaaataccgtctgaagtccacaggcttatctatcccaagcatgtctaccccacgcatgtgggcatcatatccaggttgtaacaaagaggtgaccatggcgtttatttttggctccagacaggcggattcagcctgcattgcatgcatgcatgtctgtcacctcatctaagtccccattccttccggagttgtgagctccagatccaagagtgcccagtgcacggtgctgggcacgctgtcccttggcgaggctgccacaggttcctgagtgtgcggtcaggggcgttggtgcattgatacgttaggcggagggaggagtaccatctgccagagtcttatctcgagtcccacgttttctggccatcgcggaggagtgtgcgaggacaggtagccctcgcagtgacaaggcgcgcggagtgcggtcgtgcaaggcgggggaggagcggggtggccctgccgaatcttaaccggggccccgggtgtttgcagacccaaataaagccgccttgggtctccacggtgtcctccagaagctgctgcctgagaactctgagcctcagctctgtcttgcttcgggatcctcttcctcctccttccccaccccctacctggcctgaacggcggaacgcgcggctcgggggatcccctctccctgggaccggccctgtcccgggtcgcctccacctcccgcagccgccgcgccccggctcgccgcgctcccgccggcaccatggaggaattcctgggacaaccgcctgcagccggcgacttttccccaggaatctctggcctggcgccctttgggtgagatgacggggtgctggcatccctgtcggtcccagattacccggaaaagccctggcaggtaaagagaggacccgcgcaggctgggagctcccactcctcctccagcgtcacgctcgccctccgccgctgcctcgcgtccgggtctgtttatatagcgtctggaggccgggaggcattgcccacccccgccaggcggcccgccctcccctcctgggctccgggctgccgcacgtggcagacaccagcgacgtctccgcggaaggcaggcgccggggagtggggcgcgggcgaccgtgtgcagccgcggcgcatctccgccttccgctcctcctcgcagcgccctcgtccgcttccaagcccagcacagacttcggtttctccgcctccatcccctttacgagaagaggagatcaaaaaatattgccctttaggtgctcgtgatggtcctgtgggttcgttcagttgccagaaaagaatggtaacatgaacagcggagcgtgagagcgtcaccgggggaagggacgagattgatgggcagagcgctcacttctcagaggatcgcattccgaggaccgcgcgaggaagggacgtcgcggcgccaccacttcctggctggactccgctgacatctgtagcctcctttccaccaggttcccggggctcccagccgctgcctgcagaggagcgtgtagacagcgcgcgagggtccggcacttcgtggacctccatccgaaccggagttctgcccggatcccgagtccctggatcccggtggagcccgccggcaagctggctccggagggagttgaacttgagttcagatggccaactccctctgaatcctgcagattggtgctgagcacgcaacaaaagtttgtagcttctcagtttctggtgcttcgcaggggagaggaaaggaatttgacattaaacacaagaagcagtcagggagccatctcctttaacttttcttctctgttaccatttgcaatgaagaggaaacagaagagatttctgcagatgactttgttgttcacggtggctttaattttcctgcctaacgttggtctctggtctctgtacaaggataagcacctggtgaagtcagcggagcccggggagcagcaggtaagtgccacccagagaaagatcacacaaggattggtaaggcagtgatcctcgcgcggggactcgagaaagccggtgtgggatcgccttgggttttcccccaagtcttgacagagctgattattacaagactctagagactttggggtttaagcaagtagatgttttaagattgcagccagtaacatcgtgacatgtacaactagtaaagaaggataagacaggtcaagaagaagagaagataatctttcaccattggtcttaggttgattttgacttgaggtggatgaaaggtaactgttcagctatggaggtgggagtgggtttggtgcaagtttaatgacaaggataggtttttgctttccatttggcatgcatgtctatgttcaggtgaattgggccaactaaatcattaagattgtgaagtggttctttaaaaatcaagctatggttttcagtattttggttgtaaattttgcttagcaacagctttttaccctgtcgaaacttaaagtctctctttcgtctcccctgttgctaaggtgctgccatggggcacacaggcagagttattaaggacgttcattccgtttcacagtcgcttgataacagtatgttgctaacagcttgctgtcatattggaaacacccatactaaagatatgtagtataatatgttttctttctacttaatatgtaactcattagtatgtatatacctcatgacttaacatggaccaaaataactgtgttccctggtgaacaataatgcaaaatagacttcccaaaatgttgatgaaaatcaatgttgtcgaattccttgtttgttaataaataaaatagcttccgtaattaaacgttt

SEQ ID NO: 167731 - DNA, 1254 bp, Homo sapiens
  Payload ID: 12998
  Gene Symbol: GALNTL6
  Gene Name: polypeptide N-acetylgalactosaminyltransferase-like 6
  ENST ID: ENST00000616459
  CDS Start-End: 1-1254
gaacacctgaaggataaattggaagaatacatggcccgattttccaaagtgaggattgttcgcaccaagaaaagagaaggactcatccggacccgtctcctgggggcatctatggccagaggagaagtcctgacattcctggactcccactgcgaggtcaatgtgaactggctgcccccactcctcaaccaaattgcactaaaccacaaaaccatcgtgtgtcccatgatcgatgtcattgaccacaatcacttcgggtatgaggcacaagctggggatgccatgcgaggagccttcgactgggaaatgtactacaaaagaatccccatccctccagagctccagagggcagatcccagcgacccttttgagtctcctgttatggctggaggtctctttgctgtggatcggaaatggttttgggaattgggtggctatgatccaggtttagaaatctggggaggagaacagtatgaaatctcttttaaggtttggatgtgtggaggagaaatgtttgatgttccatgttctagagttggtcatatctacaggaagtacgttccatacaaagttccatctgggacaagcctggcaagaaacctgaagcgggtagctgagacctggatggatgaatttgccgagtacatttaccagcggcggccggagtacaggcatctctccacgggggacatctctgcccagaaggagctgcgcaagcagctcaagtgcaaggacttcaaatggttcatggctgctgtggcctgggacgtgcctaaatactaccctccagtggagcccccgcctgctgcctggggggagatccgaaatgtggcagcaaatctctgtgtggacagcaagcatggagccaccggaacagagctgaggctggacatctgtgtcaaggatggttctgaaagaacatggtctcatgaacagctttttacctttggatggagagaagatattcgacccggtgagccactgcatacccggaaattctgctttgatgcgatctcacacaacagccccgttacactctatgactgtcatggcatgaaggggaaccagctctggggataccggaaggacagaacattattccatcctgtgagcaacagctgcatggattgcaaccccgcagagaagaagattttcatggccagatgtgaccctctctctgagactcagcagtggatttttgaacacattaatatgactgttttagaaaaatttaaccaccatgccaactcctag

SEQ ID NO: 167732 - DNA, 3155 bp, Homo sapiens
  Payload ID: 12999
  Gene Symbol: PTBP1
  Gene Name: polypyrimidine tract binding protein 1
  Uniprot ID: P26599
  ENST ID: ENST00000349038
  CDS Start-End: 74-1669
ctcggagccgttgggtcggttcctgctattccggcgcctccactccgtcccccgcgggtctgctctgtgtgccatggacggcattgtcccagatatagccgttggtacaaagcggggatctgacgagcttttctctacttgtgtcactaacggaccgtttatcatgagcagcaactcggcttctgcagcaaacggaaatgacagcaagaagttcaaaggtgacagccgaagtgcaggcgtcccctctagagtgatccacatccggaagctccccatcgacgtcacggagggggaagtcatctccctggggctgccctttgggaaggtcaccaacctcctgatgctgaaggggaaaaaccaggccttcatcgagatgaacacggaggaggctgccaacaccatggtgaactactacacctcggtgacccctgtgctgcgcggccagcccatctacatccagttctccaaccacaaggagctgaagaccgacagctctcccaaccaggcgcgggcccaggcggccctgcaggcggtgaactcggtccagtcggggaacctggccttggctgcctcggcggcggccgtggacgcagggatggcgatggccgggcagagccccgtgctcaggatcatcgtggagaacctcttctaccctgtgaccctggatgtgctgcaccagattttctccaagttcggcacagtgttgaagatcatcaccttcaccaagaacaaccagttccaggccctgctgcagtatgcggaccccgtgagcgcccagcacgccaagctgtcgctggacgggcagaacatctacaacgcctgctgcacgctgcgcatcgacttttccaagctcaccagcctcaacgtcaagtacaacaatgacaagagccgtgactacacacgcccagacctgccttccggggacagccagccctcgctggaccagaccatggccgcggccttcggcctttccgttccgaacgtccacggcgccctggcccccctggccatcccctcggcggcggcggcagctgcggcggcaggtcggatcgccatcccgggcctggcgggggcaggaaattctgtattgctggtcagcaacctcaacccagagagagtcacaccccaaagcctctttattcttttcggcgtctacggtgacgtgcagcgcgtgaagatcctgttcaataagaaggagaacgccctagtgcagatggcggacggcaaccaggcccagctggccatgagccacctgaacgggcacaagctgcacgggaagcccatccgcatcacgctctcgaagcaccagaacgtgcagctgccccgcgagggccaggaggaccagggcctgaccaaggactacggcaactcacccctgcaccgcttcaagaagccgggctccaagaacttccagaacatattcccgccctcggccacgctgcacctctccaacatcccgccctcagtctccgaggaggatctcaaggtcctgttttccagcaatgggggcgtcgtcaaaggattcaagttcttccagaaggaccgcaagatggcactgatccagatgggctccgtggaggaggcggtccaggccctcattgacctgcacaaccacgacctcggggagaaccaccacctgcgggtctccttctccaagtccaccatctaggggcacaggcccccacggccgggccccctggcgacaacttccatcattccagagaaaagccactttaaaaacagctgaagtgaccttagcagaccagagattttatttttttaaagagaaatcagtttacctgtttttaaaaaaattaaatctagttcaccttgctcaccctgcggtgacagggacagctcaggctcttggtgactgtggcagcgggagttcccggccctccacacccggggccagaccctcggggccatgccttggtggggcctgtgtcgggcgtggggcctgcaggtgggcgccccgaccacgacttggcttccttgtgccttaaaaaacctgccttcctgcagccacacacccacccggggtgtcctggggacccaaggggtgggggggtcacaccagagagaggcagggggcctggccggctcctgcaggatcatgcagctggggcgcggcggccgcggctgcgacaccccaaccccagccctctaatcaagtcacgtgattctcccttcaccccgcccccagggccttcccttctgcccccaggcgggctccccgctgctccagctgcggagctggtcgacataatctctgtattatatactttgcagttgcagacgtctgtgcctagcaatatttccagttgaccaaatattctaatcttttttcatttatatgcaaaagaaatagttttaagtaactttttatagcaagatgatacaatggtatgagtgtaatctaaacttccttgtggtattaccttgtatgctgttacttttattttattccttgtaattaagtcacaggcaggacccagtttccagagagcaggcggggccgcccagtgggtcaggcacagggagccccggtcctatcttagagcccctgagcttcagggaaggggcgggcgtgtcgccgcctctggcatcgcctccggttgccttacaccacgccttcacctgcagtcgcctagaaaacttgctctcaaacttcagggttttttcttccttcaaattttggaccaaagtctcatttctgtgttttgcctgcctctgatgctgggacccggaaggcgggcgctcctcctgtcttctctgtgctctttctaccgcccccgcgtcctgtcccgggggctctcctaggatcccctttccgtaaaagcgtgtaacaagggtgtaaatatttataattttttatacctgttgtgagacccgaggggcggcggcgcggttttttatggtgacacaaatgtatattttgctaacagcaattccaggctcagtattgtgaccgcggagccacaggggaccccacgcacattccgttgccttacccgatggcttgtgacgcggagagaaccgattaaaaccgtttgagaaactcctcccttgtctagccctgtgttcgctgtggacgctgtagaggcaggttggccagtctgtacctggacttcgaataaatcttctgtatcctc

SEQ ID NO: 167733 - DNA, 3069 bp, Homo sapiens
  Payload ID: 12999
  Gene Symbol: PTBP1
  Gene Name: polypyrimidine tract binding protein 1
  ENST ID: ENST00000350092
  CDS Start-End: 90-1673
tctacagcattgtcccagatatagccgttggtacaaagcggggatctgacgagcttttctctacttgtgtcactaacggaccgtttatcatgagcagcaactcggcttctgcagcaaacggaaatgacagcaagaagttcaaaggtgacagccgaagtgcaggcgtcccctctagagtgatccacatccggaagctccccatcgacgtcacggagggggaagtcatctccctggggctgccctttgggaaggtcaccaacctcctgatgctgaaggggaaaaaccaggccttcatcgagatgaacacggaggaggctgccaacaccatggtgaactactacacctcggtgacccctgtgctgcgcggccagcccatctacatccagttctccaaccacaaggagctgaagaccgacagctctcccaaccaggcgcgggcccaggcggccctgcaggcggtgaactcggtccagtcggggaacctggccttggctgcctcggcggcggccgtggacgcagggatggcgatggccgggcagagccccgtgctcaggatcatcgtggagaacctcttctaccctgtgaccctggatgtgctgcaccagattttctccaagttcggcacagtgttgaagatcatcaccttcaccaagaacaaccagttccaggccctgctgcagtatgcggaccccgtgagcgcccagcacgccaagctgtcgctggacgggcagaacatctacaacgcctgctgcacgctgcgcatcgacttttccaagctcaccagcctcaacgtcaagtacaacaatgacaagagccgtgactacacacgcccagacctgccttccggggacagccagccctcgctggaccagaccatggccgcggccttcggtgcacctggtataatctcagcctctccgtatgcaggagctggtttccctcccacctttgccattcctcaagctgcaggcctttccgttccgaacgtccacggcgccctggcccccctggccatcccctcggcggcggcggcagctgcggcggcaggtcggatcgccatcccgggcctggcgggggcaggaaattctgtattgctggtcagcaacctcaacccagagagagtcacaccccaaagcctctttattcttttcggcgtctacggtgacgtgcagcgcgtgaagatcctgttcaataagaaggagaacgccctagtgcagatggcggacggcaaccaggcccagctggccatgagccacctgaacgggcacaagctgcacgggaagcccatccgcatcacgctctcgaagcaccagaacgtgcagctgccccgcgagggccaggaggaccagggcctgaccaaggactacggcaactcacccctgcaccgcttcaagaagccgggctccaagaacttccagaacatattcccgccctcggccacgctgcacctctccaacatcccgccctcagtctccgaggaggatctcaaggtcctgttttccagcaatgggggcgtcgtcaaaggattcaagttcttccagaaggaccgcaagatggcactgatccagatgggctccgtggaggaggcggtccaggccctcattgacctgcacaaccacgacctcggggagaaccaccacctgcgggtctccttctccaagtccaccatctaggggcacaggcccccacggccgggccccctggcgacaacttccatcattccagagaaaagccactttaaaaacagctgaagtgaccttagcagaccagagattttatttttttaaagagaaatcagtttacctgtttttaaaaaaattaaatctagttcaccttgctcaccctgcggtgacagggacagctcaggctcttggtgactgtggcagcgggagttcccggccctccacacccggggccagaccctcggggccatgccttggtggggcctgtgtcgggcgtggggcctgcaggtgggcgccccgaccacgacttggcttccttgtgccttaaaaaacctgccttcctgcagccacacacccacccggggtgtcctggggacccaaggggtgggggggtcacaccagagagaggcagggggcctggccggctcctgcaggatcatgcagctggggcgcggcggccgcggctgcgacaccccaaccccagccctctaatcaagtcacgtgattctcccttcaccccgcccccagggccttcccttctgcccccaggcgggctccccgctgctccagctgcggagctggtcgacataatctctgtattatatactttgcagttgcagacgtctgtgcctagcaatatttccagttgaccaaatattctaatcttttttcatttatatgcaaaagaaatagttttaagtaactttttatagcaagatgatacaatggtatgagtgtaatctaaacttccttgtggtattaccttgtatgctgttacttttattttattccttgtaattaagtcacaggcaggacccagtttccagagagcaggcggggccgcccagtgggtcaggcacagggagccccggtcctatcttagagcccctgagcttcagggaaggggcgggcgtgtcgccgcctctggcatcgcctccggttgccttacaccacgccttcacctgcagtcgcctagaaaacttgctctcaaacttcagggttttttcttccttcaaattttggaccaaagtctcatttctgtgttttgcctgcctctgatgctgggacccggaaggcgggcgctcctcctgtcttctctgtgctctttctaccgcccccgcgtcctgtcccgggggctctcctaggatcccctttccgtaaaagcgtgtaacaagggtgtaaatatttataattttttatacctgttgtgagacccgaggggcggcggcgcggttttttatggtgacacaaatgtatattttgctaacagcaattccaggctcagtattgtgaccgcggagccacaggggaccccacgcacattccgttgccttacccgatggcttgtgacgcggagagaaccgattaaaaccgtttgagaaactcc

SEQ ID NO: 167734 - DNA, 3598 bp, Homo sapiens
  Payload ID: 12999
  Gene Symbol: PTBP1
  Gene Name: polypyrimidine tract binding protein 1
  Uniprot ID: P26599
  ENST ID: ENST00000356948
  CDS Start-End: 424-2097
gggcaaagcacgcttcccgccgcctgactcgccacgtacccactctcaagatggcgtctcccgcaaagccacgcgccagctgactggctcagacgccgtcacgtgatcccattttctccccctcccccgactacacaagccgtttccgccttcggccttgaggaataaccgcctcccccaataggcgcctgcgatttctctgggtcccgcccccgggcggccttctggccagtgggaggtgctggcgggggcccgcggggctctccccgccccctggctgcagcgggagccaatgggcagcgcgcgcgggggacgtgtgcgggcgtctccgccattttgtgagtctataactcggagccgttgggtcggttcctgctattccggcgcctccactccgtcccccgcgggtctgctctgtgtgccatggacggcattgtcccagatatagccgttggtacaaagcggggatctgacgagcttttctctacttgtgtcactaacggaccgtttatcatgagcagcaactcggcttctgcagcaaacggaaatgacagcaagaagttcaaaggtgacagccgaagtgcaggcgtcccctctagagtgatccacatccggaagctccccatcgacgtcacggagggggaagtcatctccctggggctgccctttgggaaggtcaccaacctcctgatgctgaaggggaaaaaccaggccttcatcgagatgaacacggaggaggctgccaacaccatggtgaactactacacctcggtgacccctgtgctgcgcggccagcccatctacatccagttctccaaccacaaggagctgaagaccgacagctctcccaaccaggcgcgggcccaggcggccctgcaggcggtgaactcggtccagtcggggaacctggccttggctgcctcggcggcggccgtggacgcagggatggcgatggccgggcagagccccgtgctcaggatcatcgtggagaacctcttctaccctgtgaccctggatgtgctgcaccagattttctccaagttcggcacagtgttgaagatcatcaccttcaccaagaacaaccagttccaggccctgctgcagtatgcggaccccgtgagcgcccagcacgccaagctgtcgctggacgggcagaacatctacaacgcctgctgcacgctgcgcatcgacttttccaagctcaccagcctcaacgtcaagtacaacaatgacaagagccgtgactacacacgcccagacctgccttccggggacagccagccctcgctggaccagaccatggccgcggccttcggtgcacctggtataatctcagcctctccgtatgcaggagctggtttccctcccacctttgccattcctcaagctgcaggcctttccgttccgaacgtccacggcgccctggcccccctggccatcccctcggcggcggcggcagctgcggcggcaggtcggatcgccatcccgggcctggcgggggcaggaaattctgtattgctggtcagcaacctcaacccagagagagtcacaccccaaagcctctttattcttttcggcgtctacggtgacgtgcagcgcgtgaagatcctgttcaataagaaggagaacgccctagtgcagatggcggacggcaaccaggcccagctggccatgagccacctgaacgggcacaagctgcacgggaagcccatccgcatcacgctctcgaagcaccagaacgtgcagctgccccgcgagggccaggaggaccagggcctgaccaaggactacggcaactcacccctgcaccgcttcaagaagccgggctccaagaacttccagaacatattcccgccctcggccacgctgcacctctccaacatcccgccctcagtctccgaggaggatctcaaggtcctgttttccagcaatgggggcgtcgtcaaaggattcaagttcttccagaaggaccgcaagatggcactgatccagatgggctccgtggaggaggcggtccaggccctcattgacctgcacaaccacgacctcggggagaaccaccacctgcgggtctccttctccaagtccaccatctaggggcacaggcccccacggccgggccccctggcgacaacttccatcattccagagaaaagccactttaaaaacagctgaagtgaccttagcagaccagagattttatttttttaaagagaaatcagtttacctgtttttaaaaaaattaaatctagttcaccttgctcaccctgcggtgacagggacagctcaggctcttggtgactgtggcagcgggagttcccggccctccacacccggggccagaccctcggggccatgccttggtggggcctgtgtcgggcgtggggcctgcaggtgggcgccccgaccacgacttggcttccttgtgccttaaaaaacctgccttcctgcagccacacacccacccggggtgtcctggggacccaaggggtgggggggtcacaccagagagaggcagggggcctggccggctcctgcaggatcatgcagctggggcgcggcggccgcggctgcgacaccccaaccccagccctctaatcaagtcacgtgattctcccttcaccccgcccccagggccttcccttctgcccccaggcgggctccccgctgctccagctgcggagctggtcgacataatctctgtattatatactttgcagttgcagacgtctgtgcctagcaatatttccagttgaccaaatattctaatcttttttcatttatatgcaaaagaaatagttttaagtaactttttatagcaagatgatacaatggtatgagtgtaatctaaacttccttgtggtattaccttgtatgctgttacttttattttattccttgtaattaagtcacaggcaggacccagtttccagagagcaggcggggccgcccagtgggtcaggcacagggagccccggtcctatcttagagcccctgagcttcagggaaggggcgggcgtgtcgccgcctctggcatcgcctccggttgccttacaccacgccttcacctgcagtcgcctagaaaacttgctctcaaacttcagggttttttcttccttcaaattttggaccaaagtctcatttctgtgttttgcctgcctctgatgctgggacccggaaggcgggcgctcctcctgtcttctctgtgctctttctaccgcccccgcgtcctgtcccgggggctctcctaggatcccctttccgtaaaagcgtgtaacaagggtgtaaatatttataattttttatacctgttgtgagacccgaggggcggcggcgcggttttttatggtgacacaaatgtatattttgctaacagcaattccaggctcagtattgtgaccgcggagccacaggggaccccacgcacattccgttgccttacccgatggcttgtgacgcggagagaaccgattaaaaccgtttgagaaactcctcccttgtctagccctgtgttcgctgtggacgctgtagaggcaggttggccagtctgtacctggacttcgaataaatcttctgtatcctcgctccgttccgcctt

SEQ ID NO: 167735 - DNA, 3185 bp, Homo sapiens
  Payload ID: 12999
  Gene Symbol: PTBP1
  Gene Name: polypyrimidine tract binding protein 1
  Uniprot ID: P26599
  ENST ID: ENST00000394601
  CDS Start-End: 47-1699
attccggcgcctccactccgtcccccgcgggtctgctctgtgtgccatggacggcattgtcccagatatagccgttggtacaaagcggggatctgacgagcttttctctacttgtgtcactaacggaccgtttatcatgagcagcaactcggcttctgcagcaaacggaaatgacagcaagaagttcaaaggtgacagccgaagtgcaggcgtcccctctagagtgatccacatccggaagctccccatcgacgtcacggagggggaagtcatctccctggggctgccctttgggaaggtcaccaacctcctgatgctgaaggggaaaaaccaggccttcatcgagatgaacacggaggaggctgccaacaccatggtgaactactacacctcggtgacccctgtgctgcgcggccagcccatctacatccagttctccaaccacaaggagctgaagaccgacagctctcccaaccaggcgcgggcccaggcggccctgcaggcggtgaactcggtccagtcggggaacctggccttggctgcctcggcggcggccgtggacgcagggatggcgatggccgggcagagccccgtgctcaggatcatcgtggagaacctcttctaccctgtgaccctggatgtgctgcaccagattttctccaagttcggcacagtgttgaagatcatcaccttcaccaagaacaaccagttccaggccctgctgcagtatgcggaccccgtgagcgcccagcacgccaagctgtcgctggacgggcagaacatctacaacgcctgctgcacgctgcgcatcgacttttccaagctcaccagcctcaacgtcaagtacaacaatgacaagagccgtgactacacacgcccagacctgccttccggggacagccagccctcgctggaccagaccatggccgcggccttcgcctctccgtatgcaggagctggtttccctcccacctttgccattcctcaagctgcaggcctttccgttccgaacgtccacggcgccctggcccccctggccatcccctcggcggcggcggcagctgcggcggcaggtcggatcgccatcccgggcctggcgggggcaggaaattctgtattgctggtcagcaacctcaacccagagagagtcacaccccaaagcctctttattcttttcggcgtctacggtgacgtgcagcgcgtgaagatcctgttcaataagaaggagaacgccctagtgcagatggcggacggcaaccaggcccagctggccatgagccacctgaacgggcacaagctgcacgggaagcccatccgcatcacgctctcgaagcaccagaacgtgcagctgccccgcgagggccaggaggaccagggcctgaccaaggactacggcaactcacccctgcaccgcttcaagaagccgggctccaagaacttccagaacatattcccgccctcggccacgctgcacctctccaacatcccgccctcagtctccgaggaggatctcaaggtcctgttttccagcaatgggggcgtcgtcaaaggattcaagttcttccagaaggaccgcaagatggcactgatccagatgggctccgtggaggaggcggtccaggccctcattgacctgcacaaccacgacctcggggagaaccaccacctgcgggtctccttctccaagtccaccatctaggggcacaggcccccacggccgggccccctggcgacaacttccatcattccagagaaaagccactttaaaaacagctgaagtgaccttagcagaccagagattttatttttttaaagagaaatcagtttacctgtttttaaaaaaattaaatctagttcaccttgctcaccctgcggtgacagggacagctcaggctcttggtgactgtggcagcgggagttcccggccctccacacccggggccagaccctcggggccatgccttggtggggcctgtgtcgggcgtggggcctgcaggtgggcgccccgaccacgacttggcttccttgtgccttaaaaaacctgccttcctgcagccacacacccacccggggtgtcctggggacccaaggggtgggggggtcacaccagagagaggcagggggcctggccggctcctgcaggatcatgcagctggggcgcggcggccgcggctgcgacaccccaaccccagccctctaatcaagtcacgtgattctcccttcaccccgcccccagggccttcccttctgcccccaggcgggctccccgctgctccagctgcggagctggtcgacataatctctgtattatatactttgcagttgcagacgtctgtgcctagcaatatttccagttgaccaaatattctaatcttttttcatttatatgcaaaagaaatagttttaagtaactttttatagcaagatgatacaatggtatgagtgtaatctaaacttccttgtggtattaccttgtatgctgttacttttattttattccttgtaattaagtcacaggcaggacccagtttccagagagcaggcggggccgcccagtgggtcaggcacagggagccccggtcctatcttagagcccctgagcttcagggaaggggcgggcgtgtcgccgcctctggcatcgcctccggttgccttacaccacgccttcacctgcagtcgcctagaaaacttgctctcaaacttcagggttttttcttccttcaaattttggaccaaagtctcatttctgtgttttgcctgcctctgatgctgggacccggaaggcgggcgctcctcctgtcttctctgtgctctttctaccgcccccgcgtcctgtcccgggggctctcctaggatcccctttccgtaaaagcgtgtaacaagggtgtaaatatttataattttttatacctgttgtgagacccgaggggcggcggcgcggttttttatggtgacacaaatgtatattttgctaacagcaattccaggctcagtattgtgaccgcggagccacaggggaccccacgcacattccgttgccttacccgatggcttgtgacgcggagagaaccgattaaaaccgtttgagaaactcctcccttgtctagccctgtgttcgctgtggacgctgtagaggcaggttggccagtctgtacctggacttcgaataaatcttctgtatcctc

SEQ ID NO: 167736 - DNA, 767 bp, Homo sapiens
  Payload ID: 12999
  Gene Symbol: PTBP1
  Gene Name: polypyrimidine tract binding protein 1
  ENST ID: ENST00000585956
  CDS Start-End: 1-767
cgatggccgggcagagccccgtgctcaggatcatcgtggagaacctcttctaccctgtgaccctggatgtgctgcaccagattttctccaagttcggcacagtgttgaagatcatcaccttcaccaagaacaaccagttccaggccctgctgcagtatgcggaccccgtgagcgcccagcacgccaagctgtcgctggacgggcagaacatctacaacgcctgctgcacgctgcgcatcgacttttccaagctcaccagcctcaacgtcaagtacaacaatgacaagagccgtgactacacacgcccagacctgccttccggggacagccagccctcgctggaccagaccatggccgcggccttcggtgcacctggtataatctcagcctctccgtatgcaggagctggtttccctcccacctttgccattcctcaagctgcaggcctttccgttccgaacgtccacggcgccctggcccccctggccatcccctcggcggcggcggcagctgcggcggcaggtcggatcgccatcccgggcctggcgggggcaggaaattctgtattgctggtcagcaacctcaacccagagcgcgtgaagatcctgttcaataagaaggagaacgccctagtgcagatggcggacggcaaccaggcccagctggccatgagccacctgaacgggcacaagctgcacgggaagcccatccgcatcacgctctcgaagcaccagaacgtgcagctgccccgcgagggccaggaggac

SEQ ID NO: 167737 - DNA, 749 bp, Homo sapiens
  Payload ID: 12999
  Gene Symbol: PTBP1
  Gene Name: polypyrimidine tract binding protein 1
  ENST ID: ENST00000589575
  CDS Start-End: 37-749
ctccactccgtcccccgcgggtctgctctgtgtgccatggacggcattgtcccagatatagccgttggtacaaagcggggatctgacgagcttttctctacttgtgtcactaacggaccgtttatcatgagcagcaactcggcttctgcagcaaacggaaatgacagcaagaagttcaaaggtgacagccgaagtgcaggcgtcccctctagagtgatccacatccggaagctccccatcgacgtcacggagggggaagtcatctccctggggctgccctttgggaaggtcaccaacctcctgatgctgaaggggaaaaaccaggccttcatcgagatgaacacggaggaggctgccaacaccatggtgaactactacacctcggtgacccctgtgctgcgcggccagcccatctacatccagttctccaaccacaaggagctgaagaccgacagctctcccaaccaggcggcggccctgcaggcggtgaactcggtccagtcggggaacctggccttggctgcctcggcggcggccgtggacgcagggatggcgatggccgggcagagccccgtgctcaggatcatcgtggagaacctcttctaccctgtgaccctggatgtgctgcaccagattttctccaagttcggcacagtgttgaagatcatcaccttcaccaagaacaaccagttccaggccctgctgcagtatgcggaccccgtgagcgcccagcacgccaagctgtcgct

SEQ ID NO: 167738 - DNA, 273 bp, Homo sapiens
  Payload ID: 12999
  Gene Symbol: PTBP1
  Gene Name: polypyrimidine tract binding protein 1
  ENST ID: ENST00000587094
  CDS Start-End: 105-273
gtttttcttgggttcagtcacttttaaaagtctgttaaacgtggtccgtgcagtctgtggtgtcagaagaggcgcagccctagagtgggtctggaccccttagcatgcgtgcgggcagcattgtcccagatatagccgttggtacaaagcggggatctgacgagcttttctctacttgtgtcactaacggaccgtttatcatgagcagcaactcggcttctgcagcaaacggaaatgacagcaagaagttcaaaggtgacagccgaagtgcag

SEQ ID NO: 167739 - DNA, 314 bp, Homo sapiens
  Payload ID: 12999
  Gene Symbol: PTBP1
  Gene Name: polypyrimidine tract binding protein 1
  ENST ID: ENST00000585535
  CDS Start-End: 1-314
ttttctctacttgtgtcactaacggaccgtttatcatgagcagcaactcggcttctgcagcaaacggaaatgacagcaagaagttcaaaggtgacagccgaagtgcaggcgtcccctctagagtgatccacatccggaagctccccatcgacgtcacggagggggaagtcatctccctggggctgccctttgggaaggtcaccaacctcctgatgctgaaggggaaaaaccagggcctgaccaaggactacggcaactcacccctgcaccgcttcaagaagccgggctccaagaacttccagaacatattcccg

SEQ ID NO: 167740 - DNA, 578 bp, Homo sapiens
  Payload ID: 12999
  Gene Symbol: PTBP1
  Gene Name: polypyrimidine tract binding protein 1
  ENST ID: ENST00000586481
  CDS Start-End: 131-578
cggagccgttgggtcggttcctgctattccggcgcctccactccgtcccccgcgggtctgctctgtgtgccatggacggcggggatctgacgagcttttctctacttgtgtcactaacggaccgtttatcatgagcagcaactcggcttctgcagcaaacggaaatgacagcaagaagttcaaaggtgacagccgaagtgcaggcgtcccctctagagtgatccacatccggaagctccccatcgacgtcacggagggggaagtcatctccctggggctgccctttgggaaggtcaccaacctcctgatgctgaaggggaaaaaccaggccttcatcgagatgaacacggaggaggctgccaacaccatggtgaactactacacctcggtgacccctgtgctgcgcggccagcccatctacatccagttctccaaccacaaggagctgaagaccgacagctctcccaaccaggcgcgggcccaggcggccctgcaggcggtgaactcggtccagtcggggaacctggccttggctgcctcggcggcggccgtggacgcagggatggcgatggccgggc

SEQ ID NO: 167741 - DNA, 1030 bp, Homo sapiens
  Payload ID: 12999
  Gene Symbol: PTBP1
  Gene Name: polypyrimidine tract binding protein 1
  ENST ID: ENST00000585932
  CDS Start-End: 1-346
caacaatgacaagagccgtgactacacacgcccagacctgccttccggggacagccagccctcgctggaccagaccatggccgcggccttcggtgcacctggtataatctcagcctctccgtatgcaggagctggtttccctcccacctttgccattcctcaagctgcaggcctttccgttccgaacgtccacggcgccctggcccccctggccatcccctcggcggcggcggcagctgcggcggcaggtcggatcgccatcccgggcctggcgggggcaggaaattctgtattgctggtcagcaacctcaacccagaggcgtctacggtgacgtgcagcgcgtgaagatcctgttcaataagaaggagaacgccctagtgcagatggcggacggcaaccaggcccagctggccatgagccacctgaacgggcacaagctgcacgggaagcccatccgcatcacgctctcgaagcaccagaacgtgcagctgccccgcgagggccaggaggaccagggcctgaccaaggactacggcaactcacccctgcaccgcttcaagaagccgggctccaagaacttccagaacatattcccgccctcggccacgctgcacctctccaacatcccgccctcagtctccgaggaggatctcaaggtcctgttttccagcaatgggggcgtcgtcaaaggattcaagttcttccagaaggaccgcaagatggcactgatccagatgggctccgtggaggaggcggtccaggccctcattgacctgcacaaccacgacctcggggagaaccaccacctgcgggtctccttctccaagtccaccatctaggggcacaggcccccacggccgggccccctggcgacaacttccatcattccagagaaaagccactttaaaaacagctgaagtgaccttagcagaccagagattttatttttttaaagagaaatcagtttacctgtttttaaaaaaattaaatctagttcaccttgctcaccctgcggtgacagggacagct

SEQ ID NO: 167742 - DNA, 1125 bp, Homo sapiens
  Payload ID: 12999
  Gene Symbol: PTBP1
  Gene Name: polypyrimidine tract binding protein 1
  ENST ID: ENST00000621737
  CDS Start-End: 1-683
agttctccaaccacaaggagctgaagaccgacagctctcccaaccaggcgcgggcccaggcggccctgcaggcggtgaactcggtccagtcggggaacctggccttggctgcctcggcggcggccgtggacgcagggatggcgatggccgggcagagccccgtgctcaggatcatcgtggagaacctcttctaccctgtgaccctggatgtgctgcaccagattttctccaagttcggcacagtgttgaagatcatcaccttcaccaagaacaaccagttccaggccctgctgcagtatgcggaccccgtgagcgcccagcacgccaagctgtcgctggacgggcagaacatctacaacgcctgctgcacgctgcgcatcgacttttccaagctcaccagcctcaacgtcaagtacaacaatgacaagagccgtgactacacacgcccagacctgccttccggggacagccagccctcgctggaccagaccatggccgcggccttcggcctttccgttccgaacgtccacggcgccctggcccccctggccatcccctcggcggcggcggcagctgcggcggcaggtcggatcgccatcccgggcctggcgggggcaggaaattctgtattgctggtcagcaacctcaacccagaggcgtctacggtgacgtgcagcgcgtgaagatcctgttcaataagaaggagaacgccctagtgcagatggcggacggcaaccaggcccagctggccatgagccacctgaacgggcacaagctgcacgggaagcccatccgcatcacgctctcgaagcaccagaacgtgcagctgccccgcgagggccaggaggaccagggcctgaccaaggactacggcaactcacccctgcaccgcttcaagaagccgggctccaagaacttccagaacatattcccgccctcggccacgctgcacctctccaacatcccgccctcagtctccgaggaggatctcaaggtcctgttttccagcaatgggggcgtcgtcaaaggattcaagttcttccagaaggaccgcaagatggcactgatccagatgggctccgtggaggaggcggtccaggccctcattgacctgcacaaccacga

SEQ ID NO: 167743 - DNA, 357 bp, Homo sapiens
  Payload ID: 12999
  Gene Symbol: PTBP1
  Gene Name: polypyrimidine tract binding protein 1
  ENST ID: ENST00000587191
  CDS Start-End: 113-357
tgtgtgccatggacggcattgtcccagatatagccgttggtacaaaggcgtctacggtgacgtgcagcgcgtgaagatcctgttcaataagaaggagaacgccctagtgcagatggcggacggcaaccaggcccagctggccatgagccacctgaacgggcacaagctgcacgggaagcccatccgcatcacgctctcgaagcaccagaacgtgcagctgccccgcgagggccaggaggaccagggcctgaccaaggactacggcaactcacccctgcaccgcttcaagaagccgggctccaagaacttccagaacatattcccgccctcggccacgctgcacctctccaacatccc

SEQ ID NO: 167744 - DNA, 2201 bp, Homo sapiens
  Payload ID: 12999
  Gene Symbol: PTBP1
  Gene Name: polypyrimidine tract binding protein 1
  ENST ID: ENST00000627714
  CDS Start-End: 107-700
tgcgggcgtctccgccattttgtgagtctataactcggagccgttgggtcggttcctgctattccggcgcctccactccgtcccccgcgggtctgctctgtgtgccatggacggcattgtcccagatatagccgttggtacaaagagagtcacaccccaaagcctctttattcttttcggcgtctacggtgacgtgcagcgcgtgaagatcctgttcaataagaaggagaacgccctagtgcagatggcggacggcaaccaggcccagctggccatgagccacctgaacgggcacaagctgcacgggaagcccatccgcatcacgctctcgaagcaccagaacgtgcagctgccccgcgagggccaggaggaccagggcctgaccaaggactacggcaactcacccctgcaccgcttcaagaagccgggctccaagaacttccagaacatattcccgccctcggccacgctgcacctctccaacatcccgccctcagtctccgaggaggatctcaaggtcctgttttccagcaatgggggcgtcgtcaaaggattcaagttcttccagaaggaccgcaagatggcactgatccagatgggctccgtggaggaggcggtccaggccctcattgacctgcacaaccacgacctcggggagaaccaccacctgcgggtctccttctccaagtccaccatctaggggcacaggcccccacggccgggccccctggcgacaacttccatcattccagagaaaagccactttaaaaacagctgaagtgaccttagcagaccagagattttatttttttaaagagaaatcagtttacctgtttttaaaaaaattaaatctagttcaccttgctcaccctgcggtgacagggacagctcaggctcttggtgactgtggcagcgggagttcccggccctccacacccggggccagaccctcggggccatgccttggtggggcctgtgtcgggcgtggggcctgcaggtgggcgccccgaccacgacttggcttccttgtgccttaaaaaacctgccttcctgcagccacacacccacccggggtgtcctggggacccaaggggtgggggggtcacaccagagagaggcagggggcctggccggctcctgcaggatcatgcagctggggcgcggcggccgcggctgcgacaccccaaccccagccctctaatcaagtcacgtgattctcccttcaccccgcccccagggccttcccttctgcccccaggcgggctccccgctgctccagctgcggagctggtcgacataatctctgtattatatactttgcagttgcagacgtctgtgcctagcaatatttccagttgaccaaatattctaatcttttttcatttatatgcaaaagaaatagttttaagtaactttttatagcaagatgatacaatggtatgagtgtaatctaaacttccttgtggtattaccttgtatgctgttacttttattttattccttgtaattaagtcacaggcaggacccagtttccagagagcaggcggggccgcccagtgggtcaggcacagggagccccggtcctatcttagagcccctgagcttcagggaaggggcgggcgtgtcgccgcctctggcatcgcctccggttgccttacaccacgccttcacctgcagtcgcctagaaaacttgctctcaaacttcagggttttttcttccttcaaattttggaccaaagtctcatttctgtgttttgcctgcctctgatgctgggacccggaaggcgggcgctcctcctgtcttctctgtgctctttctaccgcccccgcgtcctgtcccgggggctctcctaggatcccctttccgtaaaagcgtgtaacaagggtgtaaatatttataattttttatacctgttgtgagacccgaggggcggcggcgcggttttttatggtgacacaaatgtatattttgctaacagcaattccaggctcagtattgtgaccgcggagccacaggggaccccacgcacattccgttgccttacccgatggcttgtgacgcggagagaaccgattaaaaccgtttgagaaactcctcccttgtctagccctgtgttcgctgtggacgctgtagaggcaggttggccagtctgtacctggacttcgaataaatcttctgtatcctcgctccgttccgcctt

SEQ ID NO: 167745 - DNA, 3691 bp, Homo sapiens
  Payload ID: 12999
  Gene Symbol: PTBP1
  Gene Name: polypyrimidine tract binding protein 1
  ENST ID: ENST00000635647
  CDS Start-End: 424-2190
gggcaaagcacgcttcccgccgcctgactcgccacgtacccactctcaagatggcgtctcccgcaaagccacgcgccagctgactggctcagacgccgtcacgtgatcccattttctccccctcccccgactacacaagccgtttccgccttcggccttgaggaataaccgcctcccccaataggcgcctgcgatttctctgggtcccgcccccgggcggccttctggccagtgggaggtgctggcgggggcccgcggggctctccccgccccctggctgcagcgggagccaatgggcagcgcgcgcgggggacgtgtgcgggcgtctccgccattttgtgagtctataactcggagccgttgggtcggttcctgctattccggcgcctccactccgtcccccgcgggtctgctctgtgtgccatggacggcattgtcccagatatagccgttggtacaaagcggggatctgacgagcttttctctacttgtgtcactaacggaccgtttatcatgagcagcaactcggcttctgcagcaaacggaaatgacagcaagaagttcaaaggtgacagccgaagtgcaggcgtcccctctagagtgatccacatccggaagctccccatcgacgtcacggagggggaagtcatctccctggggctgccctttgggaaggtcaccaacctcctgatgctgaaggggaaaaaccaggccttcatcgagatgaacacggaggaggctgccaacaccatggtgaactactacacctcggtgacccctgtgctgcgcggccagcccatctacatccagttctccaaccacaaggagctgaagaccgacagctctcccaaccaggcggtgcgtggccccgcggcggaccccagcagcccggggacctcgggggtgggcccagccgcaggggccggggactcacggctgtgcctcccacagcgggcccaggcggccctgcaggcggtgaactcggtccagtcggggaacctggccttggctgcctcggcggcggccgtggacgcagggatggcgatggccgggcagagccccgtgctcaggatcatcgtggagaacctcttctaccctgtgaccctggatgtgctgcaccagattttctccaagttcggcacagtgttgaagatcatcaccttcaccaagaacaaccagttccaggccctgctgcagtatgcggaccccgtgagcgcccagcacgccaagctgtcgctggacgggcagaacatctacaacgcctgctgcacgctgcgcatcgacttttccaagctcaccagcctcaacgtcaagtacaacaatgacaagagccgtgactacacacgcccagacctgccttccggggacagccagccctcgctggaccagaccatggccgcggccttcggtgcacctggtataatctcagcctctccgtatgcaggagctggtttccctcccacctttgccattcctcaagctgcaggcctttccgttccgaacgtccacggcgccctggcccccctggccatcccctcggcggcggcggcagctgcggcggcaggtcggatcgccatcccgggcctggcgggggcaggaaattctgtattgctggtcagcaacctcaacccagagagagtcacaccccaaagcctctttattcttttcggcgtctacggtgacgtgcagcgcgtgaagatcctgttcaataagaaggagaacgccctagtgcagatggcggacggcaaccaggcccagctggccatgagccacctgaacgggcacaagctgcacgggaagcccatccgcatcacgctctcgaagcaccagaacgtgcagctgccccgcgagggccaggaggaccagggcctgaccaaggactacggcaactcacccctgcaccgcttcaagaagccgggctccaagaacttccagaacatattcccgccctcggccacgctgcacctctccaacatcccgccctcagtctccgaggaggatctcaaggtcctgttttccagcaatgggggcgtcgtcaaaggattcaagttcttccagaaggaccgcaagatggcactgatccagatgggctccgtggaggaggcggtccaggccctcattgacctgcacaaccacgacctcggggagaaccaccacctgcgggtctccttctccaagtccaccatctaggggcacaggcccccacggccgggccccctggcgacaacttccatcattccagagaaaagccactttaaaaacagctgaagtgaccttagcagaccagagattttatttttttaaagagaaatcagtttacctgtttttaaaaaaattaaatctagttcaccttgctcaccctgcggtgacagggacagctcaggctcttggtgactgtggcagcgggagttcccggccctccacacccggggccagaccctcggggccatgccttggtggggcctgtgtcgggcgtggggcctgcaggtgggcgccccgaccacgacttggcttccttgtgccttaaaaaacctgccttcctgcagccacacacccacccggggtgtcctggggacccaaggggtgggggggtcacaccagagagaggcagggggcctggccggctcctgcaggatcatgcagctggggcgcggcggccgcggctgcgacaccccaaccccagccctctaatcaagtcacgtgattctcccttcaccccgcccccagggccttcccttctgcccccaggcgggctccccgctgctccagctgcggagctggtcgacataatctctgtattatatactttgcagttgcagacgtctgtgcctagcaatatttccagttgaccaaatattctaatcttttttcatttatatgcaaaagaaatagttttaagtaactttttatagcaagatgatacaatggtatgagtgtaatctaaacttccttgtggtattaccttgtatgctgttacttttattttattccttgtaattaagtcacaggcaggacccagtttccagagagcaggcggggccgcccagtgggtcaggcacagggagccccggtcctatcttagagcccctgagcttcagggaaggggcgggcgtgtcgccgcctctggcatcgcctccggttgccttacaccacgccttcacctgcagtcgcctagaaaacttgctctcaaacttcagggttttttcttccttcaaattttggaccaaagtctcatttctgtgttttgcctgcctctgatgctgggacccggaaggcgggcgctcctcctgtcttctctgtgctctttctaccgcccccgcgtcctgtcccgggggctctcctaggatcccctttccgtaaaagcgtgtaacaagggtgtaaatatttataattttttatacctgttgtgagacccgaggggcggcggcgcggttttttatggtgacacaaatgtatattttgctaacagcaattccaggctcagtattgtgaccgcggagccacaggggaccccacgcacattccgttgccttacccgatggcttgtgacgcggagagaaccgattaaaaccgtttgagaaactcctcccttgtctagccctgtgttcgctgtggacgctgtagaggcaggttggccagtctgtacctggacttcgaataaatcttctgtatcctcgctccgttccgcctt

SEQ ID NO: 167746 - DNA, 3057 bp, Homo sapiens
  Payload ID: 13000
  Gene Symbol: PTBP2
  Gene Name: polypyrimidine tract binding protein 2
  Uniprot ID: Q9UKA9
  ENST ID: ENST00000370197
  CDS Start-End: 56-1669
ggctcgctggctgcgtggctcggttcttgtgagcgaagctttgtccggttcggcaatggacggaatcgtcactgaggttgcagttggcgtgaagagaggatctgacgaactactctcaggcagtgttctcagtagtccgaactctaatatgagcagcatggtagttacagccaatggtaatgatagtaaaaaatttaaaggagaagataaaatggatggtgctccttctcgtgtacttcatattcgaaaattacctggggaagtaacagaaactgaagttattgctttaggcttaccttttggtaaggtgaccaacatccttatgctgaaaggaaaaaatcaggcatttttggaactagcaaccgaggaagcagctattactatggttaattactattctgctgtgacacctcatcttcgtaaccaaccaatatatatccagtactcgaatcacaaagaactaaagacagataatacattaaaccaacgtgctcaggcagttcttcaagctgtgacagctgtccagacagcaaatactcctcttagtggcaccacagttagcgagagtgcagtgactccagcccagagtccagtacttagaataattattgacaacatgtactaccctgtaacacttgatgttcttcaccaaatattttctaagtttggtgctgtattgaagataatcacatttacaaaaaataaccagtttcaagctttgctccagtatggtgatccagtaaatgctcaacaagcaaaactagccctagatggtcagaatatttataatgcctgctgtaccctaaggattgatttttccaaacttgtgaatttgaatgtaaaatacaacaatgataaaagtagggattatactcgacctgatcttccatctggggatggacaacctgcattggacccagctattgctgcagcatttgccaaggagacatccctcttagggcttcctgttgcagctgttccaggagctctgagtcctttggccattccaaatgctgctgcagcagctgctgcagctgctgctggccgagtgggtatgcctggagtctcagctggtggcaatacagtcctgttggttagcaatttaaatgaagagatggttacgccccaaagtctgtttaccctcttcggtgtttatggagatgtgcagcgtgtgaagattttatacaataagaaagacagcgctctaatacagatggctgatggaaaccaatcacaacttgccatgaatcatcttaatggacagaaaatgtatggaaaaattattcgtgttactctgtctaaacatcagactgtacagctacctcgagagggacttgatgatcaagggctaacaaaagattttggtaattccccattgcatcgttttaagaaacctggatccaaaaattttcaaaacatttttcctccttctgccacccttcacctatctaatatccctccatcagtagcagaagaggatctacgaacactgttcgctaacactgggggcactgtgaaagcatttaagttttttcaaagagatcacaaaatggctcttcttcagatggcaacagtggaagaagctattcaggccttgattgatcttcataattataaccttggagaaaaccatcatctgagagtgtctttctccaagtcaacaatttaaaaatgggaagatgaagattgggggtgaatcacattgttcaatgtcatcacctatttgactgttcagaaaagtggggaccagagtttgattttttttgtttttgtttttttggggtttcttttttttttccatgctgttatcattccttggttataaaatgaaatggcatatgtaaaggcagagttgttaactgctatatttcatctgttctatagggaagccattttgtctgtttaaaatttcagtttaattttgctttttttttttttttttttttcctttcaacttagttgacatacgtgccttaaaaaggaaaactagtgttgctattgtgcatttactagaaaaaaggaattggttgtttagggcacactgttatatgggaattaaaatatgtttaggcaggggtgtgtaaaaaggttaagtttttgtttctcctgcttggaacttattttgaattactggcttgtcacctttttttctatttaatcaaataagatacatgatattgaaagaataaagcagcatttttagtttttactaccttaggctttattgctttgaaaacaacattggccttttgtatctcacaattctggtctagattcagttatgaatgtaggcattagttaaaattaacaagatgcagagtattaatttcttaagacaacaaagtgatttctgtaagtttgagccctatgtggaaagcattgtggaatcttaaccttttcgtacacactcttgtgggacgtatcatataaatgtcagcactaagtaatgtcttgtttgtggctgaatatttttcgtagatgtttttgaagttgacatgacttacgtgcatttaaatatatattgccatccttagtttgtaattaagatttggaatatggttgtggatttctgagcatgtgcagactggtctagctagttcaggaactggtgcatgtatttttcaaagataaagaaagtgtactgcgaaaatatgcaggaagattaattttgtggcagttttctaaaactgacaaccaggtgggaccaaagtttatgtgcctttagtcttaatttaccttgcattgtaatattcagttttaataaatcttcaaaatattttgtatttaggaatagatctgactttaataaaaacatggctcagaatctacaggtcaaattaatttgaacagttcttgtcaatccgaattgttgattctgtttaaatgaccaatactttttgaaattgatgtacttagtttcaagattcatagattctgttatctatgtagacagaatggtcatgtatattttctattagttgagtttttacatctttagaaatgtaaaattcagtatagtttgaaagcggcacaattaaaaattaattttctaacaaa

SEQ ID NO: 167747 - DNA, 3054 bp, Homo sapiens
  Payload ID: 13000
  Gene Symbol: PTBP2
  Gene Name: polypyrimidine tract binding protein 2
  Uniprot ID: Q9UKA9
  ENST ID: ENST00000370198
  CDS Start-End: 56-1666
ggctcgctggctgcgtggctcggttcttgtgagcgaagctttgtccggttcggcaatggacggaatcgtcactgaggttgcagttggcgtgaagagaggatctgacgaactactctcaggcagtgttctcagtagtccgaactctaatatgagcagcatggtagttacagccaatggtaatgatagtaaaaaatttaaaggagaagataaaatggatggtgctccttctcgtgtacttcatattcgaaaattacctggggaagtaacagaaactgaagttattgctttaggcttaccttttggtaaggtgaccaacatccttatgctgaaaggaaaaaatcaggcatttttggaactagcaaccgaggaagcagctattactatggttaattactattctgctgtgacacctcatcttcgtaaccaaccaatatatatccagtactcgaatcacaaagaactaaagacagataatacattaaaccaacgtgctcaggcagttcttcaagctgtgacagctgtccagacagcaaatactcctcttagtggcaccacagttagcgagagtgcagtgactccagcccagagtccagtacttagaataattattgacaacatgtactaccctgtaacacttgatgttcttcaccaaatattttctaagtttggtgctgtattgaagataatcacatttacaaaaaataaccagtttcaagctttgctccagtatggtgatccagtaaatgctcaacaagcaaaactagccctagatggtcagaatatttataatgcctgctgtaccctaaggattgatttttccaaacttgtgaatttgaatgtaaaatacaacaatgataaaagtagggattatactcgacctgatcttccatctggggatggacaacctgcattggacccagctattgctgcagcatttgccaaggagacatccctcttagggcttcctgttgcagctgttccaggagctctgagtcctttggccattccaaatgctgctgcagcagctgctgcagctgctgctggccgagtgggtatgcctggagtctcagctggtggcaatacagtcctgttggttagcaatttaaatgaagagatggttacgccccaaagtctgtttaccctcttcggtgtttatggagatgtgcagcgtgtgaagattttatacaataagaaagacagcgctctaatacagatggctgatggaaaccaatcacaacttgccatgaatcatcttaatggacagaaaatgtatggaaaaattattcgtgttactctgtctaaacatcagactgtacagctacctcgagagggacttgatgatcaagggctaacaaaagattttggtaattccccattgcatcgttttaagaaacctggatccaaaaattttcaaaacatttttcctccttctgccacccttcacctatctaatatccctccatcagtagcagaagaggatctacgaacactgttcgctaacactgggggcactgtgaaagcatttaagttttttcaagatcacaaaatggctcttcttcagatggcaacagtggaagaagctattcaggccttgattgatcttcataattataaccttggagaaaaccatcatctgagagtgtctttctccaagtcaacaatttaaaaatgggaagatgaagattgggggtgaatcacattgttcaatgtcatcacctatttgactgttcagaaaagtggggaccagagtttgattttttttgtttttgtttttttggggtttcttttttttttccatgctgttatcattccttggttataaaatgaaatggcatatgtaaaggcagagttgttaactgctatatttcatctgttctatagggaagccattttgtctgtttaaaatttcagtttaattttgctttttttttttttttttttttcctttcaacttagttgacatacgtgccttaaaaaggaaaactagtgttgctattgtgcatttactagaaaaaaggaattggttgtttagggcacactgttatatgggaattaaaatatgtttaggcaggggtgtgtaaaaaggttaagtttttgtttctcctgcttggaacttattttgaattactggcttgtcacctttttttctatttaatcaaataagatacatgatattgaaagaataaagcagcatttttagtttttactaccttaggctttattgctttgaaaacaacattggccttttgtatctcacaattctggtctagattcagttatgaatgtaggcattagttaaaattaacaagatgcagagtattaatttcttaagacaacaaagtgatttctgtaagtttgagccctatgtggaaagcattgtggaatcttaaccttttcgtacacactcttgtgggacgtatcatataaatgtcagcactaagtaatgtcttgtttgtggctgaatatttttcgtagatgtttttgaagttgacatgacttacgtgcatttaaatatatattgccatccttagtttgtaattaagatttggaatatggttgtggatttctgagcatgtgcagactggtctagctagttcaggaactggtgcatgtatttttcaaagataaagaaagtgtactgcgaaaatatgcaggaagattaattttgtggcagttttctaaaactgacaaccaggtgggaccaaagtttatgtgcctttagtcttaatttaccttgcattgtaatattcagttttaataaatcttcaaaatattttgtatttaggaatagatctgactttaataaaaacatggctcagaatctacaggtcaaattaatttgaacagttcttgtcaatccgaattgttgattctgtttaaatgaccaatactttttgaaattgatgtacttagtttcaagattcatagattctgttatctatgtagacagaatggtcatgtatattttctattagttgagtttttacatctttagaaatgtaaaattcagtatagtttgaaagcggcacaattaaaaattaattttctaacaaa

SEQ ID NO: 167748 - DNA, 3027 bp, Homo sapiens
  Payload ID: 13000
  Gene Symbol: PTBP2
  Gene Name: polypyrimidine tract binding protein 2
  Uniprot ID: Q9UKA9
  ENST ID: ENST00000426398
  CDS Start-End: 44-1639
gcgtggctcggttcttgtgagcgaagctttgtccggttcggcaatggacggaatcgtcactgaggttgcagttggcgtgaagagaggatctgacgaactactctcaggcagtgttctcagtagtccgaactctaatatgagcagcatggtagttacagccaatggtaatgatagtaaaaaatttaaaggagaagataaaatggatggtgctccttctcgtgtacttcatattcgaaaattacctggggaagtaacagaaactgaagttattgctttaggcttaccttttggtaaggtgaccaacatccttatgctgaaaggaaaaaatcaggcatttttggaactagcaaccgaggaagcagctattactatggttaattactattctgctgtgacacctcatcttcgtaaccaaccaatatatatccagtactcgaatcacaaagaactaaagacagataatacattaaaccaacgtgctcaggcagttcttcaagctgtgacagctgtccagacagcaaatactcctcttagtggcaccacagttagcgagagtgcagtgactccagcccagagtccagtacttagaataattattgacaacatgtactaccctgtaacacttgatgttcttcaccaaatattttctaagtttggtgctgtattgaagataatcacatttacaaaaaataaccagtttcaagctttgctccagtatggtgatccagtaaatgctcaacaagcaaaactagccctagatggtcagaatatttataatgcctgctgtaccctaaggattgatttttccaaacttgtgaatttgaatgtaaaatacaacaatgataaaagtagggattatactcgacctgatcttccatctggggatggacaacctgcattggacccagctattgctgcagcatttgccaaggagacatccctcttagctgttccaggagctctgagtcctttggccattccaaatgctgctgcagcagctgctgcagctgctgctggccgagtgggtatgcctggagtctcagctggtggcaatacagtcctgttggttagcaatttaaatgaagagatggttacgccccaaagtctgtttaccctcttcggtgtttatggagatgtgcagcgtgtgaagattttatacaataagaaagacagcgctctaatacagatggctgatggaaaccaatcacaacttgccatgaatcatcttaatggacagaaaatgtatggaaaaattattcgtgttactctgtctaaacatcagactgtacagctacctcgagagggacttgatgatcaagggctaacaaaagattttggtaattccccattgcatcgttttaagaaacctggatccaaaaattttcaaaacatttttcctccttctgccacccttcacctatctaatatccctccatcagtagcagaagaggatctacgaacactgttcgctaacactgggggcactgtgaaagcatttaagttttttcaagatcacaaaatggctcttcttcagatggcaacagtggaagaagctattcaggccttgattgatcttcataattataaccttggagaaaaccatcatctgagagtgtctttctccaagtcaacaatttaaaaatgggaagatgaagattgggggtgaatcacattgttcaatgtcatcacctatttgactgttcagaaaagtggggaccagagtttgattttttttgtttttgtttttttggggtttcttttttttttccatgctgttatcattccttggttataaaatgaaatggcatatgtaaaggcagagttgttaactgctatatttcatctgttctatagggaagccattttgtctgtttaaaatttcagtttaattttgctttttttttttttttttttttcctttcaacttagttgacatacgtgccttaaaaaggaaaactagtgttgctattgtgcatttactagaaaaaaggaattggttgtttagggcacactgttatatgggaattaaaatatgtttaggcaggggtgtgtaaaaaggttaagtttttgtttctcctgcttggaacttattttgaattactggcttgtcacctttttttctatttaatcaaataagatacatgatattgaaagaataaagcagcatttttagtttttactaccttaggctttattgctttgaaaacaacattggccttttgtatctcacaattctggtctagattcagttatgaatgtaggcattagttaaaattaacaagatgcagagtattaatttcttaagacaacaaagtgatttctgtaagtttgagccctatgtggaaagcattgtggaatcttaaccttttcgtacacactcttgtgggacgtatcatataaatgtcagcactaagtaatgtcttgtttgtggctgaatatttttcgtagatgtttttgaagttgacatgacttacgtgcatttaaatatatattgccatccttagtttgtaattaagatttggaatatggttgtggatttctgagcatgtgcagactggtctagctagttcaggaactggtgcatgtatttttcaaagataaagaaagtgtactgcgaaaatatgcaggaagattaattttgtggcagttttctaaaactgacaaccaggtgggaccaaagtttatgtgcctttagtcttaatttaccttgcattgtaatattcagttttaataaatcttcaaaatattttgtatttaggaatagatctgactttaataaaaacatggctcagaatctacaggtcaaattaatttgaacagttcttgtcaatccgaattgttgattctgtttaaatgaccaatactttttgaaattgatgtacttagtttcaagattcatagattctgttatctatgtagacagaatggtcatgtatattttctattagttgagtttttacatctttagaaatgtaaaattcagtatagtttgaaagcggcacaattaaaaattaattttctaacaaa

SEQ ID NO: 167749 - DNA, 12014 bp, Homo sapiens
  Payload ID: 13000
  Gene Symbol: PTBP2
  Gene Name: polypyrimidine tract binding protein 2
  Uniprot ID: Q9UKA9
  ENST ID: ENST00000609116
  CDS Start-End: 83-1681
cagccgccattttctcgccgcttgtgtggctcgctggctgcgtggctcggttcttgtgagcgaagctttgtccggttcggcaatggacggaatcgtcactgaggttgcagttggcgtgaagagaggatctgacgaactactctcaggcagtgttctcagtagtccgaactctaatatgagcagcatggtagttacagccaatggtaatgatagtaaaaaatttaaaggagaagataaaatggatggtgctccttctcgtgtacttcatattcgaaaattacctggggaagtaacagaaactgaagttattgctttaggcttaccttttggtaaggtgaccaacatccttatgctgaaaggaaaaaatcaggcatttttggaactagcaaccgaggaagcagctattactatggttaattactattctgctgtgacacctcatcttcgtaaccaaccaatatatatccagtactcgaatcacaaagaactaaagacagataatacattaaaccaacgtgctcaggcagttcttcaagctgtgacagctgtccagacagcaaatactcctcttagtggcaccacagttagcgagagtgcagtgactccagcccagagtccagtacttagaataattattgacaacatgtactaccctgtaacacttgatgttcttcaccaaatattttctaagtttggtgctgtattgaagataatcacatttacaaaaaataaccagtttcaagctttgctccagtatggtgatccagtaaatgctcaacaagcaaaactagccctagatggtcagaatatttataatgcctgctgtaccctaaggattgatttttccaaacttgtgaatttgaatgtaaaatacaacaatgataaaagtagggattatactcgacctgatcttccatctggggatggacaacctgcattggacccagctattgctgcagcatttgccaaggagacatccctcttagctgttccaggagctctgagtcctttggccattccaaatgctgctgcagcagctgctgcagctgctgctggccgagtgggtatgcctggagtctcagctggtggcaatacagtcctgttggttagcaatttaaatgaagagatggttacgccccaaagtctgtttaccctcttcggtgtttatggagatgtgcagcgtgtgaagattttatacaataagaaagacagcgctctaatacagatggctgatggaaaccaatcacaacttgccatgaatcatcttaatggacagaaaatgtatggaaaaattattcgtgttactctgtctaaacatcagactgtacagctacctcgagagggacttgatgatcaagggctaacaaaagattttggtaattccccattgcatcgttttaagaaacctggatccaaaaattttcaaaacatttttcctccttctgccacccttcacctatctaatatccctccatcagtagcagaagaggatctacgaacactgttcgctaacactgggggcactgtgaaagcatttaagttttttcaaagagatcacaaaatggctcttcttcagatggcaacagtggaagaagctattcaggccttgattgatcttcataattataaccttggagaaaaccatcatctgagagtgtctttctccaagtcaacaatttaaaaatgggaagatgaagattgggggtgaatcacattgttcaatgtcatcacctatttgactgttcagaaaagtggggaccagagtttgattttttttgtttttgtttttttggggtttcttttttttttccatgctgttatcattccttggttataaaatgaaatggcatatgtaaaggcagagttgttaactgctatatttcatctgttctatagggaagccattttgtctgtttaaaatttcagtttaattttgctttttttttttttttttttttcctttcaacttagttgacatacgtgccttaaaaaggaaaactagtgttgctattgtgcatttactagaaaaaaggaattggttgtttagggcacactgttatatgggaattaaaatatgtttaggcaggggtgtgtaaaaaggttaagtttttgtttctcctgcttggaacttattttgaattactggcttgtcacctttttttctatttaatcaaataagatacatgatattgaaagaataaagcagcatttttagtttttactaccttaggctttattgctttgaaaacaacattggccttttgtatctcacaattctggtctagattcagttatgaatgtaggcattagttaaaattaacaagatgcagagtattaatttcttaagacaacaaagtgatttctgtaagtttgagccctatgtggaaagcattgtggaatcttaaccttttcgtacacactcttgtgggacgtatcatataaatgtcagcactaagtaatgtcttgtttgtggctgaatatttttcgtagatgtttttgaagttgacatgacttacgtgcatttaaatatatattgccatccttagtttgtaattaagatttggaatatggttgtggatttctgagcatgtgcagactggtctagctagttcaggaactggtgcatgtatttttcaaagataaagaaagtgtactgcgaaaatatgcaggaagattaattttgtggcagttttctaaaactgacaaccaggtgggaccaaagtttatgtgcctttagtcttaatttaccttgcattgtaatattcagttttaataaatcttcaaaatattttgtatttaggaatagatctgactttaataaaaacatggctcagaatctacaggtcaaattaatttgaacagttcttgtcaatccgaattgttgattctgtttaaatgaccaatactttttgaaattgatgtacttagtttcaagattcatagattctgttatctatgtagacagaatggtcatgtatattttctattagttgagtttttacatctttagaaatgtaaaattcagtatagtttgaaagcggcacaattaaaaattaattttctaacaaagttgggaggtttgatggttgtttaatttcattttgtgtgtactctgcttacccctgtagcatgctcaataaacacttctgtagctctatattcaccttttctgtctttctctgctgccttttctctctcctcttctttgttttcactccactgtgcttctgaattcatgtttattctctgccagggtgggaaaggagtaataatattacaattctatggctttataccataaataaatctagatgctgtgaaaatataccagctggttttttttaatttaaaagatggtaactgcttttcaggaggacacatattaaacatttcccaccctgttataatctactgctttaaagacataacttttattgtagcttgttaattctatctcttttgttcttgttgttttttttttttttccagtagatttatgcactaatagatcttttggatttgccatgctctcttgctgcagtttcatctttcatcttttgtgtctgctaaagatttcttactaatcttagactaccttgtgagttaacaaaaagaacttgatattactgggaagaaagagcagcatatctgcatatcagcatatctgcttttgccttgggtgggaagaatgatatacattcaagtatttaaaaacttagagtaatttgcatttaacaactgaggatgttactactgtaacttgttaagcagttacaattagggtgctatttatattcaaaatatttcggtcagtttttctaaacagatatattggtatcaaataactttggagttacacatgtttcttaggtttgttctgttataaaatatcccacacttatgcaaaacttacacataggataataaaaagtaaatgaaggaacataaaatatgttttactatacttaatgtagtaattcagttacctccaagaaagaagaatataataagtaaaataattttgtttacactagtgtcactgttgtcatctgaagaagaaccattagagtcaacagtctgggatgatttggaagctaggtgatctgtgtttttttcttaaaataacatcgtagcacagaggaactctaccagcatcagataagtctaaagtctaaaaaaccaataccagggttagtgaatagtaattgaacaaagcttctcaaggtgaagtttttctcagtaattagtggtggctataatatttgaaagtaggttctgtcaccttttcaggtgctcattgtgggtgggattgccttgggaaggagaaactaagtcctgagctgtgtgtgtggacttagtttgtgccagttgctaagctggtgggagttcccagtctccctagtgggagataaccagaaaccagctcttcctgcctaaggactacagcagattctatactgtcttacagtatgccctaatacggccttccttccaaagcaccaagtcactaaagggggattttgacattctagaatatttttaattcagtacatcaaattaacccaggccttggcatatagtgaattgcttattaaaagttaggtaaaaataaaaacagctttgtcgtatattagtactctatgactcttagagtgaacaagctaacaagtattcttaggacttagctgctttgttaatagaggtcttaacttgaatatttagaaataatcagaaaaattattttttggtattgaagatgtattttggaaatgggttttaaagtacctacttaaggaagagatatctacagtttatatttaacgttagcatttgaaagcaatgaagaaaatttttccttaaccaggaagtgtaatgaatcattatattagagattaaattaacactttggaagcattttagctcctagagttaaggttagtatagtgaaattatggtgattagcttaattcattcatgtacatctatttgtatcaccatataattactagggaaaggacaaatcacttttcaaagcctcaatgttatttgtaaaatggaggcaataagttctgctctgctcccctcacaggattattacagaggctcaaataggataagtgaaggaatgctatgcaattagttaactaatgccagttcccagactgccagatttgcccacagtaaacttcattatccacaatacatgttatcctaatatgtctttttgctacaaagaaatactaatgttttaaaattatttactagtttcataaagcagaaagatgtaaaatgcagttatagagagcatcccaagccagatgaaaagaaaccatggatttagctttatattttctgtttgaacttgatagcccaatcataaaatgcacatatttaattatagactgcacttaagatttcatatgtataaaaaagttgctgtgaaacaggtaattttaacactcaggaatttcaaggctaaggaagaaagacatactctcatgagcagctctgaacttcaaacaggattttctggctgccttaatatattaaaatggagcctaaatctgaaaacgtttttttcattcagaagaaagtacagaattcagtgaaattgagtatactaggaaatctgatggcaagaattcagcagaaagtcttaattttaaaccgtaatattcattgattatgcaaaaccttagttttatagttattctttgttattttgaatagcttccctttaaattttctagtttcagattttgcaaataaaagtgtacatgttaaagttatagagtattagattattcacattaagaactgttcaaatacgcggaaaaataaaaccgtaatgaacacctatgcacttcactcaactatatcactacctaacatattccatattttaaacgtaattatatattagttgaaagaaaacgttacagaatgaactgaaatcccatatgaacctctttctgatcttagttcaaaccttattctttcccaagaggtaattgttaccttcagtttagtattttattattcagtggttgcttttcaagaggaatttgtcctatattctgtaggctaaatttcttgttttgcctagttataaaaatggcaaataatatgatattgggtgtttaaatagtacaatattgttcaaaacacactttataatttttaacagactgtttggacattgataattcccctatcaaatctcatgacatttaaccaatttttaacaaggattttaaattgtgtttaagaaataagtcatttgggcctcaggtttctcttaaggatgtaaacaaggagctatatcattggtattttagacgctgaattatgtgtaaggtccttaaatacaaacataccctttgtagcttcacagagccacccgttttgcacttctctcgcttttcttcctccctctttggctcccatttcaatggacagaaagactatgtggcatctctattttcattcacttggtttattgtcttggtatgttgtataggtttttgaatcagaaaattttaacatttttagatatttcaaacatacaaaaaatagaagaatatttaacaaacccttgtcagcttcagttagcaacttagatcttcctcgtttcctccacccaattctcatctcctttattaatgcagatcccagatatattttatcaagaaattttgtagcatatatttgtgttgttttattcgtggtcatagttgctttctctaatatctagactagcctagctggtcaatactacttttcttcaaatcctagaacctccctattaaaaatatagtcaccagaccagtggcaaattagtatcacctaggagtttattagaaactcagtctatgagcctactgaatctacattttgacaagattggcaggtgatgcatttggacataagttggagaagcactcaatgcattttttcagttctataaaaatcagcttcaaagttttttcctgagtgtggaaattatttcattagtaattttaagttatgcagatatagttaataccaagaaataattgaactgaaaaggaacccggatatctagttttaaccagctgttttaaagataaacagttctagagatcaaatgaatagtttagcaacatatttattgtaacttacctgtagttagaatccaagtccctggctttccaatccagtcttcaatgtataatactgatcaaaagaaatacaggcctgctattattcataaatttaaactattatgtacaagttgatagcttataatagaaatcagtatgattagtgttaaaagtcaaatttagtctgacagggaaggaatgtccatgtgaactgattttttttaatagaatgcaaattaatactcaattcctgatttgtttattacattttgtggtttaatgaaatgatactcaggtcattttcataaatagcttttctattaatgcttcctcagtcacattctctattcctattgcatagcacagtctaacagttgaaatgcctaagccttactgaatgatgactgatattctctgtgagagttagagctgtactataaatatacattacctgtgcaaagtatgccttcaggggctattccccataaccttagcaaaattttaaaatattcttatggctagcaatcttatctattgtcatgtcttactatttcctgcttaccacccccatttctctctcaaccttgttgctgcattagctgtccatcacttaacactgtttatttctctgtttttcttccatcattctcttctttgcaactaaatgatttagactttttataaccataatcaaccagttagattctttttatttgtggttattgagttgataaatgatagtgcattttatgtaatattcaggtgttatgctatttttatctggttcactttaaaacctccctccccccactccctttttttgtgggttttttttttattattattattttccagttttgtgttgttttgctttttaacttctgagattgcagtggttccagatggttgaaatcactagtagtgatttacatgaagcattcatgtatttattactggtatattcaactatggtggagggaaattggtcgaagaattacggttaaagagctcctttaaaaaggagatttgtagaattctaaaatgtgattctgattcatatagtcatgattcttagaaattagctacaggaagagatagaaacattgctatagttgtctttgccctaagtttggagttttatagtgtaatatatatataatagctctaattataaatacacttttactctggaaaaagcatagacattgacataagagacatttaaaaaccattattttctcatctgtaaaatggagagaattacttcatatgttcacttataaggattatgtgaaatactgttccattccattagtagtttttcttttcctctaattgggggtgggggcagtttttggcattctatttatggaaggtgtttttttccctaagatcattttgatgtctcagaagacatttgctatgtacgttggacatttgccatgtacattgtagagaatacaaagataaacagaaccacagtacagctggttctattagacattgaaaatgcatattctagcatatttaatatattagggaacaatttaagcataatgtgaatttcatgtttactgaagatttcatcctgagaaacaaatgaaagcagaaaattacaaccaactgaaccagctgtgtaagaaatatatatatggtgtgcacacatgtacatacctcagacatctattagcattctcagttttccacaagttaaaagccacgctcatccatatctggtgctaataacttcctatccaatttcagatagctgttttcaacacatctgacaccttctttttttcaagcaaacttcaggtctttttcaagataaagtcatttatagtagtgtctatatatttcttaaccatttaacatgtaaactgtgctgccttttaagaaattaattctatcctttttagtgtcagagttgaagattttgagtgttgtgccctaaccttatcattttcctcataagtcctgtggtttttattgtatgattttgcatagtgtggcaattcttggaaatgcttatgttgtgttatagtataactgacttactactttcaaatagcttctagtctgattcatgttatgacagtatacagtatagcaaaataaggacatcagggaacaggaggctgagcatatcaccatttaccaatggtagcttgagcaaggcacttcatttatcgaagtccattttctcatctgtacaatggaggtgatgatagtacatgtcttttctgtcttgtgttatttgtagtttcaagtaagatatgaaatatgctgtagaaatacagggttgggaatatctagtggtacaaaaatcaacttttggcccaattttaaggtgagataattatgagacatttttcgacctcaaagtctttgttcttttctctctacaccattgtgaataacacagtgtatatatgagattaatttattacctcgactttccatttttgttttgtaaagtagtttaattttttatatctatttataaagttaactgcaggagtgtacctgcagttaactttatacagttaagaagaggttggtttcagttttaaagattgtatgtcagtgtaaaacatccattattatgctttcaagtaaaatagctcctaaaaatatggattactatcaactttcaaggaaaatagctcctaaaaatatggattactaccaactttcaaggaaaatagctcctagaaatatggattactagccacataaattgctaacatttgcttttattattattattattattattttagacacagtcttgctctgtcacccaggctggagtgcggtggtattatctcggctcactgcaacctccacctctcgggttcaagcaattctcctgcctcagccttccgagtagctggaattacaggcacccaccaccacacccagctaatttttgtatttttagtagagacagggttttaccatgtgaccaggctggtttcgaactcctgacctcaaatgatccacctgcctcagcctcccaaactgctgggattacaggtgtgagccaccgctcccagcctatttgctaatatttaacctcttgagagtctttaattctttttttcaacaagtgttcattacctgctatgtgccagcttagatgctttggatgaaatacaggttggtgcgaaagtaattgcgatttttgccgttaaaattagaaaaaccacaattacttttgcaccaacctaaataactaaaacacaatttcttcctatcatggggctttcagttcagtatgagataagtaaagaattatatgggttgataaattttctggaggaactattgggtgttattacagtgtgctcaatctttagcagttaggaaaggattcttgaaggtagttgtattacctgggttggaggtaagtgttggggacacaagtgttagaaacagaacagtttgtttaaaagttggggacaaaaaaggaccagaatcaagattacggcaccctggagaaagttaagcatggctcggtcataaattaggagacaaggaacaaatagagaaatacgtttggatagaatagtcagattataggctgtgctaagttgtttgggctccactagggtttctaaatgcagttattggtaaactggacttaggagaagggacagggttgacatgacaaatctagtgaatttatgttcattaaaatatcccttttgaattgatttagtttttgtatgtttcttttttataattccaaaaaatcatacaaataagttaaacttatccatctaaaagctgcacacaaaacttgatgttagattcttttaaaattacaaaattaagacttccaaaagaatcttgttgaataagagtaaaagaaagacccttactcagtaaagctgcgtaatactttggcagtttgaacccatggccatgcctctctgtgtgataaggatttggcaaaaccatggaagaaacatgcatgtttttgaattgtctttccatggtaacttaaaacattttttcatgaaacatggatatatatccttagaaaactgcaaaacataaagcttgtaagttataagacaagatttatctcttttttttttttttctgagagagagtcttgctctgttgcccaggccggagtgcaacagtgtgatctctgctcactgcaccctccgcctcccgggttcaagcaattctcctgcctcagcctcctgagtagctgggactacaggcgtgtgccgccaagcccagctaatttttttgtatctttagtagagacggtttcaccatgttggccaggctggtctcgaactcctgacctcaagtgatctacctgcctcagccttctaaagtgttgggattacaggcatgagccatggcacccggccaagatgaaatgtcaaggccattttagccactatgcttttaagactacttaaagctgtgctttcaggtctccccaggaatacttgttcactctatactattgctgctgctgttctggcttgagaattttgagaatcactaagatacaattttaagttttgacatgtaaattatttggttgagtagaaagaattaatgtagataagcaaaaacccctttataaaaaatgcttaccctttaaaaaatgttgaatcctcacagtatgattaaatactacttgtaaaagtgtctgttaaccataatgtattttttagataatttgagtagaattatacgtgcaatatattcttgagtttgtgaccaacaaagaaacagattaatgattgaaaattcaccatacattactacctatgtctctccacctgctatctacttccaattttttatatatataaaagtcattaaagtcatttgtaattg

SEQ ID NO: 167750 - DNA, 734 bp, Homo sapiens
  Payload ID: 13001
  Gene Symbol: PTBP3
  Gene Name: polypyrimidine tract binding protein 3
  ENST ID: ENST00000210227
  CDS Start-End: 187-734
ggcgaggtggggcgagcggccgacggcgggtgcacgcgtcggtacacgtctgggcggcgacctggtcgcaagccatggtcccacgcggggtcccagggccgccgcgggacttggccgaggtctcccgacttgtgctgtgagatacgttaacgctttctcgacaccaggggtctggacttagtgaccatggacgcttccccctcacctttctctctccccaagaaacttaatgaattatctgcccgtcggggatctgatgagcttctttcttctggcatcattaacggaccttttaccatgaatagttctactccttctacagctaatgggaatgacagcaagaaatttaaacgagatagacctccctgttcgccttcccgtgttctccatcttcgaaaaattccatgtgatgtcaccgaagcagagatcatatcattaggtctaccatttggcaaagtaactaatcttttgatgttgaaaggaaaaagccaggctttcttagaaatggcttctgaggaagctgccgttactatggtgaattattacactcctattactcctcaccttcgaagccagcctgtttatattcagtattccaatcacagagaacttaagactgacaatctacctaatcaagctcgagcccaagctgcactgcaggctgtcagtgccgtccaatcaggaagcctggccctttctggaggtccttccaatgaaggcacagtcctacctgg

SEQ ID NO: 167751 - DNA, 7990 bp, Homo sapiens
  Payload ID: 13001
  Gene Symbol: PTBP3
  Gene Name: polypyrimidine tract binding protein 3
  Uniprot ID: O95758
  ENST ID: ENST00000334318
  CDS Start-End: 188-1855
ggcgcggcggtggcgggagcgtgcccggtccccgcccctgttcccactctccttccacctcggaccggccggggctccgcagagccaaagctcgcttgtccccggaaccgccctgctgccgccgcctgcttcctctgctcgcggttagcccgtcagtccctgctctgtgcgcgcctccatctgggccatggatggtgttgttacagatcttataacagtcggtttaaagcggggatctgatgagcttctttcttctggcatcattaacggaccttttaccatgaatagttctactccttctacaggtgtgtatgctaatgggaatgacagcaagaaatttaaacgagatagacctccctgttcgccttcccgtgttctccatcttcgaaaaattccatgtgatgtcaccgaagcagagatcatatcattaggtctaccatttggcaaagtaactaatcttttgatgttgaaaggaaaaagccaggctttcttagaaatggcttctgaggaagctgccgttactatggtgaattattacactcctattactcctcaccttcgaagccagcctgtttatattcagtattccaatcacagagaacttaagactgacaatctacctaatcaagctcgagcccaagctgcactgcaggctgtcagtgccgtccaatcaggaagcctggccctttctggaggtccttccaatgaaggcacagtcctacctgggcagagccctgtgcttcgaataattattgaaaacctcttttaccctgttaccctggaagttcttcatcagatattttctaaatttggcacagtcttgaagattatcacctttacaaagaataatcagtttcaagccttgcttcagtatgctgacccagtaaatgcacattatgccaaaatggctctggatggccagaatatctataatgcatgctgcactctgcgcattgacttctccaagctcaccagccttaatgtgaaatataataatgacaaaagcagagacttcactcgcttagaccttcctactggtgatggccagccatcccttgaaccccctatggctgctgcttttggtgcaccgggtataatttcttcaccatatgcaggggctgctggatttgccccagccattggatttcctcaagctacaggtctatcagttccagctgttcctggagctcttggtcctctcacaatcacctcttctgctgtcactggaaggatggccattcctggggctagtggtataccaggaaattctgttctactcgtcacaaatctcaatcctgatcttatcacaccacatgggctttttatcctatttggagtctatggtgatgtacatcgagtgaagattatgtttaataagaaagaaaatgccttggttcagatggcggatgcaaatcaagctcagctagcaatgaaccatctaagtggtcagagactttatgggaaagtgcttcgtgctacactgtccaaacatcaagcagtacagcttcctcgagagggacaagaagaccaaggtctgactaaggatttcagcaatagtcctttgcatcgctttaaaaagccgggctctaaaaacttccagaatatctttccaccatcagccactctgcatctttccaacattcccccttctgttacagtggatgatctgaagaaccttttcatagaagctggatgttcagtgaaggcttttaaattctttcagaaagatcgcaaaatggcgctcattcaattgggatctgtggaagaagcaattcaggccctcattgagcttcataaccatgaccttggagaaaatcaccacctcagagtttccttctcaaaatctacaatctgacttttctgtgaatttttctcctaaaactggaccataatttcagtaaaaccttcagacatagactgaagcagctcaagaccaattttgcctctttcacaaaaataactctgagtttgatattcaagtatattttaaaaatcaagggattttttttttttgtattccccctgcccccgccagtcaaaggtttcttttccctttttaccatggtttctacaaaaataaccttcaggaaaaagaaaatcaggaaaaaaattttttttcaataatcttattccctatattaaattagatttgaagaggattaacgttgttttagtttgggtccagatcagccttatacaacatttctaaactcatttgtacttttaaaaaatttaaacacagacttctaaaattacttgatgtaagtaatttaaatcacttatgaccaagttattaaccttatgaatcagaagtctgacccttgtaggaaattatattcacatataaagtacatcagatctttgccatatattgatggttattatgcataaacacattgagttgtgttggaagcagatttataaacctgcatgttttctttgaatgatttctttttttcactgtaagacactcctttaaataatgcctatctttaactttttaagactatttggaaaaatgcagtgtctcagctgtccccagggaaattaagtggaattcaactaagatctgttaataagatgtcagaataactaataattttattaggaaaaaatcatgttttaaatttcaaaatgacacttatttgtcaagtaatatgatcttggaaaattttaaagaaaaataatcctacttataaactacttttttataattgttttcagaaaaaaagtttacagtcttaaggaaaatattcaggtctatcatatggtttgacagattttttaaaagttatttttggtaaggtcttcttttagaaaaaaattaatctcaagggttttttgtaccactataatctctaatacttactcagaattactgtgtatttacttaatttcttattatgtgccttattatgtgcttaagatacaataggttagagtttaatctaaatatcttgaaagctatattgtgggcttggtaagcattttgttttttctttctctgttttggtaaggatttaaaatttttttcattgcaattttaagtggttttcaataagtaatagtttttatcaaatttttggtgcttggtgcagagacggtgtggggaagggtgaatggttttgggaataattcagtgcacacctgtaggcctctttacattgtgactgataggggttattgcatatcaatttggggctgtagagtgcaatctcagtttcatctttttcacccatcagaatttgtctcaggattacttggtttttctcagtcctcaagcgagaacttgcttttctttgttaatgtgactttcattactgagtacccacgtatttggagtatgagaaggtgggttatttctcatactctgtccctctctttttcattgaatgtaagagtacattttaatgttgcttcagtgattgtataatgtaaaattgtttctttttaataagaaactttgctattatttcttcaattgttgatcagaattttttaaagcagaatttgtcaaaagggtcatttttttgtctaccccttttacacttttcagattctcaaagtgtctcatctcaacttttaaaagaataaagaatatcttgctgggcatggtggtgtgcgcctgtgcgcctgtagtcccagctacaggctgagcctgtaggcaggaggctacaggcaggaggatcacttgagcccaggagttcaaggctgcagtgcgctatgatcacatttgtgaatagccacttcactccagccctggaacatagtgtgaccccttctcttaaaagtaaaaattaagaaaatctcaatctctttgctgtattccagtgattaatttgaacatagggaggtttttacagaagaaattttaccaaaaaatagagactgcaagagatgatacagattgtttaaaaagcagaattcactcaccactgagcaacacttagttggtagaatagaaaggagggatactaagttaagacttttcaaatggatcagtttggctgaatagatagatatactcatgtatgtagttgtgggagtttttagttttttgtttttttacttatgaaataagttttgacctagacacaaggggtatatgaaggaggaaaaaaatttctttgcaaaatctcccaaaacttgcttttttttcccttccacacaggcactattataattttcagtgccatgttaaattggattatttcatttactttaagttaggaattactgtgtaatttattaattcatgattctcataacattcagcataagtgtagcaaagttgctaataacggaaggggatcatagtggtgttgaatgtaactttgaagtagggaatggccttttaagtctgagagagaacatttgaatccttttcagggatttgtgtaggggtgtgtttgtgtgtgtgtgtgaatgtgtgtgtgtgtagataagtgtatatacataaatacactcttctaaagttgtatatacatatgcacattacatacattttaatttattgacaaaattaaccaaattaagatttggagatgtgggatgttcttgttttaaaatagcatgtttgaaaccatcagtttgtgtctaaaattagctgtagcacatggatgttgtccatattaagctatttgctgtttgaattatagaggtctacagtatttgtgttggcatagtttttgtaaaaaaaagattaaaaaatatcaggatggtggaaaaactagatctgtgtatctctgttttggcatgcatttattcagtatcttctagcaatggtttttctctgttgatctaccgtagtatcctatttttaagtttattttatttttaaggagtattgtcatcacttttcaaggtgtcttgacttctacacaaagtatatatattcaggactttaaaaaatagcagtacacatttaacagtagcgaattacaccaaaatgatttactttgagatttgaataatttgcatagcagtaaaatgtgttttgtgtaacatacaaatagaaaaatgacccagtatcttaattgatacttactggagagtatcagaattacccagcagctcttacagaatgccataaattctttaagactaaatattgaaatcaattatttgaagtaatgtttctgatttactgttaaaagttgctgagctcagtttttggagatatcatttatgcctgcctgttcccttatgacagtgaggccttctttggctccacctagtatgataatcatgggttctgttttagttgatgagaagtggctcctatgaatgcctctgctcaatttctttttattttactttattttatttttaggggtctcgccaactcctgggctcaagtgattctcctgcttccacctccccacagtgctgggattacaggcatgagccaccacgcctggctctctgttcttttcagtgtctccgtgccatcagtcagcagtgcttacatgtttagcatattgtcatgcagtttctcttctgttcccacgagatatttttggacaaaaaattgacaaaagtacatgtgtttttccccacctatcccttagaaaacctaatgtgtactgctatttttaaaaccaaaaagagacagcgtgacgatgcgtaaagcatttttcttagcctttcctttgtcttgatctgttaatgagaacaaaactgccagactcaaaatactctactattgtgctgaaagaaatacaatttagattgcacaaaatttgaaaatataactcagctgtcttttaaaagagttgtgttgttatctacaagactattagcagtcttttttcagagcaaattttaacagctagttgtgagtggtttaaaatatagaaaattattaaaatcttagtttgaggggttttatagtgggagaaaaaacaggaccaaagtttatgtgccttcttcagtagtcttaattgaccttttcttcctatttgagactaaagtagtatcagtattctggttttcaggaaatatgtactatatagttttaaaagaatgttgtcccaccaactattcatccaagcaaagaattgtaactataaataaagtctcagttacacttttgcctttatcacataatattcattgtagagcattgtgcaggtccaagaatagagctgctcaaaatctttgtggtagtttccttagtttttgtaacctgaggcatatgttccagagaacagggatatttgtctggtccagtgaccttggtgatcatagtcataattgaaagatgcctatggcatgcttaaatcagcattgtcaactgatttgttgttgtattattttcacttcttggatctatgtagtagttgtaataacaaatatttaaatagctatttttttgatgccattaaaaaaatcatactctggccttttttcccccttactgttgtttcccagatcttttaaaaattcatcccatatccagaaagtaccagttataaagattgctgaccaagcaaagttttgcatcaaagtgtcacctcattgctctgaccaaagactgactgttgtggttttaactcctctctgtaaagcattttgcattttccccaagctcctttctgaaagaagaaccagtgcagagcggcctttactttcaatttctactgctgaatagactacttagagaaaatgtgagtttcagtgtgaacagaatggattaggatgacgagtttgatgggcattttcagtactgtatctaagaaaaaaaaaatagcacagctaggagcctctgacattgtctggtgttttacgtggtctgttcatcaaaattccccttttcagtttttaagaatgttcgtctaacagaagaaaatgctgtaaatatttgtaacaacattttttttaacaaggccaaaaaagaaaaaaaggtttttgggaacaaatgaacttataaagtggttttatataaaacatcaattgtcttgtatattttggataagcagcagtaccagctttcatttgtaacagtctgtggcattggaaaaaaaggagtctgtgattgttgaagtgaattatgttataaatgcaaagagaagataaaatattaaaaaacatattttctaaatgcgtagtgcatggttaattcaagcttctgtacactacagtatattccattttcgttcagtttgtatatttgctgactattacttgatatctctaatctcttttcctaacaaatatagcattgtagcatgccttttaataaatgtcatgacatctgtactctcttaaaatttttctgtgttcttgtctgtactttgggtttccctttgtcttacctgtaattctaatgatgtcctattttcttttcttttccatagccatccatctaaacgtgtcatggttagtgaatagtgagcacatattcaaacaatgttcaaaatgggaaaaacacaaaatctattaactgtctctgtcttcatttaggaataattctcgttttgaggagcaaagtgctttcctaatcttcctatgatgcaccttctctggcactgccccgtaatgcaggggcatggcggcatgctttcttgcttgcacactcactctcctttttctttctctctttctccccatatgtgcagtgccaaactacagttggaacactatttccagttttgttcagtatttggcttccctacggcattagtatacatacactttgagacacaaggtgtgatctcaaaccaaatttgtgtcctctttaaaaaggtagcacagatactagctgatgctacattccttttccttagacaaacgttttacttctcagatctttaaagaattgttggattgcagaagtctagacttagcgttcattgtatattttagtctcctggaagtgggaatttattttgaatggaatagaaaattaggtaatcactactaatctttgctggcttacctgtaaaatctgtggtctccataaatactgggaaaataaataggtattttt

SEQ ID NO: 167752 - DNA, 2755 bp, Homo sapiens
  Payload ID: 13001
  Gene Symbol: PTBP3
  Gene Name: polypyrimidine tract binding protein 3
  Uniprot ID: O95758
  ENST ID: ENST00000343327
  CDS Start-End: 192-1565
aaagctcgcttgtccccggaaccgccctgctgccgccgcctgcttcctctgctcgcggttagcccgtcagtccctgctctgtgcgcgcctccatctgggccatggatggcggggatctgatgagcttctttcttctggcatcattaacggaccttttaccatgaatagttctactccttctacaggtgtgtatggctttcttagaaatggcttctgaggaagctgccgttactatggtgaattattacactcctattactcctcaccttcgaagccagcctgtttatattcagtattccaatcacagagaacttaagactgacaatctacctaatcaagctcgagcccaagctgcactgcaggctgtcagtgccgtccaatcaggaagcctggccctttctggaggtccttccaatgaaggcacagtcctacctgggcagagccctgtgcttcgaataattattgaaaacctcttttaccctgttaccctggaagttcttcatcagatattttctaaatttggcacagtcttgaagattatcacctttacaaagaataatcagtttcaagccttgcttcagtatgctgacccagtaaatgcacattatgccaaaatggctctggatggccagaatatctataatgcatgctgcactctgcgcattgacttctccaagctcaccagccttaatgtgaaatataataatgacaaaagcagagacttcactcgcttagaccttcctactggtgatggccagccatcccttgaaccccctatggctgctgcttttggtgcaccgggtataatttcttcaccatatgcaggggctgctggatttgccccagccattggatttcctcaagctacaggtctatcagttccagctgttcctggagctcttggtcctctcacaatcacctcttctgctgtcactggaaggatggccattcctggggctagtggtataccaggaaattctgttctactcgtcacaaatctcaatcctgatcttatcacaccacatgggctttttatcctatttggagtctatggtgatgtacatcgagtgaagattatgtttaataagaaagaaaatgccttggttcagatggcggatgcaaatcaagctcagctagcaatgaaccatctaagtggtcagagactttatgggaaagtgcttcgtgctacactgtccaaacatcaagcagtacagcttcctcgagagggacaagaagaccaaggtctgactaaggatttcagcaatagtcctttgcatcgctttaaaaagccgggctctaaaaacttccagaatatctttccaccatcagccactctgcatctttccaacattcccccttctgttacagtggatgatctgaagaaccttttcatagaagctggatgttcagtgaaggcttttaaattctttcagaaagatcgcaaaatggcgctcattcaattgggatctgtggaagaagcaattcaggccctcattgagcttcataaccatgaccttggagaaaatcaccacctcagagtttccttctcaaaatctacaatctgacttttctgtgaatttttctcctaaaactggaccataatttcagtaaaaccttcagacatagactgaagcagctcaagaccaattttgcctctttcacaaaaataactctgagtttgatattcaagtatattttaaaaatcaagggattttttttttttgtattccccctgcccccgccagtcaaaggtttcttttccctttttaccatggtttctacaaaaataaccttcaggaaaaagaaaatcaggaaaaaaattttttttcaataatcttattccctatattaaattagatttgaagaggattaacgttgttttagtttgggtccagatcagccttatacaacatttctaaactcatttgtacttttaaaaaatttaaacacagacttctaaaattacttgatgtaagtaatttaaatcacttatgaccaagttattaaccttatgaatcagaagtctgacccttgtaggaaattatattcacatataaagtacatcagatctttgccatatattgatggttattatgcataaacacattgagttgtgttggaagcagatttataaacctgcatgttttctttgaatgatttctttttttcactgtaagacactcctttaaataatgcctatctttaactttttaagactatttggaaaaatgcagtgtctcagctgtccccagggaaattaagtggaattcaactaagatctgttaataagatgtcagaataactaataattttattaggaaaaaatcatgttttaaatttcaaaatgacacttatttgtcaagtaatatgatcttggaaaattttaaagaaaaataatcctacttataaactacttttttataattgttttcagaaaaaaagtttacagtcttaaggaaaatattcaggtctatcatatggtttgacagattttttaaaagttatttttggtaaggtcttcttttagaaaaaaattaatctcaagggttttttgtaccactataatctctaatacttactcagaattactgtgtatttacttaatttcttattatgtgccttattatgtgcttaagatacaataggttagagtttaatctaaatatcttgaaagctatattgtgggcttggtaagcattttgttttttctttctctgttttggtaaggatttaaaatttttttcattgcaatttt

SEQ ID NO: 167753 - DNA, 3413 bp, Homo sapiens
  Payload ID: 13001
  Gene Symbol: PTBP3
  Gene Name: polypyrimidine tract binding protein 3
  Uniprot ID: O95758
  ENST ID: ENST00000374255
  CDS Start-End: 149-1807
gttcccactctccttccacctcggaccggccggggctccgcagagccaaagctcgcttgtccccggaaccgccctgctgccgccgcctgcttcctctgctcgcggttagcccgtcagtccctgctctgtgcgcgcctccatctgggccatggatggtgttgttacagatcttataacagtcggtttaaagcggggatctgatgagcttctttcttctggcatcattaacggaccttttaccatgaatagttctactccttctacagctaatgggaatgacagcaagaaatttaaacgagatagacctccctgttcgccttcccgtgttctccatcttcgaaaaattccatgtgatgtcaccgaagcagagatcatatcattaggtctaccatttggcaaagtaactaatcttttgatgttgaaaggaaaaagccaggctttcttagaaatggcttctgaggaagctgccgttactatggtgaattattacactcctattactcctcaccttcgaagccagcctgtttatattcagtattccaatcacagagaacttaagactgacaatctacctaatcaagctcgagcccaagctgcactgcaggctgtcagtgccgtccaatcaggaagcctggccctttctggaggtccttccaatgaaggcacagtcctacctgggcagagccctgtgcttcgaataattattgaaaacctcttttaccctgttaccctggaagttcttcatcagatattttctaaatttggcacagtcttgaagattatcacctttacaaagaataatcagtttcaagccttgcttcagtatgctgacccagtaaatgcacattatgccaaaatggctctggatggccagaatatctataatgcatgctgcactctgcgcattgacttctccaagctcaccagccttaatgtgaaatataataatgacaaaagcagagacttcactcgcttagaccttcctactggtgatggccagccatcccttgaaccccctatggctgctgcttttggtgcaccgggtataatttcttcaccatatgcaggggctgctggatttgccccagccattggatttcctcaagctacaggtctatcagttccagctgttcctggagctcttggtcctctcacaatcacctcttctgctgtcactggaaggatggccattcctggggctagtggtataccaggaaattctgttctactcgtcacaaatctcaatcctgatcttatcacaccacatgggctttttatcctatttggagtctatggtgatgtacatcgagtgaagattatgtttaataagaaagaaaatgccttggttcagatggcggatgcaaatcaagctcagctagcaatgaaccatctaagtggtcagagactttatgggaaagtgcttcgtgctacactgtccaaacatcaagcagtacagcttcctcgagagggacaagaagaccaaggtctgactaaggatttcagcaatagtcctttgcatcgctttaaaaagccgggctctaaaaacttccagaatatctttccaccatcagccactctgcatctttccaacattcccccttctgttacagtggatgatctgaagaaccttttcatagaagctggatgttcagtgaaggcttttaaattctttcagaaagatcgcaaaatggcgctcattcaattgggatctgtggaagaagcaattcaggccctcattgagcttcataaccatgaccttggagaaaatcaccacctcagagtttccttctcaaaatctacaatctgacttttctgtgaatttttctcctaaaactggaccataatttcagtaaaaccttcagacatagactgaagcagctcaagaccaattttgcctctttcacaaaaataactctgagtttgatattcaagtatattttaaaaatcaagggattttttttttttgtattccccctgcccccgccagtcaaaggtttcttttccctttttaccatggtttctacaaaaataaccttcaggaaaaagaaaatcaggaaaaaaattttttttcaataatcttattccctatattaaattagatttgaagaggattaacgttgttttagtttgggtccagatcagccttatacaacatttctaaactcatttgtacttttaaaaaatttaaacacagacttctaaaattacttgatgtaagtaatttaaatcacttatgaccaagttattaaccttatgaatcagaagtctgacccttgtaggaaattatattcacatataaagtacatcagatctttgccatatattgatggttattatgcataaacacattgagttgtgttggaagcagatttataaacctgcatgttttctttgaatgatttctttttttcactgtaagacactcctttaaataatgcctatctttaactttttaagactatttggaaaaatgcagtgtctcagctgtccccagggaaattaagtggaattcaactaagatctgttaataagatgtcagaataactaataattttattaggaaaaaatcatgttttaaatttcaaaatgacacttatttgtcaagtaatatgatcttggaaaattttaaagaaaaataatcctacttataaactacttttttataattgttttcagaaaaaaagtttacagtcttaaggaaaatattcaggtctatcatatggtttgacagattttttaaaagttatttttggtaaggtcttcttttagaaaaaaattaatctcaagggttttttgtaccactataatctctaatacttactcagaattactgtgtatttacttaatttcttattatgtgccttattatgtgcttaagatacaataggttagagtttaatctaaatatcttgaaagctatattgtgggcttggtaagcattttgttttttctttctctgttttggtaaggatttaaaatttttttcattgcaattttaagtggttttcaataagtaatagtttttatcaaatttttggtgcttggtgcagagacggtgtggggaagggtgaatggttttgggaataattcagtgcacacctgtaggcctctttacattgtgactgataggggttattgcatatcaatttggggctgtagagtgcaatctcagtttcatctttttcacccatcagaatttgtctcaggattacttggtttttctcagtcctcaagcgagaacttgcttttctttgttaatgtgactttcattactgagtacccacgtatttggagtatgagaaggtgggttatttctcatactctgtccctctctttttcattgaatgtaagagtacattttaatgttgcttcagtgattgtataatgtaaaattgtttctttttaataagaaa

SEQ ID NO: 167754 - DNA, 7240 bp, Homo sapiens
  Payload ID: 13001
  Gene Symbol: PTBP3
  Gene Name: polypyrimidine tract binding protein 3
  Uniprot ID: O95758
  ENST ID: ENST00000374257
  CDS Start-End: 250-1824
gggggcgcggcggtggcgggagcgtgcccggtccccgcccctgttcccactctccttccacctcggaccggccggggctccgcagagccaaagctcgcttgtccccggaaccgccctgctgccgccgcctgcttcctctgctcgcggttagcccgtcagtccctgctctgtgcgcgcctccatctgggccatggatggcggggatctgatgagcttctttcttctggcatcattaacggaccttttaccatgaatagttctactccttctacaggtgtgtatgctaatgggaatgacagcaagaaatttaaacgagatagacctccctgttcgccttcccgtgttctccatcttcgaaaaattccatgtgatgtcaccgaagcagagatcatatcattaggtctaccatttggcaaagtaactaatcttttgatgttgaaaggaaaaagccaggctttcttagaaatggcttctgaggaagctgccgttactatggtgaattattacactcctattactcctcaccttcgaagccagcctgtttatattcagtattccaatcacagagaacttaagactgacaatctacctaatcaagctcgagcccaagctgcactgcaggctgtcagtgccgtccaatcaggaagcctggccctttctggaggtccttccaatgaaggcacagtcctacctgggcagagccctgtgcttcgaataattattgaaaacctcttttaccctgttaccctggaagttcttcatcagatattttctaaatttggcacagtcttgaagattatcacctttacaaagaataatcagtttcaagccttgcttcagtatgctgacccagtaaatgcacattatgccaaaatggctctggatggccagaatatctataatgcatgctgcactctgcgcattgacttctccaagctcaccagccttaatgtgaaatataataatgacaaaagcagagacttcactcgcttagaccttcctactggtgatggccagccatcccttgaaccccctatggctgctgcttttggtgcaccgggtataatttcttcaccatatgcaggggctgctggatttgccccagccattggatttcctcaagctacaggtctatcagttccagctgttcctggagctcttggtcctctcacaatcacctcttctgctgtcactggaaggatggccattcctggggctagtggtataccaggaaattctgttctactcgtcacaaatctcaatcctgatcttatcacaccacatgggctttttatcctatttggagtctatggtgatgtacatcgagtgaagattatgtttaataagaaagaaaatgccttggttcagatggcggatgcaaatcaagctcagctagcaatgaaccatctaagtggtcagagactttatgggaaagtgcttcgtgctacactgtccaaacatcaagcagtacagcttcctcgagagggacaagaagaccaaggtctgactaaggatttcagcaatagtcctttgcatcgctttaaaaagccgggctctaaaaacttccagaatatctttccaccatcagccactctgcatctttccaacattcccccttctgttacagtggatgatctgaagaaccttttcatagaagctggatgttcagtgaaggcttttaaattctttcagaaagatcgcaaaatggcgctcattcaattgggatctgtggaagaagcaattcaggccctcattgagcttcataaccatgaccttggagaaaatcaccacctcagagtttccttctcaaaatctacaatctgacttttctgtgaatttttctcctaaaactggaccataatttcagtaaaaccttcagacatagactgaagcagctcaagaccaattttgcctctttcacaaaaataactctgagtttgatattcaagtatattttaaaaatcaagggattttttttttttgtattccccctgcccccgccagtcaaaggtttcttttccctttttaccatggtttctacaaaaataaccttcaggaaaaagaaaatcaggaaaaaaattttttttcaataatcttattccctatattaaattagatttgaagaggattaacgttgttttagtttgggtccagatcagccttatacaacatttctaaactcatttgtacttttaaaaaatttaaacacagacttctaaaattacttgatgtaagtaatttaaatcacttatgaccaagttattaaccttatgaatcagaagtctgacccttgtaggaaattatattcacatataaagtacatcagatctttgccatatattgatggttattatgcataaacacattgagttgtgttggaagcagatttataaacctgcatgttttctttgaatgatttctttttttcactgtaagacactcctttaaataatgcctatctttaactttttaagactatttggaaaaatgcagtgtctcagctgtccccagggaaattaagtggaattcaactaagatctgttaataagatgtcagaataactaataattttattaggaaaaaatcatgttttaaatttcaaaatgacacttatttgtcaagtaatatgatcttggaaaattttaaagaaaaataatcctacttataaactacttttttataattgttttcagaaaaaaagtttacagtcttaaggaaaatattcaggtctatcatatggtttgacagattttttaaaagttatttttggtaaggtcttcttttagaaaaaaattaatctcaagggttttttgtaccactataatctctaatacttactcagaattactgtgtatttacttaatttcttattatgtgccttattatgtgcttaagatacaataggttagagtttaatctaaatatcttgaaagctatattgtgggcttggtaagcattttgttttttctttctctgttttggtaaggatttaaaatttttttcattgcaattttaagtggttttcaataagtaatagtttttatcaaatttttggtgcttggtgcagagacggtgtggggaagggtgaatggttttgggaataattcagtgcacacctgtaggcctctttacattgtgactgataggggttattgcatatcaatttggggctgtagagtgcaatctcagtttcatctttttcacccatcagaatttgtctcaggattacttggtttttctcagtcctcaagcgagaacttgcttttctttgttaatgtgactttcattactgagtacccacgtatttggagtatgagaaggtgggttatttctcatactctgtccctctctttttcattgaatgtaagagtacattttaatgttgcttcagtgattgtataatgtaaaattgtttctttttaataagaaactttgctattatttcttcaattgttgatcagaattttttaaagcagaatttgtcaaaagggtcatttttttgtctaccccttttacacttttcagattctcaaagtgtctcatctcaacttttaaaagaataaagaatatcttgctgggcatggtggtgtgcgcctgtgcgcctgtagtcccagctacaggctgagcctgtaggcaggaggctacaggcaggaggatcacttgagcccaggagttcaaggctgcagtgcgctatgatcacatttgtgaatagccacttcactccagccctggaacatagtgtgaccccttctcttaaaagtaaaaattaagaaaatctcaatctctttgctgtattccagtgattaatttgaacatagggaggtttttacagaagaaattttaccaaaaaatagagactgcaagagatgatacagattgtttaaaaagcagaattcactcaccactgagcaacacttagttggtagaatagaaaggagggatactaagttaagacttttcaaatggatcagtttggctgaatagatagatatactcatgtatgtagttgtgggagtttttagttttttgtttttttacttatgaaataagttttgacctagacacaaggggtatatgaaggaggaaaaaaatttctttgcaaaatctcccaaaacttgcttttttttcccttccacacaggcactattataattttcagtgccatgttaaattggattatttcatttactttaagttaggaattactgtgtaatttattaattcatgattctcataacattcagcataagtgtagcaaagttgctaataacggaaggggatcatagtggtgttgaatgtaactttgaagtagggaatggccttttaagtctgagagagaacatttgaatccttttcagggatttgtgtaggggtgtgtttgtgtgtgtgtgtgaatgtgtgtgtgtgtagataagtgtatatacataaatacactcttctaaagttgtatatacatatgcacattacatacattttaatttattgacaaaattaaccaaattaagatttggagatgtgggatgttcttgttttaaaatagcatgtttgaaaccatcagtttgtgtctaaaattagctgtagcacatggatgttgtccatattaagctatttgctgtttgaattatagaggtctacagtatttgtgttggcatagtttttgtaaaaaaaagattaaaaaatatcaggatggtggaaaaactagatctgtgtatctctgttttggcatgcatttattcagtatcttctagcaatggtttttctctgttgatctaccgtagtatcctatttttaagtttattttatttttaaggagtattgtcatcacttttcaaggtgtcttgacttctacacaaagtatatatattcaggactttaaaaaatagcagtacacatttaacagtagcgaattacaccaaaatgatttactttgagatttgaataatttgcatagcagtaaaatgtgttttgtgtaacatacaaatagaaaaatgacccagtatcttaattgatacttactggagagtatcagaattacccagcagctcttacagaatgccataaattctttaagactaaatattgaaatcaattatttgaagtaatgtttctgatttactgttaaaagttgctgagctcagtttttggagatatcatttatgcctgcctgttcccttatgacagtgaggccttctttggctccacctagtatgataatcatgggttctgttttagttgatgagaagtggctcctatgaatgcctctgctcaatttctttttattttactttattttatttttaggggtctcgccaactcctgggctcaagtgattctcctgcttccacctccccacagtgctgggattacaggcatgagccaccacgcctggctctctgttcttttcagtgtctccgtgccatcagtcagcagtgcttacatgtttagcatattgtcatgcagtttctcttctgttcccacgagatatttttggacaaaaaattgacaaaagtacatgtgtttttccccacctatcccttagaaaacctaatgtgtactgctatttttaaaaccaaaaagagacagcgtgacgatgcgtaaagcatttttcttagcctttcctttgtcttgatctgttaatgagaacaaaactgccagactcaaaatactctactattgtgctgaaagaaatacaatttagattgcacaaaatttgaaaatataactcagctgtcttttaaaagagttgtgttgttatctacaagactattagcagtcttttttcagagcaaattttaacagctagttgtgagtggtttaaaatatagaaaattattaaaatcttagtttgaggggttttatagtgggagaaaaaacaggaccaaagtttatgtgccttcttcagtagtcttaattgaccttttcttcctatttgagactaaagtagtatcagtattctggttttcaggaaatatgtactatatagttttaaaagaatgttgtcccaccaactattcatccaagcaaagaattgtaactataaataaagtctcagttacacttttgcctttatcacataatattcattgtagagcattgtgcaggtccaagaatagagctgctcaaaatctttgtggtagtttccttagtttttgtaacctgaggcatatgttccagagaacagggatatttgtctggtccagtgaccttggtgatcatagtcataattgaaagatgcctatggcatgcttaaatcagcattgtcaactgatttgttgttgtattattttcacttcttggatctatgtagtagttgtaataacaaatatttaaatagctatttttttgatgccattaaaaaaatcatactctggccttttttcccccttactgttgtttcccagatcttttaaaaattcatcccatatccagaaagtaccagttataaagattgctgaccaagcaaagttttgcatcaaagtgtcacctcattgctctgaccaaagactgactgttgtggttttaactcctctctgtaaagcattttgcattttccccaagctcctttctgaaagaagaaccagtgcagagcggcctttactttcaatttctactgctgaatagactacttagagaaaatgtgagtttcagtgtgaacagaatggattaggatgacgagtttgatgggcattttcagtactgtatctaagaaaaaaaaaatagcacagctaggagcctctgacattgtctggtgttttacgtggtctgttcatcaaaattccccttttcagtttttaagaatgttcgtctaacagaagaaaatgctgtaaatatttgtaacaacattttttttaacaaggccaaaaaagaaaaaaaggtttttgggaacaaatgaacttataaagtggttttatataaaacatcaattgtcttgtatattttggataagcagcagtaccagctttcatttgtaacagtctgtggcattggaaaaaaaggagtctgtgattgttgaagtgaattatgttataaatgcaaagagaagataaaatattaaaaaacatattttctaaatgcgtagtgcatggttaattcaagcttctgtacactacagtatattccattttcgttcagtttgtatatttgctgactattacttgatatctctaatctcttttcctaacaaatatagcattgtagcatgccttttaataaatgtcatgacatctgtactctcttaaaa

SEQ ID NO: 167755 - DNA, 368 bp, Homo sapiens
  Payload ID: 13001
  Gene Symbol: PTBP3
  Gene Name: polypyrimidine tract binding protein 3
  ENST ID: ENST00000450374
  CDS Start-End: 138-368
ccttccacctcggaccggccggggctccgcagagccaaagctcgcttgtccccggaaccgccctgctgccgccgcctgcttcctctgctcgcggttagcccgtcagtccctgctctgtgcgcgcctccatctgggccatggatggtgttgttacagatcttataacagtcggtttaaagcggggatctgatgagcttctttcttctggcatcattaacggaccttttaccatgaatagttctactccttctacaggtgtgtatgctaatgggaatgacagcaagaaatttaaacgagatagacctccctgttcgccttcccgtgttctccatcttcgaaaaattccatgtgatgtcaccgaagcagag

SEQ ID NO: 167756 - DNA, 7995 bp, Homo sapiens
  Payload ID: 13001
  Gene Symbol: PTBP3
  Gene Name: polypyrimidine tract binding protein 3
  Uniprot ID: O95758
  ENST ID: ENST00000458258
  CDS Start-End: 184-1860
gaggtggggcgagcggccgacggcgggtgcacgcgtcggtacacgtctgggcggcgacctggtcgcaagccatggtcccacgcggggtcccagggccgccgcgggacttggccgaggtctcccgacttgtgctgtgagatacgttaacgctttctcgacaccaggggtctggacttagtgaccatggacgcttccccctcacctttctctctccccaagaaacttaatgaattatctgcccgtcggggatctgatgagcttctttcttctggcatcattaacggaccttttaccatgaatagttctactccttctacagctaatgggaatgacagcaagaaatttaaacgagatagacctccctgttcgccttcccgtgttctccatcttcgaaaaattccatgtgatgtcaccgaagcagagatcatatcattaggtctaccatttggcaaagtaactaatcttttgatgttgaaaggaaaaagccaggctttcttagaaatggcttctgaggaagctgccgttactatggtgaattattacactcctattactcctcaccttcgaagccagcctgtttatattcagtattccaatcacagagaacttaagactgacaatctacctaatcaagctcgagcccaagctgcactgcaggctgtcagtgccgtccaatcaggaagcctggccctttctggaggtccttccaatgaaggcacagtcctacctgggcagagccctgtgcttcgaataattattgaaaacctcttttaccctgttaccctggaagttcttcatcagatattttctaaatttggcacagtcttgaagattatcacctttacaaagaataatcagtttcaagccttgcttcagtatgctgacccagtaaatgcacattatgccaaaatggctctggatggccagaatatctataatgcatgctgcactctgcgcattgacttctccaagctcaccagccttaatgtgaaatataataatgacaaaagcagagacttcactcgcttagaccttcctactggtgatggccagccatcccttgaaccccctatggctgctgcttttggtgcaccgggtataatttcttcaccatatgcaggggctgctggatttgccccagccattggatttcctcaagctacaggtctatcagttccagctgttcctggagctcttggtcctctcacaatcacctcttctgctgtcactggaaggatggccattcctggggctagtggtataccaggaaattctgttctactcgtcacaaatctcaatcctgatcttatcacaccacatgggctttttatcctatttggagtctatggtgatgtacatcgagtgaagattatgtttaataagaaagaaaatgccttggttcagatggcggatgcaaatcaagctcagctagcaatgaaccatctaagtggtcagagactttatgggaaagtgcttcgtgctacactgtccaaacatcaagcagtacagcttcctcgagagggacaagaagaccaaggtctgactaaggatttcagcaatagtcctttgcatcgctttaaaaagccgggctctaaaaacttccagaatatctttccaccatcagccactctgcatctttccaacattcccccttctgttacagtggatgatctgaagaaccttttcatagaagctggatgttcagtgaaggcttttaaattctttcagaaagatcgcaaaatggcgctcattcaattgggatctgtggaagaagcaattcaggccctcattgagcttcataaccatgaccttggagaaaatcaccacctcagagtttccttctcaaaatctacaatctgacttttctgtgaatttttctcctaaaactggaccataatttcagtaaaaccttcagacatagactgaagcagctcaagaccaattttgcctctttcacaaaaataactctgagtttgatattcaagtatattttaaaaatcaagggattttttttttttgtattccccctgcccccgccagtcaaaggtttcttttccctttttaccatggtttctacaaaaataaccttcaggaaaaagaaaatcaggaaaaaaattttttttcaataatcttattccctatattaaattagatttgaagaggattaacgttgttttagtttgggtccagatcagccttatacaacatttctaaactcatttgtacttttaaaaaatttaaacacagacttctaaaattacttgatgtaagtaatttaaatcacttatgaccaagttattaaccttatgaatcagaagtctgacccttgtaggaaattatattcacatataaagtacatcagatctttgccatatattgatggttattatgcataaacacattgagttgtgttggaagcagatttataaacctgcatgttttctttgaatgatttctttttttcactgtaagacactcctttaaataatgcctatctttaactttttaagactatttggaaaaatgcagtgtctcagctgtccccagggaaattaagtggaattcaactaagatctgttaataagatgtcagaataactaataattttattaggaaaaaatcatgttttaaatttcaaaatgacacttatttgtcaagtaatatgatcttggaaaattttaaagaaaaataatcctacttataaactacttttttataattgttttcagaaaaaaagtttacagtcttaaggaaaatattcaggtctatcatatggtttgacagattttttaaaagttatttttggtaaggtcttcttttagaaaaaaattaatctcaagggttttttgtaccactataatctctaatacttactcagaattactgtgtatttacttaatttcttattatgtgccttattatgtgcttaagatacaataggttagagtttaatctaaatatcttgaaagctatattgtgggcttggtaagcattttgttttttctttctctgttttggtaaggatttaaaatttttttcattgcaattttaagtggttttcaataagtaatagtttttatcaaatttttggtgcttggtgcagagacggtgtggggaagggtgaatggttttgggaataattcagtgcacacctgtaggcctctttacattgtgactgataggggttattgcatatcaatttggggctgtagagtgcaatctcagtttcatctttttcacccatcagaatttgtctcaggattacttggtttttctcagtcctcaagcgagaacttgcttttctttgttaatgtgactttcattactgagtacccacgtatttggagtatgagaaggtgggttatttctcatactctgtccctctctttttcattgaatgtaagagtacattttaatgttgcttcagtgattgtataatgtaaaattgtttctttttaataagaaactttgctattatttcttcaattgttgatcagaattttttaaagcagaatttgtcaaaagggtcatttttttgtctaccccttttacacttttcagattctcaaagtgtctcatctcaacttttaaaagaataaagaatatcttgctgggcatggtggtgtgcgcctgtgcgcctgtagtcccagctacaggctgagcctgtaggcaggaggctacaggcaggaggatcacttgagcccaggagttcaaggctgcagtgcgctatgatcacatttgtgaatagccacttcactccagccctggaacatagtgtgaccccttctcttaaaagtaaaaattaagaaaatctcaatctctttgctgtattccagtgattaatttgaacatagggaggtttttacagaagaaattttaccaaaaaatagagactgcaagagatgatacagattgtttaaaaagcagaattcactcaccactgagcaacacttagttggtagaatagaaaggagggatactaagttaagacttttcaaatggatcagtttggctgaatagatagatatactcatgtatgtagttgtgggagtttttagttttttgtttttttacttatgaaataagttttgacctagacacaaggggtatatgaaggaggaaaaaaatttctttgcaaaatctcccaaaacttgcttttttttcccttccacacaggcactattataattttcagtgccatgttaaattggattatttcatttactttaagttaggaattactgtgtaatttattaattcatgattctcataacattcagcataagtgtagcaaagttgctaataacggaaggggatcatagtggtgttgaatgtaactttgaagtagggaatggccttttaagtctgagagagaacatttgaatccttttcagggatttgtgtaggggtgtgtttgtgtgtgtgtgtgaatgtgtgtgtgtgtagataagtgtatatacataaatacactcttctaaagttgtatatacatatgcacattacatacattttaatttattgacaaaattaaccaaattaagatttggagatgtgggatgttcttgttttaaaatagcatgtttgaaaccatcagtttgtgtctaaaattagctgtagcacatggatgttgtccatattaagctatttgctgtttgaattatagaggtctacagtatttgtgttggcatagtttttgtaaaaaaaagattaaaaaatatcaggatggtggaaaaactagatctgtgtatctctgttttggcatgcatttattcagtatcttctagcaatggtttttctctgttgatctaccgtagtatcctatttttaagtttattttatttttaaggagtattgtcatcacttttcaaggtgtcttgacttctacacaaagtatatatattcaggactttaaaaaatagcagtacacatttaacagtagcgaattacaccaaaatgatttactttgagatttgaataatttgcatagcagtaaaatgtgttttgtgtaacatacaaatagaaaaatgacccagtatcttaattgatacttactggagagtatcagaattacccagcagctcttacagaatgccataaattctttaagactaaatattgaaatcaattatttgaagtaatgtttctgatttactgttaaaagttgctgagctcagtttttggagatatcatttatgcctgcctgttcccttatgacagtgaggccttctttggctccacctagtatgataatcatgggttctgttttagttgatgagaagtggctcctatgaatgcctctgctcaatttctttttattttactttattttatttttaggggtctcgccaactcctgggctcaagtgattctcctgcttccacctccccacagtgctgggattacaggcatgagccaccacgcctggctctctgttcttttcagtgtctccgtgccatcagtcagcagtgcttacatgtttagcatattgtcatgcagtttctcttctgttcccacgagatatttttggacaaaaaattgacaaaagtacatgtgtttttccccacctatcccttagaaaacctaatgtgtactgctatttttaaaaccaaaaagagacagcgtgacgatgcgtaaagcatttttcttagcctttcctttgtcttgatctgttaatgagaacaaaactgccagactcaaaatactctactattgtgctgaaagaaatacaatttagattgcacaaaatttgaaaatataactcagctgtcttttaaaagagttgtgttgttatctacaagactattagcagtcttttttcagagcaaattttaacagctagttgtgagtggtttaaaatatagaaaattattaaaatcttagtttgaggggttttatagtgggagaaaaaacaggaccaaagtttatgtgccttcttcagtagtcttaattgaccttttcttcctatttgagactaaagtagtatcagtattctggttttcaggaaatatgtactatatagttttaaaagaatgttgtcccaccaactattcatccaagcaaagaattgtaactataaataaagtctcagttacacttttgcctttatcacataatattcattgtagagcattgtgcaggtccaagaatagagctgctcaaaatctttgtggtagtttccttagtttttgtaacctgaggcatatgttccagagaacagggatatttgtctggtccagtgaccttggtgatcatagtcataattgaaagatgcctatggcatgcttaaatcagcattgtcaactgatttgttgttgtattattttcacttcttggatctatgtagtagttgtaataacaaatatttaaatagctatttttttgatgccattaaaaaaatcatactctggccttttttcccccttactgttgtttcccagatcttttaaaaattcatcccatatccagaaagtaccagttataaagattgctgaccaagcaaagttttgcatcaaagtgtcacctcattgctctgaccaaagactgactgttgtggttttaactcctctctgtaaagcattttgcattttccccaagctcctttctgaaagaagaaccagtgcagagcggcctttactttcaatttctactgctgaatagactacttagagaaaatgtgagtttcagtgtgaacagaatggattaggatgacgagtttgatgggcattttcagtactgtatctaagaaaaaaaaaatagcacagctaggagcctctgacattgtctggtgttttacgtggtctgttcatcaaaattccccttttcagtttttaagaatgttcgtctaacagaagaaaatgctgtaaatatttgtaacaacattttttttaacaaggccaaaaaagaaaaaaaggtttttgggaacaaatgaacttataaagtggttttatataaaacatcaattgtcttgtatattttggataagcagcagtaccagctttcatttgtaacagtctgtggcattggaaaaaaaggagtctgtgattgttgaagtgaattatgttataaatgcaaagagaagataaaatattaaaaaacatattttctaaatgcgtagtgcatggttaattcaagcttctgtacactacagtatattccattttcgttcagtttgtatatttgctgactattacttgatatctctaatctcttttcctaacaaatatagcattgtagcatgccttttaataaatgtcatgacatctgtactctcttaaaatttttctgtgttcttgtctgtactttgggtttccctttgtcttacctgtaattctaatgatgtcctattttcttttcttttccatagccatccatctaaacgtgtcatggttagtgaatagtgagcacatattcaaacaatgttcaaaatgggaaaaacacaaaatctattaactgtctctgtcttcatttaggaataattctcgttttgaggagcaaagtgctttcctaatcttcctatgatgcaccttctctggcactgccccgtaatgcaggggcatggcggcatgctttcttgcttgcacactcactctcctttttctttctctctttctccccatatgtgcagtgccaaactacagttggaacactatttccagttttgttcagtatttggcttccctacggcattagtatacatacactttgagacacaaggtgtgatctcaaaccaaatttgtgtcctctttaaaaaggtagcacagatactagctgatgctacattccttttccttagacaaacgttttacttctcagatctttaaagaattgttggattgcagaagtctagacttagcgttcattgtatattttagtctcctggaagtgggaatttattttgaatggaatagaaaattaggtaatcactactaatctttgctggcttacctgtaaaatctgtggtctccataaatactgggaaaataaataggtattttt

SEQ ID NO: 167757 - DNA, 3596 bp, Homo sapiens
  Payload ID: 13002
  Gene Symbol: PNPT1
  Gene Name: polyribonucleotide nucleotidyltransferase 1
  ENST ID: ENST00000260604
  CDS Start-End: 20-559
tgaccgcgtgccgggtgtcatggcggcctgcaggtactgctgctcgtgcctccggctccggcccctgagcgatggtcctttccttctgccacggcgggatcgggcactcacccagttgcaagtgcgagcactatggagtagcgcagggtctcgagctgtggccgtggacttaggcaacaggaaattagaaatatcttctggaaagctggccagatttgcagatggctctgctgtagtacagtcaggtgacactgcagtaatggtcacagcggtcagtaaaacaaaaccttccccttcccagtttatgcctttggtggttgactacagacaaaaagctgctgcagcaggtagaattcccacaaactatctgagaagagagattggtacttctgataaagaaattctaacaagtcgaataatagatcgttcaattagaccgctctttccagctggctacttctatgatacacaggttctgtgtaatctgttagcagtagatggtgtaaatgagcctgatgtcctagcaattaatggcggtaagtataaaagtagagattaaaattatcagattaaaaatttttttaaagcaatgaaattttaatttcggccctgatttttctccttttttaagcttccgtagccctctcattatcagatattccttggaatggacctgttggggcagtacgaataggaataattgatggagaatatgttgttaacccaacaagaaaagaaatgtcttctagtactttaaatttagtggttgctggagcacctaaaagtcagattgtcatgttggaagcctctgcagagaacattttacagcaggacttttgccatgctatcaaagtgggagtgaaatatacccaacaaataattcagggcattcagcagttggtaaaagaaactggtgttaccaagaggacacctcagaagttatttaccccttcgccagagattgtgaaatatactcataaacttgctatggagagactctatgcagtttttacagattacgagcatgacaaagtttccagagatgaagctgttaacaaaataagattagatacggaggaacaactaaaagaaaaatttccagaagccgatccatatgaaataatagaatccttcaatgttgttgcaaaggaagtttttagaagtattgttttgaatgaatacaaaaggtgcgatggtcgggatttgacttcacttaggaatgtaagttgtgaggtagatatgtttaaaacccttcatggatcagcattatttcaaagaggacaaacacaggtgctttgtaccgttacatttgattcattagaatctggtattaagtcagatcaagttataacagctataaatgggataaaagataaaaatttcatgctgcactacgagtttcctccttatgcaactaatgaaattggcaaagtcactggtttaaatagaagagaacttgggcatggtgctcttgctgagaaagctttgtatcctgttattccccgagattttcctttcaccataagagttacatctgaagtcctagagtcaaatgggtcatcttctatggcatctgcatgtggcggaagtttagcattaatggattcaggggttccaatttcatctgctgttgcaggcgtagcaataggattggtcaccaaaaccgatcctgagaagggtgaaatagaagattatcgtttgctgacagatattttgggaattgaagattacaatggtgacatggacttcaaaatagctggcactaataaaggaataactgcattacaggctgatattaaattacctggaataccaataaaaattgtgatggaggctattcaacaagcttcagtggcaaaaaaggagatattacagatcatgaacaaaactatttcaaaacctcgagcatctagaaaagaaaatggacctgttgtagaaactgttcaggttccattatcaaaacgagcaaaatttgttggacctggtggctataacttaaaaaaacttcaggctgaaacagtcaggtggatgaagaaacgttttctgtatttgcaccaacacccagtgctatgcatgaggcaagagacttcattactgaaatctgcaaggatgatcaggagcagcaattagaatttggagcagtatataccgccacaataactgaaatcagagatactggtgtaatggtaaaattatatccaaatatgactgcggtactgcttcataacacacaacttgatcaacgaaagattaaacatcctactgccctaggattagaagttggccaagaaattcaggtgaaatactttggacgtgacccagccgatggaagaatgaggctttctcgaaaagtgcttcagtcgccagctacaaccgtggtcagaactttgaatgacagaagtagtattgtaatgggagaacctatttcacagtcatcatctaattctcagtgatttttttttttaaagagaattctagaattctattttgtctagggtgatgtgctgtagagcaacattttagtagtatcttccattgtgtagatttctatataatataaatacattttaattatttgtactaaaatgctcatttacatgtgccatttttttaattcgagtaacccatatttgtttaattgtatttacattataaatcaagaaatatttattattaaaagtaagtcatttatacatcttagaaaaaattacatagttttgtttttacaattctgaaatatatgaaaaacttagatagaatatgtcatatgttattataacagatctcttcctacatcttatttttcttctttgtatacagtagtgacagtttaccttcagtcatcctacaggtcacctctgtgcccaacaactttacttgcctacaacggttcacaaactggaacaggccatattcaaagccagtgcctatttcttcagaactgttaacagatatagtgagttgagggagctaatctgatacacttttgataatataatgcctttcaaattagttaccaaatcataaacagagtggaataaatataaatgagattctaactaggatgaatgtggtagtaatgatgtatatttttcaaatttacctaaacagaaagattattggctaaggcaggcggatcatgagatcaggagatcgagaccatcctggctaacacggtgaaaccccgtctctactaaaagtgcaaaaattagccgggcgtggtggcgcatgcctgtaatcctagctactcaggaggctgaggcagaagaatcacttcaacccaggaggtggaggttgtagtgagccgagattgcgccattgcactccagctcaggcaacaagagcaaaactccgtctcaaaaaaaaaaaaaaaattgtttacttatcaaattgaactaggtcaatttgaatatgtgtattgctctaatgtatggaagttcttagtataagagctgaaggatcatgactttcggttaatagatgtttgaaatagatgtttagaggttactgatacacatgtcaagttgttcattcccatcatttaaaatatcaccttataattccacagaaaagtaaatggtatgtggacgtcataa

SEQ ID NO: 167758 - DNA, 3308 bp, Homo sapiens
  Payload ID: 13002
  Gene Symbol: PNPT1
  Gene Name: polyribonucleotide nucleotidyltransferase 1
  Uniprot ID: Q8TCS8
  ENST ID: ENST00000415374
  CDS Start-End: 1-2352
atggcggcctgcaggtactgctgctcgtgcctccggctccggcccctgagcgatggtcctttccttctgccacggcgggatcgggcactcacccagttgcaagtgcgagcactatggagtagcgcagggtctcgagctgtggccgtggacttaggcaacaggaaattagaaatatcttctggaaagctggccagatttgcagatggctctgctgtagtacagtcaggtgacactgcagtaatggtcacagcggtcagtaaaacaaaaccttccccttcccagtttatgcctttggtggttgactacagacaaaaagctgctgcagcaggtagaattcccacaaactatctgagaagagagattggtacttctgataaagaaattctaacaagtcgaataatagatcgttcaattagaccgctctttccagctggctacttctatgatacacaggttctgtgtaatctgttagcagtagatggtgtaaatgagcctgatgtcctagcaattaatggcgcttccgtagccctctcattatcagatattccttggaatggacctgttggggcagtacgaataggaataattgatggagaatatgttgttaacccaacaagaaaagaaatgtcttctagtactttaaatttagtggttgctggagcacctaaaagtcagattgtcatgttggaagcctctgcagagaacattttacagcaggacttttgccatgctatcaaagtgggagtgaaatatacccaacaaataattcagggcattcagcagttggtaaaagaaactggtgttaccaagaggacacctcagaagttatttaccccttcgccagagattgtgaaatatactcataaacttgctatggagagactctatgcagtttttacagattacgagcatgacaaagtttccagagatgaagctgttaacaaaataagattagatacggaggaacaactaaaagaaaaatttccagaagccgatccatatgaaataatagaatccttcaatgttgttgcaaaggaagtttttagaagtattgttttgaatgaatacaaaaggtgcgatggtcgggatttgacttcacttaggaatgtaagttgtgaggtagatatgtttaaaacccttcatggatcagcattatttcaaagaggacaaacacaggtgctttgtaccgttacatttgattcattagaatctggtattaagtcagatcaagttataacagctataaatgggataaaagataaaaatttcatgctgcactacgagtttcctccttatgcaactaatgaaattggcaaagtcactggtttaaatagaagagaacttgggcatggtgctcttgctgagaaagctttgtatcctgttattccccgagattttcctttcaccataagagttacatctgaagtcctagagtcaaatgggtcatcttctatggcatctgcatgtggcggaagtttagcattaatggattcaggggttccaatttcatctgctgttgcaggcgtagcaataggattggtcaccaaaaccgatcctgagaagggtgaaatagaagattatcgtttgctgacagatattttgggaattgaagattacaatggtgacatggacttcaaaatagctggcactaataaaggaataactgcattacaggctgatattaaattacctggaataccaataaaaattgtgatggaggctattcaacaagcttcagtggcaaaaaaggagatattacagatcatgaacaaaactatttcaaaacctcgagcatctagaaaagaaaatggacctgttgtagaaactgttcaggttccattatcaaaacgagcaaaatttgttggacctggtggctataacttaaaaaaacttcaggctgaaacaggtgtaactattagtcaggtggatgaagaaacgttttctgtatttgcaccaacacccagtgctatgcatgaggcaagagacttcattactgaaatctgcaaggatgatcaggagcagcaattagaatttggagcagtatataccgccacaataactgaaatcagagatactggtgtaatggtaaaattatatccaaatatgactgcggtactgcttcataacacacaacttgatcaacgaaagattaaacatcctactgccctaggattagaagttggccaagaaattcaggtgaaatactttggacgtgacccagccgatggaagaatgaggctttctcgaaaagtgcttcagtcgccagctacaaccgtggtcagaactttgaatgacagaagtagtattgtaatgggagaacctatttcacagtcatcatctaattctcagtgatttttttttttaaagagaattctagaattctattttgtctagggtgatgtgctgtagagcaacattttagtagtatcttccattgtgtagatttctatataatataaatacattttaattatttgtactaaaatgctcatttacatgtgccatttttttaattcgagtaacccatatttgtttaattgtatttacattataaatcaagaaatatttattattaaaagtaagtcatttatacatcttagaaaaaattacatagttttgtttttacaattctgaaatatatgaaaaacttagatagaatatgtcatatgttattataacagatctcttcctacatcttatttttcttctttgtatacagtagtgacagtttaccttcagtcatcctacaggtcacctctgtgcccaacaactttacttgcctacaacggttcacaaactggaacaggccatattcaaagccagtgcctatttcttcagaactgttaacagatatagtgagttgagggagctaatctgatacacttttgataatataatgcctttcaaattagttaccaaatcataaacagagtggaataaatataaatgagattctaactaggatgaatgtggtagtaatgatgtatatttttcaaatttacctaaacagaaagattattggctaaggcatggtggctcacacctgtaatcccaacactttgggaggtcaaggcgggtagatcacctgaggtcaggagttcgagaccagcctggccaacatggtgaaaccccatctctactaaaaatacaaaaattagctgggtgtggtggcgggcgcctgtaatcccagctactcaggaggctgaggcaggagaatctcttgaacctgggaggcagaggtggcagtgagctgagatcgcaccactgcactccagcctgggcaaaaagagtaaaactccatctcaaaa

SEQ ID NO: 167759 - DNA, 4411 bp, Homo sapiens
  Payload ID: 13002
  Gene Symbol: PNPT1
  Gene Name: polyribonucleotide nucleotidyltransferase 1
  Uniprot ID: Q8TCS8
  ENST ID: ENST00000447944
  CDS Start-End: 88-2439
ggaaacgaaactccatcaggctccgccccacggtctgcggagtgagccaatcagggcacagcctgcgttgaccgcgtgccgggtgtcatggcggcctgcaggtactgctgctcgtgcctccggctccggcccctgagcgatggtcctttccttctgccacggcgggatcgggcactcacccagttgcaagtgcgagcactatggagtagcgcagggtctcgagctgtggccgtggacttaggcaacaggaaattagaaatatcttctggaaagctggccagatttgcagatggctctgctgtagtacagtcaggtgacactgcagtaatggtcacagcggtcagtaaaacaaaaccttccccttcccagtttatgcctttggtggttgactacagacaaaaagctgctgcagcaggtagaattcccacaaactatctgagaagagagattggtacttctgataaagaaattctaacaagtcgaataatagatcgttcaattagaccgctctttccagctggctacttctatgatacacaggttctgtgtaatctgttagcagtagatggtgtaaatgagcctgatgtcctagcaattaatggcgcttccgtagccctctcattatcagatattccttggaatggacctgttggggcagtacgaataggaataattgatggagaatatgttgttaacccaacaagaaaagaaatgtcttctagtactttaaatttagtggttgctggagcacctaaaagtcagattgtcatgttggaagcctctgcagagaacattttacagcaggacttttgccatgctatcaaagtgggagtgaaatatacccaacaaataattcagggcattcagcagttggtaaaagaaactggtgttaccaagaggacacctcagaagttatttaccccttcgccagagattgtgaaatatactcataaacttgctatggagagactctatgcagtttttacagattacgagcatgacaaagtttccagagatgaagctgttaacaaaataagattagatacggaggaacaactaaaagaaaaatttccagaagccgatccatatgaaataatagaatccttcaatgttgttgcaaaggaagtttttagaagtattgttttgaatgaatacaaaaggtgcgatggtcgggatttgacttcacttaggaatgtaagttgtgaggtagatatgtttaaaacccttcatggatcagcattatttcaaagaggacaaacacaggtgctttgtaccgttacatttgattcattagaatctggtattaagtcagatcaagttataacagctataaatgggataaaagataaaaatttcatgctgcactacgagtttcctccttatgcaactaatgaaattggcaaagtcactggtttaaatagaagagaacttgggcatggtgctcttgctgagaaagctttgtatcctgttattccccgagattttcctttcaccataagagttacatctgaagtcctagagtcaaatgggtcatcttctatggcatctgcatgtggcggaagtttagcattaatggattcaggggttccaatttcatctgctgttgcaggcgtagcaataggattggtcaccaaaaccgatcctgagaagggtgaaatagaagattatcgtttgctgacagatattttgggaattgaagattacaatggtgacatggacttcaaaatagctggcactaataaaggaataactgcattacaggctgatattaaattacctggaataccaataaaaattgtgatggaggctattcaacaagcttcagtggcaaaaaaggagatattacagatcatgaacaaaactatttcaaaacctcgagcatctagaaaagaaaatggacctgttgtagaaactgttcaggttccattatcaaaacgagcaaaatttgttggacctggtggctataacttaaaaaaacttcaggctgaaacaggtgtaactattagtcaggtggatgaagaaacgttttctgtatttgcaccaacacccagtgctatgcatgaggcaagagacttcattactgaaatctgcaaggatgatcaggagcagcaattagaatttggagcagtatataccgccacaataactgaaatcagagatactggtgtaatggtaaaattatatccaaatatgactgcggtactgcttcataacacacaacttgatcaacgaaagattaaacatcctactgccctaggattagaagttggccaagaaattcaggtgaaatactttggacgtgacccagccgatggaagaatgaggctttctcgaaaagtgcttcagtcgccagctacaaccgtggtcagaactttgaatgacagaagtagtattgtaatgggagaacctatttcacagtcatcatctaattctcagtgatttttttttttaaagagaattctagaattctattttgtctagggtgatgtgctgtagagcaacattttagtagtatcttccattgtgtagatttctatataatataaatacattttaattatttgtactaaaatgctcatttacatgtgccatttttttaattcgagtaacccatatttgtttaattgtatttacattataaatcaagaaatatttattattaaaagtaagtcatttatacatcttagaaaaaattacatagttttgtttttacaattctgaaatatatgaaaaacttagatagaatatgtcatatgttattataacagatctcttcctacatcttatttttcttctttgtatacagtagtgacagtttaccttcagtcatcctacaggtcacctctgtgcccaacaactttacttgcctacaacggttcacaaactggaacaggccatattcaaagccagtgcctatttcttcagaactgttaacagatatagtgagttgagggagctaatctgatacacttttgataatataatgcctttcaaattagttaccaaatcataaacagagtggaataaatataaatgagattctaactaggatgaatgtggtagtaatgatgtatatttttcaaatttacctaaacagaaagattattggctaaggcaggcggatcatgagatcaggagatcgagaccatcctggctaacacggtgaaaccccgtctctactaaaagtgcaaaaattagccgggcgtggtggcgcatgcctgtaatcctagctactcaggaggctgaggcagaagaatcacttcaacccaggaggtggaggttgtagtgagccgagattgcgccattgcactccagctcaggcaacaagagcaaaactccgtctcaaaaaaaaaaaaaaaattgtttacttatcaaattgaactaggtcaatttgaatatgtgtattgctctaatgtatggaagttcttagtataagagctgaaggatcatgactttcggttaatagatgtttgaaatagatgtttagaggttactgatacacatgtcaagttgttcattcccatcatttaaaatatcaccttataattccacagaaaagtaaatggtatgtggacgtcataatttagaatgtgtaatcttttttaaaatcttataaaaatacactggactcagtggtacgtgcctgtagtcccagctacttggaaggctgaagtgggaaggtcactagagcccagaagttcgacactgtagtgtgcaacaatcatacctgtgaatagctactgtactccagcctgggcaacatagcaggactcttatctctaaaaaaaattttaaatcttataaaaatgtaggtatatctggccaggcatggtggctcacacctgtaatcccaacactttgggaggtcaaggcgggtagatcacctgaggtcaggagttcgagaccagcctggccaacatggtgaaaccccatctctactaaaaatacaaaaattagctgggtgtggtggcgggcgcctgtaatcccagctactcaggaggctgaggcaggagaatctcttgaacctgggaggcagaggtggcagtgagctgagatcgcaccactgcactccagcctgggcaaaaagagtaaaactccatctcaaaaaaaaaaatggtgggcacagaagctcatgcctgtaattccagcactttgggaggccgaggcgggtggattacatgaggtcaggaattcaagaccagcctggccaacacggtaaaaccccatctctactaaaaatacaaaaattagctgggcatggtggcaggcacctgtaatcctagctactcgggaggctgaggcaggagaatcacttgagcctgggaaatggaggttgcagtgagccgagattgcgccattgcactccagcctgggcgacagagcaagactccgtctccagaaaaaaaaaaaa

SEQ ID NO: 167760 - DNA, 555 bp, Homo sapiens
  Payload ID: 13002
  Gene Symbol: PNPT1
  Gene Name: polyribonucleotide nucleotidyltransferase 1
  ENST ID: ENST00000415489
  CDS Start-End: 1-418
agatgaagctgttaacaaaataagattagatacggaggaacaactaaaagaaaaatttccagaagccgatccatatgaaataatagaatccttcaatgttgttgcaaaggaagtttttagaagtattgttttgaatgaatacaaaaggtgcgatggtcgggatttgacttcacttaggaatgtaagttgtgaggtagatatgtttaaaacccttcatggatcagcattatttcaaagaggacaaacacaggtgctttgtaccgttacatttgattcattagaatctggtattaagtcagatcaagttataacagctataaatgggataaaagataaaaatttcatgctgcactacgaggtgctcttgctgagaaagctttgtatcctgttattccccgagattttcctttcaccataagagttacatctgaagtcctagagtcaaatgggtcatcttctatggcatctgcatgtggcggaagtttagcattaatggattcaggggttccaatttcatctgctgttgcaggcgtagcaataggattggtcaccaaa

SEQ ID NO: 167761 - DNA, 583 bp, Homo sapiens
  Payload ID: 13002
  Gene Symbol: PNPT1
  Gene Name: polyribonucleotide nucleotidyltransferase 1
  ENST ID: ENST00000429805
  CDS Start-End: 41-256
caatcagggcacagcctgcgttgaccgcgtgccgggtgtcatggcggcctgcaggtactgctgctcgtgcctccggctccggcccctgagcgatggtcctttccttctgccacggcgggatcgggcactcacccagttgcaagtgcgagcactatggagtagcgcagggtctcgagctgtggccgtggacttaggcaacaggttgactacagacaaaaagctgctgcagcaggtagaattcccacaaactatctgagaagagagattggtacttctgataaagaaattctaacaagtcgaataatagatcgttcaattagaccgctctttccagctggctacttctatgatacacaggttctgtgtaatctgttagcagtagatggtgtaaatgagcctgatgtcctagcaattaatggcgcttccgtagccctctcattatcagatattccttggaatggacctgttggggcagtacgaataggaataattgatggagaatatgttgttaacccaacaagaaaagaaatgtcttctagtactttaaatttagtggttgctggagcacctaaaagtcagattg

SEQ ID NO: 167762 - DNA, 216 bp, Homo sapiens
  Payload ID: 13002
  Gene Symbol: PNPT1
  Gene Name: polyribonucleotide nucleotidyltransferase 1
  ENST ID: ENST00000625249
  CDS Start-End: 1-216
atggcggcctgcaggtactgctgctcgtgcctccggctccggcccctgagcgatggtcctttccttctgccacggcgggatcgggcactcacccagttgcaagtgcgagcactatggagtagcgcagggtctcgagctgtggccgtggacttaggcaacaggttgactacagacaaaaagctgctgcagcaggtagaattcccacaaactatctga

SEQ ID NO: 167763 - DNA, 977 bp, Homo sapiens
  Payload ID: 13003
  Gene Symbol: PBDC1
  Gene Name: polysaccharide biosynthesis domain containing 1
  ENST ID: ENST00000373357
  CDS Start-End: 100-798
agggagagcgcacggtggagccgccagttgagaaggactctgatccggctcagctttccaatcagctgcggaaggagccacgctttcgggggttgcaagatggcggccaccagtggaactgatgagccggtttccggggagttggtgtctgtggcacatgcgctttctctcccagcagagtcgtatggcaacgatcctgacattgagatggcttgggccatgagagcaatgcagcatgctgaagtctattacaagctgatttcatcagttgacccacagttcctgaaactcaccaaagtagatgaccaaatttactctgagttccggaaaaattttgagacccttaggatagatgtgttggacccagaagaactcaagtcagaatcagccaaagagcccccaggatacaattctttgccattgaaattgctcggaaccgggaaggctataacaaagctgtttatatcagtgttcaggacaaagaaggagagaaaggagtcaacaatggaggagaaaaaagagctgacagtggagaagaagagaacaccaagaatggaggagagaaaggagctgatagtggagaagaaaaagaggaaggaatcaacagagaagacaaaactgacaaaggaggagaaaaagggaaagaagctgacaaagaaatcaacaaaagtggtgaaaaagctatgtaaggtatacagggaacagcactctagaagctatgactcaattgagactacaagtaccacggtgctacttgcacagacccctttggttaaatgtaaattcttgtacaattgaaggatacgcagaaggacatctttctagtctaacagtcaggagctgctctggtcattcccttgtatgaactggtctaaagactgttagtggggtgttagttgatttttcctggtatactgtttcttggctgacactactggtcaagtaagaaatttgtaaataaatttcttttggttctt

SEQ ID NO: 167764 - DNA, 1201 bp, Homo sapiens
  Payload ID: 13003
  Gene Symbol: PBDC1
  Gene Name: polysaccharide biosynthesis domain containing 1
  Uniprot ID: Q9BVG4
  ENST ID: ENST00000373358
  CDS Start-End: 204-905
gtcaatcacctcagatctctcaagcagtccagcctacgcaacagtactccacctctgcgcctgtgcggggagggtaaggcggggccagcaacttcctcagctggagggagagcgcacggtggagccgccagttgagaaggactctgatccggctcagctttccaatcagctgcggaaggagccacgctttcgggggttgcaagatggcggccaccagtggaactgatgagccggtttccggggagttggtgtctgtggcacatgcgctttctctcccagcagagtcgtatggcaacgatcctgacattgagatggcttgggccatgagagcaatgcagcatgctgaagtctattacaagctgatttcatcagttgacccacagttcctgaaactcaccaaagtagatgaccaaatttactctgagttccggaaaaattttgagacccttaggatagatgtgttggacccagaagaactcaagtcagaatcagccaaagagaagtggaggccattctgcttgaagtttaatgggattgttgaagacttcaactatggtactttgctgcgactagattgttctcagggctacactgaggaaaacaccatctttgcccccaggatacaattctttgccattgaaattgctcggaaccgggaaggctataacaaagctgtttatatcagtgttcaggacaaagaaggagagaaaggagtcaacaatggaggagaaaaaagagctgacagtggagaagaagagaacaccaagaatggaggagagaaaggagctgatagtggagaagaaaaagaggaaggaatcaacagagaagacaaaactgacaaaggaggagaaaaagggaaagaagctgacaaagaaatcaacaaaagtggtgaaaaagctatgtaaggtatacagggaacagcactctagaagctatgactcaattgagactacaagtaccacggtgctacttgcacagacccctttggttaaatgtaaattcttgtacaattgaaggatacgcagaaggacatctttctagtctaacagtcaggagctgctctggtcattcccttgtatgaactggtctaaagactgttagtggggtgttagttgatttttcctggtatactgtttcttggctgacactactggtcaagtaagaaatttgtaaataaatttcttttggttcttattatcta

SEQ ID NO: 167765 - DNA, 1804 bp, Homo sapiens
  Payload ID: 13004
  Gene Symbol: PUF60
  Gene Name: poly-U binding splicing factor 60KDa
  Uniprot ID: Q9UHX1
  ENST ID: ENST00000313352
  CDS Start-End: 162-1661
gcgcggcgtgtggcccttgcgggcgagcctggcggggttgcgttcctgtccgctagcaggtcaatggccagcaaggaggggggtccgagccggcggcggcggcggcagtggtggcagcgggagacaaatggaaacctccacagggcacagactccatcaagatggagaacgggcagagcacagccgccaagctggggctgcctcccctgacgcccgagcagcaggaggcccttcagaaggccaagaagtacgccatggagcagagcatcaagagtgtgctggtgaagcagaccatcgcgcaccagcagcagcagctcaccaacctgcagatggcggctcagcggcagcgggcgctggccatcatgtgccgcgtctacgtgggctctatctactatgagctgggggaggacaccatccgccaggcctttgccccctttggccccatcaagagcatcgacatgtcctgggactccgtcaccatgaagcacaagggctttgccttcgtggagtatgaggtccccgaagctgcacagctggccttggagcagatgaactcggtgatgctggggggcaggaacatcaaggtgggcagacccagcaacatagggcaggcccagcccatcatagaccagttggctgaggaggcacgggccttcaaccgcatctacgtggcctctgtgcaccaggacctctcagacgatgacatcaagagcgtgtttgaggcctttggcaagatcaagtcctgcacactggcccgggaccccacaactggcaagcacaagggctacggcttcattgagtacgagaaggcccagtcgtcccaagatgctgtgtcttccatgaacctctttgacctgggtggccagtacttgcgggtgggcaaggctgtcacaccgcccatgcccctactcacaccagccacgcctggaggcctcccacctgccgctgctgtggcagctgctgcagccactgccaagatcacagctcaggaagcagtggccggagcagcggtgctgggtaccctgggcacacctggactggtgtccccagcactgaccctggcccagcccctgggcactttgccccaggctgtcatggctgcccaggcacctggagtcatcacaggtgtgaccccagcccgtcctcctatcccggtcaccatcccctcggtgggagtggtgaaccccatcctggccagccctccaacgctgggtctcctggagcccaagaaggagaaggaagaagaggagctgtttcccgagtcagagcggccagagatgctgagcgagcaggagcacatgagcatctcgggcagtagcgcccgacacatggtgatgcagaagctgctccgcaagcaggagtctacagtgatggttctgcgcaacatggtggaccccaaggacatcgatgatgacctggaaggggaggtgacagaggagtgtggcaagttcggggccgtgaaccgcgtcatcatctaccaagagaaacaaggcgaggaggaggatgcagaaatcattgtcaagatctttgtggagttttccatagcctctgagactcataaggccatccaggccctcaatggccgctggtttgctggccgcaaggtggtggctgaagtgtacgaccaggagcgttttgataacagtgacctctctgcgtgacagtggtccctctccccggacttgcacttgttccttgtttcctctgggttttatagtgatacagtggtgtccccggggccaggcgcgctctgcccagcccagcctacagtgcggataaaggtgcggatgctgctggccctgaa

SEQ ID NO: 167766 - DNA, 1821 bp, Homo sapiens
  Payload ID: 13004
  Gene Symbol: PUF60
  Gene Name: poly-U binding splicing factor 60KDa
  Uniprot ID: Q9UHX1
  ENST ID: ENST00000349157
  CDS Start-End: 50-1678
ggaaggagcaagagtgggaggcgcgcgcggaggccgcgacggacgcaagatggcgacggcgaccatagctctccaggtcaatggccagcaaggaggggggtccgagccggcggcggcggcggcagtggtggcagcgggagacaaatggaaacctccacagggcacagactccatcaagatggagaacgggcagagcacagccgccaagctggggctgcctcccctgacgcccgagcagcaggaggcccttcagaaggccaagaagtacgccatggagcagagcatcaagagtgtgctggtgaagcagaccatcgcgcaccagcagcagcagctcaccaacctgcagatggcggctcagcggcagcgggcgctggccatcatgtgccgcgtctacgtgggctctatctactatgagctgggggaggacaccatccgccaggcctttgccccctttggccccatcaagagcatcgacatgtcctgggactccgtcaccatgaagcacaagggctttgccttcgtggagtatgaggtccccgaagctgcacagctggccttggagcagatgaactcggtgatgctggggggcaggaacatcaaggtgggcagacccagcaacatagggcaggcccagcccatcatagaccagttggctgaggaggcacgggccttcaaccgcatctacgtggcctctgtgcaccaggacctctcagacgatgacatcaagagcgtgtttgaggcctttggcaagatcaagtcctgcacactggcccgggaccccacaactggcaagcacaagggctacggcttcattgagtacgagaaggcccagtcgtcccaagatgctgtgtcttccatgaacctctttgacctgggtggccagtacttgcgggtgggcaaggctgtcacaccgcccatgcccctactcacaccagccacgcctggaggcctcccacctgccgctgctgtggcagctgctgcagccactgccaagatcacagctcaggaagcagtggccggagcagcggtgctgggtaccctgggcacacctggactggtgtccccagcactgaccctggcccagcccctgggcactttgccccaggctgtcatggctgcccaggcacctggagtcatcacaggtgtgaccccagcccgtcctcctatcccggtcaccatcccctcggtgggagtggtgaaccccatcctggccagccctccaacgctgggtctcctggagcccaagaaggagaaggaagaagaggagctgtttcccgagtcagagcggccagagatgctgagcgagcaggagcacatgagcatctcgggcagtagcgcccgacacatggtgatgcagaagctgctccgcaagcaggagtctacagtgatggttctgcgcaacatggtggaccccaaggacatcgatgatgacctggaaggggaggtgacagaggagtgtggcaagttcggggccgtgaaccgcgtcatcatctaccaagagaaacaaggcgaggaggaggatgcagaaatcattgtcaagatctttgtggagttttccatagcctctgagactcataaggccatccaggccctcaatggccgctggtttgctggccgcaaggtggtggctgaagtgtacgaccaggagcgttttgataacagtgacctctctgcgtgacagtggtccctctccccggacttgcacttgttccttgtttcctctgggttttatagtgatacagtggtgtccccggggccaggcgcgctctgcccagcccagcctacagtgcggataaaggtgcggatgctgctggccctgaa

SEQ ID NO: 167767 - DNA, 1736 bp, Homo sapiens
  Payload ID: 13004
  Gene Symbol: PUF60
  Gene Name: poly-U binding splicing factor 60KDa
  Uniprot ID: Q9UHX1
  ENST ID: ENST00000456095
  CDS Start-End: 1-1593
atggcgacggcgaccatagctctcggcacagactccatcaagatggagaacgggcagagcacagccgccaagctggggctgcctcccctgacgcccgagcagcaggaggcccttcagaaggccaagaagtacgccatggagcagagcatcaagagtgtgctggtgaagcagaccatcgcgcaccagcagcagcagctcaccaacctgcagatggcagcagtgacaatgggctttggagatcctctctcacctttgcaatcgatggcggctcagcggcagcgggcgctggccatcatgtgccgcgtctacgtgggctctatctactatgagctgggggaggacaccatccgccaggcctttgccccctttggccccatcaagagcatcgacatgtcctgggactccgtcaccatgaagcacaagggctttgccttcgtggagtatgaggtccccgaagctgcacagctggccttggagcagatgaactcggtgatgctggggggcaggaacatcaaggtgggcagacccagcaacatagggcaggcccagcccatcatagaccagttggctgaggaggcacgggccttcaaccgcatctacgtggcctctgtgcaccaggacctctcagacgatgacatcaagagcgtgtttgaggcctttggcaagatcaagtcctgcacactggcccgggaccccacaactggcaagcacaagggctacggcttcattgagtacgagaaggcccagtcgtcccaagatgctgtgtcttccatgaacctctttgacctgggtggccagtacttgcgggtgggcaaggctgtcacaccgcccatgcccctactcacaccagccacgcctggaggcctcccacctgccgctgctgtggcagctgctgcagccactgccaagatcacagctcaggaagcagtggccggagcagcggtgctgggtaccctgggcacacctggactggtgtccccagcactgaccctggcccagcccctgggcactttgccccaggctgtcatggctgcccaggcacctggagtcatcacaggtgtgaccccagcccgtcctcctatcccggtcaccatcccctcggtgggagtggtgaaccccatcctggccagccctccaacgctgggtctcctggagcccaagaaggagaaggaagaagaggagctgtttcccgagtcagagcggccagagatgctgagcgagcaggagcacatgagcatctcgggcagtagcgcccgacacatggtgatgcagaagctgctccgcaagcaggagtctacagtgatggttctgcgcaacatggtggaccccaaggacatcgatgatgacctggaaggggaggtgacagaggagtgtggcaagttcggggccgtgaaccgcgtcatcatctaccaagagaaacaaggcgaggaggaggatgcagaaatcattgtcaagatctttgtggagttttccatagcctctgagactcataaggccatccaggccctcaatggccgctggtttgctggccgcaaggtggtggctgaagtgtacgaccaggagcgttttgataacagtgacctctctgcgtgacagtggtccctctccccggacttgcacttgttccttgtttcctctgggttttatagtgatacagtggtgtccccggggccaggcgcgctctgcccagcccagcctacagtgcggataaaggtgcggatgctgctggccctgaa

SEQ ID NO: 167768 - DNA, 1842 bp, Homo sapiens
  Payload ID: 13004
  Gene Symbol: PUF60
  Gene Name: poly-U binding splicing factor 60KDa
  Uniprot ID: Q9UHX1
  ENST ID: ENST00000453551
  CDS Start-End: 149-1699
cccttgcgggcgagcctggcggggttgcgttcctgtccgctagcaggtcaatggccagcaaggaggggggtccgagccggcggcggcggcggcagtggtggcagcgggagacaaatggaaacctccacagggcacagactccatcaagatggagaacgggcagagcacagccgccaagctggggctgcctcccctgacgcccgagcagcaggaggcccttcagaaggccaagaagtacgccatggagcagagcatcaagagtgtgctggtgaagcagaccatcgcgcaccagcagcagcagctcaccaacctgcagatggcagcagtgacaatgggctttggagatcctctctcacctttgcaatcgatggcggctcagcggcagcgggcgctggccatcatgtgccgcgtctacgtgggctctatctactatgagctgggggaggacaccatccgccaggcctttgccccctttggccccatcaagagcatcgacatgtcctgggactccgtcaccatgaagcacaagggctttgccttcgtggagtatgaggtccccgaagctgcacagctggccttggagcagatgaactcggtgatgctggggggcaggaacatcaaggtgggcagacccagcaacatagggcaggcccagcccatcatagaccagttggctgaggaggcacgggccttcaaccgcatctacgtggcctctgtgcaccaggacctctcagacgatgacatcaagagcgtgtttgaggcctttggcaagatcaagtcctgcacactggcccgggaccccacaactggcaagcacaagggctacggcttcattgagtacgagaaggcccagtcgtcccaagatgctgtgtcttccatgaacctctttgacctgggtggccagtacttgcgggtgggcaaggctgtcacaccgcccatgcccctactcacaccagccacgcctggaggcctcccacctgccgctgctgtggcagctgctgcagccactgccaagatcacagctcaggaagcagtggccggagcagcggtgctgggtaccctgggcacacctggactggtgtccccagcactgaccctggcccagcccctgggcactttgccccaggctgtcatggctgcccaggcacctggagtcatcacaggtgtgaccccagcccgtcctcctatcccggtcaccatcccctcggtgggagtggtgaaccccatcctggccagccctccaacgctgggtctcctggagcccaagaaggagaaggaagaagaggagctgtttcccgagtcagagcggccagagatgctgagcgagcaggagcacatgagcatctcgggcagtagcgcccgacacatggtgatgcagaagctgctccgcaagcaggagtctacagtgatggttctgcgcaacatggtggaccccaaggacatcgatgatgacctggaaggggaggtgacagaggagtgtggcaagttcggggccgtgaaccgcgtcatcatctaccaagagaaacaaggcgaggaggaggatgcagaaatcattgtcaagatctttgtggagttttccatagcctctgagactcataaggccatccaggccctcaatggccgctggtttgctggccgcaaggtggtggctgaagtgtacgaccaggagcgttttgataacagtgacctctctgcgtgacagtggtccctctccccggacttgcacttgttccttgtttcctctgggttttatagtgatacagtggtgtccccggggccaggcgcgctctgcccagcccagcctacagtgcggataaaggtgcggatgctgctggccctgaa

SEQ ID NO: 167769 - DNA, 1559 bp, Homo sapiens
  Payload ID: 13004
  Gene Symbol: PUF60
  Gene Name: poly-U binding splicing factor 60KDa
  Uniprot ID: Q9UHX1
  ENST ID: ENST00000527197
  CDS Start-End: 18-1559
gccgcgacggacgcaagatggcgacggcgaccatagctctcggcacagactccatcaagatggagaacgggcagagcacagccgccaagctggggctgcctcccctgacgcccgagcagcaggaggcccttcagaaggccaagaagtacgccatggagcagagcatcaagagtgtgctggtgaagcagaccatcgcgcaccagcagcagcagctcaccaacctgcagatggcggctcagcggcagcgggcgctggccatcatgtgccgcgtctacgtgggctctatctactatgagctgggggaggacaccatccgccaggcctttgccccctttggccccatcaagagcatcgacatgtcctgggactccgtcaccatgaagcacaagggctttgccttcgtggagtatgaggtccccgaagctgcacagctggccttggagcagatgaactcggtgatgctggggggcaggaacatcaaggtgggcagacccagcaacatagggcaggcccagcccatcatagaccagttggctgaggaggcacgggccttcaaccgcatctacgtggcctctgtgcaccaggacctctcagacgatgacatcaagagcgtgtttgaggcctttggcaagatcaagtcctgcacactggcccgggaccccacaactggcaagcacaagggctacggcttcattgagtacgagaaggcccagtcgtcccaagatgctgtgtcttccatgaacctctttgacctgggtggccagtacttgcgggtgggcaaggctgtcacaccgcccatgcccctactcacaccagccacgcctggaggcctcccacctgccgctgctgtggcagctgctgcagccactgccaagatcacagctcaggaagcagtggccggagcagcggtgctgggtaccctgggcacacctggactggtgtccccagcactgaccctggcccagcccctgggcactttgccccaggctgtcatggctgcccaggcacctggagtcatcacaggtgtgaccccagcccgtcctcctatcccggtcaccatcccctcggtgggagtggtgaaccccatcctggccagccctccaacgctgggtctcctggagcccaagaaggagaaggaagaagaggagctgtttcccgagtcagagcggccagagatgctgagcgagcaggagcacatgagcatctcgggcagtagcgcccgacacatggtgatgcagaagctgctccgcaagcaggagtctacagtgatggttctgcgcaacatggtggaccccaaggacatcgatgatgacctggaaggggaggtgacagaggagtgtggcaagttcggggccgtgaaccgcgtcatcatctaccaagagaaacaaggcgaggaggaggatgcagaaatcattgtcaagatctttgtggagttttccatagcctctgagactcataaggccatccaggccctcaatggccgctggtttgctggccgcaaggtggtggctgaagtgtacgaccaggagcgttttgataacagtgacctctctgcgtga

SEQ ID NO: 167770 - DNA, 819 bp, Homo sapiens
  Payload ID: 13004
  Gene Symbol: PUF60
  Gene Name: poly-U binding splicing factor 60KDa
  ENST ID: ENST00000532884
  CDS Start-End: 1-819
tctactatgagctgggggaggacaccatccgccaggcctttgccccctttggccccatcaagagcatcgacatgtcctgggactccgtcaccatgaagcacaagggctttgccttcgtggagtatgaggtccccgaagctgcacagctggccttggagcagatgaactcggtgatgctggggggcaggaacatcaaggtgaggcagggagccaaggcctcgatcccgcaggcgtgcagggctgcccctccacggaagccttttgtggccgggcctgggttgaccggtctttccatctcaccgcctcttccccaggacctctcagacgatgacatcaagagcgtgtttgaggcctttggcaagatcaagtcctgcacactggcccgggaccccacaactggcaagcacaagggctacggcttcattgagtacgagaaggcccagtcgtcccaagatgctgtgtcttccatgaacctctttgacctgggtggccagtacttgcgggtgggcaaggctgtcacaccgcccatgcccctactcacaccagccacgcctggaggcctcccacctgccgctgctgtggcagctgctgcagccactgccaagatcacagctcaggaagcagtggccggagcagcggtgctgggtaccctgggcacacctggactggtgtccccagcactgaccctggcccagcccctgggcactttgccccaggctgtcatggctgcccaggcacctggagtcatcacaggtgtgaccccagcccgtcctcctatcccggtcaccatcccctcggtgggagtggtgaaccccatcc

SEQ ID NO: 167771 - DNA, 1003 bp, Homo sapiens
  Payload ID: 13004
  Gene Symbol: PUF60
  Gene Name: poly-U binding splicing factor 60KDa
  ENST ID: ENST00000526459
  CDS Start-End: 36-1003
tgggaggcgcgcgcggaggccgcgacggacgcaagatggcgacggcgaccatagctctcgtcaatggccagcaaggaggggggtccgagccggcggcggcggcggcagtggtggcagcgggagacaaatggaaacctccacagggcacagactccatcaagatggagaacgggcagagcacagccgccaagctggggctgcctcccctgacgcccgagcagcaggaggcccttcagaaggccaagaagtacgccatggagcagagcatcaagagtgtgctggtgaagcagaccatcgcgcaccagcagcagcagctcaccaacctgcagatggcggctcagcggcagcgggcgctggccatcatgtgccgcgtctacgtgggctctatctactatgagctgggggaggacaccatccgccaggcctttgccccctttggccccatcaagagcatcgacatgtcctgggactccgtcaccatgaagcacaagggctttgccttcgtggagtatgaggtccccgaagctgcacagctggccttggagcagatgaactcggtgatgctggggggcaggaacatcaaggtgggcagacccagcaacatagggcaggcccagcccatcatagaccagttggctgaggaggcacgggccttcaaccgcatctacgtggcctctgtgcaccaggacctctcagacgatgacatcaagagcgtgtttgaggcctttggcaagatcaagtcctgcacactggcccgggaccccacaactggcaagcacaagggctacggcttcattgagtacgagaaggcccagtcgtcccaagatgctgtgtcttccatgaacctctttgacctgggtggccagtacttgcgggtgggcaaggctgtcacaccgcccatgcccctactcacaccagccacgcctggaggcctcccacctgccgctgctgtggcagctgctgcagccactgccaagatcacagctcaggtgagggcccacac

SEQ ID NO: 167772 - DNA, 761 bp, Homo sapiens
  Payload ID: 13004
  Gene Symbol: PUF60
  Gene Name: poly-U binding splicing factor 60KDa
  ENST ID: ENST00000533162
  CDS Start-End: 77-761
tgggaggcgcgcgcggaggccgcgacggacgcaagatggcgacggcgaccatagctctcctctcatgggaggttgaatggagcagctgaacttggctgacagtggcctggtggggaaggaagccagaagatgcagaagggcctcccctcccatgggcatgccttctgcctggtggctgcagaatgaggccggctgcctctttgcagcaaggcaggtcaatggccagcaaggaggggggtccgagccggcggcggcggcggcagtggtggcagcgggagacaaatggaaacctccacagggcacagactccatcaagatggagaacgggcagagcacagccgccaagctggggctgcctcccctgacgcccgagcagcaggaggcccttcagaaggccaagaagtacgccatggagcagagcatcaagagtgtgctggtgaagcagaccatcgcgcaccagcagcagcagctcaccaacctgcagatggcagcagtgacaatgggctttggagatcctctctcacctttgcaatcgatggcggctcagcggcagcgggcgctggccatcatgtgccgcgtctacgtgggctctatctactatgagctgggggaggacaccatccgccaggcctttgccccctttggccccatcaagagcatcgacatgtcctgggactccgtcaccatgaagcacaagggctttgccttcgtggagtatgaggtccccgaagctgcacagctggccttggagcagatgaact

SEQ ID NO: 167773 - DNA, 2412 bp, Homo sapiens
  Payload ID: 13004
  Gene Symbol: PUF60
  Gene Name: poly-U binding splicing factor 60KDa
  Uniprot ID: Q9UHX1
  ENST ID: ENST00000526683
  CDS Start-End: 557-2236
gggtcatcggttccctggaaggagaaaaagctgccaattgaacggggcctcccggtcccagggatgtcgcgacgcggggacgacgcatctcacgacgtcagcctgaaacacgcgggcctttcatcacccgagactcctccagcccaggagggccccgctctttcgcctgcctcctgggggagagcctctggacgacgcacgcgacagcgttttctccaaaaaaggcagagaagagaagcgtagcagtggccgcaagggcgacgggcggcgaagggtactacgcacgcccgcgtcggccacgcggagagatacgcccgactcgagtcccgcggcgcacgcccctagacgcccgaggtgcgcgggccacgcccctcgcccggccaagagcacgccccttccgtcgcccctcccgggggcgtttaccgttcctccccgccccggaagcgcgttcttacctccttcctcgcgagagttccgtgcaccggcacccagatcgcgcgagacagcggaaggagcaagagtgggaggcgcgcgcggaggccgcgacggacgcaagatggcgacggcgaccatagctctccaggtcaatggccagcaaggaggggggtccgagccggcggcggcggcggcagtggtggcagcgggagacaaatggaaacctccacagggcacagactccatcaagatggagaacgggcagagcacagccgccaagctggggctgcctcccctgacgcccgagcagcaggaggcccttcagaaggccaagaagtacgccatggagcagagcatcaagagtgtgctggtgaagcagaccatcgcgcaccagcagcagcagctcaccaacctgcagatggcagcagtgacaatgggctttggagatcctctctcacctttgcaatcgatggcggctcagcggcagcgggcgctggccatcatgtgccgcgtctacgtgggctctatctactatgagctgggggaggacaccatccgccaggcctttgccccctttggccccatcaagagcatcgacatgtcctgggactccgtcaccatgaagcacaagggctttgccttcgtggagtatgaggtccccgaagctgcacagctggccttggagcagatgaactcggtgatgctggggggcaggaacatcaaggtgggcagacccagcaacatagggcaggcccagcccatcatagaccagttggctgaggaggcacgggccttcaaccgcatctacgtggcctctgtgcaccaggacctctcagacgatgacatcaagagcgtgtttgaggcctttggcaagatcaagtcctgcacactggcccgggaccccacaactggcaagcacaagggctacggcttcattgagtacgagaaggcccagtcgtcccaagatgctgtgtcttccatgaacctctttgacctgggtggccagtacttgcgggtgggcaaggctgtcacaccgcccatgcccctactcacaccagccacgcctggaggcctcccacctgccgctgctgtggcagctgctgcagccactgccaagatcacagctcaggaagcagtggccggagcagcggtgctgggtaccctgggcacacctggactggtgtccccagcactgaccctggcccagcccctgggcactttgccccaggctgtcatggctgcccaggcacctggagtcatcacaggtgtgaccccagcccgtcctcctatcccggtcaccatcccctcggtgggagtggtgaaccccatcctggccagccctccaacgctgggtctcctggagcccaagaaggagaaggaagaagaggagctgtttcccgagtcagagcggccagagatgctgagcgagcaggagcacatgagcatctcgggcagtagcgcccgacacatggtgatgcagaagctgctccgcaagcaggagtctacagtgatggttctgcgcaacatggtggaccccaaggacatcgatgatgacctggaaggggaggtgacagaggagtgtggcaagttcggggccgtgaaccgcgtcatcatctaccaagagaaacaaggcgaggaggaggatgcagaaatcattgtcaagatctttgtggagttttccatagcctctgagactcataaggccatccaggccctcaatggccgctggtttgctggccgcaaggtggtggctgaagtgtacgaccaggagcgttttgataacagtgacctctctgcgtgacagtggtccctctccccggacttgcacttgttccttgtttcctctgggttttatagtgatacagtggtgtccccggggccaggcgcgctctgcccagcccagcctacagtgcggataaaggtgcggatgctgctggccctgaacgtccgtgtgtctgccgtcggtcctgtcaccga

SEQ ID NO: 167774 - DNA, 867 bp, Homo sapiens
  Payload ID: 13004
  Gene Symbol: PUF60
  Gene Name: poly-U binding splicing factor 60KDa
  ENST ID: ENST00000529999
  CDS Start-End: 79-867
cctgggcgcggcgtgtggcccttgcgggcgagcctggcggggttgcgttcctgtccgctagctctcatgggaggttgaatggagcagctgaacttggctgacagtggcctggtggggaaggaagccagaagatgcagaagggcctcccctcccatgggcatgccttctgcctggtggctgcagaatgaggccggctgcctctttgcagcaaggcaggtcaatggccagcaaggaggggggtccgagccggcggcggcggcggcagtggtggcagcgggagacaaatggaaacctccacagggcacagactccatcaagatggagaacgggcagagcacagccgccaagctggggctgcctcccctgacgcccgagcagcaggaggcccttcagaaggccaagaagtacgccatggagcagagcatcaagagtgtgctggtgaagcagaccatcgcgcaccagcagcagcagctcaccaacctgcagatggcggctcagcggcagcgggcgctggccatcatgtgccgcgtctacgtgggctctatctactatgagctgggggaggacaccatccgccaggcctttgccccctttggccccatcaagagcatcgacatgtcctgggactccgtcaccatgaagcacaagggctttgccttcgtggagtatgaggtccccgaagctgcacagctggccttggagcagatgaactcggtgatgctggggggcaggaacatcaaggtgggcagacccagcaacatagggcaggcccagcccatcatagaccagttggctgaggaggcacgggccttcaaccgcatctacgtggcctctgtgcaccaggacctctcagacgatgacatcaag

SEQ ID NO: 167775 - DNA, 1007 bp, Homo sapiens
  Payload ID: 13004
  Gene Symbol: PUF60
  Gene Name: poly-U binding splicing factor 60KDa
  ENST ID: ENST00000527744
  CDS Start-End: 1-1007
cgacggcgaccatagctctcgtcaatggccagcaaggaggggggtccgagccggcggcggcggcggcagtggtggcagcgggagacaaatggaaacctccacagggcacagactccatcaagatggagaacgggcagagcacagccgccaagctggggctgcctcccctgacgcccgagcagcaggaggcccttcagaaggccaagaagtacgccatggagcagagcatcaagagtgtgctggtgaagcagaccatcgcgcaccagcagcagcagctcaccaacctgcagatggcagcagtgacaatgggctttggagatcctctctcacctttgcaatcgatggcggctcagcggcagcgggcgctggccatcatgtgccgcgtctacgtgggctctatctactatgagctgggggaggacaccatccgccaggcctttgccccctttggccccatcaagagcatcgacatgtcctgggactccgtcaccatgaagcacaagggctttgccttcgtggagtatgaggtccccgaagctgcacagctggccttggagcagatgaactcggtgatgctggggggcaggaacatcaaggtgggcagacccagcaacatagggcaggcccagcccatcatagaccagttggctgaggaggcacgggccttcaaccgcatctacgtggcctctgtgcaccaggacctctcagacgatgacatcaagagcgtgtttgaggcctttggcaagatcaagtcctgcacactggcccgggaccccacaactggcaagcacaagggctacggcttcattgagtacgagaaggcccagtcgtcccaagatgctgtgtcttccatgaacctctttgacctgggtggccagtacttgcgggtgggcaaggctgtcacaccgcccatgcccctactcacaccagccacgcctggaggcctcccacctgccgctgctgtggcagctgctgcagccactgccaagatcacagctcaggtgagg

SEQ ID NO: 167776 - DNA, 785 bp, Homo sapiens
  Payload ID: 13004
  Gene Symbol: PUF60
  Gene Name: poly-U binding splicing factor 60KDa
  ENST ID: ENST00000531897
  CDS Start-End: 43-785
gatggcgacggcgaccatagctctcctctcatgggaggttgaatggagcagctgaacttggctgacagtggcctggtggggaaggaagccagaagatgcagaagggcctcccctcccatgggcatgccttctgcctggtggctgcagaatgaggccggctgcctctttgcagcaaggcaggtcaatggccagcaaggaggggggtccgagccggcggcggcggcggcagtggtggcagcgggagacaaatggaaacctccacagggcacagactccatcaagatggagaacgggcagagcacagccgccaagctggggctgcctcccctgacgcccgagcagcaggaggcccttcagaaggccaagaagtacgccatggagcagagcatcaagagtgtgctggtgaagcagaccatcgcgcaccagcagcagcagctcaccaacctgcagatggcggctcagcggcagcgggcgctggccatcatgtgccgcgtctacgtgggctctatctactatgagctgggggaggacaccatccgccaggcctttgccccctttggccccatcaagagcatcgacatgtcctgggactccgtcaccatgaagcacaagggctttgccttcgtggagtatgaggtccccgaagctgcacagctggccttggagcagatgaactcggtgatgctggggggcaggaacatcaaggtgggcagacccagcaacatagggcaggcccagcccatcatagaccagttggctgaggaggcacgggccttcaaccgcat

SEQ ID NO: 167777 - DNA, 1734 bp, Homo sapiens
  Payload ID: 13004
  Gene Symbol: PUF60
  Gene Name: poly-U binding splicing factor 60KDa
  Uniprot ID: Q9UHX1
  ENST ID: ENST00000620953
  CDS Start-End: 1-1593
atggcgacggcgaccatagctctcggcacagactccatcaagatggagaacgggcagagcacagccgccaagctggggctgcctcccctgacgcccgagcagcaggaggcccttcagaaggccaagaagtacgccatggagcagagcatcaagagtgtgctggtgaagcagaccatcgcgcaccagcagcagcagctcaccaacctgcagatggcagcagtgacaatgggctttggagatcctctctcacctttgcaatcgatggcggctcagcggcagcgggcgctggccatcatgtgccgcgtctacgtgggctctatctactatgagctgggggaggacaccatccgccaggcctttgccccctttggccccatcaagagcatcgacatgtcctgggactccgtcaccatgaagcacaagggctttgccttcgtggagtatgaggtccccgaagctgcacagctggccttggagcagatgaactcggtgatgctggggggcaggaacatcaaggtgggcagacccagcaacatagggcaggcccagcccatcatagaccagttggctgaggaggcacgggccttcaaccgcatctacgtggcctctgtgcaccaggacctctcagacgatgacatcaagagcgtgtttgaggcctttggcaagatcaagtcctgcacactggcccgggaccccacaactggcaagcacaagggctacggcttcattgagtacgagaaggcccagtcgtcccaagatgctgtgtcttccatgaacctctttgacctgggtggccagtacttgcgggtgggcaaggctgtcacaccgcccatgcccctactcacaccagccacgcctggaggcctcccacctgccgctgctgtggcagctgctgcagccactgccaagatcacagctcaggaagcagtggccggagcagcggtgctgggtaccctgggcacacctggactggtgtccccagcactgaccctggcccagcccctgggcactttgccccaggctgtcatggctgcccaggcacctggagtcatcacaggtgtgaccccagcccgtcctcctatcccggtcaccatcccctcggtgggagtggtgaaccccatcctggccagccctccaacgctgggtctcctggagcccaagaaggagaaggaagaagaggagctgtttcccgagtcagagcggccagagatgctgagcgagcaggagcacatgagcatctcgggcagtagcgcccgacacatggtgatgcagaagctgctccgcaagcaggagtctacagtgatggttctgcgcaacatggtggaccccaaggacatcgatgatgacctggaaggggaggtgacagaggagtgtggcaagttcggggccgtgaaccgcgtcatcatctaccaagagaaacaaggcgaggaggaggatgcagaaatcattgtcaagatctttgtggagttttccatagcctctgagactcataaggccatccaggccctcaatggccgctggtttgctggccgcaaggtggtggctgaagtgtacgaccaggagcgttttgataacagtgacctctctgcgtgacagtggtccctctccccggacttgcacttgttccttgtttcctctgggttttatagtgatacagtggtgtccccggggccaggcgcgctctgcccagcccagcctacagtgcggataaaggtgcggatgctgctggccctg

SEQ ID NO: 167778 - DNA, 1770 bp, Homo sapiens
  Payload ID: 13004
  Gene Symbol: PUF60
  Gene Name: poly-U binding splicing factor 60KDa
  Uniprot ID: Q9UHX1
  ENST ID: ENST00000612237
  CDS Start-End: 1-1629
atggcgacggcgaccatagctctccaggtcaatggccagcaaggaggggggtccgagccggcggcggcggcggcagtggtggcagcgggagacaaatggaaacctccacagggcacagactccatcaagatggagaacgggcagagcacagccgccaagctggggctgcctcccctgacgcccgagcagcaggaggcccttcagaaggccaagaagtacgccatggagcagagcatcaagagtgtgctggtgaagcagaccatcgcgcaccagcagcagcagctcaccaacctgcagatggcggctcagcggcagcgggcgctggccatcatgtgccgcgtctacgtgggctctatctactatgagctgggggaggacaccatccgccaggcctttgccccctttggccccatcaagagcatcgacatgtcctgggactccgtcaccatgaagcacaagggctttgccttcgtggagtatgaggtccccgaagctgcacagctggccttggagcagatgaactcggtgatgctggggggcaggaacatcaaggtgggcagacccagcaacatagggcaggcccagcccatcatagaccagttggctgaggaggcacgggccttcaaccgcatctacgtggcctctgtgcaccaggacctctcagacgatgacatcaagagcgtgtttgaggcctttggcaagatcaagtcctgcacactggcccgggaccccacaactggcaagcacaagggctacggcttcattgagtacgagaaggcccagtcgtcccaagatgctgtgtcttccatgaacctctttgacctgggtggccagtacttgcgggtgggcaaggctgtcacaccgcccatgcccctactcacaccagccacgcctggaggcctcccacctgccgctgctgtggcagctgctgcagccactgccaagatcacagctcaggaagcagtggccggagcagcggtgctgggtaccctgggcacacctggactggtgtccccagcactgaccctggcccagcccctgggcactttgccccaggctgtcatggctgcccaggcacctggagtcatcacaggtgtgaccccagcccgtcctcctatcccggtcaccatcccctcggtgggagtggtgaaccccatcctggccagccctccaacgctgggtctcctggagcccaagaaggagaaggaagaagaggagctgtttcccgagtcagagcggccagagatgctgagcgagcaggagcacatgagcatctcgggcagtagcgcccgacacatggtgatgcagaagctgctccgcaagcaggagtctacagtgatggttctgcgcaacatggtggaccccaaggacatcgatgatgacctggaaggggaggtgacagaggagtgtggcaagttcggggccgtgaaccgcgtcatcatctaccaagagaaacaaggcgaggaggaggatgcagaaatcattgtcaagatctttgtggagttttccatagcctctgagactcataaggccatccaggccctcaatggccgctggtttgctggccgcaaggtggtggctgaagtgtacgaccaggagcgttttgataacagtgacctctctgcgtgacagtggtccctctccccggacttgcacttgttccttgtttcctctgggttttatagtgatacagtggtgtccccggggccaggcgcgctctgcccagcccagcctacagtgcggataaaggtgcggatgctgctggccctg

SEQ ID NO: 167779 - DNA, 1821 bp, Homo sapiens
  Payload ID: 13004
  Gene Symbol: PUF60
  Gene Name: poly-U binding splicing factor 60KDa
  Uniprot ID: Q9UHX1
  ENST ID: ENST00000620341
  CDS Start-End: 1-1680
atggcgacggcgaccatagctctccaggtcaatggccagcaaggaggggggtccgagccggcggcggcggcggcagtggtggcagcgggagacaaatggaaacctccacagggcacagactccatcaagatggagaacgggcagagcacagccgccaagctggggctgcctcccctgacgcccgagcagcaggaggcccttcagaaggccaagaagtacgccatggagcagagcatcaagagtgtgctggtgaagcagaccatcgcgcaccagcagcagcagctcaccaacctgcagatggcagcagtgacaatgggctttggagatcctctctcacctttgcaatcgatggcggctcagcggcagcgggcgctggccatcatgtgccgcgtctacgtgggctctatctactatgagctgggggaggacaccatccgccaggcctttgccccctttggccccatcaagagcatcgacatgtcctgggactccgtcaccatgaagcacaagggctttgccttcgtggagtatgaggtccccgaagctgcacagctggccttggagcagatgaactcggtgatgctggggggcaggaacatcaaggtgggcagacccagcaacatagggcaggcccagcccatcatagaccagttggctgaggaggcacgggccttcaaccgcatctacgtggcctctgtgcaccaggacctctcagacgatgacatcaagagcgtgtttgaggcctttggcaagatcaagtcctgcacactggcccgggaccccacaactggcaagcacaagggctacggcttcattgagtacgagaaggcccagtcgtcccaagatgctgtgtcttccatgaacctctttgacctgggtggccagtacttgcgggtgggcaaggctgtcacaccgcccatgcccctactcacaccagccacgcctggaggcctcccacctgccgctgctgtggcagctgctgcagccactgccaagatcacagctcaggaagcagtggccggagcagcggtgctgggtaccctgggcacacctggactggtgtccccagcactgaccctggcccagcccctgggcactttgccccaggctgtcatggctgcccaggcacctggagtcatcacaggtgtgaccccagcccgtcctcctatcccggtcaccatcccctcggtgggagtggtgaaccccatcctggccagccctccaacgctgggtctcctggagcccaagaaggagaaggaagaagaggagctgtttcccgagtcagagcggccagagatgctgagcgagcaggagcacatgagcatctcgggcagtagcgcccgacacatggtgatgcagaagctgctccgcaagcaggagtctacagtgatggttctgcgcaacatggtggaccccaaggacatcgatgatgacctggaaggggaggtgacagaggagtgtggcaagttcggggccgtgaaccgcgtcatcatctaccaagagaaacaaggcgaggaggaggatgcagaaatcattgtcaagatctttgtggagttttccatagcctctgagactcataaggccatccaggccctcaatggccgctggtttgctggccgcaaggtggtggctgaagtgtacgaccaggagcgttttgataacagtgacctctctgcgtgacagtggtccctctccccggacttgcacttgttccttgtttcctctgggttttatagtgatacagtggtgtccccggggccaggcgcgctctgcccagcccagcctacagtgcggataaaggtgcggatgctgctggccctg

SEQ ID NO: 167780 - DNA, 1748 bp, Homo sapiens
  Payload ID: 13004
  Gene Symbol: PUF60
  Gene Name: poly-U binding splicing factor 60KDa
  ENST ID: ENST00000631439
  CDS Start-End: 1-1605
caggtcaatggccagcaaggaggggggtccgagccggcggcggcggcggcagtggtggcagcgggagacaaatggaaacctccacagggcacagactccatcaagatggagaacgggcagagcacagccgccaagctggggctgcctcccctgacgcccgagcagcaggaggcccttcagaaggccaagaagtacgccatggagcagagcatcaagagtgtgctggtgaagcagaccatcgcgcaccagcagcagcagctcaccaacctgcagatggcggctcagcggcagcgggcgctggccatcatgtgccgcgtctacgtgggctctatctactatgagctgggggaggacaccatccgccaggcctttgccccctttggccccatcaagagcatcgacatgtcctgggactccgtcaccatgaagcacaagggctttgccttcgtggagtatgaggtccccgaagctgcacagctggccttggagcagatgaactcggtgatgctggggggcaggaacatcaaggtgggcagacccagcaacatagggcaggcccagcccatcatagaccagttggctgaggaggcacgggccttcaaccgcatctacgtggcctctgtgcaccaggacctctcagacgatgacatcaagagcgtgtttgaggcctttggcaagatcaagtcctgcacactggcccgggaccccacaactggcaagcacaagggctacggcttcattgagtacgagaaggcccagtcgtcccaagatgctgtgtcttccatgaacctctttgacctgggtggccagtacttgcgggtgggcaaggctgtcacaccgcccatgcccctactcacaccagccacgcctggaggcctcccacctgccgctgctgtggcagctgctgcagccactgccaagatcacagctcaggaagcagtggccggagcagcggtgctgggtaccctgggcacacctggactggtgtccccagcactgaccctggcccagcccctgggcactttgccccaggctgtcatggctgcccaggcacctggagtcatcacaggtgtgaccccagcccgtcctcctatcccggtcaccatcccctcggtgggagtggtgaaccccatcctggccagccctccaacgctgggtctcctggagcccaagaaggagaaggaagaagaggagctgtttcccgagtcagagcggccagagatgctgagcgagcaggagcacatgagcatctcgggcagtagcgcccgacacatggtgatgcagaagctgctccgcaagcaggagtctacagtgatggttctgcgcaacatggtggaccccaaggacatcgatgatgacctggaaggggaggtgacagaggagtgtggcaagttcggggccgtgaaccgcgtcatcatctaccaagagaaacaaggcgaggaggaggatgcagaaatcattgtcaagatctttgtggagttttccatagcctctgagactcataaggccatccaggccctcaatggccgctggtttgctggccgcaaggtggtggctgaagtgtacgaccaggagcgttttgataacagtgacctctctgcgtgacagtggtccctctccccggacttgcacttgttccttgtttcctctgggttttatagtgatacagtggtgtccccggggccaggcgcgctctgcccagcccagcctacagtgcggataaaggtgcggatgctgctggccctgaa

SEQ ID NO: 167781 - DNA, 944 bp, Homo sapiens
  Payload ID: 13004
  Gene Symbol: PUF60
  Gene Name: poly-U binding splicing factor 60KDa
  ENST ID: ENST00000632477
  CDS Start-End: 1-944
gtcaatggccagcaaggaggggggtccgagccggcggcggcggcggcagtggtggcagcgggagacaaatggaaacctccacagggcacagactccatcaagatggagaacgggcagagcacagccgccaagctggggctgcctcccctgacgcccgagcagcaggaggcccttcagaaggccaagaagtacgccatggagcagagcatcaagagtgtgctggtgaagcagaccatcgcgcaccagcagcagcagctcaccaacctgcagatggcggctcagcggcagcgggcgctggccatcatgtgccgcgtctacgtgggctctatctactatgagctgggggaggacaccatccgccaggcctttgccccctttggccccatcaagagcatcgacatgtcctgggactccgtcaccatgaagcacaagggctttgccttcgtggagtatgaggtccccgaagctgcacagctggccttggagcagatgaactcggtgatgctggggggcaggaacatcaaggtgggcagacccagcaacatagggcaggcccagcccatcatagaccagttggctgaggaggcacgggccttcaaccgcatctacgtggcctctgtgcaccaggacctctcagacgatgacatcaagagcgtgtttgaggcctttggcaagatcaagtcctgcacactggcccgggaccccacaactggcaagcacaagggctacggcttcattgagtacgagaaggcccagtcgtcccaagatgctgtgtcttccatgaacctctttgacctgggtggccagtacttgcgggtgggcaaggctgtcacaccgcccatgcccctactcacaccagccacgcctggaggcctcccacctgccgctgctgtggcagctgctgcagccactgccaagatcacagctcaggtgagggcccacac

SEQ ID NO: 167782 - DNA, 760 bp, Homo sapiens
  Payload ID: 13004
  Gene Symbol: PUF60
  Gene Name: poly-U binding splicing factor 60KDa
  ENST ID: ENST00000631813
  CDS Start-End: 18-760
ctctcatgggaggttgaatggagcagctgaacttggctgacagtggcctggtggggaaggaagccagaagatgcagaagggcctcccctcccatgggcatgccttctgcctggtggctgcagaatgaggccggctgcctctttgcagcaaggcaggtcaatggccagcaaggaggggggtccgagccggcggcggcggcggcagtggtggcagcgggagacaaatggaaacctccacagggcacagactccatcaagatggagaacgggcagagcacagccgccaagctggggctgcctcccctgacgcccgagcagcaggaggcccttcagaaggccaagaagtacgccatggagcagagcatcaagagtgtgctggtgaagcagaccatcgcgcaccagcagcagcagctcaccaacctgcagatggcggctcagcggcagcgggcgctggccatcatgtgccgcgtctacgtgggctctatctactatgagctgggggaggacaccatccgccaggcctttgccccctttggccccatcaagagcatcgacatgtcctgggactccgtcaccatgaagcacaagggctttgccttcgtggagtatgaggtccccgaagctgcacagctggccttggagcagatgaactcggtgatgctggggggcaggaacatcaaggtgggcagacccagcaacatagggcaggcccagcccatcatagaccagttggctgaggaggcacgggccttcaaccgcat

SEQ ID NO: 167783 - DNA, 1748 bp, Homo sapiens; identical to SEQ ID NO: 167780
  Payload ID: 13004
  Gene Symbol: PUF60
  Gene Name: poly-U binding splicing factor 60KDa
  Uniprot ID: Q9UHX1
  ENST ID: ENST00000633206
  CDS Start-End: 106-1605

SEQ ID NO: 167784 - DNA, 1799 bp, Homo sapiens
  Payload ID: 13004
  Gene Symbol: PUF60
  Gene Name: poly-U binding splicing factor 60KDa
  Uniprot ID: Q9UHX1
  ENST ID: ENST00000632444
  CDS Start-End: 106-1656
caggtcaatggccagcaaggaggggggtccgagccggcggcggcggcggcagtggtggcagcgggagacaaatggaaacctccacagggcacagactccatcaagatggagaacgggcagagcacagccgccaagctggggctgcctcccctgacgcccgagcagcaggaggcccttcagaaggccaagaagtacgccatggagcagagcatcaagagtgtgctggtgaagcagaccatcgcgcaccagcagcagcagctcaccaacctgcagatggcagcagtgacaatgggctttggagatcctctctcacctttgcaatcgatggcggctcagcggcagcgggcgctggccatcatgtgccgcgtctacgtgggctctatctactatgagctgggggaggacaccatccgccaggcctttgccccctttggccccatcaagagcatcgacatgtcctgggactccgtcaccatgaagcacaagggctttgccttcgtggagtatgaggtccccgaagctgcacagctggccttggagcagatgaactcggtgatgctggggggcaggaacatcaaggtgggcagacccagcaacatagggcaggcccagcccatcatagaccagttggctgaggaggcacgggccttcaaccgcatctacgtggcctctgtgcaccaggacctctcagacgatgacatcaagagcgtgtttgaggcctttggcaagatcaagtcctgcacactggcccgggaccccacaactggcaagcacaagggctacggcttcattgagtacgagaaggcccagtcgtcccaagatgctgtgtcttccatgaacctctttgacctgggtggccagtacttgcgggtgggcaaggctgtcacaccgcccatgcccctactcacaccagccacgcctggaggcctcccacctgccgctgctgtggcagctgctgcagccactgccaagatcacagctcaggaagcagtggccggagcagcggtgctgggtaccctgggcacacctggactggtgtccccagcactgaccctggcccagcccctgggcactttgccccaggctgtcatggctgcccaggcacctggagtcatcacaggtgtgaccccagcccgtcctcctatcccggtcaccatcccctcggtgggagtggtgaaccccatcctggccagccctccaacgctgggtctcctggagcccaagaaggagaaggaagaagaggagctgtttcccgagtcagagcggccagagatgctgagcgagcaggagcacatgagcatctcgggcagtagcgcccgacacatggtgatgcagaagctgctccgcaagcaggagtctacagtgatggttctgcgcaacatggtggaccccaaggacatcgatgatgacctggaaggggaggtgacagaggagtgtggcaagttcggggccgtgaaccgcgtcatcatctaccaagagaaacaaggcgaggaggaggatgcagaaatcattgtcaagatctttgtggagttttccatagcctctgagactcataaggccatccaggccctcaatggccgctggtttgctggccgcaaggtggtggctgaagtgtacgaccaggagcgttttgataacagtgacctctctgcgtgacagtggtccctctccccggacttgcacttgttccttgtttcctctgggttttatagtgatacagtggtgtccccggggccaggcgcgctctgcccagcccagcctacagtgcggataaaggtgcggatgctgctggccctgaa

SEQ ID NO: 167785 - DNA, 987 bp, Homo sapiens
  Payload ID: 13004
  Gene Symbol: PUF60
  Gene Name: poly-U binding splicing factor 60KDa
  ENST ID: ENST00000632085
  CDS Start-End: 1-987
gtcaatggccagcaaggaggggggtccgagccggcggcggcggcggcagtggtggcagcgggagacaaatggaaacctccacagggcacagactccatcaagatggagaacgggcagagcacagccgccaagctggggctgcctcccctgacgcccgagcagcaggaggcccttcagaaggccaagaagtacgccatggagcagagcatcaagagtgtgctggtgaagcagaccatcgcgcaccagcagcagcagctcaccaacctgcagatggcagcagtgacaatgggctttggagatcctctctcacctttgcaatcgatggcggctcagcggcagcgggcgctggccatcatgtgccgcgtctacgtgggctctatctactatgagctgggggaggacaccatccgccaggcctttgccccctttggccccatcaagagcatcgacatgtcctgggactccgtcaccatgaagcacaagggctttgccttcgtggagtatgaggtccccgaagctgcacagctggccttggagcagatgaactcggtgatgctggggggcaggaacatcaaggtgggcagacccagcaacatagggcaggcccagcccatcatagaccagttggctgaggaggcacgggccttcaaccgcatctacgtggcctctgtgcaccaggacctctcagacgatgacatcaagagcgtgtttgaggcctttggcaagatcaagtcctgcacactggcccgggaccccacaactggcaagcacaagggctacggcttcattgagtacgagaaggcccagtcgtcccaagatgctgtgtcttccatgaacctctttgacctgggtggccagtacttgcgggtgggcaaggctgtcacaccgcccatgcccctactcacaccagccacgcctggaggcctcccacctgccgctgctgtggcagctgctgcagccactgccaagatcacagctcaggtgagg

SEQ ID NO: 167786 - DNA, 806 bp, Homo sapiens
  Payload ID: 13004
  Gene Symbol: PUF60
  Gene Name: poly-U binding splicing factor 60KDa
  ENST ID: ENST00000633617
  CDS Start-End: 18-806
ctctcatgggaggttgaatggagcagctgaacttggctgacagtggcctggtggggaaggaagccagaagatgcagaagggcctcccctcccatgggcatgccttctgcctggtggctgcagaatgaggccggctgcctctttgcagcaaggcaggtcaatggccagcaaggaggggggtccgagccggcggcggcggcggcagtggtggcagcgggagacaaatggaaacctccacagggcacagactccatcaagatggagaacgggcagagcacagccgccaagctggggctgcctcccctgacgcccgagcagcaggaggcccttcagaaggccaagaagtacgccatggagcagagcatcaagagtgtgctggtgaagcagaccatcgcgcaccagcagcagcagctcaccaacctgcagatggcggctcagcggcagcgggcgctggccatcatgtgccgcgtctacgtgggctctatctactatgagctgggggaggacaccatccgccaggcctttgccccctttggccccatcaagagcatcgacatgtcctgggactccgtcaccatgaagcacaagggctttgccttcgtggagtatgaggtccccgaagctgcacagctggccttggagcagatgaactcggtgatgctggggggcaggaacatcaaggtgggcagacccagcaacatagggcaggcccagcccatcatagaccagttggctgaggaggcacgggccttcaaccgcatctacgtggcctctgtgcaccaggacctctcagacgatgacatcaag

SEQ ID NO: 167787 - DNA, 702 bp, Homo sapiens
  Payload ID: 13004
  Gene Symbol: PUF60
  Gene Name: poly-U binding splicing factor 60KDa
  ENST ID: ENST00000632399
  CDS Start-End: 18-702
ctctcatgggaggttgaatggagcagctgaacttggctgacagtggcctggtggggaaggaagccagaagatgcagaagggcctcccctcccatgggcatgccttctgcctggtggctgcagaatgaggccggctgcctctttgcagcaaggcaggtcaatggccagcaaggaggggggtccgagccggcggcggcggcggcagtggtggcagcgggagacaaatggaaacctccacagggcacagactccatcaagatggagaacgggcagagcacagccgccaagctggggctgcctcccctgacgcccgagcagcaggaggcccttcagaaggccaagaagtacgccatggagcagagcatcaagagtgtgctggtgaagcagaccatcgcgcaccagcagcagcagctcaccaacctgcagatggcagcagtgacaatgggctttggagatcctctctcacctttgcaatcgatggcggctcagcggcagcgggcgctggccatcatgtgccgcgtctacgtgggctctatctactatgagctgggggaggacaccatccgccaggcctttgccccctttggccccatcaagagcatcgacatgtcctgggactccgtcaccatgaagcacaagggctttgccttcgtggagtatgaggtccccgaagctgcacagctggccttggagcagatgaact

SEQ ID NO: 167788 - DNA, 819 bp, Homo sapiens; identical to SEQ ID NO: 167770
  Payload ID: 13004
  Gene Symbol: PUF60
  Gene Name: poly-U binding splicing factor 60KDa
  ENST ID: ENST00000632993
  CDS Start-End: 1-819

SEQ ID NO: 167789 - DNA, 1712 bp, Homo sapiens
  Payload ID: 13004
  Gene Symbol: PUF60
  Gene Name: poly-U binding splicing factor 60KDa
  ENST ID: ENST00000632796
  CDS Start-End: 1-1569
ggcacagactccatcaagatggagaacgggcagagcacagccgccaagctggggctgcctcccctgacgcccgagcagcaggaggcccttcagaaggccaagaagtacgccatggagcagagcatcaagagtgtgctggtgaagcagaccatcgcgcaccagcagcagcagctcaccaacctgcagatggcagcagtgacaatgggctttggagatcctctctcacctttgcaatcgatggcggctcagcggcagcgggcgctggccatcatgtgccgcgtctacgtgggctctatctactatgagctgggggaggacaccatccgccaggcctttgccccctttggccccatcaagagcatcgacatgtcctgggactccgtcaccatgaagcacaagggctttgccttcgtggagtatgaggtccccgaagctgcacagctggccttggagcagatgaactcggtgatgctggggggcaggaacatcaaggtgggcagacccagcaacatagggcaggcccagcccatcatagaccagttggctgaggaggcacgggccttcaaccgcatctacgtggcctctgtgcaccaggacctctcagacgatgacatcaagagcgtgtttgaggcctttggcaagatcaagtcctgcacactggcccgggaccccacaactggcaagcacaagggctacggcttcattgagtacgagaaggcccagtcgtcccaagatgctgtgtcttccatgaacctctttgacctgggtggccagtacttgcgggtgggcaaggctgtcacaccgcccatgcccctactcacaccagccacgcctggaggcctcccacctgccgctgctgtggcagctgctgcagccactgccaagatcacagctcaggaagcagtggccggagcagcggtgctgggtaccctgggcacacctggactggtgtccccagcactgaccctggcccagcccctgggcactttgccccaggctgtcatggctgcccaggcacctggagtcatcacaggtgtgaccccagcccgtcctcctatcccggtcaccatcccctcggtgggagtggtgaaccccatcctggccagccctccaacgctgggtctcctggagcccaagaaggagaaggaagaagaggagctgtttcccgagtcagagcggccagagatgctgagcgagcaggagcacatgagcatctcgggcagtagcgcccgacacatggtgatgcagaagctgctccgcaagcaggagtctacagtgatggttctgcgcaacatggtggaccccaaggacatcgatgatgacctggaaggggaggtgacagaggagtgtggcaagttcggggccgtgaaccgcgtcatcatctaccaagagaaacaaggcgaggaggaggatgcagaaatcattgtcaagatctttgtggagttttccatagcctctgagactcataaggccatccaggccctcaatggccgctggtttgctggccgcaaggtggtggctgaagtgtacgaccaggagcgttttgataacagtgacctctctgcgtgacagtggtccctctccccggacttgcacttgttccttgtttcctctgggttttatagtgatacagtggtgtccccggggccaggcgcgctctgcccagcccagcctacagtgcggataaaggtgcggatgctgctggccctgaa

SEQ ID NO: 167790 - DNA, 1832 bp, Homo sapiens
  Payload ID: 13004
  Gene Symbol: PUF60
  Gene Name: poly-U binding splicing factor 60KDa
  ENST ID: ENST00000632872
  CDS Start-End: 1-1656
caggtcaatggccagcaaggaggggggtccgagccggcggcggcggcggcagtggtggcagcgggagacaaatggaaacctccacagggcacagactccatcaagatggagaacgggcagagcacagccgccaagctggggctgcctcccctgacgcccgagcagcaggaggcccttcagaaggccaagaagtacgccatggagcagagcatcaagagtgtgctggtgaagcagaccatcgcgcaccagcagcagcagctcaccaacctgcagatggcagcagtgacaatgggctttggagatcctctctcacctttgcaatcgatggcggctcagcggcagcgggcgctggccatcatgtgccgcgtctacgtgggctctatctactatgagctgggggaggacaccatccgccaggcctttgccccctttggccccatcaagagcatcgacatgtcctgggactccgtcaccatgaagcacaagggctttgccttcgtggagtatgaggtccccgaagctgcacagctggccttggagcagatgaactcggtgatgctggggggcaggaacatcaaggtgggcagacccagcaacatagggcaggcccagcccatcatagaccagttggctgaggaggcacgggccttcaaccgcatctacgtggcctctgtgcaccaggacctctcagacgatgacatcaagagcgtgtttgaggcctttggcaagatcaagtcctgcacactggcccgggaccccacaactggcaagcacaagggctacggcttcattgagtacgagaaggcccagtcgtcccaagatgctgtgtcttccatgaacctctttgacctgggtggccagtacttgcgggtgggcaaggctgtcacaccgcccatgcccctactcacaccagccacgcctggaggcctcccacctgccgctgctgtggcagctgctgcagccactgccaagatcacagctcaggaagcagtggccggagcagcggtgctgggtaccctgggcacacctggactggtgtccccagcactgaccctggcccagcccctgggcactttgccccaggctgtcatggctgcccaggcacctggagtcatcacaggtgtgaccccagcccgtcctcctatcccggtcaccatcccctcggtgggagtggtgaaccccatcctggccagccctccaacgctgggtctcctggagcccaagaaggagaaggaagaagaggagctgtttcccgagtcagagcggccagagatgctgagcgagcaggagcacatgagcatctcgggcagtagcgcccgacacatggtgatgcagaagctgctccgcaagcaggagtctacagtgatggttctgcgcaacatggtggaccccaaggacatcgatgatgacctggaaggggaggtgacagaggagtgtggcaagttcggggccgtgaaccgcgtcatcatctaccaagagaaacaaggcgaggaggaggatgcagaaatcattgtcaagatctttgtggagttttccatagcctctgagactcataaggccatccaggccctcaatggccgctggtttgctggccgcaaggtggtggctgaagtgtacgaccaggagcgttttgataacagtgacctctctgcgtgacagtggtccctctccccggacttgcacttgttccttgtttcctctgggttttatagtgatacagtggtgtccccggggccaggcgcgctctgcccagcccagcctacagtgcggataaaggtgcggatgctgctggccctgaacgtccgtgtgtctgccgtcggtcctgtcaccga

SEQ ID NO: 167791 - DNA, 1518 bp, Homo sapiens
  Payload ID: 13004
  Gene Symbol: PUF60
  Gene Name: poly-U binding splicing factor 60KDa
  ENST ID: ENST00000634206
  CDS Start-End: 1-1518
ggcacagactccatcaagatggagaacgggcagagcacagccgccaagctggggctgcctcccctgacgcccgagcagcaggaggcccttcagaaggccaagaagtacgccatggagcagagcatcaagagtgtgctggtgaagcagaccatcgcgcaccagcagcagcagctcaccaacctgcagatggcggctcagcggcagcgggcgctggccatcatgtgccgcgtctacgtgggctctatctactatgagctgggggaggacaccatccgccaggcctttgccccctttggccccatcaagagcatcgacatgtcctgggactccgtcaccatgaagcacaagggctttgccttcgtggagtatgaggtccccgaagctgcacagctggccttggagcagatgaactcggtgatgctggggggcaggaacatcaaggtgggcagacccagcaacatagggcaggcccagcccatcatagaccagttggctgaggaggcacgggccttcaaccgcatctacgtggcctctgtgcaccaggacctctcagacgatgacatcaagagcgtgtttgaggcctttggcaagatcaagtcctgcacactggcccgggaccccacaactggcaagcacaagggctacggcttcattgagtacgagaaggcccagtcgtcccaagatgctgtgtcttccatgaacctctttgacctgggtggccagtacttgcgggtgggcaaggctgtcacaccgcccatgcccctactcacaccagccacgcctggaggcctcccacctgccgctgctgtggcagctgctgcagccactgccaagatcacagctcaggaagcagtggccggagcagcggtgctgggtaccctgggcacacctggactggtgtccccagcactgaccctggcccagcccctgggcactttgccccaggctgtcatggctgcccaggcacctggagtcatcacaggtgtgaccccagcccgtcctcctatcccggtcaccatcccctcggtgggagtggtgaaccccatcctggccagccctccaacgctgggtctcctggagcccaagaaggagaaggaagaagaggagctgtttcccgagtcagagcggccagagatgctgagcgagcaggagcacatgagcatctcgggcagtagcgcccgacacatggtgatgcagaagctgctccgcaagcaggagtctacagtgatggttctgcgcaacatggtggaccccaaggacatcgatgatgacctggaaggggaggtgacagaggagtgtggcaagttcggggccgtgaaccgcgtcatcatctaccaagagaaacaaggcgaggaggaggatgcagaaatcattgtcaagatctttgtggagttttccatagcctctgagactcataaggccatccaggccctcaatggccgctggtttgctggccgcaaggtggtggctgaagtgtacgaccaggagcgttttgataacagtgacctctctgcgtga

SEQ ID NO: 167792 - DNA, 1259 bp, Homo sapiens
  Payload ID: 13005
  Gene Symbol: POMZP3
  Gene Name: POM121 and ZP3 fusion
  Uniprot ID: Q6PJE2
  ENST ID: ENST00000275569
  CDS Start-End: 685-1032
gctgcggcggctggagcaggcgagcggcggcggccgatagcgagtgtcagggccggccggggcggcgcttctcggcctgtcgctggtcggcctcctactgtacctcgtgcctgctgcggctgcgctggcctggctggccgtggggactaccgcggcctggtggggactgagccgcgagccccgaggttcgcgccccttgtcctccttcgttcagaaggcgcgacatcggcgaacactgttcgcttcgcctccggccaagtcgacagccaacggaaacctcctagagccgcggaccctgctcgaaggacctgaccctgccgaactgctcctcatgggcagttacctgggcaagcccgggccgccgcagcccgcccccgctccggagggccaggacctgcggaataggcctggccgccgcccgcccgcccggcgccgcgctccacaccgccctccccgccgacccatcgcgttcaccacttttacccctctctccccactcctcttctccgaccctccgggaggccttccccacgggatcgtgggactttaccagatcggtttgtaataacacctcgaagacgctatccgatccatcaggcccagtattcctgtccgggggtacttcccacagtgtgctggaatggttatcacaagaaggctgtgctgtcccctcgcaactccaggatggtgtgtagcccagtgactctgaggatcgcccctcctgacagaagattttcgcgttctgcgataccagagcagataatcagctcaacactgtcctcaccatcaagtaatgccccagacccatgtgcaaaggagactgtactgagtgccctcaaagagaagaagaagaaaaggacagtggaggaagaagaccaaatattccttgatggccaggaaaataaaagaagctgtcttgtcgacggtctcactgatgcctcttctgcattcaaagttcctcgacccgggccagatacactccagttcacagtggatgtcttccactttgctaatgactccagaaacatgtgacagaagaagcagatgtcaccgtggggccactgatcttcctggacaggaggggtgaccatgaagtagagcagtgggctttgccttctgacacctcagtggtgctgctgggcgtaggcctggctgtggtggtgtccctgactctgactgctgttatcctggttctcaccaggaggtgtcgcactgcctcccaccctgtgtctgcttccgaataaaagaagaaagcaata

SEQ ID NO: 167793 - DNA, 1490 bp, Homo sapiens
  Payload ID: 13005
  Gene Symbol: POMZP3
  Gene Name: POM121 and ZP3 fusion
  Uniprot ID: Q6PJE2
  ENST ID: ENST00000310842
  CDS Start-End: 686-1249
ggctgcggcggctggagcaggcgagcggcggcggccgatagcgagtgtcagggccggccggggcggcgcttctcggcctgtcgctggtcggcctcctactgtacctcgtgcctgctgcggctgcgctggcctggctggccgtggggactaccgcggcctggtggggactgagccgcgagccccgaggttcgcgccccttgtcctccttcgttcagaaggcgcgacatcggcgaacactgttcgcttcgcctccggccaagtcgacagccaacggaaacctcctagagccgcggaccctgctcgaaggacctgaccctgccgaactgctcctcatgggcagttacctgggcaagcccgggccgccgcagcccgcccccgctccggagggccaggacctgcggaataggcctggccgccgcccgcccgcccggcgccgcgctccacaccgccctccccgccgacccatcgcgttcaccacttttacccctctctccccactcctcttctccgaccctccgggaggccttccccacgggatcgtgggactttaccagatcggtttgtaataacacctcgaagacgctatccgatccatcaggcccagtattcctgtccgggggtacttcccacagtgtgctggaatggttatcacaagaaggctgtgctgtcccctcgcaactccaggatggtgtgtagcccagtgactctgaggatcgcccctcctgacagaagattttcgcgttctgcgataccagagcagataatcagctcaacactgtcctcaccatcaagtaatgccccagacccatgtgcaaaggagactgtactgagtgccctcaaagagaagaagaagaaaaggacagtggaggaagaagaccaaatattccttgatggccaggaaaataaaagaagctgtcttgtcgacggtctcactgatgcctcttctgcattcaaagttcctcgacccgggccagatacactccagttcacagtggatgtcttccactttgctaatgactccagaaacatgatatacatcacctgccacctgaaggtcaccctagctgagcaggacccagatgaactcaacaaggcctgttccttcagcaagccttccaacagctggttcccagtggaaggcctggctgacatctgtcaatgctgtaacaaaggtgactgtggcactccaagccattccaggaggcagcctcgtgtcgtgagccagtggtccacgtctgcttccctgtaaccgcaggcatgtgacagaagaagcagatgtcaccgtggggccactgatcttcctggacaggaggggtgaccatgaagtagagcagtgggctttgccttctgacacctcagtggtgctgctgggcgtaggcctggctgtggtggtgtccctgactctgactgctgttatcctggttctcaccaggaggtgtcgcactgcctcccaccctgtgtctgcttccgaataaaagaagaaagcaata

SEQ ID NO: 167794 - DNA, 815 bp, Homo sapiens
  Payload ID: 13005
  Gene Symbol: POMZP3
  Gene Name: POM121 and ZP3 fusion
  ENST ID: ENST00000454397
  CDS Start-End: 64-815
cttcccacagtgtgctggaatggttatcacaagaaggctgtgctgtcccctcgcaactccaggatggtgtgtagcccagtgactctgaggatcgcccctcctgacagaagattttcgcgttctgcgataccagagcagataatcagctcaacactgtcctcaccatcaagtaatgccccagacccatgtgcaaaggagactgtactgagtgccctcaaagagaagaagaagaaaaggacagtggaggaagaagaccaaatattccttgatggccaggaaaataaaagaagaccgagtctcagtctgtcacccaggctagtgcaatggtgcaattttggctcactacaccctctgcctcccagattcaagcgattctcctgcctcagcctcccgagtaggtggattacaggtgtgcactgctgcacccagctaatttttgtatttttagtagagacaaggtttcaccatgtttgccaggctagtctcgaactcctgacctcaagtgatccacccaccttggcctcccaaagtgctgggattatgggcgtgagccacggtgcccggcccacctgtctggctttaacaccgttctgttttcttccaagctgtcttgtcgacggtctcactgatgcctcttctgcattcaaagttcctcgacccgggccagatacactccagttcacagtggatgtcttccactttgctaatgactccagaaacatgatatacatcacctgccacctgaaggtcaccctagctgagcaggacccagatgaactcaacaaggcctgttccttcagcaagccttccaacag

SEQ ID NO: 167795 - DNA, 1587 bp, Homo sapiens
  Payload ID: 13005
  Gene Symbol: POMZP3
  Gene Name: POM121 and ZP3 fusion
  ENST ID: ENST00000424818
  CDS Start-End: 706-1170
ggagccgcgatgtctccggcggctgcggcggctggagcaggcgagcggcggcggccgatagcgagtgtcagggccggccggggcggcgcttctcggcctgtcgctggtcggcctcctactgtacctcgtgcctgctgcggctgcgctggcctggctggccgtggggactaccgcggcctggtggggactgagccgcgagccccgaggttcgcgccccttgtcctccttcgttcagaaggcgcgacatcggcgaacactgttcgcttcgcctccggccaagtcgacagccaacggaaacctcctagagccgcggaccctgctcgaaggacctgaccctgccgaactgctcctcatgggcagttacctgggcaagcccgggccgccgcagcccgcccccgctccggagggccaggacctgcggaataggcctggccgccgcccgcccgcccggcgccgcgctccacaccgccctccccgccgacccatcgcgttcaccacttttacccctctctccccactcctcttctccgaccctccgggaggccttccccacgggatcgtgggactttaccagatcggtttgtaataacacctcgaagacgctatccgatccatcaggcccagtattcctgtccgggggtacttcccacagtgtgctggaatggttatcacaagaaggctgtgctgtcccctcgcaactccaggatggtgtgtagcccagtgactctgaggatcgcccctcctgacagaagattttcgcgttctgcgataccagagcagataatcagctcaacactgtcctcaccatcaagtaatgccccagacccatgtgcaaaggagactgtactgagtgccctcaaagagaagaagaagaaaaggacagtggaggaagaagaccaaatattccttgatggccaggaaaataaaagaagaccgagtctcagtctgtcacccaggctagtgcaatggtgcaattttggctcactacaccctctgcctcccagattcaagcgattctcctgcctcagcctcccgagtaggtggattacagctgtcttgtcgacggtctcactgatgcctcttctgcattcaaagttcctcgacccgggccagatacactccagttcacagtggatgtcttccactttgctaatgactccagaaacatgatatacatcacctgccacctgaaggtcaccctagctgagcaggacccagatgaactcaacaaggcctgttccttcagcaagccttccaacagctggttcccagtggaaggcctggctgacatctgtcaatgctgtaacaaaggtgactgtggcactccaagccattccaggaggcagcctcgtgtcgtgagccagtggtccacgtctgcttccctgtaaccgcaggcatgtgacagaagaagcagatgtcaccgtggggccactgatcttcctggacaggaggggtgaccatgaagtagagcagtgggctttgccttctgacacctcagtggtgctgctgggcgtaggcctggctgtggtggtgtccctgactctgactgctgttatcctggttctcaccaggaggtgtcgcactgcc

SEQ ID NO: 167796 - DNA, 606 bp, Homo sapiens
  Payload ID: 13005
  Gene Symbol: POMZP3
  Gene Name: POM121 and ZP3 fusion
  ENST ID: ENST00000441393
  CDS Start-End: 1-373
ctgtcttgtcgacggtctcactgatgcctcttctgcattcaaagttcctcgacccgggccagatacactccagttcacagtggatgtcttccactttgctaatgactccagaaacatgatatacatcacctgccacctgaaggtcaccctagctgagcaggacccagatgaactcaacaaggcctgttccttcagcaagccttccaacaggcaacaaaaatctaagctgcttctctttcatctcagctggttcccagtggaaggcctggctgacatctgtcaatgctgtaacaaaggtgactgtggcactccaagccattccaggaggcagcctcgtgtcgtgagccagtggtccacgtctgcttccctgtaaccgcaggcatgtgacagaagaagcagatgtcaccgtggggccactgatcttcctggacaggaggggtgaccatgaagtagagcagtgggctttgccttctgacacctcagtggtgctgctgggcgtaggcctggctgtggtggtgtccctgactctgactgctgttatcctggttctcaccaggaggtgtcgcactgcctcccaccctgtgtctgcttccgaataaaagaaga

SEQ ID NO: 167797 - DNA, 1490 bp, Homo sapiens; identical to SEQ ID NO: 167793
  Payload ID: 13005
  Gene Symbol: POMZP3
  Gene Name: POM121 and ZP3 fusion
  Uniprot ID: Q6PJE2
  ENST ID: ENST00000619075
  CDS Start-End: 686-1249

SEQ ID NO: 167798 - DNA, 1259 bp, Homo sapiens; identical to SEQ ID NO: 167792
  Payload ID: 13005
  Gene Symbol: POMZP3
  Gene Name: POM121 and ZP3 fusion
  Uniprot ID: Q6PJE2
  ENST ID: ENST00000615241
  CDS Start-End: 685-1032

SEQ ID NO: 167799 - DNA, 815 bp, Homo sapiens; identical to SEQ ID NO: 167794
  Payload ID: 13005
  Gene Symbol: POMZP3
  Gene Name: POM121 and ZP3 fusion
  ENST ID: ENST00000631876
  CDS Start-End: 64-815

SEQ ID NO: 167800 - DNA, 1587 bp, Homo sapiens; identical to SEQ ID NO: 167795
  Payload ID: 13005
  Gene Symbol: POMZP3
  Gene Name: POM121 and ZP3 fusion
  ENST ID: ENST00000633323
  CDS Start-End: 706-1170

SEQ ID NO: 167801 - DNA, 606 bp, Homo sapiens; identical to SEQ ID NO: 167796
  Payload ID: 13005
  Gene Symbol: POMZP3
  Gene Name: POM121 and ZP3 fusion
  ENST ID: ENST00000632234
  CDS Start-End: 1-373

SEQ ID NO: 167802 - DNA, 5320 bp, Homo sapiens
  Payload ID: 13006
  Gene Symbol: POM121
  Gene Name: POM121 transmembrane nucleoporin
  Uniprot ID: Q96HA1
  ENST ID: ENST00000358357
  CDS Start-End: 301-3255
gagatctgaagccgagcaacttgcccaagtccttcttcttttcccattaacaagatatgatatcaccaagccaaacgtcatcattaagttggagcagggagaggagctgtggataacgggaggtgaatttccatgtcaacatagtccagggattgtgggactttaccaaatcggtttgtaataacacctagaagacgctatccgatccatcaggcccagtattcctgtctgggggtacttcccaccgtgtgctggaatggttatcacaagaaggctgtgctgtcccctcgcaactccaggatggtgtgtagcccagtgactgtgaggatcgcccctcctgacagaagattttcgcgttctgcgataccagagcagataatcagctcaacactgtcctcaccatcaagtaacgccccagacccatgtgcaaaggagacagtactgagtgccctcaaagagaaggagaagaaaaggacagtggaggaagaagaccaaatattccttgatggccaggaaaataaaagaaggcgccatgatagcagtggcagtggacattcagcatttgagcccctggtggccaatggagtccccgcttcttttgtgcctaagcctgggtctctgaagagaggcctcaattctcagagctcagatgaccacttgaataagagatcccgaagctcttccatgagctccttgacaggcgcttacgcaagtggcatccctagctccagccgcaatgccattaccagttcctacagctccactcgaggcatctcacagctctggaagagaaatggccccagttcatcacccttctctagcccagcctcctcccgctcccagacaccggagaggccagcaaagaaaataagagaagaggagctgtgtcatcattccagttcttcaactccattggcagcagacagggagtcccagggagaaaaggctgcagatacaaccccaaggaagaaacaaaactcgaattctcagtctacacctggcagctctgggcagcgtaagcggaaagttcagctgctgccttctcggcgaggggaacagctgaccttgcctccacctccccagcttggctattcgatcactgccgaggacctagacttagagaagaaggcttcattacagtggttcaaccaggccttggaggacaagagcgatgctgcctcgaactctgtcactgagaccccacctatcactcagccttcatttacctttaccctgcctgctgctgcacctgcctccccacccacctccctcctggccccaagcaccaacccactgttagagagcttgaagaagatgcagactcccccgagcctgccaccctgcccagaatctgctggagcagcaaccactgaggccctctcacctccaaagacacccagcctcctacccccgctgggtttatcacagtcagggccgccagggctgctccccagcccctcctttgactccaaacccccgaccactttgctggggctgatccctgctccatccatggtaccagccactgacaccaaggcacctccaacccttcaggcagagacggctaccaaaccccaagccacatctgccccgtcccccgcccccaagcaaagcttcctgtttggaacacagaacacctcaccttccagccctgccgcccctgctgcatcttcagcacctcccatgttcaagcccattttcacggctccacccaagagtgagaaggaaggccccacaccgcctggcccttcagtcacagccacagcgccctccagctcctccctccccacgaccaccagcaccacagccccgaccttccagcctgtctttagcagcatggggccacctgcatctgtgcccttgcctgctcccttcttcaagcagacaactactcccgccactgctcccaccacaactgccccgctcttcactggcctggccagcgccacctctgctgtggctcccatcacctctgccagtccatccacagactctgcttcgaagcctgcgtttggctttggcataaacagtgtgagcagcagcagtgtgagtaccacgaccagcaccgccactgccgcctcacagcctttcctcttcggggcgccccaggcctctgctgccagcttcaccccggccatgggctccatattccagtttggcaaacctcctgccttgcccacaaccaccacagtcaccaccttcagccagtccctgcacactgccgtgccaacggccaccagcagcagcgctgccgactttagtggttttggcagcaccctcgccacctccgccccggccaccagcagccagcccactctgacgttcagtaacacgagcacccccacgttcaacattccctttggctcaagcgccaagtccccgctcccatcatatccgggagccaacccccagcccgcatttggggccgctgaggggcagccaccgggggccgccaagccggcccttgcccccagctttggcagctctttcacttttggaaactctgcagccccggctgctgcacccacacctgcacctccgtccatgatcaaggtcgtgcctgcgtacgtgcctacgcccatccatcctatctttggcggtgccacgcactcggcgtttgggttgaaagccacggcttcggccttcggcgctcccgccagctcacagcccgcctttggcggctccactgctgtcttcttcggtgcagccaccagctccggctttggagccaccacccagaccgccagcagcgggagcagcagctcggtgtttggcagcacaacaccatcacccttcacgtttgggggttcggcagcccccgctggcagtgggagctttgggatcaatgtggccaccccaggctccagcaccaccaccggagctttcagctttggagcaggacagagtgggagcacagccacctccacccccttcgcagggggcttaggtcagaacgccctgggcaccaccggccagagcacaccgtttgccttcaacgtgagcagcacaactgagagcaaacctgtgtttggaggcaccgccacccccacctttggtctgaacacccctgcgcctggagtgggcacatcaggcagcagcctctcctttggggcatcctcagcacccgcccaaggctttgttggtgttgcacctttcggatcggcggccctttcattttccattggtgcgggatccaagaccccaggggctcgacagcgactgcaggcccgaaggcagcacacccgcaaaaagtagcctttgtcccctgtccctgttccccccaccccttccctaaatctggaccttggcacctgctaggaagagccttggacccttccagttgcgtaaagcaaacctaccccggatctctggcttcagccgccagggggcagtggcagccctggggccctttcccttctggaggaagcacaagcctcagggaaggggaagcaggatgcggagggccaaagcccgggacctctacttgaacagttctactggggaggctggagaactaaggaaacacctgtacatagtgtccgctgccctgactcccgcttagcacacccttaggcaggcgccccttccacctttccccgagaccgtcgtcgctggagggggcagggtccagcccgcctggatcggtggtgtgcacctgatgggatttgggaaatgggctatccgtaaagctttatcttgcttggcttagctgtgagaagtggttctcttcctctggtcccttctggggactctgtttccccatttcttgctgctgtgtccctcaccagttccttgcaggattccttcgtttttaaatgcccttgaatctagctttgccttggagaccccagtgggtgctgctcctgccgttttcttcctgccaagcctgaatcaatgtttcatctccaaccctctgccagtttggcccctcagagcttggtggctcaagactgttagcctggcagagccaggggtgaagggagaagctcttggagcaggcaggatgcccaccgctgcttcagctgcctcctcgcccagctaccctttggccccattgggccctcgtctgcctctccaggattgtatgtttcaagccttgtcctgtgttcctttgtctgatgctctgtgtattgctctttgaatcgagtttggaggaagagttgagttgtatgagtggcggcatgttggtagtgccggacttcctgtttcaagttttctggggcctcgctaattgaatgtggaaagtagcaccacttgacggctacaagtgccgactcctgaattttcccatggtgttctgacttcaagggctggcagccagggagaatgggcccaggggaagcaaagacctcttccctctgccgtttctgtcccacttaactgacctcactggaggctacatcacccaaagtagatgttagaaaacctaaattaatgaaccatatttttaaaatcctatttttcccaaacagggccctctgcagcccatcctttccttccgtccttctgaaaccacataccccaggcccaagcgccttgctgccacgcccaacctctttgggagaagtatgaatgcgtgtgtctaaattaaaagaaaaaaatatttaaacgttttttaacaaaaatttatttttgtatttaagctaaattgccttttaaattccttcaagcttggttcattgaggtggttaagtataaatgctattaactaggaattagctgtatagttaagttatgcctgtgcaaagaagaggctcaaatgctgtccccggcagctttcctgggggactagagctccttctggccatgttatatgaaatgtaattcttattttataaataatgtgatgtaaatgtaactggtgccccctccccgatgtgactgagggtgagtgagtggtggcggggctgctccttcccacccctcagaacagctctgatcctcgttaatacctggctgcgtgtgcagctgaggagggagtgaacctcaagcctaaatacctgttaggattggagggtctgggtgggcctgggcctagcaatcaagcttctacctgtaccttatgtaaggtagaccctcctagtgtcagtacctgagctagtttacctcagttccgcaggcaggacagccggtccgggaaccctgagtgagaatgagtgtggatgtgtacagtacacgcactggacggcagcgggaggctgggactttccattacaaatagagacttcattcctgttgagtctagttggaatttttagtatgaatgtgagatttttctcctgcttgtgacattaagaataaaaaactgtgatctatcgta

SEQ ID NO: 167803 - DNA, 7011 bp, Homo sapiens
  Payload ID: 13006
  Gene Symbol: POM121
  Gene Name: POM121 transmembrane nucleoporin
  Uniprot ID: Q96HA1
  ENST ID: ENST00000395270
  CDS Start-End: 1042-4041
cgcttcctgcgcctcttcaggtcaccgcttgctctagttcccaggctttggcctctagtggatgagaatcaccgagtctgcggggctggacgctgaccgcccgggccagcacctaggcgggcgggagctgtgcggcccagggttcgcgcgggccgggtagaggctcgagccgggacccccgagcgtgaaccccggagccagcggcgctggggccagaggggccaggcgggaggtggtggcggaggcgaaggggcgacgggacctgggcctggcccgtgtgtgtcctcggcggcctggcgccggccgtcgctgtacggtgagccccagggaggcggatctgggccccgagaaggacacccgcctggatttgccccgtaggcccggcccgggcccctcgggagcagaacagccttggtgaggtggacgggaggggacttcgcgagcagacgcgcgcgccagcgacagcagcccgccccggcctctcgggagccgtggggcagaggctgcagagccccaggagggggccagtgtcattcaaagatgtggctgtggatttcacccaggaggagtggtggcaactggaccctgatgagaagataacatacggggatgtgatgttggagaactacagccatctagtttccctggcttatgaggtggcaacatcttgtacttcggagatctgaagccgagcaacttgcccaagtccttcttcttttcccattaacaagatatgatatcaccaagccaaacgtcatcattaagttggagcagggagaggagctgtggataacgggaggtgaatttccatgtcaacatagtccagcccttcacatcctcagccgaagatctcacttcctcccagaggcctttgctgactgacccctcagggattgtgggactttaccaaatcggtttgtaataacacctagaagacgctatccgatccatcaggcccagtattcctgtctgggggtacttcccaccgtgtgctggaatggttatcacaagaaggctgtgctgtcccctcgcaactccaggatggtgtgtagcccagtgactgtgaggatcgcccctcctgacagaagattttcgcgttctgcgataccagagcagataatcagctcaacactgtcctcaccatcaagtaacgccccagacccatgtgcaaaggagacagtactgagtgccctcaaagagaaggagaagaaaaggacagtggaggaagaagaccaaatattccttgatggccaggaaaataaaagaaggcgccatgatagcagtggcagtggacattcagcatttgagcccctggtggccaatggagtccccgcttcttttgtgcctaagcctgggtctctgaagagaggcctcaattctcagagctcagatgaccacttgaataagagatcccgaagctcttccatgagctccttgacaggcgcttacgcaagtggcatccctagctccagccgcaatgccattaccagttcctacagctccactcgaggcatctcacagctctggaagagaaatggccccagttcatcacccttctctagcccagcctcctcccgctcccagacaccggagaggccagcaaagaaaataagagaagaggagctgtgtcatcattccagttcttcaactccattggcagcagacagggagtcccagggagaaaaggctgcagatacaaccccaaggaagaaacaaaactcgaattctcagtctacacctggcagctctgggcagcgtaagcggaaagttcagctgctgccttctcggcgaggggaacagctgaccttgcctccacctccccagcttggctattcgatcactgccgaggacctagacttagagaagaaggcttcattacagtggttcaaccaggccttggaggacaagagcgatgctgcctcgaactctgtcactgagaccccacctatcactcagccttcatttacctttaccctgcctgctgctgcacctgcctccccacccacctccctcctggccccaagcaccaacccactgttagagagcttgaagaagatgcagactcccccgagcctgccaccctgcccagaatctgctggagcagcaaccactgaggccctctcacctccaaagacacccagcctcctacccccgctgggtttatcacagtcagggccgccagggctgctccccagcccctcctttgactccaaacccccgaccactttgctggggctgatccctgctccatccatggtaccagccactgacaccaaggcacctccaacccttcaggcagagacggctaccaaaccccaagccacatctgccccgtcccccgcccccaagcaaagcttcctgtttggaacacagaacacctcaccttccagccctgccgcccctgctgcatcttcagcacctcccatgttcaagcccattttcacggctccacccaagagtgagaaggaaggccccacaccgcctggcccttcagtcacagccacagcgccctccagctcctccctccccacgaccaccagcaccacagccccgaccttccagcctgtctttagcagcatggggccacctgcatctgtgcccttgcctgctcccttcttcaagcagacaactactcccgccactgctcccaccacaactgccccgctcttcactggcctggccagcgccacctctgctgtggctcccatcacctctgccagtccatccacagactctgcttcgaagcctgcgtttggctttggcataaacagtgtgagcagcagcagtgtgagtaccacgaccagcaccgccactgccgcctcacagcctttcctcttcggggcgccccaggcctctgctgccagcttcaccccggccatgggctccatattccagtttggcaaacctcctgccttgcccacaaccaccacagtcaccaccttcagccagtccctgcacactgccgtgccaacggccaccagcagcagcgctgccgactttagtggttttggcagcaccctcgccacctccgccccggccaccagcagccagcccactctgacgttcagtaacacgagcacccccacgttcaacattccctttggctcaagcgccaagtccccgctcccatcatatccgggagccaacccccagcccgcatttggggccgctgaggggcagccaccgggggccgccaagccggcccttgcccccagctttggcagctctttcacttttggaaactctgcagccccggctgctgcacccacacctgcacctccgtccatgatcaaggtcgtgcctgcgtacgtgcctacgcccatccatcctatctttggcggtgccacgcactcggcgtttgggttgaaagccacggcttcggccttcggcgctcccgccagctcacagcccgcctttggcggctccactgctgtcttcttcggtgcagccaccagctccggctttggagccaccacccagaccgccagcagcgggagcagcagctcggtgtttggcagcacaacaccatcacccttcacgtttgggggttcggcagcccccgctggcagtgggagctttgggatcaatgtggccaccccaggctccagcaccaccaccggagctttcagctttggagcaggacagagtgggagcacagccacctccacccccttcgcagggggcttaggtcagaacgccctgggcaccaccggccagagcacaccgtttgccttcaacgtgagcagcacaactgagagcaaacctgtgtttggaggcaccgccacccccacctttggtctgaacacccctgcgcctggagtgggcacatcaggcagcagcctctcctttggggcatcctcagcacccgcccaaggctttgttggtgttgcacctttcggcaacacttttgctcaccagcaagaacacagcccgaggaagggacccaataacctttcaaaacgcaaactgctgcctgcggtgagggcccagggtcttccacggagaggacaggcatcttcctttcccaccaggaaggagtgagcccggagcctctgctatgtgcaaggcggtgtgcaagcaccggctgcagctttttgctctcttctttctctttggggctgggctgggtgtgcgttctggtgctgatgctttggcctgtgaggctgagctagagaaatgtagatgttagatgtgccagtaccatcctgcgcctcccaagcatgcccccactcactcacgtcggcatctcgacccgttcaattacagcaacgaagaagccaccgctaagcgtggtcttgggggaagcccggaggcagtgctcggcacccgggaacgtgctcaggcctcggtggggccgggcaggcagggcgggagctagcctgcaagagaaacagccccaatgctgggtaagagagcagttcaccccatccccccctccacgaccctggcgcacgccctgtacctgaaggcgcccgggttctgctgcagcgcatcttgtaccatgtcttcattctcctcctggcagagggagcacatggagtagacgagccgctgcagggaagggaaagtgagcgcgtggcacagggctcgctgctggaaccctgccagggcatgcagacgcaccgggctaggtgtccctgccccgggctcctccagctgtctgctcggcatacctaaggaaaagcgtgtctcggttacacagcttcacaggctgcctcagtcctgaaatcctcgctcctgaaatcctcgcttcacagaggagaacttttgctccagggtcccaagcccattaaagtgtcagaactaagaccaaaacagatgactccaggtctaagctgctgtggacctctgagtccctcagccacgccttctcaccatctcacccgagccactgcaggaaggatccagcaggacatagtggacctcacgatagcgcggatctaagggggagaccgccaggaagtcctcctcagccagctcacagcaggagacgccagcccaggccagcagcgtggccatggatgccagccgcctggcatccaggtcaaaggcaaagatcttcctagggcagagggcagagcaggggtgagctgagcatgcatggagcagctaagggcctgtcacagctgacacagacaaccagaacatgcaggttaagccaggacacacaatattgaaacagcctatatttaaagggcccagggtcagaggtaactggcctggggtctctgccccaagggctaagggatccacatctcacacctgcagtggggaaagcttagcttggggcaaataccgtgaactactttggtgcagcaggaaagagttaagcgaaagtcatcctttcagccttcattacccactgaaaggcacaaaatcaaaccccatgtcctcctcctcctcctgtggcactcacccttggttcttcagaagagcagccaagtgactggtctttattgcctggggtggcacaggcatccatgacatgggagcctggcgggggtccagcagcatggctgggagacagctggcctggcaggcagaacacaggggccgggtaaacagagaccccaggctaggcccttcccgtgcctacacattcttcccttttctattcctcttgcctaccctgtcctgcagaatgaggtgtccggcccggtacagtgggtgttcatgcagatctgtctgggcgggaaacaccagcagctccggcatcaaggggtccaggagaaaatgcttccccttgagggctcgtaagtcatcgaggctgccagggaagaaccattcattcatcatttcctgaatttctccctgccaggccctatttcaacggtccattcatgcaacaaatgttaccacagctatggagaaatcaacagggtgataagggaatccgggatccgcagttgagggaatgggttgtcaagccagacttatgggtcaggagccccctctactgtttaccagcagtgggagcctgggcaagtgattcaatctcaagccccactggcatctctgtaaaatagtaggtgtgaggattcaatgagccaatatatccaagatacttacgtgccacaatttaataaatgttagctattcctgttgaagcataaccttggagaaaggttactttacaggggggtgaggagtggggaagtgagagctgagctcattcttgatggatgaggagttagtcatgtgaggcgcttaggttaaaactacattcactataactcagtaaagcagtcccgcccactctccgacccatgcagaaataggcctagggagtcacatgtctcagttcagaaatctatcgaagtggcagagctggaattcaaacacaagcagccgttctctgctattccaccctggtgtccaagcaacatggtagggcagaaggaagaggatcttacaaagagtaagggaaagggagaggggcagaggctgcttctcagagccaccaaaggacaaaataagacaggtgtgagcccagtggaggaggcacggggcagagaccagccactgttgctggcacgctggtgcacgtagcactgtggcagatggacctggagaggaagcaggagggacagcacaatggagccaagaaaggacttagcatggccgggcgcggtggttcatgcctgtaatcccagcattttgggaggccaaggtgggcagatcacctgaggtcaggagtttgagaccagcctggccaacatggagaaatcccgtctctactaaaaatacaaaattagccaggcatggtgctgcatgcctgcaatcctgtagggaaaagaaagagagatcagactgttactgtgtctgtgtagaaagggaagacataagaaattccattttgacctgtaccttgaacaattggttggctgagatgctgttaatttgtgactttgccccaaatttgagctcacaaaaacatgtgttgtatggaatcaaggtttaaaggatctagggctgtgcaggacatgccttgttaataaaacgtttacaagc

SEQ ID NO: 167804 - DNA, 3456 bp, Homo sapiens
  Payload ID: 13006
  Gene Symbol: POM121
  Gene Name: POM121 transmembrane nucleoporin
  Uniprot ID: Q96HA1
  ENST ID: ENST00000446813
  CDS Start-End: 457-3456
gggccagtgtcattcaaagatgtggctgtggatttcacccaggaggagtggtggcaactggaccctgatgagaagataacatacggggatgtgatgttggagaactacagccatctagtttccctggcttatgaggtggcaacatcttgtacttcggagatctgaagccgagcaacttgcccaagtccttcttcttttcccattaacaagatatgatatcaccaagccaaacgtcatcattaagttggagcagggagaggagctgtggataacgggaggtgaatttccatgtcaacatagtccagggattgtgggactttaccaaatcggtttgtaataacacctagaagacgctatccgatccatcaggcccagtattcctgtctgggggtacttcccaccgtgtgctggaatggttatcacaagaaggctgtgctgtcccctcgcaactccaggatggtgtgtagcccagtgactgtgaggatcgcccctcctgacagaagattttcgcgttctgcgataccagagcagataatcagctcaacactgtcctcaccatcaagtaacgccccagacccatgtgcaaaggagacagtactgagtgccctcaaagagaaggagaagaaaaggacagtggaggaagaagaccaaatattccttgatggccaggaaaataaaagaaggcgccatgatagcagtggcagtggacattcagcatttgagcccctggtggccaatggagtccccgcttcttttgtgcctaagcctgggtctctgaagagaggcctcaattctcagagctcagatgaccacttgaataagagatcccgaagctcttccatgagctccttgacaggcgcttacgcaagtggcatccctagctccagccgcaatgccattaccagttcctacagctccactcgaggcatctcacagctctggaagagaaatggccccagttcatcacccttctctagcccagcctcctcccgctcccagacaccggagaggccagcaaagaaaataagagaagaggagctgtgtcatcattccagttcttcaactccattggcagcagacagggagtcccagggagaaaaggctgcagatacaaccccaaggaagaaacaaaactcgaattctcagtctacacctggcagctctgggcagcgtaagcggaaagttcagctgctgccttctcggcgaggggaacagctgaccttgcctccacctccccagcttggctattcgatcactgccgaggacctagacttagagaagaaggcttcattacagtggttcaaccaggccttggaggacaagagcgatgctgcctcgaactctgtcactgagaccccacctatcactcagccttcatttacctttaccctgcctgctgctgcacctgcctccccacccacctccctcctggccccaagcaccaacccactgttagagagcttgaagaagatgcagactcccccgagcctgccaccctgcccagaatctgctggagcagcaaccactgaggccctctcacctccaaagacacccagcctcctacccccgctgggtttatcacagtcagggccgccagggctgctccccagcccctcctttgactccaaacccccgaccactttgctggggctgatccctgctccatccatggtaccagccactgacaccaaggcacctccaacccttcaggcagagacggctaccaaaccccaagccacatctgccccgtcccccgcccccaagcaaagcttcctgtttggaacacagaacacctcaccttccagccctgccgcccctgctgcatcttcagcacctcccatgttcaagcccattttcacggctccacccaagagtgagaaggaaggccccacaccgcctggcccttcagtcacagccacagcgccctccagctcctccctccccacgaccaccagcaccacagccccgaccttccagcctgtctttagcagcatggggccacctgcatctgtgcccttgcctgctcccttcttcaagcagacaactactcccgccactgctcccaccacaactgccccgctcttcactggcctggccagcgccacctctgctgtggctcccatcacctctgccagtccatccacagactctgcttcgaagcctgcgtttggctttggcataaacagtgtgagcagcagcagtgtgagtaccacgaccagcaccgccactgccgcctcacagcctttcctcttcggggcgccccaggcctctgctgccagcttcaccccggccatgggctccatattccagtttggcaaacctcctgccttgcccacaaccaccacagtcaccaccttcagccagtccctgcacactgccgtgccaacggccaccagcagcagcgctgccgactttagtggttttggcagcaccctcgccacctccgccccggccaccagcagccagcccactctgacgttcagtaacacgagcacccccacgttcaacattccctttggctcaagcgccaagtccccgctcccatcatatccgggagccaacccccagcccgcatttggggccgctgaggggcagccaccgggggccgccaagccggcccttgcccccagctttggcagctctttcacttttggaaactctgcagccccggctgctgcacccacacctgcacctccgtccatgatcaaggtcgtgcctgcgtacgtgcctacgcccatccatcctatctttggcggtgccacgcactcggcgtttgggttgaaagccacggcttcggccttcggcgctcccgccagctcacagcccgcctttggcggctccactgctgtcttcttcggtgcagccaccagctccggctttggagccaccacccagaccgccagcagcgggagcagcagctcggtgtttggcagcacaacaccatcacccttcacgtttgggggttcggcagcccccgctggcagtgggagctttgggatcaatgtggccaccccaggctccagcaccaccaccggagctttcagctttggagcaggacagagtgggagcacagccacctccacccccttcgcagggggcttaggtcagaacgccctgggcaccaccggccagagcacaccgtttgccttcaacgtgagcagcacaactgagagcaaacctgtgtttggaggcaccgccacccccacctttggtctgaacacccctgcgcctggagtgggcacatcaggcagcagcctctcctttggggcatcctcagcacccgcccaaggctttgttggtgttgcacctttcggcaacacttttgctcaccagcaagaacacagcccgaggaagggacccaataacctttcaaaacgcaaactgctgcctgcggtgagggcccagggtcttccacggagaggacaggcatcttcctttcccaccaggaaggagtga

SEQ ID NO: 167805 - DNA, 3750 bp, Homo sapiens
  Payload ID: 13006
  Gene Symbol: POM121
  Gene Name: POM121 transmembrane nucleoporin
  Uniprot ID: Q96HA1
  ENST ID: ENST00000434423
  CDS Start-End: 1-3750
atgtctccggcggctgcggcggctggagcaggcgagcggcggcggcccatagcgagtgtcagggacggccggggccggggctgcggcgggccggccagggcggtgctcctgggcctgtcgctggttggcctcttactgtacctcgtgccggctgcggctgcactggcctggctgaccgtgggggctaccgcggcctggtggggactgagccgcgagccccgaggttcgcgccccttgtcctccttcgttcggaaggcgcgtcatcggcgccccttgtcctccttcgttcggaaggcgcgtcatcggcgaacactgttcgcttcgcctctggccaagtcgacagccaacggaaacctcctagagccgcggaccctgctcgaaggacctgaccctgcggaactgctactcatgggcagttacctgggcaagcccgggccgccgcagcccgccgccgctccggagggccaggacctgcgggataggcctggccgccgcccacctgcccgcccggcgccgcgctccccaccgccgcgctccccaccgccgcgctcccccccgccctccccgccgacccatcgcgctcaccacgtttacccctctctgcccactcctcttctccgaccctccaggaggccttccccacgggattgtgggactttaccaaatcggtttgtaataacacctagaagacgctatccgatccatcaggcccagtattcctgtctgggggtacttcccaccgtgtgctggaatggttatcacaagaaggctgtgctgtcccctcgcaactccaggatggtgtgtagcccagtgactgtgaggatcgcccctcctgacagaagattttcgcgttctgcgataccagagcagataatcagctcaacactgtcctcaccatcaagtaacgccccagacccatgtgcaaaggagacagtactgagtgccctcaaagagaaggagaagaaaaggacagtggaggaagaagaccaaatattccttgatggccaggaaaataaaagaaggcgccatgatagcagtggcagtggacattcagcatttgagcccctggtggccaatggagtccccgcttcttttgtgcctaagcctgggtctctgaagagaggcctcaattctcagagctcagatgaccacttgaataagagatcccgaagctcttccatgagctccttgacaggcgcttacgcaagtggcatccctagctccagccgcaatgccattaccagttcctacagctccactcgaggcatctcacagctctggaagagaaatggccccagttcatcacccttctctagcccagcctcctcccgctcccagacaccggagaggccagcaaagaaaataagagaagaggagctgtgtcatcattccagttcttcaactccattggcagcagacagggagtcccagggagaaaaggctgcagatacaaccccaaggaagaaacaaaactcgaattctcagtctacacctggcagctctgggcagcgtaagcggaaagttcagctgctgccttctcggcgaggggaacagctgaccttgcctccacctccccagcttggctattcgatcactgccgaggacctagacttagagaagaaggcttcattacagtggttcaaccaggccttggaggacaagagcgatgctgcctcgaactctgtcactgagaccccacctatcactcagccttcatttacctttaccctgcctgctgctgcacctgcctccccacccacctccctcctggccccaagcaccaacccactgttagagagcttgaagaagatgcagactcccccgagcctgccaccctgcccagaatctgctggagcagcaaccactgaggccctctcacctccaaagacacccagcctcctacccccgctgggtttatcacagtcagggccgccagggctgctccccagcccctcctttgactccaaacccccgaccactttgctggggctgatccctgctccatccatggtaccagccactgacaccaaggcacctccaacccttcaggcagagacggctaccaaaccccaagccacatctgccccgtcccccgcccccaagcaaagcttcctgtttggaacacagaacacctcaccttccagccctgccgcccctgctgcatcttcagcacctcccatgttcaagcccattttcacggctccacccaagagtgagaaggaaggccccacaccgcctggcccttcagtcacagccacagcgccctccagctcctccctccccacgaccaccagcaccacagccccgaccttccagcctgtctttagcagcatggggccacctgcatctgtgcccttgcctgctcccttcttcaagcagacaactactcccgccactgctcccaccacaactgccccgctcttcactggcctggccagcgccacctctgctgtggctcccatcacctctgccagtccatccacagactctgcttcgaagcctgcgtttggctttggcataaacagtgtgagcagcagcagtgtgagtaccacgaccagcaccgccactgccgcctcacagcctttcctcttcggggcgccccaggcctctgctgccagcttcaccccggccatgggctccatattccagtttggcaaacctcctgccttgcccacaaccaccacagtcaccaccttcagccagtccctgcacactgccgtgccaacggccaccagcagcagcgctgccgactttagtggttttggcagcaccctcgccacctccgccccggccaccagcagccagcccactctgacgttcagtaacacgagcacccccacgttcaacattccctttggctcaagcgccaagtccccgctcccatcatatccgggagccaacccccagcccgcatttggggccgctgaggggcagccaccgggggccgccaagccggcccttgcccccagctttggcagctctttcacttttggaaactctgcagccccggctgctgcacccacacctgcacctccgtccatgatcaaggtcgtgcctgcgtacgtgcctacgcccatccatcctatctttggcggtgccacgcactcggcgtttgggttgaaagccacggcttcggccttcggcgctcccgccagctcacagcccgcctttggcggctccactgctgtcttcttcggtgcagccaccagctccggctttggagccaccacccagaccgccagcagcgggagcagcagctcggtgtttggcagcacaacaccatcacccttcacgtttgggggttcggcagcccccgctggcagtgggagctttgggatcaatgtggccaccccaggctccagcaccaccaccggagctttcagctttggagcaggacagagtgggagcacagccacctccacccccttcgcagggggcttaggtcagaacgccctgggcaccaccggccagagcacaccgtttgccttcaacgtgagcagcacaactgagagcaaacctgtgtttggaggcaccgccacccccacctttggtctgaacacccctgcgcctggagtgggcacatcaggcagcagcctctcctttggggcatcctcagcacccgcccaaggctttgttggtgttgcacctttcggatcggcggccctttcattttccattggtgcgggatccaagaccccaggggctcgacagcgactgcaggcccgaaggcagcacacccgcaaaaagtag

SEQ ID NO: 167806 - DNA, 5480 bp, Homo sapiens
  Payload ID: 13006
  Gene Symbol: POM121
  Gene Name: POM121 transmembrane nucleoporin
  Uniprot ID: Q96HA1
  ENST ID: ENST00000627934
  CDS Start-End: 457-3411
gggccagtgtcattcaaagatgtggctgtggatttcacccaggaggagtggtggcaactggaccctgatgagaagataacatacggggatgtgatgttggagaactacagccatctagtttccctggcttatgaggtggcaacatcttgtacttcggagatctgaagccgagcaacttgcccaagtccttcttcttttcccattaacaagatatgatatcaccaagccaaacgtcatcattaagttggagcagggagaggagctgtggataacgggaggtgaatttccatgtcaacatagtccagggattgtgggactttaccaaatcggtttgtaataacacctagaagacgctatccgatccatcaggcccagtattcctgtctgggggtacttcccaccgtgtgctggaatggttatcacaagaaggctgtgctgtcccctcgcaactccaggatggtgtgtagcccagtgactgtgaggatcgcccctcctgacagaagattttcgcgttctgcgataccagagcagataatcagctcaacactgtcctcaccatcaagtaacgccccagacccatgtgcaaaggagacagtactgagtgccctcaaagagaaggagaagaaaaggacagtggaggaagaagaccaaatattccttgatggccaggaaaataaaagaaggcgccatgatagcagtggcagtggacattcagcatttgagcccctggtggccaatggagtccccgcttcttttgtgcctaagcctgggtctctgaagagaggcctcaattctcagagctcagatgaccacttgaataagagatcccgaagctcttccatgagctccttgacaggcgcttacgcaagtggcatccctagctccagccgcaatgccattaccagttcctacagctccactcgaggcatctcacagctctggaagagaaatggccccagttcatcacccttctctagcccagcctcctcccgctcccagacaccggagaggccagcaaagaaaataagagaagaggagctgtgtcatcattccagttcttcaactccattggcagcagacagggagtcccagggagaaaaggctgcagatacaaccccaaggaagaaacaaaactcgaattctcagtctacacctggcagctctgggcagcgtaagcggaaagttcagctgctgccttctcggcgaggggaacagctgaccttgcctccacctccccagcttggctattcgatcactgccgaggacctagacttagagaagaaggcttcattacagtggttcaaccaggccttggaggacaagagcgatgctgcctcgaactctgtcactgagaccccacctatcactcagccttcatttacctttaccctgcctgctgctgcacctgcctccccacccacctccctcctggccccaagcaccaacccactgttagagagcttgaagaagatgcagactcccccgagcctgccaccctgcccagaatctgctggagcagcaaccactgaggccctctcacctccaaagacacccagcctcctacccccgctgggtttatcacagtcagggccgccagggctgctccccagcccctcctttgactccaaacccccgaccactttgctggggctgatccctgctccatccatggtaccagccactgacaccaaggcacctccaacccttcaggcagagacggctaccaaaccccaagccacatctgccccgtcccccgcccccaagcaaagcttcctgtttggaacacagaacacctcaccttccagccctgccgcccctgctgcatcttcagcacctcccatgttcaagcccattttcacggctccacccaagagtgagaaggaaggccccacaccgcctggcccttcagtcacagccacagcgccctccagctcctccctccccacgaccaccagcaccacagccccgaccttccagcctgtctttagcagcatggggccacctgcatctgtgcccttgcctgctcccttcttcaagcagacaactactcccgccactgctcccaccacaactgccccgctcttcactggcctggccagcgccacctctgctgtggctcccatcacctctgccagtccatccacagactctgcttcgaagcctgcgtttggctttggcataaacagtgtgagcagcagcagtgtgagtaccacgaccagcaccgccactgccgcctcacagcctttcctcttcggggcgccccaggcctctgctgccagcttcaccccggccatgggctccatattccagtttggcaaacctcctgccttgcccacaaccaccacagtcaccaccttcagccagtccctgcacactgccgtgccaacggccaccagcagcagcgctgccgactttagtggttttggcagcaccctcgccacctccgccccggccaccagcagccagcccactctgacgttcagtaacacgagcacccccacgttcaacattccctttggctcaagcgccaagtccccgctcccatcatatccgggagccaacccccagcccgcatttggggccgctgaggggcagccaccgggggccgccaagccggcccttgcccccagctttggcagctctttcacttttggaaactctgcagccccggctgctgcacccacacctgcacctccgtccatgatcaaggtcgtgcctgcgtacgtgcctacgcccatccatcctatctttggcggtgccacgcactcggcgtttgggttgaaagccacggcttcggccttcggcgctcccgccagctcacagcccgcctttggcggctccactgctgtcttcttcggtgcagccaccagctccggctttggagccaccacccagaccgccagcagcgggagcagcagctcggtgtttggcagcacaacaccatcacccttcacgtttgggggttcggcagcccccgctggcagtgggagctttgggatcaatgtggccaccccaggctccagcaccaccaccggagctttcagctttggagcaggacagagtgggagcacagccacctccacccccttcgcagggggcttaggtcagaacgccctgggcaccaccggccagagcacaccgtttgccttcaacgtgagcagcacaactgagagcaaacctgtgtttggaggcaccgccacccccacctttggtctgaacacccctgcgcctggagtgggcacatcaggcagcagcctctcctttggggcatcctcagcacccgcccaaggctttgttggtgttgcacctttcggatcggcggccctttcattttccattggtgcgggatccaagaccccaggggctcgacagcgactgcaggcccgaaggcagcacacccgcaaaaagtagcctttgtcccctgtccctgttccccccaccccttccctaaatctggaccttggcacctgctaggaagagccttggacccttccagttgcgtaaagcaaacctaccccggatctctggcttcagccgccagggggcagtggcagccctggggccctttcccttctggaggaagcacaagcctcagggaaggggaagcaggatgcggagggccaaagcccgggacctctacttgaacagttctactggggaggctggagaactaaggaaacacctgtacatagtgtccgctgccctgactcccgcttagcacacccttaggcaggcgccccttccacctttccccgagaccgtcgtcgctggagggggcagggtccagcccgcctggatcggtggtgtgcacctgatgggatttgggaaatgggctatccgtaaagctttatcttgcttggcttagctgtgagaagtggttctcttcctctggtcccttctggggactctgtttccccatttcttgctgctgtgtccctcaccagttccttgcaggattccttcgtttttaaatgcccttgaatctagctttgccttggagaccccagtgggtgctgctcctgccgttttcttcctgccaagcctgaatcaatgtttcatctccaaccctctgccagtttggcccctcagagcttggtggctcaagactgttagcctggcagagccaggggtgaagggagaagctcttggagcaggcaggatgcccaccgctgcttcagctgcctcctcgcccagctaccctttggccccattgggccctcgtctgcctctccaggattgtatgtttcaagccttgtcctgtgttcctttgtctgatgctctgtgtattgctctttgaatcgagtttggaggaagagttgagttgtatgagtggcggcatgttggtagtgccggacttcctgtttcaagttttctggggcctcgctaattgaatgtggaaagtagcaccacttgacggctacaagtgccgactcctgaattttcccatggtgttctgacttcaagggctggcagccagggagaatgggcccaggggaagcaaagacctcttccctctgccgtttctgtcccacttaactgacctcactggaggctacatcacccaaagtagatgttagaaaacctaaattaatgaaccatatttttaaaatcctatttttcccaaacagggccctctgcagcccatcctttccttccgtccttctgaaaccacataccccaggcccaagcgccttgctgccacgcccaacctctttgggagaagtatgaatgcgtgtgtctaaattaaaagaaaaaaatatttaaacgttttttaacaaaaatttatttttgtatttaagctaaattgccttttaaattccttcaagcttggttcattgaggtggttaagtataaatgctattaactaggaattagctgtatagttaagttatgcctgtgcaaagaagaggctcaaatgctgtccccggcagctttcctgggggactagagctccttctggccatgttatatgaaatgtaattcttattttataaataatgtgatgtaaatgtaactggtgccccctccccgatgtgactgagggtgagtgagtggtggcggggctgctccttcccacccctcagaacagctctgatcctcgttaatacctggctgcgtgtgcagctgaggagggagtgaacctcaagcctaaatacctgttaggattggagggtctgggtgggcctgggcctagcaatcaagcttctacctgtaccttatgtaaggtagaccctcctagtgtcagtacctgagctagtttacctcagttccgcaggcaggacagccggtccgggaaccctgagtgagaatgagtgtggatgtgtacagtacacgcactggacggcagcgggaggctgggactttccattacaaatagagacttcattcctgttgagtctagttggaatttttagtatgaatgtgagatttttctcctgcttgtgacattaagaataaaaaactgtgatctatcgtagagt

SEQ ID NO: 167807 - DNA, 715 bp, Homo sapiens
  Payload ID: 13007
  Gene Symbol: POM121C
  Gene Name: POM121 transmembrane nucleoporin C
  ENST ID: ENST00000398379
  CDS Start-End: 589-715
cttatgcaggtgatttctgcctttgcaggccggagccctcatgacttcagtgacctgcttctgcccctctaggtctatcagccacagtctctgcatgtttccaagagcagcagaaaatgaacacattgcaggggccagtgtcattcaaagatgtggctgtggatttcacccaggaggagtggcggcaactggaccctgatgagaagataacatacggggatgtgatgttggagaactacagccatctagtttccttggcttatgaggtggcaacatcttgtacttcggagattctgaagccgagcaacttgcccaagtccttcttcttttcccattaacaagatatgatatcaccaagccaaacgtcatcattaagttggagcagggagaggagctgtggataacgggaggtgaatttccatgtcaacatagtcctgggatcgtgggactttaccagatcggtttgtaataacacctcgaagacgctatccgatccatcagacccagtattcctgtccgggggtacttcccacagtgtgctggaatggttatcacaagaaggctgtgctgtcccctcgcaactccaggatggtgtgtagcccagtgactgtgaggatcgcccctcctgacagaagattttcacgttctgcgataccagagcagataatcagctcaacactgtcgtcaccatcaagtaatgccccagacccatgtg

SEQ ID NO: 167808 - DNA, 575 bp, Homo sapiens
  Payload ID: 13007
  Gene Symbol: POM121C
  Gene Name: POM121 transmembrane nucleoporin C
  ENST ID: ENST00000439629
  CDS Start-End: 254-575
agcctcatgcttctgtagaaacgtgttaaaagtttattttcaagaaagaaggctctaagtcttccggtcggaattttgtggtgttcagttatttgggcgccatgatagcagtggcagtggacattcagcatttgagcccctggtggccagtggagtccccgcttcttttgtgcctaagcctgggtctctgaagagaggcctcaattctcagagctcagatgaccacttgaataagagatcccgaagctcttccatgagctccttgacaggcgcttacacaagtggcatccctagctccagccgcaatgccattaccagttcctacagctccactcgaggcatctcacagctgtggaagagaaatggccccagttcatcacccttctctagcccagcctcatcccgctcccagacaccggagaggccagcaaagaaaataagagaagaagagctgtgtcatcattccagttcttcaactccattggcagcagacaaggagtcccagggagaaaaggctgcagatacaaccccaaggaagaaacaaaactcgaattctcagtctacacctggcagct

SEQ ID NO: 167809 - DNA, 3690 bp, Homo sapiens
  Payload ID: 13007
  Gene Symbol: POM121C
  Gene Name: POM121 transmembrane nucleoporin C
  ENST ID: ENST00000607367
  CDS Start-End: 1-3690
atgtctccggcggctgcggcggctggagcaggcgagcggcggcggccgatagcgagtgtcagggacggccggggccggggctgcggcgggccggccggggcggcgcttctcggcctgtcgctggtcggcctcctactgtacctcgtgcctgctgcggctgcgctggcctggctggccgtggggactaccgcggcctggtggggactgagccgcgagccccgaggttcgcgccccttgtcctccttcgttcagaaggcgcgacatcggcgaacactgttcgcttcgcctccggccaagtcgacagccaacggaaacctcctagagccgcggaccctgctcgaaggacctgaccctgccgaactgctcctcatgggcagttacctgggcaagcccgggccgccgcagcccgcccccgctccggagggccaggacctgcggaataggcctggccgccgcccacccgcccgcccggcgccgcgctccacaccgccctcccagccgacccatcgcgttcaccacttttacccctctctccccactcctcttctccgaccctccgggaggccttccccacgggatcgtgggactttaccagatcggtttgtaataacacctcgaagacgctatccgatccatcagacccagtattcctgtccgggggtacttcccacagtgtgctggaatggttatcacaagaaggctgtgctgtcccctcgcaactccaggatggtgtgtagcccagtgactgtgaggatcgcccctcctgacagaagattttcacgttctgcgataccagagcagataatcagctcaacactgtcgtcaccatcaagtaatgccccagacccatgtgcaaaggagactgtactgagtgccctcaaagagaagaagaagaaaaggacagtggaggaagaagaccaaatattccttgatggccaggaaaataaaagaaggcgccatgatagcagtggcagtggacattcagcatttgagcccctggtggccagtggagtccccgcttcttttgtgcctaagcctgggtctctgaagagaggcctcaattctcagagctcagatgaccacttgaataagagatcccgaagctcttccatgagctccttgacaggcgcttacacaagtggcatccctagctccagccgcaatgccattaccagttcctacagctccactcgaggcatctcacagctgtggaagagaaatggccccagttcatcacccttctctagcccagcctcatcccgctcccagacaccggagaggccagcaaagaaaataagagaagaagagctgtgtcatcattccagttcttcaactccattggcagcagacaaggagtcccagggagaaaaggctgcagatacaaccccaaggaagaaacaaaactcgaattctcagtctacacctggcagctctgggcagcgtaagcggaaagttcagctgctgccttctcggcgaggggaacagctgaccttgcctccacctccccagcttggctattcgatcactgccgaggacctagacttagagaagaaggcttcattacagtggttcaaccaggccttggaggacaagagtgatgctgcctcgaactctgtcactgagaccccacctaccactcagccttcatttacctttaccctgcctgctgctgcaactgcctccccacccacctccctcctggccccaagcaccaacccactgttagagagcttgaagaagatgcagactcccccgagcctgccaccctgcccagaatctgctggagcagcaaccactgaggccctctcacctccaaagacacccagcctcctacccccgctgggtttatcacagtcagggccgccagggctgctccccagcccctcctttgactccaaacccccgaccactttgctggggctgatccctgctccatccatggtaccagccactgacaccaaggcacctccaacccttcaggcagagacggctaccaaaccccaagccacatctgccccgtcccccgcccccaagcaaagcttcctgtttggaacacagaacacctcaccttccagccctgccgcccctgctgcatcttcagcatctcccatgttcaagcccattttcacggctccacccaagagtgagaaggaaggcctcacaccgcctggcccttcagtctcagccacagcgccctccagctcctccctccccacgaccaccagcaccacagccccgaccttccagcctgtctttagcagcatggggccacctgcatctgtgcccttgcctgctcccttcttcaagcagacaactactcccgccactgctcccaccacaactgccccgctcttcactggcctggccagcgccacctctgctgtggctcccatcacctctgccagtccatccacagactctgcttcgaagcctgcgtttggctttggcataaacagtgtgagcagcagcagtgtgagtaccacgaccagcaccgccactgccgcctcacagcctttcctcttcggggcgccccaggcctctgctgccagcttcaccccggccatgggctccatattccagtttggcaaacctcctgccttgcccacaaccaccacagtcaccaccttcagccagtccctgcccactgccgtgccaacggccaccagcagcagcgctgccgactttagtggttttggcagcaccctcgccacctccgccccggccaccagcagccagcccactctgacgttcagtaacacgagcacccccacgttcaacattccctttggctcaagcgccaagtccccgctcccatcatatccgggagccaacccccagcccgcatttggggccgctgaggggcagccaccgggggccgccaagccagcccttacccccagctttggcagctctttcacttttggaaactctgcagccccggccccggctactgcacccacacctgcacctgcgtccacgatcaagatcgtgcctgcgcacgtgcctacgcccatccagcctacctttggcggtgccacgcactcggcgtttggattgaaagccacggcttccgccttcggcgctcccgccagctcacagcccgcctttggcggctccactgctgtcttctccttcggtgcagccaccagctccggctttggagccaccacccagaccgccagcagcgggagcagcagctcggtgtttggcagcacaacaccatcacccttcacgtttgggggttcggcagcccccgctggcagtgggagctttgggatcaacgtggccaccccaggctccagcgccaccaccggagctttcagctttggagcaggacagagtgggagcacagccacctccacccccttcacagggggcttaggtcagaacgccctgggcaccaccggccagagcacaccgtttgccttcaacgtgggcagcacaactgagagcaaacctgtgtttggaggcaccgccacccccacctttggtcagaacacccctgcgcctggagtgggcacatcgggcagcagcctctcctttggggcatcttcagcacccgcccaaggctttgttggtgttggaccgttcggatcggcggccccttcattttccattggtgcgggatccaagaccccaggggctcgacagcgactgcaggcccgaaggcagcacacccgcaaaaagtag

SEQ ID NO: 167810 - DNA, 5835 bp, Homo sapiens
  Payload ID: 13007
  Gene Symbol: POM121C
  Gene Name: POM121 transmembrane nucleoporin C
  ENST ID: ENST00000615331
  CDS Start-End: 866-3829
gtcatcgcttgctctcgttcccaggctttggcttctagtggacgagaatcaccgagtctgcggggctggatgctgaccgcccggaccagcacctaggcgggcgggagctgtgcggcccagggttcgcgcgggccgggtagaggctcgagctgggacccccgagcgtgaaccccggagccggcggcgctggggccagaggggccgggagccccagggaggcggatctgggccccgagaaggacacccgcctggatttgccccgtaggcccggcccgggcccctcgggagcagaacagccttggtgaggtggacaggaggggacctcgcgagcagacgcgcgcgccagcgacagcagcccgccccggcctctcgggagccgtggggcagaggctgcggagccccaggagggggccagtgtcattcaaagatgtggctgtggatttcacccaggaggagtggcggcaactggaccctgatgagaagataacatacggggatgtgatgttggagaactacagccatctagtttccttggcttatgaggtggcaacatcttgtacttcggagattctgaagccgagcaacttgcccaagtccttcttcttttcccattaacaagatatgatatcaccaagccaaacgtcatcattaagttggagcagggagaggagctgtggataacgggaggtgaatttccatgtcaacatagtcctgggatcgtgggactttaccagatcggtttgtaataacacctcgaagacgctatccgatccatcagacccagtattcctgtccgggggtacttcccacagtgtgctggaatggttatcacaagaaggctgtgctgtcccctcgcaactccaggatggtgtgtagcccagtgactgtgaggatcgcccctcctgacagaagattttcacgttctgcgataccagagcagataatcagctcaacactgtcgtcaccatcaagtaatgccccagacccatgtgcaaaggagactgtactgagtgccctcaaagagaagaagaagaaaaggacagtggaggaagaagaccaaatattccttgatggccaggaaaataaaagaaggcgccatgatagcagtggcagtggacattcagcatttgagcccctggtggccagtggagtccccgcttcttttgtgcctaagcctgggtctctgaagagaggcctcaattctcagagctcagatgaccacttgaataagagatcccgaagctcttccatgagctccttgacaggcgcttacacaagtggcatccctagctccagccgcaatgccattaccagttcctacagctccactcgaggcatctcacagctgtggaagagaaatggccccagttcatcacccttctctagcccagcctcatcccgctcccagacaccggagaggccagcaaagaaaataagagaagaagagctgtgtcatcattccagttcttcaactccattggcagcagacaaggagtcccagggagaaaaggctgcagatacaaccccaaggaagaaacaaaactcgaattctcagtctacacctggcagctctgggcagcgtaagcggaaagttcagctgctgccttctcggcgaggggaacagctgaccttgcctccacctccccagcttggctattcgatcactgccgaggacctagacttagagaagaaggcttcattacagtggttcaaccaggccttggaggacaagagtgatgctgcctcgaactctgtcactgagaccccacctaccactcagccttcatttacctttaccctgcctgctgctgcaactgcctccccacccacctccctcctggccccaagcaccaacccactgttagagagcttgaagaagatgcagactcccccgagcctgccaccctgcccagaatctgctggagcagcaaccactgaggccctctcacctccaaagacacccagcctcctacccccgctgggtttatcacagtcagggccgccagggctgctccccagcccctcctttgactccaaacccccgaccactttgctggggctgatccctgctccatccatggtaccagccactgacaccaaggcacctccaacccttcaggcagagacggctaccaaaccccaagccacatctgccccgtcccccgcccccaagcaaagcttcctgtttggaacacagaacacctcaccttccagccctgccgcccctgctgcatcttcagcatctcccatgttcaagcccattttcacggctccacccaagagtgagaaggaaggcctcacaccgcctggcccttcagtctcagccacagcgccctccagctcctccctccccacgaccaccagcaccacagccccgaccttccagcctgtctttagcagcatggggccacctgcatctgtgcccttgcctgctcccttcttcaagcagacaactactcccgccactgctcccaccacaactgccccgctcttcactggcctggccagcgccacctctgctgtggctcccatcacctctgccagtccatccacagactctgcttcgaagcctgcgtttggctttggcataaacagtgtgagcagcagcagtgtgagtaccacgaccagcaccgccactgccgcctcacagcctttcctcttcggggcgccccaggcctctgctgccagcttcaccccggccatgggctccatattccagtttggcaaacctcctgccttgcccacaaccaccacagtcaccaccttcagccagtccctgcccactgccgtgccaacggccaccagcagcagcgctgccgactttagtggttttggcagcaccctcgccacctccgccccggccaccagcagccagcccactctgacgttcagtaacacgagcacccccacgttcaacattccctttggctcaagcgccaagtccccgctcccatcatatccgggagccaacccccagcccgcatttggggccgctgaggggcagccaccgggggccgccaagccagcccttacccccagctttggcagctctttcacttttggaaactctgcagccccggccccggctactgcacccacacctgcacctgcgtccacgatcaagatcgtgcctgcgcacgtgcctacgcccatccagcctacctttggcggtgccacgcactcggcgtttggattgaaagccacggcttccgccttcggcgctcccgccagctcacagcccgcctttggcggctccactgctgtcttctccttcggtgcagccaccagctccggctttggagccaccacccagaccgccagcagcgggagcagcagctcggtgtttggcagcacaacaccatcacccttcacgtttgggggttcggcagcccccgctggcagtgggagctttgggatcaacgtggccaccccaggctccagcgccaccaccggagctttcagctttggagcaggacagagtgggagcacagccacctccacccccttcacagggggcttaggtcagaacgccctgggcaccaccggccagagcacaccgtttgccttcaacgtgggcagcacaactgagagcaaacctgtgtttggaggcaccgccacccccacctttggtcagaacacccctgcgcctggagtgggcacatcgggcagcagcctctcctttggggcatcttcagcacccgcccaaggctttgttggtgttggaccgttcggatcggcggccccttcattttccattggtgcgggatccaagaccccaggggctcgacagcgactgcaggcccgaaggcagcacacccgcaaaaagtagcctttgtcccctgtccctgttccccccaccccttccctaaatctggaccttggcacgtgctagaaagagccttggacccttccagctgcgtaaagcaaacctaccccggatctctggcttcagccgccagggggcagtggcagccctggggccctttcccttctggaggaagcacaagcctcagggaaggggaagcaggatgcggagggccaaagcccgggacctctacttgaacagttccactggggaggctggagaactaaggacctgtacatagtgtccgctgccctgactcccgcttagcgcacccttaggcaggcgccccttccacctttccccgagagccgtcgtcgctggagggggcagggtccagcccgcctggatcggtggtgtgcacctgatgggatttgggaaatgggttatccctaaagctttatcttgcttggcttagctgtgagaagtggttctcttcctctggtcccttctggggactctgtttccccatttcttgctgctgtgtccctcaccggttccttgcaggattccctcctttttaaatgcccttgaatctagctttgccttggagaccccagtgggtgctgctcctgccgttttcttcctgccaagcctgaatcaatgtttcatctccaaccctctgccagtttggcccctcagagcttggtggctcaagactgttagcctggcagagccaggggtgaagggagaagctcttggagcaggcaggatgcccactgctgcttcagctgcctcctcgcccagctaccctttggccccattgggccctcgtctgcctctccaggattgtatgtttcaagccttgtcctgtgttcctttgtctgacgctctgtgtattgctctttgaatcgagtttggaggaagagttgagttgtatgagtggcggcatgttggtagtgccggacttcctgtttcaagttttctggggcctcgctaattgaatgtggaaagtagcaccacttgacggctacaagtgccgactcctgaattttcccatggtgttctgacttcaagggctggcagccagggagaatgggcccaggggaagcaaagacctcttccctctgcggtttctgtcccacttaactgacctcactggaggctacgtcacccaaagtagatgttagaaaacctaaattaatgaaccatatttttaaaatcctatttttcccaaacagggccctctgcagcccatcctttccttccgtccttctgaaaccacataccccaggcccaagcgccttgctgtcacgcccaacctctttgggagaagtatgaatgcgtgtgtctaaattaaaagaaaaaaatatttaaacgttttttaacaaaaatttatttttgtatttaagctaaattgccttttaaattccttcaagcttggttcattgaggtggttaagtataaatgctattaactaggaattagctgtatagttaagttatgcctgtgcaaagaagaggctcaaatgctgtccccggcagctttcctgggggactagagctccttctggccatgttatatgaaatgtaattcttattttataaataatgtgatgtagatgtaaccggtgccccctccccgttgtgactgagggcgagtgttatacctggctgcgtgtgcagctgaggagggagtgaacctcaagcctaaatacctgttaggattggagggtctgggtgggcctgggcctagcaatcaagcttctacctgtaccttatgtaaggtagaccctcctagtgtcagtacctgagcttgtttacctcagttccgcaggcaggacagccggtccgggaaccctgagtgagagtgagtgtggatgtgtacagtacacacactggacggcagcgggaggctgggactttccattacaaatagagacttcattcctgttgagtctagttggaatttttagtatgaatgtgagatttttctcctgcttgtgacattaagaataaaaaactgtgatctat

SEQ ID NO: 167811 - DNA, 1283 bp, Homo sapiens
  Payload ID: 13008
  Gene Symbol: POM121L12
  Gene Name: POM121 transmembrane nucleoporin-like 12
  Uniprot ID: Q8N7R1
  ENST ID: ENST00000408890
  CDS Start-End: 31-921
aagcgcccagaggccaacggtcccccagccatgggcgctgcagctccggccgagtccgcagacctcgggaacttctggaaggcgggagaacccctgctgcaaggccccgacgccctggcggctcccatgagcaggtcacccagcacgccccagaccacgccatctccccagggtcgccagagtccctggcccctgaggtccctgactcagagccatattcagtacttccagtgggggcgcccggtgcccagcacccacctcatcgaggtgcggcccacccaggaccccgccaagccgcagcgggtggtctccgagggctggaggcgccctgcccttcccggggagaccgctctggggcgagacctctcctgtgcctgggagggttgcatgaaaggggggctgtgtcgtgcctggaacccaggacggacctggagcccggtgaccatcgggatcgcgccccctgagcgtcaggagagcccctggagatcccctggacagagagcccgccccgcaggccgccccgccgcccaggagctcctggacccctgcacccgggagactctgctgggggcgctcagccagtgccccaagggaagcgctaggttcgacgggccgttgtggttcgaggtctcagacagcaagggtggcaggcggaacctgcagccccggccctctgccttcaagcccctgagcaaaaatggagcggttgcttccttcgtgcccaggccagggcctctgaagccgagcctcggcccctggagcctcagtttttgtgatgatgcttggccttccgtgctggtccagcccgccccatccgccatctgggacttctgggaggcgacaacgccttcctgcggcagctgcagtagggtctccttcgccctcgaggtcacccagtctgctggcccctttggctcctaagaatctgggctctgctacccacctccggagacacaagcccacgtatctactttcacttgctcatccttgctctacctcaacgtggggccctgacaccacgttatcaaacatgcagcccccacacccctcgtctgcccgcccccagatcttccctctgtgctccctgccaccccagcagctgttgatttcagaacccttgccttcgccctgctggccctctcctccctgcccttcttcctgcccttcctctgaaaagaggcatttcgggaaggcttgctttttctccatgtctcccagtttgtatagttaaattgtccagttgtatagttaaatatttgatcttattaaaaacatttgtctgc

SEQ ID NO: 167812 - DNA, 3108 bp, Homo sapiens
  Payload ID: 13009
  Gene Symbol: POM121L2
  Gene Name: POM121 transmembrane nucleoporin-like 2
  Uniprot ID: Q96KW2
  ENST ID: ENST00000444565
  CDS Start-End: 1-3108
atgggcagtttcctgagcaaactggaactttcgccctcgtccccagcccaggtgcgcaccgacttgcccgagaggcccacgaaacgccggccacctcagccccttcaccaagttcatcgggttcagttcgtccaccgcgcccaccctgccccacggtatagacctgtgaggaggcggccaaacctggatcctgccaatccaaccacgtggctggccaacgaggcctggaggcgctttcccatgaagaagtcccagaattcccccctggggcctctcccttcagactggtgggaaagttacttaaagcggactatttggtctcttcgacatcccaggccaatttggagcccagtgaccatcaggatcactcctcctgaccagagagtgcccccttccacttctcctgaagatgtaattgcccttgcaggactcccgccctctgaggagctcgcagatccatgttcaaaggagacagtgttgagggccctcagagagtgcagaaaagggaaagggaggttggaagaaccactattccctgagagtctggacagtaagagaaggagtccagagaccagaccatcggcatttaagcccctgatgaaaaatggaaccctcacttcttttgtgcccaggcctgggccgctgaagagaagtctccactcctggggctcagatcacagcttgactaagaggcccaattgctcctccatgagctccttggccagcatatacagaggtggcaccctcagctccaaaaggaatgctattggcagctcttacagctcttgcagaaatttctcagacccttggaagagaagtgttcccagtgtatcattcgagacaccagagtggccaataaaaaaggaaaaaagttgtcatcggccttcctctccagtcccactggtatcagattttgagtccctaggaggatctgaaagttctgggcagcaaaaccagaagattccacagctgccgtctagccctgagaacctggtgtcagagatcccacctccccagcttggttatgcagtctctgatgagaacttgactttggggaagaaagctgagctacaggtaagcaacaacgcaggagaagatacaactgaggtcaacacagaccctttccctgagacttggcttgctattcagccttccttgtctcttgctctgccttcttcagaaacagatctaacccagggagcaaatcctcagttggaaaacttaagaaaaatgcagaagtctctaggtccactggcctctccacagtccacgggagaggcaaccagtgtggcccattctcctttgaagacacccagcctaccgaccccacctgggtgctcacagtcagagctccttccaggcacctctccagactcaaagcccacagctactttcatcctgctgacccccacctctcccacattaccagttactgacaccacctggccgccttcaacctctcaggctgacaggtctcccatgcccccagacccacctgcaccacccaccatccaaagtactttgcttggaatggtgagtagcccaacatcccatctttctgcatctgcacctcctgatgcaacttctgctcacctcatgttaaaaccgattttggggcccctgcacaacagcgagattggaagctcctcatattccagaatttcagtcacagctgcagcatcttcaatctcttccctttccacaattcagggtaccttaactcctaccttcaagcctatctttggcagcatagatccacttaaaactacgcccatgatagctcctttctcctccaagcagacccctcctccatttactcatgcttctacccatcatttccatggcctggtcaaggccacctctgtggtcatgtccaccaccctagccagcacatctaaagactctgtttttaagccacctttggattttggtgtagtgaatgtcaccagtgccgtaggcaacacttattctgtcccttccacttgcgacactttcctgcttgggactgctcaggccttcagggccgacttcaccccagccacaggattcattttcccaccacaccaccatcctacaattcctactgtgcatacagtcaccatgtttacccaggtcctttccagtgttgtacagatatcccctagaagcagcactgctaatttcaggggtatgggcagccctctgcctgcctctgccctagtatccacaaactggcttgcatcaacccccagcatctccaacctgactccagcaatcacaagtcccttgggatcaagctcaaggccacctttcccactatcccaaggagctaatccccagcctgcatttggtgccacaaatggacagaaacaagggccttcccagccagcccttatgccaagtgtcagtagttcttttctttttgggagctcagcagtggcattgccaacccccatgccaactccagctcagccagccttcattagtaccacacagtcagccttggggtgtttgacaccctcagcctccacctctcaaacccctgccagcacctggtcaggcattggcggcattccagcaggttttcccattagtcaagctagtacaactgggtttagaattgtaattcagacccaccaaagtggggcttttggctcagtgtttggcagcagagctccacaacctttcacttttgggggattcgtgacccctatggactgtgatgagtctgggatcataatgactggtccagacatgagccccacctctggagctttcagcattggagcattgcctagtgggaccactaacaccatgatcccctttggaaaaggctggagccagaacactgaaggcctgcccagccaccgcacagctttttccttggggagaggcagcatttctgcaagaaagactatggcccccattgctcaaaacaccccagtccctggacaagctaaggcaggcagcagtgttggctttgggatgccttttccacctgcccagggctctgttgggagaggaccttttagatcatcagcctcttcattttccattggcgcaaaatcaaaaaccccaaagaatcgggagaaagggcattcccgaaggcatcatgcctacaagaagtag

SEQ ID NO: 167813 - DNA, 462 bp, Homo sapiens
  Payload ID: 13009
  Gene Symbol: POM121L2
  Gene Name: POM121 transmembrane nucleoporin-like 2
  ENST ID: ENST00000429945
  CDS Start-End: 1-279
aaaaaggaaaaaagttgtcatcggccttcctctccagtcccactggtatcagattttgagtccctaggaggatctgaaagttctgggcagcaaaaccagaagattccacagctgccgtctagccctgagaacctggtgtcagagatcccacctccccagcttggttatgcagtctctgatgagaacttgactttggggaagaaagctgagctacagcatttcccgggtatctggaaggtgctcaacagtgagatggtgctcttcctccaaatctgttgacatgacaggacagtgccgcttatgaatctctgacaaatagcaaagtggaaaattcctgctcttggcagctaaaacttggattgatcacaatatttcaggaaacagagaagaaagacagtatttcccagttagcaagatcttgagtcttatgatttttttctgacattaaatctgcagcataaa

SEQ ID NO: 167814 - DNA, 2404 bp, Homo sapiens
  Payload ID: 13010
  Gene Symbol: POM121L7
  Gene Name: POM121 transmembrane nucleoporin-like 7
  ENST ID: ENST00000329949
  CDS Start-End: 428-1816
ggcggctggacgaggacgctcagagcccagctctcgagagttcaagcaaccgacggttccccactgctcccaggagcggttacctgggcactctgtgcccctccttcctgttcgggcccaggccgaggacctgccagtagggctcagttgcctggagcccgttcagcccatcccccagttcactttgcctgtgggatctccccgttgctcctgcccgtggactgagtggcaggccatcctacaagcacccggacacttgacatcagtggtgtcaagacaactctaagaaggttttccgtgatcctgcaagccctgccttccttcctgggatcctgccttcaatttgattgcacaggtaccacagcaagccagtgctgtgtgctccgagttccagggcgtcctccagctcagccactgcactgagaacatggactctctgtggggcccaggagccgggagtcacccctttggggtccacaacacccggctgtccccagacttgtgtccagggaagatagtgttgagggccctcaaggagagcggggcagggatgcctgagcaggacaaggaccctagagtccaagagaatcctggtgatcagagaagggtccccgaggtcaccggggatgcaccgtctgcatttcggcccctgcgggacaatggaggcctctctccctttgtgcccgggcccgggcctctgcagacagacctccatgcccagaggtcagaaatcagatataaccagacatcccagacctcctggacgagctcctgcaccaaccgaaatgccatctccagctcctacagctccacgggaggcttgccggggctaaagcggaggagggggccagcctcatcccactgccagctgaccctcagttcctcaaagacagtgagtgaggacaggcctcaggctgtctcttcaggtcacacccagtgtgaaaaggcagcagatatagcaccagggcagacactcgccctcaggaatgactcctccacatccgaggcctctaggcccagtacacacaagtttcccctgctgccacgcaggcgaggggagcctttgatgctgccacctcccttagagctggggtaccgggtcactgttgaagaccttgaccgggagaaggaggcggcattccagcgcatcaacagtgcactgcaagttgaggacaaggccatctcggactgcagaccctcacggccttcccacactttgtcctcacttgcaacaggggcttctggtctgcctcccgtttctaaagcacccagtatggatgcacagcaggagacacacaagtcccaagactgcctgggcctactggcccccttagcatctgctgcaggggtcccctctacagctcccatgtctgggaagaagcacagaccaccaggccccctgttctcctcctcagatccccttcctgccacctcttcccattcccaggactcagcccaggtcacctcgctgattcctgcccccttcccagctgcaagcatggatgcgggcatgagaagaacaaggtgtggcacttctgctcctgcagctgccgcagcagcccctcccccctccacattgaaccccacgttggggtcactactggagtggatggaggcccttcacatttctgggcctcagccacagctgcagcaggtgcccagaggtcagaaccagagatcccagacctcccggaccagctcgtgccccaaacgaaatgccatctcgagcccctaccgctctacgggaggcctcccggaacgaaagcggagaagggggccagcctcatcccactgccagctgaccctcagttcctgaaacacagtgagtgaggacggacctcaggctgtctcttcaggtcacacccagtgtgaaaagatggcagatacagcaccagggcagacactcgcccccaggggtggctcccccagatcccaggcctctaggccctgtagatgcaagtttcccctgctgccacgcaggcgaggggagcctttgatgctgccacctcccttagagctggggtaccgggtcactgctgaagacctggaccaggagaaggaggcggctttccagcgcatcaggagtgcactgcaggttgaggacaaggccatttagtactgcagaccctcacggccttcccacactttgtcctcacttgcaacaggggcttctggtctgcctgccatttctaaagcacccagtatggatgcacagcaggagagacacaagtcccaagactgcctgggcctagtggccccccagcatctgctgcacaggcctgtagtcccagctactcaggaggctgaggcaggagaacggcataaacccgggaggcagagcttgcagtgagctgagatcgcgccactgcactccagcctgggtgacagagcgagactccgtctc

SEQ ID NO: 167815 - DNA, 3244 bp, Homo sapiens
  Payload ID: 13011
  Gene Symbol: POP1
  Gene Name: POP1 homolog, ribonuclease P/MRP subunit
  Uniprot ID: Q99575
  ENST ID: ENST00000349693
  CDS Start-End: 29-3103
gtgatctggaatggcccagatcccttaaatgtcaaatgcaaaagaaagaaaacacgccaagaaaatgagaaaccagcctaccaatgtgactctgtcctctggctttgtggctgacagaggtgtaaagcaccacagtggaggtgaaaaacctttccaagctcaaaaacaagagcctcatcctggaacttcacgacagcggcaaaccagagtcaacccccattctctgcctgaccctgaagtgaatgagcagtcttcctccaaagggatgtttagaaaaaagggaggatggaaagcaggtcccgagggcacgtctcaggagatccccaagtatataactgcttctacttttgctcaagcacgagctgctgaaatcagtgctatgttaaaagctgtgacccagaagtcttcgaattcactggtttttcagactctgccacggcacatgcgacgaagagccatgagccacaacgtcaaacgccttcccagacggttacaggagattgcccagaaagaggcggagaaagccgtacatcagaaaaaagaacattcaaaaaataaatgccataaagctcgaagatgtcacatgaaccggacgctagaatttaaccgtagacaaaagaagaacatttggttagaaactcacatctggcacgccaagcggtttcatatggtcaagaagtggggctactgccttggggagaggccaacagtcaagagccacagagcctgctatcgagccatgacgaaccggtgcctcctgcaggatttatcctattactgttgtttggagttgaaaggcaaagaggaagaaatactaaaggcgctttctggaatgtgtaacatagacacagggctgacgtttgcagcagttcactgcttgtctggaaagcgccaagggagccttgtgctttatcgggtgaataaatatcccagagaaatgcttgggcctgttacgtttatctggaagtcccagaggaccccgggtgacccttctgagagcaggcagctgtggatctggctgcatccaacccttaaacaggatatcttagaggaaataaaagcagcgtgccagtgtgtggaacccatcaaatcagctgtctgcatcgctgacccacttccaacaccatcccaagaaaaaagccaaactgaattgcctgacgagaaaattggcaagaaaagaaaaaggaaagatgatggagaaaatgctaaaccaattaaaaaaattatcggtgatggaactagagatccatgtctaccatactcttggatctctccaaccacaggcattataatcagcgatttgacgatggagatgaacagattccggctgattgggccactttcccactccatcctaactgaagcaataaaagctgcttctgtccacactgtgggagaggacacagaggagacacctcaccgctggtggatagaaacctgtaagaaacctgacagcgtttcccttcattgcagacaagaagccattttcgagttgttgggaggaataacatcaccagcagaaattccggcaggtactattctgggactgacagttggggatcctcgaataaatttgccccaaaagaagtccaaagctttgcccaatccagaaaaatgccaagataatgagaaagttagacagctgcttctggagggtgtgcctgtggaatgtacgcatagctttatctggaaccaagatatctgtaagagtgtcacagagaataaaatctcggatcaggatttaaaccggatgaggagtgaattgctggtgcctgggtcacagcttattttaggtccccatgaatccaagatacctatacttttgattcagcagccaggaaaagtgactggtgaagatcgactaggctggggaagtggctgggatgtcctactcccaaagggctggggcatggctttctggattccatttatttatcgaggtgtgagagtcggagggttgaaagagtctgcagtgcattctcagtataagaggtcgcctaatgtcccaggcgattttccagactgccctgccgggatgctgtttgcggaagagcaagctaagaatcttcttgaaaagtacaaaagacgccctcctgcaaaacggcccaactacgttaagcttggcactctggcacctttctgctgtccctgggagcagttaactcaagactgggagtcaagagtccaggcttacgaagaaccttctgtagcttcatctccaaatggtaaggagagtgacctaagaagatctgaggtgccttgtgctcccatgcctaaaaaaactcatcagccatctgatgaagtgggcacatccatagagcaccccagggaggcagaggaggtaatggatgcagggtgtcaagaatcggcagggcctgagaggatcacagaccaggaggccagtgaaaaccatgttgctgccacagggagtcacctctgcgttctcaggagtagaaaattactgaagcaactgtcagcctggtgtgggcccagttctgaggatagtcggggaggccggcgagctcccggcagaggccagcaaggattgaccagagaggcttgcctgtccatcttgggccacttccccagggccctggtttgggtcagcctgtccctgctcagcaagggcagccccgagcctcacaccatgatctgtgtcccagccaaggaggacttcctccagctccatgaggactggcattactgtgggccccaggaatccaaacacagtgacccattcaggagcaagatcctgaaacagaaagagaagaagaaaagggagaagaggcagaagccaggacgtgcctcttctgatggcccggcgggggaagagcccgtggctgggcaggaagctctgactctagggctgtggtcaggccctctgccgcgtgtgacgttgcactgctccagaactctcctaggctttgtgactcagggagatttttccatggctgttggctgtggagaagccctggggtttgttagcttgacaggcttgctggatatgctgtccagccagcctgcagcgcagaggggcttagtgctactgaggcctcccgcctctctgcagtatcgatttgcgaggattgctattgaggtgtgaatgcgtgcttgtatcccagcagggcatagataatacgttattattgtctgccaagttctacatgtggagaatctgcttctgctttaaaatatcatgtgaaactccctggaaacaagaataaaaaattatgtattatgcaga

SEQ ID NO: 167816 - DNA, 4719 bp, Homo sapiens
  Payload ID: 13011
  Gene Symbol: POP1
  Gene Name: POP1 homolog, ribonuclease P/MRP subunit
  Uniprot ID: Q99575
  ENST ID: ENST00000401707
  CDS Start-End: 82-3156
ctccaggagctttggctcggtgggtactgtcgcggaggcttgtcattctgacccggggattcctcacagcgtctggcagaaatgtcaaatgcaaaagaaagaaaacacgccaagaaaatgagaaaccagcctaccaatgtgactctgtcctctggctttgtggctgacagaggtgtaaagcaccacagtggaggtgaaaaacctttccaagctcaaaaacaagagcctcatcctggaacttcacgacagcggcaaaccagagtcaacccccattctctgcctgaccctgaagtgaatgagcagtcttcctccaaagggatgtttagaaaaaagggaggatggaaagcaggtcccgagggcacgtctcaggagatccccaagtatataactgcttctacttttgctcaagcacgagctgctgaaatcagtgctatgttaaaagctgtgacccagaagtcttcgaattcactggtttttcagactctgccacggcacatgcgacgaagagccatgagccacaacgtcaaacgccttcccagacggttacaggagattgcccagaaagaggcggagaaagccgtacatcagaaaaaagaacattcaaaaaataaatgccataaagctcgaagatgtcacatgaaccggacgctagaatttaaccgtagacaaaagaagaacatttggttagaaactcacatctggcacgccaagcggtttcatatggtcaagaagtggggctactgccttggggagaggccaacagtcaagagccacagagcctgctatcgagccatgacgaaccggtgcctcctgcaggatttatcctattactgttgtttggagttgaaaggcaaagaggaagaaatactaaaggcgctttctggaatgtgtaacatagacacagggctgacgtttgcagcagttcactgcttgtctggaaagcgccaagggagccttgtgctttatcgggtgaataaatatcccagagaaatgcttgggcctgttacgtttatctggaagtcccagaggaccccgggtgacccttctgagagcaggcagctgtggatctggctgcatccaacccttaaacaggatatcttagaggaaataaaagcagcgtgccagtgtgtggaacccatcaaatcagctgtctgcatcgctgacccacttccaacaccatcccaagaaaaaagccaaactgaattgcctgacgagaaaattggcaagaaaagaaaaaggaaagatgatggagaaaatgctaaaccaattaaaaaaattatcggtgatggaactagagatccatgtctaccatactcttggatctctccaaccacaggcattataatcagcgatttgacgatggagatgaacagattccggctgattgggccactttcccactccatcctaactgaagcaataaaagctgcttctgtccacactgtgggagaggacacagaggagacacctcaccgctggtggatagaaacctgtaagaaacctgacagcgtttcccttcattgcagacaagaagccattttcgagttgttgggaggaataacatcaccagcagaaattccggcaggtactattctgggactgacagttggggatcctcgaataaatttgccccaaaagaagtccaaagctttgcccaatccagaaaaatgccaagataatgagaaagttagacagctgcttctggagggtgtgcctgtggaatgtacgcatagctttatctggaaccaagatatctgtaagagtgtcacagagaataaaatctcggatcaggatttaaaccggatgaggagtgaattgctggtgcctgggtcacagcttattttaggtccccatgaatccaagatacctatacttttgattcagcagccaggaaaagtgactggtgaagatcgactaggctggggaagtggctgggatgtcctactcccaaagggctggggcatggctttctggattccatttatttatcgaggtgtgagagtcggagggttgaaagagtctgcagtgcattctcagtataagaggtcgcctaatgtcccaggcgattttccagactgccctgccgggatgctgtttgcggaagagcaagctaagaatcttcttgaaaagtacaaaagacgccctcctgcaaaacggcccaactacgttaagcttggcactctggcacctttctgctgtccctgggagcagttaactcaagactgggagtcaagagtccaggcttacgaagaaccttctgtagcttcatctccaaatggtaaggagagtgacctaagaagatctgaggtgccttgtgctcccatgcctaaaaaaactcatcagccatctgatgaagtgggcacatccatagagcaccccagggaggcagaggaggtaatggatgcagggtgtcaagaatcggcagggcctgagaggatcacagaccaggaggccagtgaaaaccatgttgctgccacagggagtcacctctgcgttctcaggagtagaaaattactgaagcaactgtcagcctggtgtgggcccagttctgaggatagtcggggaggccggcgagctcccggcagaggccagcaaggattgaccagagaggcttgcctgtccatcttgggccacttccccagggccctggtttgggtcagcctgtccctgctcagcaagggcagccccgagcctcacaccatgatctgtgtcccagccaaggaggacttcctccagctccatgaggactggcattactgtgggccccaggaatccaaacacagtgacccattcaggagcaagatcctgaaacagaaagagaagaagaaaagggagaagaggcagaagccaggacgtgcctcttctgatggcccggcgggggaagagcccgtggctgggcaggaagctctgactctagggctgtggtcaggccctctgccgcgtgtgacgttgcactgctccagaactctcctaggctttgtgactcagggagatttttccatggctgttggctgtggagaagccctggggtttgttagcttgacaggcttgctggatatgctgtccagccagcctgcagcgcagaggggcttagtgctactgaggcctcccgcctctctgcagtatcgatttgcgaggattgctattgaggtgtgaatgcgtgcttgtatcccagcagggcatagataatacgttattattgtctgccaagttctacatgtggagaatctgcttctgctttaaaatatcatgtgaaactccctggaaacaagaataaaaaattatgtattatgcagatgatgaaatgtttacatcattccagtaatgtcattgattttcatctttccctgtccttgctgtaatacttttaaattatttggccaaaagctttgtattatgatctcttggtctgtgtagttgtggctgaaaataatgagaagctctacgagttatcatcccctttttttgttagaaacaaagggcttgtcaggtctatttgaaaaacctcatagtcatgtgataagcaacaatagatgtttaatgatttcactgttatagcagaagacaagagaagacgcttggcctctgtacatgaaatatgggctcctgatggacctcattcaattctgtactgtgatttccatgccgaacaactcaagccttaaagagagaaatcatggacaactgatttctgcctgttttcaggcaggcacagtttatggcgtcagtgctaggctggaattagaaagtgggggtctatgacgtggacttcctgactctttgatctctttgttgttgaccaacacttgatcctactagttacttaatttttttaagtaaaaaattattattattttgtttctgcaaagattttctcaaagccatagaggagcatttctcagaatatgttctatgatatgtgtcacctaaaaaagtaagagattccaaggtcaggttgatatggaaactctaggttaaataaagttaagcatttctttatgaaagaacttctggaaacttccatgtgataatgtgcattgcggatctctaggaaggaaatgatagtgtatagtattttctaaatacttgtgattcctaaagttctcttacaaggagccctttgtaggaccagtgttcttagtagcgcgctttgggcagtgtggctgtgtagtgcatagctacctctgcaaggtgataactaagccggcaagctgcctttcaacactcatgcagtcacgttgtccacctgagattctcaacagggtataaaaggaaggtctcatcttgcctcacaggaagagtgggctcagtgtggcttttttccaactatggagaaactcagtgctcatctactttaagtttccacatatggcttgctcatagccttggtccttacctttcctgccataactttctagaagagcttaatgggattttttttctaaaaaatgtaaatatgcagttaggcattattttatgtaaatgcattgggtttttactgtagcatttggcactaaatggctttgggggtgatgaggtggggaaggatacagcaggtggtacagtagtcaggaagtacctgccaccaatgagatgtctgatgctttgcctcttaccatgcctctgaatgtctttggatccaacccagatgagactgaaaaaaaaaaaacagtgtaactaagtggcatctgtaaacagaataaatgaaaatgtcacctg

SEQ ID NO: 167817 - DNA, 585 bp, Homo sapiens
  Payload ID: 13011
  Gene Symbol: POP1
  Gene Name: POP1 homolog, ribonuclease P/MRP subunit
  ENST ID: ENST00000522319
  CDS Start-End: 37-585
gctctccagcgcgctctccaggagctttggctcgaaatgtcaaatgcaaaagaaagaaaacacgccaagaaaatgagaaaccagcctaccaatgtgactctgtcctctggctttgtggctgacagaggtgtaaagcaccacagtggaggtgaaaaacctttccaagctcaaaaacaagagcctcatcctggaacttcacgacagcggcaaaccagagtcaacccccattctctgcctgaccctgaagtgaatgagcagtcttcctccaaagggatgtttagaaaaaagggaggatggaaagcaggtcccgagggcacgtctcaggagatccccaagtatataactgcttctacttttgctcaagcacgagctgctgaaatcagtgctatgttaaaagctgtgacccagaagtcttcgaattcactggtttttcagactctgccacggcacatgcgacgaagagccatgagccacaacgtcaaacgccttcccagacggttacaggagattgcccagaaagaggcggagaaagccgtacatcagaaaaaagaacattcaaaaaataaatgccataaagctcgaaga

SEQ ID NO: 167818 - DNA, 2321 bp, Homo sapiens
  Payload ID: 13012
  Gene Symbol: POP4
  Gene Name: POP4 homolog, ribonuclease P/MRP subunit
  ENST ID: ENST00000221770
  CDS Start-End: 174-464
agagagcgccggaagcggtccgagaatgaagagtgtgatctaccatgcattgtctcagaaagaggcgaatgactccgatgtccagatacagccttttcctccctctccatgaactctggaaacagtacatcagggacctgtgcagtgggctcaagccagacacgcagccacagatgattcaggccaagctcttaaaggcagatcttcacggggctattatttcagtgacaaaatccaaatgcccctcttatgtgggtattacaggaatccttctacaggaaacaaagcacattttcaaaattatcaccaaagaagaccgcctgaaagttatccccaagctaaactgcgtgttcactgtggaaaccgatggctttatttcctacatttacgggagcaaattccagcttcggtcaagtgaacggtctgcgaagaagttcaaagcgaagggaacgattgacctgtgaattctttgccgtctaaggcagttgtttatgacagctgaaaactggacactccctaaatgtccacctttcagtgaagagatagttaagccaattccatttatagaccacctccagccagtgacgctccgagttgaggatgttgaacaacatgggaaggtcgcagcgtactaagtgaagaagtcagaggacagaggaatttctctttctaggagattttcattttgtgtgactcccatggggaggaacagactggcaggaagcacaccggggttaacactggttgacttgaataggattattcgatttttaaaaatacttttccatgttttctgagtgctctatgataaatcagttgcatctgtgataatacagtacatatgtggacataaacagggatcaaataaaggaggtattgctgcagtccagccaggttgaaagggaaggggggtccccaaaggtccattggatggcaggtgtctacagaggctcgcctttgggtggaactctgacccacctaaggtttactttgctatttcaggaaggttgaagaggattgaagggtgagttgctaagtgacttagggtttattcacttcaggaatcatagctggggtggaccccaggagcagagtactgcatgcagctgtgcccatgcatggttgccccagcgtagtgagatgggacctgccgcagcatgcccactcctgagctgccaggctgagccatggaggactgaaaggaggtcgcccggcatcacctcccgaggtgagacctgctgcaaaagccaagccagcagcattgacgccctttgatatcttcgccatttttgctgctgaaagacttggcttttcagtctgaccctggccctctgtgaccatgtgtctgtaaagccagtgggtcaggcccttccatgcagggccagaggaaaagcgggcccagggctgcagtgagagcggggcaggggaccagcctaccagatgggttggaaacatggctcagaaggaccaactaccccttccctttgaggagcaagtctctgccgatcagcaaggcaaggccaggagccctcctggcgaaaggcaggccacaaatctgttctcccccaggagaagtagcagtgccagggctttgcgtttctggtaacttccacccaaaccacaccagagagaaacaccgtagtggagaagggaagtgggagcgctgactgctgtgtgccaggagagtagaaaggcccaggtctgtgccaccacccctccccaaagctcagtgcacccagagtctcacagggaccaacacggtgcctcggtcctgcttccatccatgcaagtgtcctccgctcaccagggtgttctgaggcagctcaagtgctctcccccaagcagcacgcagtcaccgctgccagtgatgaacacacgcacgggctaggcacatggagcccaagcacactgccacctcggacacgggccccggcccagcgactgccttgtggtgtggccgtcctcatctgccacaggaagacagacttcgagggacctcttgcctaaggcctcgctgactcaagggtagattgagatttggacctaataggctccagaactgtgctttgagctacagggtggctgcaggatgagacggatgcagttcaaagtgcaggatgtgctgcctttattacctgctttcccgctgagcaaatccctgtcttgagtgggaagtggcatctattcccccagccatctgaaaatgctgtgttcataaccaaataggtgctgtagcttcctagccatcccgctcttacccgcccctctgcaatgtaaaaggcgtccactgttgtgtaaatacacagttgctttccagaaaa

SEQ ID NO: 167819 - DNA, 3385 bp, Homo sapiens
  Payload ID: 13012
  Gene Symbol: POP4
  Gene Name: POP4 homolog, ribonuclease P/MRP subunit
  Uniprot ID: O95707
  ENST ID: ENST00000585603
  CDS Start-End: 2303-2965
gtttgctttttaaaaaatattttaggctgggcgcagtggctcacccctgtaatctcagcactttgggaggccgaggcgggtggatcatgagatcaggagttcgagaccaacctgaccaacatggtaaaaccctgtctctactaaaaatacaaaaattagctgggcgtggtggtgtgtgcctgtaatctcagctactcaggaggctgaggcaggagaatcacttcaacctaggaggcagaggttgcagtgagccgagatcacaccattgcactccagcctggacaacacagcaagactccgtctcaaaaaaaaaaatattttaatgatgaaggaactatgttgtaattgcaactcaaggacgacccaccccaccaccatcagggaattcgaggggagactggcagttatccagggatcccagaaggagtcaactgggagttaagagtcctaacaaccctagaaaaaaactttcaaagacacaggtcttctcattaatctccataatcacagaggtcttgcctaaaagggccccccttgagtacacagctctgaaactggctaacatcttctgctgtctcatttgattttaaagttcacatttgtgaagggctctattgtacaacatggtgactatagttaataacagtgaatttcagttaataacctgaatttcactgagagtaggtctgaagtgttctcatcacaaaatgagtgtattagcatcgctcatagctcatttagccattacacaatgtatacacatttcaaaccatattgtataccataaatacatacaattcttattggttaattttaaaaataataaaagttctctatcagtcccataaattacaattttcaggcatctgcaaaggcagcatgttttggtttaaatgtggtctttccaaattttatacgtataaaataaatgcataagtgtactacatatgcaaaaactaatacataaattttataaagtcaatgcacgcggggtcactgggatgaaccaatttcagtgcctgcagtctaatgtttaaaatcaaaatggtacaaggtcaccaccaaagaaattgtttaagccaatgtttctcaaactaaaacctttggacatactcccagaatcccctgtaaagaaatgtatactgtactcaaagttgagaaccactgacttagcataaagggaccgtatttcttttctctcccacccagcacaggcccagtgctcagcagaaattggggctccacagttctgcccaacactgggtcactgctgagaagtctgcaccaggccttcctgcacctttccactgagcaatggagtttgtttattcatttatttatttatatggaatttatttatttattttggagacagggtctcactctgtcacccaggctggagtgcagtagcgcaatccaggttcactgcagccctaaactccttgggctcaactgatcctcccacctcagatacccgagtagttgggactacaagcacgcaccaccacgcctggataattttttttaaatgttttgtagagatggggtctcccgatgttgcccaggctggtctcgaactcctgggctcaagagatcctcccgcctgcgcctcccacggtgtgagccacctttgatcttattgctatgatttttttattgataaaaactaataaatattctgagtctcaagaaagctttctgaaactatcaaagggacccaggcggcgcatcactacctgtgaggccgaccccactcacagcacagactgcaagtgaggcttacagatgggaagtgccctaagcgaggttaaacagctagttagcagcagacacggaactagaacctaagcctgctgtcccagcttcggtgcccgtgctcacagcggaagctgcctcggctcatccgtaagggcgctgattagggacgacaaagacctcaccccaccgtccccgtcccatttccgccctcccagatccccaacctccttcgagtcctctccaagtcgcctcgcctcgctccactccaggccttagcaagcattccacatgcctttaccccaaccctactgcctgtcccccaaaagatgcaggcggaaaagaccccaggaagcgagcccactcctccccactgctcagcaacaccgcctacgacgttctcagtagccgaatccctttccaggcgcatgcgcccccgaggtgggcgagcgccggtgatgtcacgcatagcgccatctccgagctccgagagtctgcgacagcagctgccagtgcgtcatcagagagcgccggaagcggtccgagaatgaagagtgtgatctaccatgcattgtctcagaaagaggcgaatgactccgatgtccagccttcaggagcacagcgggccgaggccttcgtgagggccttcctgaagcgcagcacgccccgcatgagcccgcaggcccgcgaggaccagctgcagcgcaaggcggtggtcctggagtacttcacccgccacaagcgcaaggagaagaagaagaaagccaaaggcctctctgccaggcaaaggagggagctgcggctctttgacattaaaccagagcagcagagatacagccttttcctccctctccatgaactctggaaacagtacatcagggacctgtgcagtgggctcaagccagacacgcagccacagatgattcaggccaagctcttaaaggcagatcttcacggggctattatttcagtgacaaaatccaaatgcccctcttatgtgggtattacaggaatccttctacaggaaacaaagcacattttcaaaattatcaccaaagaagaccgcctgaaagttatccccaagctaaactgcgtgttcactgtggaaaccgatggctttatttcctacatttacgggagcaaattccagcttcggtcaagtgaacggtctgcgaagaagttcaaagcgaagggaacgattgacctgtgaattctttgccgtctaaggcagttgtttatgacagctgaaaactggacactccctaaatgtccacctttcagtgaagagatagttaagccaattccatttatagaccacctccagccagtgacgctccgagttgaggatgttgaacaacatgggaaggtcgcagcgtactaagtgaagaagtcagaggacagaggaatttctctttctaggagattttcattttgtgtgactcccatggggaggaacagactggcaggaagcacaccggggttaacactggttgacttgaataggattattcgatttttaaaaatacttttccatgttttctgagtgctctatgataaatcagttgcatctgtgataatacagtacatatgtggacataaacagggatcaaataaaggaggtattgctgca

SEQ ID NO: 167820 - DNA, 575 bp, Homo sapiens
  Payload ID: 13012
  Gene Symbol: POP4
  Gene Name: POP4 homolog, ribonuclease P/MRP subunit
  ENST ID: ENST00000586823
  CDS Start-End: 22-150
agcgccggaagcggtccgagaatgaagagtgtgatctaccatgcattgtctcagaaagaggcgaatgactccgatgtccaggtcagttcttggcagggagtccaggagcaacagagccttcaggagcacagcgggccgaggccttcgtgagggccttcctgaagcgcagcacgccccgcatgagcccgcaggcccgcgaggaccagctgcagcgcaaggcggtggtcctggagtacttcacccgccacaagcgcaaggagaagaagaagaaagccaaaggcctctctgccaggcaaaggagggagctgcggctctttgacattaaaccagagcagcagagatacagccttttcctccctctccatgaactctggaaacagtacatcagggacctgtgcagtgggctcaagccagacacgcagccacagatgattcaggccaagctcttaaaggcagatcttcacggggctattatttcagtgacaaaatccaaatgcccctcttatgtgggtattacaggaatccttctacaggaaacaaagcacattttcaaaattatcaccaaagaagaccgc

SEQ ID NO: 167821 - DNA, 527 bp, Homo sapiens
  Payload ID: 13012
  Gene Symbol: POP4
  Gene Name: POP4 homolog, ribonuclease P/MRP subunit
  ENST ID: ENST00000590688
  CDS Start-End: 76-527
gaagagtaagcggggccgcgaagttggagagggttggggacgttaagggtcggggtcttggtactggtgggtgaaatgggtccgggctacctgttgctgcggagtcctaacagaaccgctacaggaatgggcccaccctacctaagaaaaactgagggctggagcacgggtgtgatctaccatgcattgtctcagaaagaggcgaatgactccgatgtccagccttcaggagcacagcgggccgaggccttcgtgagggccttcctgaagcgcagcacgccccgcatgagcccgcaggcccgcgaggaccagctgcagcgcaaggcggtggtcctggagtacttcacccgccacaagcgcaaggagaagaagaagaaagccaaaggcctctctgccaggcaaaggagggagctgcggctctttgacattaaaccagagcagcagagatacagccttttcctccctctccatgaactctggaaacagtacatcagggacctgtgcagtgggctcaagccagacacgca

SEQ ID NO: 167822 - DNA, 579 bp, Homo sapiens
  Payload ID: 13012
  Gene Symbol: POP4
  Gene Name: POP4 homolog, ribonuclease P/MRP subunit
  ENST ID: ENST00000586420
  CDS Start-End: 37-579
agtgcgtcatcagagagcgccggaagcggtccgagaatgaagagtgtgatctaccatgcattgtctcagaaagaggcgaatgactccgatgtccagccttcaggagcacagcgggccgaggccttcgtgagggccttcctgaagcgcagcacgccccgcatgagcccgcaggcccgcgaggaccagctgcagcgcaaggcggtggtcctggagtacttcacccgccacaagcgcaaggagaagaagaagaaagccaaaggcctctctgccaggcaaaggagggagctgcggctctttgacattaaaccagagcagcagagccttttcctccctctccatgaactctggaaacagtacatcagggacctgtgcagtgggctcaagccagacacgcagccacagatgattcaggccaagctcttaaaggcagatcttcacggggctattatttcagtgacaaaatccaaatgcccctcttatgtgggtattacaggaatccttctacaggaaacaaagcacattttcaaaattatcaccaaagaagaccgcctgaaagttatccccaagctaaactgcgtg

SEQ ID NO: 167823 - DNA, 502 bp, Homo sapiens
  Payload ID: 13012
  Gene Symbol: POP4
  Gene Name: POP4 homolog, ribonuclease P/MRP subunit
  ENST ID: ENST00000591061
  CDS Start-End: 37-159
agtgcgtcatcagagagcgccggaagcggtccgagaatgaagagtgtgatctaccatgcattgtctcagaaagaggcgaatgactccgatgtccagccttcaggagcacagcgggccgaggccttcgtgagggccttcctgaagcgcagccacagatgattcaggccaagctcttaaaggcagatcttcacggggctattatttcagtgacaaaatccaaatgcccctcttatgtgggtattacaggaatccttctacaggaaacaaagcacattttcaaaattatcaccaaagaagaccgcctgaaagttatccccaagctaaactgcgtgttcactgtggaaaccgatggctttatttcctacatttacgggagcaaattccagcttcggtcaagtgaacggtctgcgaagaagttcaaagcgaagggaacgattgacctgtgaattctttgccgtctaaggcagttgtttatgacagctgaaaactggacactccctaa

SEQ ID NO: 167824 - DNA, 913 bp, Homo sapiens
  Payload ID: 13013
  Gene Symbol: POP5
  Gene Name: POP5 homolog, ribonuclease P/MRP subunit
  Uniprot ID: Q969H6
  ENST ID: ENST00000341039
  CDS Start-End: 18-359
agagcgcggaggcagccatggtgcggttcaagcacaggtacctgctctgcgaactggtgtctgacgacccccgctgccgcctaagcctcgatgaccgagttctgagcagcctcgtacgggacacgatcgccagggtgcacggaactttcggcgcagccgcctgctccatcggcttcgcgggtacaataagaacatgtcagaagttcctaattcagtacaacaggagacagctgttgatcttgttgcagaactgcactgatgaaggagagcgggaagctatccagaagtctgtgacaagaagctgcttattagaggaggaggaggagtcaggtgaggaggctgcagaagcaatggagtgaacctctgctccccacacagctggctacactgctcaggcttcaggcccacttgttgaacagaacaatctgggtagcaacagcatcttccacagttttccaaactggatagctgccaaccagcagacattacccacttgaaatggagtactcagttaaactgaagttgcctttacctagcattccctggtgaagtgttgcaggttgtgaactctgtagacatctttattgcttggctaagagtagatttaataaatgtatctggtttccgtggcatttagcatacttatattacagaaagggcttatggagtccatgcttggccaagtctctgttctctctctatccctagccttggtgggaagactgactccctatgtggtactagttaaacttttttttttgagacagtctcagtctatcacccaggctggagtgtagtggcccagtatcggctcactgcaacctccgcctcctgggttcaagcaattctcccacctcagccttccaagtaactgggattacagacgtgcaccaccacgtctggctaatttttg

SEQ ID NO: 167825 - DNA, 801 bp, Homo sapiens
  Payload ID: 13013
  Gene Symbol: POP5
  Gene Name: POP5 homolog, ribonuclease P/MRP subunit
  Uniprot ID: Q969H6
  ENST ID: ENST00000357500
  CDS Start-End: 37-528
ggtttgcacgccggaccggagagcgcggaggcagccatggtgcggttcaagcacaggtacctgctctgcgaactggtgtctgacgacccccgctgccgcctaagcctcgatgaccgagttctgagcagcctcgtacgggacacgatcgccagggtgcacggaactttcggcgcagccgcctgctccatcggcttcgcggttcgatatctcaatgcctatactggaatagtgctacttcgatgcagaaaagaattctatcagcttgtgtggtcagctcttcccttcatcacatacttggagaacaaaggacaccgttacccatgctttttcaacacattacatgtgggaggtacaataagaacatgtcagaagttcctaattcagtacaacaggagacagctgttgatcttgttgcagaactgcactgatgaaggagagcgggaagctatccagaagtctgtgacaagaagctgcttattagaggaggaggaggagtcaggtgaggaggctgcagaagcaatggagtgaacctctgctccccacacagctggctacactgctcaggcttcaggcccacttgttgaacagaacaatctgggtagcaacagcatcttccacagttttccaaactggatagctgccaaccagcagacattacccacttgaaatggagtactcagttaaactgaagttgcctttacctagcattccctggtgaagtgttgcaggttgtgaactctgtagacatctttattgcttggctaagagtagatttaataaatgtatctggtttccgtggca

SEQ ID NO: 167826 - DNA, 927 bp, Homo sapiens
  Payload ID: 13014
  Gene Symbol: POP7
  Gene Name: POP7 homolog, ribonuclease P/MRP subunit
  Uniprot ID: O75817
  ENST ID: ENST00000303151
  CDS Start-End: 263-685
ggaaggggcggggcgaacggaagccgggaaggcgattcatagctcgcggggtacgggcgcgcgtgcgcactccgcagcccgttcaggaccccggcgcgggcagggcgcccacgagctggctggctgcttgcacccacatccttctttctctgggacctggggtcgcggttacttgggctggccggcgaacccttgagtggcctggcggggagcgggcctcgcgcgcctggagggccctgtggaacgaagagaggcacacagcatggcagaaaaccgagagccccgcggtgctgtggaggctgaactggatccagtggaatacacccttaggaaaaggcttcccagccgcctgccccggagacccaatgacatttatgtcaacatgaagacggactttaaggcccagctggcccgctgccagaagctgctggacggaggggcccggggtcagaacgcgtgctctgagatctacattcacggcttgggcctggccatcaaccgcgccatcaacatcgcgctgcagctgcaggcgggcagcttcgggtccttgcaggtggctgccaatacctccaccgtggagcttgttgatgagctggagccagagaccgacacacgggagccactgactcggatccgcaacaactcagccatccacatccgagtcttcagggtcacacccaagtaattgaaaagacactcctccacttatcccctccgtgatatggctcttcgcatgctgagtactggacctcggaccagagccatgtaagaaaaggcctgttccctggaagcccaaaggactctgcattgagggtgggggtaattgtctcttggtgggcccagttagtgggccttcctgagtgtgtgtatgcggtctgtaactattgccatataaataaaaaatcctgttgcactagtgtcctgcca

SEQ ID NO: 167827 - DNA, 483 bp, Homo sapiens
  Payload ID: 13014
  Gene Symbol: POP7
  Gene Name: POP7 homolog, ribonuclease P/MRP subunit
  ENST ID: ENST00000457480
  CDS Start-End: 72-483
agtttgagggcgacgcgatgaatgaatcggaacggggggtggggagacgcgggatctggagggcacacagcatggcagaaaaccgagagccccgcggtgctgtggaggctgaactggatccagtggaatacacccttaggaaaaggcttcccagccgcctgccccggagacccaatgacatttatgtcaacatgaagacggactttaaggcccagctggcccgctgccagaagctgctggacggaggggcccggggtcagaacgcgtgctctgagatctacattcacggcttgggcctggccatcaaccgcgccatcaacatcgcgctgcagctgcaggcgggcagcttcgggtccttgcaggtggctgccaatacctccaccgtggagcttgttgatgagctggagccagagaccgacacacgggagccactgactcggatccgcaacaactcagccatccacatccgagtcttcagggtca

SEQ ID NO: 167828 - DNA, 1679 bp, Homo sapiens
  Payload ID: 13015
  Gene Symbol: POPDC2
  Gene Name: popeye domain containing 2
  Uniprot ID: Q9HBU9
  ENST ID: ENST00000264231
  CDS Start-End: 168-1262
catcattccttcccaaagccaccggaagcattccttctaggaaaggtggagtcggtagtgagaagccggaggtgagaagacccctgagcggatggattcattcattttctgaatttcctatgtgaggacagtattagagcccagtgaggctttgagaggccccaaagatgagcgccaacagcagcagagtgggccagcttctcttgcagggttcagcgtgcattaggtggaagcaggatgtggaaggggctgtctaccacctagccaactgcctcttactcctgggcttcatggggggcagtggggtgtatggatgcttctatctttttggcttcctgagtgcaggttacctgtgctgcgtgctgtggggctggttcagtgcctgtggcctggacattgttctttggagcttcctgctggctgtggtctgcctgctccagctggcacacctggtataccgcctgcgtgaggacaccctccctgaggagtttgacctcctctacaagacgctgtgcctgcccttgcaggtgcccctacagacatacaaggagattgttcactgctgcgaggagcaggtcttaactctggccactgaacagacctatgctgtggagggtgagacacccatcaaccgcctgtccctgctgctctctggccgggttcgtgtgagccaggatgggcagtttctgcactacatctttccataccagttcatggactctcctgagtgggaatcactacagccttctgaggagggggtgttccaggtcactctgactgctgagacctcatgtagctacatttcctggccccggaaaagtctccatcttcttctgaccaaagagcgatacatctcctgcctcttctcggctctgctgggatatgacatctcagagaagctctacactctcaatgacaagctctttgctaagtttgggctgcgctttgacatccgccttcccagcctctaccatgtcctgggtcccactgctgcagatgctggaccagagtccgagaagggtgatgaggaagtctgtgagccagctgtgtcccctcctcaggccacacccacctctctccagcaaacacccccttgttctacccctccagctaccaccaactttcctgcacctcctacccgggccaggttgtccaggccagacagtggcatactggcttctagaattcctctccagagctactctcaagttatatccaggggacaggcccctttggctccaacccacacgcctgaactttaaggatcattggactatcttctctgtggccagcgcagctctcttctgtgttcacagaatggccactgataggcatgcctcttttcccacccactggaaggctcacaggcaaggtgagagaggacacagaaggtgccaacactgtcgctacagtaaggacctgaagtgactttgagaaattcaccctcacaaaccttccttcaggagcaggcattggtagtgcagaggcacagattccgtcctttaccagctgcagaatcttgggcaagttacatagcctctgtgagcctcatcggtaaacagtgggggttatgaaacccacctcacagggttgttgtgaggatccaatgagttgatttaggtaagcacctagcacatgccgtggcaccaagtaagcactcaataaatcactcaactcct

SEQ ID NO: 167829 - DNA, 1958 bp, Homo sapiens
  Payload ID: 13015
  Gene Symbol: POPDC2
  Gene Name: popeye domain containing 2
  ENST ID: ENST00000341124
  CDS Start-End: 222-1328
gagagagagagagagaaagaggtttttaaattctccatgaagtgtactatgttccatcattccttcccaaagccaccggaagcattccttctaggaaaggtggagtcggtagtgagaagccggaggtgagaagacccctgagcggatggattcattcattttctgaatttcctatgtgaggacagtattagagcccagtgaggctttgagaggccccaaagatgagcgccaacagcagcagagtgggccagcttctcttgcagggttcagcgtgcattaggtggaagcaggatgtggaaggggctgtctaccacctagccaactgcctcttactcctgggcttcatggggggcagtggggtgtatggatgcttctatctttttggcttcctgagtgcaggttacctgtgctgcgtgctgtggggctggttcagtgcctgtggcctggacattgttctttggagcttcctgctggctgtggtctgcctgctccagctggcacacctggtataccgcctgcgtgaggacaccctccctgaggagtttgacctcctctacaagacgctgtgcctgcccttgcaggtgcccctacagacatacaaggagattgttcactgctgcgaggagcaggtcttaactctggccactgaacagacctatgctgtggagggtgagacacccatcaaccgcctgtccctgctgctctctggccgggttcgtgtgagccaggatgggcagtttctgcactacatctttccataccagttcatggactctcctgagtgggaatcactacagccttctgaggagggggtgttccaggtcactctgactgctgagacctcatgtagctacatttcctggccccggaaaagtctccatcttcttctgaccaaagagcgatacatctcctgcctcttctcggctctgctgggatatgacatctcagagaagctctacactctcaatgacaagctctttgctaagtttgggctgcgctttgacatccgccttcccagcctctaccatgtcctgggtcccactgctgcagatgctggaccagagtccgagaagggtgatgaggaagtctgtgagccagctgtgtcccctcctcaggccacacccacctctctccagcaaacacccccttgttctacccctccagctaccaccaactttcctgcacctcctacccgggccaggttgtccaggccagacagtggcatactgggtgaggactccaccagtctggtgctggaggattttgaggaggtgtcaggatcagaatcgtttatggattataggagtgatggggagtacatgaggtgaagggagaactaacatgggcacagccaccggctcaggatcctatagatagatgattttccctcttatttccaccagtttggcttttcagggaaggtggcagctggcagaatcccctgacaacaaaagcttctagaattcctctccagagctactctcaagttatatccaggggacaggcccctttggctccaacccacacgcctgaactttaaggatcattggactatcttctctgtggccagcgcagctctcttctgtgttcacagaatggccactgataggcatgcctcttttcccacccactggaaggctcacaggcaaggtgagagaggacacagaaggtgccaacactgtcgctacagtaaggacctgaagtgactttgagaaattcaccctcacaaaccttccttcaggagcaggcattggtagtgcagaggcacagattccgtcctttaccagctgcagaatcttgggcaagttacatagcctctgtgagcctcatcggtaaacagtgggggttatgaaacccacctcacagggttgttgtgaggatccaatgagttgatttaggtaagcacctagcacatgccgtggcaccaagtaagcactcaataaatcactcaactcctt

SEQ ID NO: 167830 - DNA, 1837 bp, Homo sapiens
  Payload ID: 13015
  Gene Symbol: POPDC2
  Gene Name: popeye domain containing 2
  ENST ID: ENST00000493094
  CDS Start-End: 461-1567
attctgcttgggaaaaacagagagcaggatgtggccgcatcatcccacgctgctggacttttcagtcctgtagtgctactttcccttgggactatttaggtttttctgctaagaaccaaatttgaagactcccaagaaacatggaaccaaggaagcttgccagagctctgcagggagagccagagccttgctgagacagcgggggtggtggggaggagagagggggggagagggggagagagagagagagagagaaagaggtttttaaattctccatgaagtgtactatgttccatcattccttcccaaagccaccggaagcattccttctaggaaaggtggagtcggtagtgagaagccggaggtgagaagacccctgagcggatggattcattcattttctgaatttcctatgtgaggacagtattagagcccagtgaggctttgagaggccccaaagatgagcgccaacagcagcagagtgggccagcttctcttgcagggttcagcgtgcattaggtggaagcaggatgtggaaggggctgtctaccacctagccaactgcctcttactcctgggcttcatggggggcagtggggtgtatggatgcttctatctttttggcttcctgagtgcaggttacctgtgctgcgtgctgtggggctggttcagtgcctgtggcctggacattgttctttggagcttcctgctggctgtggtctgcctgctccagctggcacacctggtataccgcctgcgtgaggacaccctccctgaggagtttgacctcctctacaagacgctgtgcctgcccttgcaggtgcccctacagacatacaaggagattgttcactgctgcgaggagcaggtcttaactctggccactgaacagacctatgctgtggagggtgagacacccatcaaccgcctgtccctgctgctctctggccgggttcgtgtgagccaggatgggcagtttctgcactacatctttccataccagttcatggactctcctgagtgggaatcactacagccttctgaggagggggtgttccaggtcactctgactgctgagacctcatgtagctacatttcctggccccggaaaagtctccatcttcttctgaccaaagagcgatacatctcctgcctcttctcggctctgctgggatatgacatctcagagaagctctacactctcaatgacaagctctttgctaagtttgggctgcgctttgacatccgccttcccagcctctaccatgtcctgggtcccactgctgcagatgctggaccagagtccgagaagggtgatgaggaagtctgtgagccagctgtgtcccctcctcaggccacacccacctctctccagcaaacacccccttgttctacccctccagctaccaccaactttcctgcacctcctacccgggccaggttgtccaggccagacagtggcatactgggtgaggactccaccagtctggtgctggaggattttgaggaggtgtcaggatcagaatcgtttatggattataggagtgatggggagtacatgaggtgaagggagaactaacatgggcacagccaccggctcaggatcctatcttctagaattcctctccagagctactctcaagttatatccaggggacaggcccctttggctccaacccacacgcctgaactttaaggatcattggactatcttctctgtggccagcgcagctctcttctgtgttcacagaatggccactgataggcatgcctcttttcccacccactggaaggctcacaggcaaggtgagagaggacacagaaggtgccaacactg

SEQ ID NO: 167831 - DNA, 1345 bp, Homo sapiens
  Payload ID: 13015
  Gene Symbol: POPDC2
  Gene Name: popeye domain containing 2
  Uniprot ID: Q9HBU9
  ENST ID: ENST00000468801
  CDS Start-End: 168-1250
catcattccttcccaaagccaccggaagcattccttctaggaaaggtggagtcggtagtgagaagccggaggtgagaagacccctgagcggatggattcattcattttctgaatttcctatgtgaggacagtattagagcccagtgaggctttgagaggccccaaagatgagcgccaacagcagcagagtgggccagcttctcttgcagggttcagcgtgcattaggtggaagcaggatgtggaaggggctgtctaccacctagccaactgcctcttactcctgggcttcatggggggcagtggggtgtatggatgcttctatctttttggcttcctgagtgcaggttacctgtgctgcgtgctgtggggctggttcagtgcctgtggcctggacattgttctttggagcttcctgctggctgtggtctgcctgctccagctggcacacctggtataccgcctgcgtgaggacaccctccctgaggagtttgacctcctctacaagacgctgtgcctgcccttgcaggtgcccctacagacatacaaggagattgttcactgctgcgaggagcaggtcttaactctggccactgaacagacctatgctgtggagggtgagacacccatcaaccgcctgtccctgctgctctctggccgggttcgtgtgagccaggatgggcagtttctgcactacatctttccataccagttcatggactctcctgagtgggaatcactacagccttctgaggagggggtgttccaggtcactctgactgctgagacctcatgtagctacatttcctggccccggaaaagtctccatcttcttctgaccaaagagcgatacatctcctgcctcttctcggctctgctgggatatgacatctcagagaagctctacactctcaatgacaagctctttgctaagtttgggctgcgctttgacatccgccttcccagcctctaccatgtcctgggtcccactgctgcagatgctggaccagagtccgagaagggtgatgaggaagtctgtgagccagctgtgtcccctcctcaggccacacccacctctctccagcaaacacccccttgttctacccctccagctaccaccaactttcctgcacctcctacccgggccaggttgtccaggccagacagtggcatactggagatagatgattttccctcttatttccaccagtttggcttttcagggaaggtggcagctggcagaatcccctgacaacaaaagcttctagaattcctctccagagctactctcaagttatatccaggggacaggcccctttggctccaacccacacgcctgaactttaa

SEQ ID NO: 167832 - DNA, 247 bp, Homo sapiens
  Payload ID: 13015
  Gene Symbol: POPDC2
  Gene Name: popeye domain containing 2
  ENST ID: ENST00000495362
  CDS Start-End: 1-77
ttcctctccagagctactctcaagttatatccaggggacaggcccctttggctccaacccacacgcctgaactttaaggatcattggactatcttctctgtggccagcgcagctctcttctgtgttcacagaatggccactgataggcatgcctcttttcccacccactggaaggctcacaggcaaggagaactgcaacatgtttctgttttccaacagagcagtcttccctgtttctctgttctca

SEQ ID NO: 167833 - DNA, 1345 bp, Homo sapiens
  Payload ID: 13016
  Gene Symbol: POPDC3
  Gene Name: popeye domain containing 3
  Uniprot ID: Q9HBV1
  ENST ID: ENST00000254765
  CDS Start-End: 280-1155
aagctccgggcagggctgggaaggaaaggaaataccaaaatatttgcagactggatccaaatcaggagcccagatgaacttaaagaagcgagcatgggattcttagtttttcaagatccgtacacacgaagcctttaatcagcatcaactccagtgtccgttttctctggttttgtgaagactgcacaaaactctcatgatggagaaccaaaggacttagttacctgtttcagtgtcatctaaagtcaactgaaaagtgaagcaggcagtaatacagccatggaaagaaattcaagtttatggaagaacctaatagatgaacacccagtctgcacaacctggaagcaagaggccgaaggagccatttatcatcttgccagtattttatttgtagtaggtttcatgggtggcagtggattcttcgggctcctttatgtcttcagtttgctggggttgggttttctctgttctgctgtctgggcttgggtagatgtctgtgcagctgacatattttcctggaattttgtactgtttgtcatctgcttcatgcaatttgttcatattgcatatcaagttcgcagcataacctttgcccgagaattccaagtgttgtacagctcccttttccagcccctggggatctctttgcctgtcttcagaacgattgctttgagctctgaagtggttactttggaaaaggaacactgttatgccatgcaggggaaaacttccattgataaactctccttgcttgtttcaggaaggatcagagtgacagttgatggcgaatttctgcattacattttcccccttcagttcctggattctcctgagtgggattcactgagacccacagaggaaggcatttttcaggtaaccctcactgcagaaactgattgtcgatatgtgtcttggaggagaaagaaattatatctgctctttgctcagcatcgctacatctcccgccttttttcagtgctaattggcagtgacattgcagataaactctatgccttgaatgacagggtatatataggaaaaagatatcactatgatattcggctacccaacttctatcaaatgtcaactccagaaatacgcagatcacccctgacacaacattttcagaattccagacgatactgtgataaatgacatcaaagtctgaaatttataagtataaaaaaagactctctcttcatcattccccagtgaaatagcaaaatacaaaaaaagagctccctaatgtttttataaatcaaattcagaagcgagatgccattgccaactgttttattcctttcaacaactgcattgtgaataaactttacaaatttttcttgta

SEQ ID NO: 167834 - DNA, 582 bp, Homo sapiens
  Payload ID: 13016
  Gene Symbol: POPDC3
  Gene Name: popeye domain containing 3
  ENST ID: ENST00000429112
  CDS Start-End: 280-582
gttttattgaagtataatatgcacacataaatggacatatataaatgtacaacttgatgaattttctgatgaatttcactcaatattccagaatcctgactgtataaggaacatgataacatgaatcttacaggacattatgtcacttattataatgtatgaatttaatattttgcctttcaaaatcataaagggcaagagtcatcagggatctgaaatacacttcctctaccccccacccctccccaattatgtgctctctttctccttcccttataaatgttgttcttgtgttttgataggatcagagtgacagttgatggcgaatttctgcattacattttcccccttcagttcctggattctcctgagtgggattcactgagacccacagaggaaggcatttttcaggtaaccctcactgcagaaactgattgtcgatatgtgtcttggaggagaaagaaattatatctgctctttgctcagcatcgctacatctcccgccttttttcagtgctaattggcagtgacattgcagataaactctatgccttgaatgacagggtatatataggaaaaaga

SEQ ID NO: 167835 - DNA, 1755 bp, Homo sapiens
  Payload ID: 13017
  Gene Symbol: PORCN
  Gene Name: porcupine homolog (Drosophila)
  Uniprot ID: Q9H237
  ENST ID: ENST00000326194
  CDS Start-End: 44-1429
tgacagatctatccatctggccatccatccgtgggggtctgcaatggccacctttagccgccaggaatttttccagcagctactgcaaggctgtctcctgcctactgcccagcagggccttgaccagatctggctgctccttgccatctgcctcgcctgccgcctcctctggaggctcgggttgccatcctacctgaagcatgcaagcaccgtggcaggcgggttcttcagcctctaccacttcttccagctgcacatggtttgggtcgtgctgctcagcctcctgtgctacctcgtgctgttcctctgccgacattcctcccatcgaggcgtcttcctatccgtcaccatcctcatctacctactcatgggtgagatgcacatggtagacaccgtgacatggcacaagatgcgaggggcacagatgattgtggccatgaaggcagtgtctctgggcttcgacctggaccggggcgaggtgggtacggtgccctcgccagtggagttcatgggctacctctacttcgtgggcaccatcgtcttcgggccctggatatccttccacagctacctacaagctgtccaaggccgcccactgagctgccggtggctgcagaaggtggcccggagcctggcactggccctgctgtgccttgtgctgtccacttgcgtgggcccctacctcttcccgtacttcatccccctcaacggtgaccgcctccttcgcaacaagaaacgcaaagccaggggcaccatggtaaggtggctgcgagcctacgagagtgctgtctccttccacttcagcaactattttgtgggctttctttccgaggccacggccacgttggcgggggctggctttaccgaggagaaggatcacctggaatgggacctgacggtgtccaagccactgaatgtggagctgcctcggtcaatggtggaagttgtcacaagctggaacctgcccatgtcttattggctaaataactatgttttcaagaatgctctccgcctggggaccttctcggctgtgctggtcacctatgcagccagcgccctcctacatggcttcagtttccacctggctgcggtcctgctgtccctggcttttatcacttacgtggagcatgtcctccggaagcgcctggctcggatcctcagtgcctgtgtcttgtcaaagcggtgcccgccagactgttcgcaccagcatcgcttgggcctgggggtgcgagccttaaacttgctctttggagctctggccatcttccacctggcctacctgggctccctgtttgatgtcgatgtggatgacaccacagaggagcagggctacggcatggcatacactgtccacaagtggtcagagctcagctgggccagtcactgggtcacttttggatgctggatcttctaccgtctcataggctgaggcacatctgtggaccctcataaccctcttaagacccctctcagggtgccactgatgggggatgagggaaggccctctctctactccttgaccccctccatccttgacccccaacacctcaacacacacacacacacacacacacaaaatcacaccattttcatgcctgtcaatccccaccccaccacaaggcaggaagggggtggtgcctgctggggcctagagggggatgcttggggaaacagagaaggggagatccagggcctccccgccttccttcttcctttttatatacaatttgttattgtcaaataaaagtaggaaat

SEQ ID NO: 167836 - DNA, 1556 bp, Homo sapiens
  Payload ID: 13017
  Gene Symbol: PORCN
  Gene Name: porcupine homolog (Drosophila)
  ENST ID: ENST00000355092
  CDS Start-End: 1-1218
gggttgccatcctacctgaagcatgcaagcaccgtggcaggcgggttcttcagcctctaccacttcttccagctgcacatggtttgggtcgtgctgctcagcctcctgtgctacctcgtgctgttcctctgccgacattcctcccatcgaggcgtcttcctatccgtcaccatcctcatctacctactcatgggtgagatgcacatggtagacaccgtgacatggcacaagatgcgaggggcacagatgattgtggccatgaaggcagtgtctctgggcttcgacctggaccggggcgaggtgggtacggtgccctcgccagtggagttcatgggctacctctacttcgtgggcaccatcgtcttcgggccctggatatccttccacagctacctacaagctgtccaaggccgcccactgagctgccggtggctgcagaaggtggcccggagcctggcactggccctgctgtgccttgtgctgtccacttgcgtgggcccctacctcttcccgtacttcatccccctcaacggtgaccgcctccttcgcaagtggctgcgagcctacgagagtgctgtctccttccacttcagcaactattttgtgggctttctttccgaggccacggccacgttggcgggggctggctttaccgaggagaaggatcacctggaatgggacctgacggtgtccaagccactgaatgtggagctgcctcggtcaatggtggaagttgtcacaagctggaacctgcccatgtcttattggctaaataactatgttttcaagaatgctctccgcctggggaccttctcggctgtgctggtcacctatgcagccagcgccctcctacatggcttcagtttccacctggctgcggtcctgctgtccctggcttttatcacttacgtggagcatgtcctccggaagcgcctggctcggatcctcagtgcctgtgtcttgtcaaagcggtgcccgccagactgttcgcaccagcatcgcttgggcctgggggtgcgagccttaaacttgctctttggagctctggccatcttccacctggcctacctgggctccctgtttgatgtcgatgtggatgacaccacagaggagcagggctacggcatggcatacactgtccacaagtggtcagagctcagctgggccagtcactgggtcacttttggatgctggatcttctaccgtctcataggctgaggcacatctgtggaccctcataaccctcttaagacccctctcagggtgccactgatgggggatgagggaaggccctctctctactccttgaccccctccatccttgacccccaacacctcaacacacacacacacacacacacacaaaatcacaccattttcatgcctgtcaatccccaccccaccacaaggcaggaagggggtggtgcctgctggggcctagagggggatgcttggggaaacagagaaggggagatccagggcctccccgccttccttcttcctttttatatacaatttgttattgtcaaataaaagtaggaaatattcaataggct

SEQ ID NO: 167837 - DNA, 1848 bp, Homo sapiens
  Payload ID: 13017
  Gene Symbol: PORCN
  Gene Name: porcupine homolog (Drosophila)
  Uniprot ID: Q9H237
  ENST ID: ENST00000355961
  CDS Start-End: 140-1510
gctggtcccggccttgcggcctgcgggggaggctgcccggaggaggcagcggcggcggcagcgcgtcctcggtccccaggaccacggcttctttcctgccagatctatccatctggccatccatccgtgggggtctgcaatggccacctttagccgccaggaatttttccagcagctactgcaaggctgtctcctgcctactgcccagcagggccttgaccagatctggctgctccttgccatctgcctcgcctgccgcctcctctggaggctcgggttgccatcctacctgaagcatgcaagcaccgtggcaggcgggttcttcagcctctaccacttcttccagctgcacatggtttgggtcgtgctgctcagcctcctgtgctacctcgtgctgttcctctgccgacattcctcccatcgaggcgtcttcctatccgtcaccatcctcatctacctactcatgggtgagatgcacatggtagacaccgtgacatggcacaagatgcgaggggcacagatgattgtggccatgaaggcagtgtctctgggcttcgacctggaccggggcgaggtgggtacggtgccctcgccagtggagttcatgggctacctctacttcgtgggcaccatcgtcttcgggccctggatatccttccacagctacctacaagctgtccaaggccgcccactgagctgccggtggctgcagaaggtggcccggagcctggcactggccctgctgtgccttgtgctgtccacttgcgtgggcccctacctcttcccgtacttcatccccctcaacggtgaccgcctccttcgcaacaagaaacgcaaagccaggtggctgcgagcctacgagagtgctgtctccttccacttcagcaactattttgtgggctttctttccgaggccacggccacgttggcgggggctggctttaccgaggagaaggatcacctggaatgggacctgacggtgtccaagccactgaatgtggagctgcctcggtcaatggtggaagttgtcacaagctggaacctgcccatgtcttattggctaaataactatgttttcaagaatgctctccgcctggggaccttctcggctgtgctggtcacctatgcagccagcgccctcctacatggcttcagtttccacctggctgcggtcctgctgtccctggcttttatcacttacgtggagcatgtcctccggaagcgcctggctcggatcctcagtgcctgtgtcttgtcaaagcggtgcccgccagactgttcgcaccagcatcgcttgggcctgggggtgcgagccttaaacttgctctttggagctctggccatcttccacctggcctacctgggctccctgtttgatgtcgatgtggatgacaccacagaggagcagggctacggcatggcatacactgtccacaagtggtcagagctcagctgggccagtcactgggtcacttttggatgctggatcttctaccgtctcataggctgaggcacatctgtggaccctcataaccctcttaagacccctctcagggtgccactgatgggggatgagggaaggccctctctctactccttgaccccctccatccttgacccccaacacctcaacacacacacacacacacacacacaaaatcacaccattttcatgcctgtcaatccccaccccaccacaaggcaggaagggggtggtgcctgctggggcctagagggggatgcttggggaaacagagaaggggagatccagggcctccccgccttccttcttcctttttatatacaatttgttattgtcaaataaaagtaggaaatattcaataggct

SEQ ID NO: 167838 - DNA, 1877 bp, Homo sapiens
  Payload ID: 13017
  Gene Symbol: PORCN
  Gene Name: porcupine homolog (Drosophila)
  Uniprot ID: Q9H237
  ENST ID: ENST00000359882
  CDS Start-End: 180-1547
atttaaagggcccgctcgccgcgccgctctgggagccgctgctggtcccggccttgcggcctgcgggggaggctgcccggaggaggcagcggcggcggcagcgcgtcctcggtccccaggaccacggcttctttcctgccagatctatccatctggccatccatccgtgggggtctgcaatggccacctttagccgccaggaatttttccagcagctactgcaaggctgtctcctgcctactgcccagcagggccttgaccagatctggctgctccttgccatctgcctcgcctgccgcctcctctggaggctcgggttgccatcctacctgaagcatgcaagcaccgtggcaggcgggttcttcagcctctaccacttcttccagctgcacatggtttgggtcgtgctgctcagcctcctgtgctacctcgtgctgttcctctgccgacattcctcccatcgaggcgtcttcctatccgtcaccatcctcatctacctactcatgggtgagatgcacatggtagacaccgtgacatggcacaagatgcgaggggcacagatgattgtggccatgaaggcagtgtctctgggcttcgacctggaccggggcgaggtgggtacggtgccctcgccagtggagttcatgggctacctctacttcgtgggcaccatcgtcttcgggccctggatatccttccacagctacctacaagctgtccaaggccgcccactgagctgccggtggctgcagaaggtggcccggagcctggcactggccctgctgtgccttgtgctgtccacttgcgtgggcccctacctcttcccgtacttcatccccctcaacggtgaccgcctccttcgcaagggcaccatggtaaggtggctgcgagcctacgagagtgctgtctccttccacttcagcaactattttgtgggctttctttccgaggccacggccacgttggcgggggctggctttaccgaggagaaggatcacctggaatgggacctgacggtgtccaagccactgaatgtggagctgcctcggtcaatggtggaagttgtcacaagctggaacctgcccatgtcttattggctaaataactatgttttcaagaatgctctccgcctggggaccttctcggctgtgctggtcacctatgcagccagcgccctcctacatggcttcagtttccacctggctgcggtcctgctgtccctggcttttatcacttacgtggagcatgtcctccggaagcgcctggctcggatcctcagtgcctgtgtcttgtcaaagcggtgcccgccagactgttcgcaccagcatcgcttgggcctgggggtgcgagccttaaacttgctctttggagctctggccatcttccacctggcctacctgggctccctgtttgatgtcgatgtggatgacaccacagaggagcagggctacggcatggcatacactgtccacaagtggtcagagctcagctgggccagtcactgggtcacttttggatgctggatcttctaccgtctcataggctgaggcacatctgtggaccctcataaccctcttaagacccctctcagggtgccactgatgggggatgagggaaggccctctctctactccttgaccccctccatccttgacccccaacacctcaacacacacacacacacacacacacaaaatcacaccattttcatgcctgtcaatccccaccccaccacaaggcaggaagggggtggtgcctgctggggcctagagggggatgcttggggaaacagagaaggggagatccagggcctccccgccttccttcttcctttttatatacaatttgttattgtcaaataaaagtaggaaatattc

SEQ ID NO: 167839 - DNA, 1672 bp, Homo sapiens
  Payload ID: 13017
  Gene Symbol: PORCN
  Gene Name: porcupine homolog (Drosophila)
  Uniprot ID: Q9H237
  ENST ID: ENST00000361988
  CDS Start-End: 102-1454
ggaggaggcagcggcggcggcagcgcgtcctcggtccccaggaccacggcttctttcctgccagatctatccatctggccatccatccgtgggggtctgcaatggccacctttagccgccaggaatttttccagcagctactgcaaggctgtctcctgcctactgcccagcagggccttgaccagatctggctgctccttgccatctgcctcgcctgccgcctcctctggaggctcgggttgccatcctacctgaagcatgcaagcaccgtggcaggcgggttcttcagcctctaccacttcttccagctgcacatggtttgggtcgtgctgctcagcctcctgtgctacctcgtgctgttcctctgccgacattcctcccatcgaggcgtcttcctatccgtcaccatcctcatctacctactcatgggtgagatgcacatggtagacaccgtgacatggcacaagatgcgaggggcacagatgattgtggccatgaaggcagtgtctctgggcttcgacctggaccggggcgaggtgggtacggtgccctcgccagtggagttcatgggctacctctacttcgtgggcaccatcgtcttcgggccctggatatccttccacagctacctacaagctgtccaaggccgcccactgagctgccggtggctgcagaaggtggcccggagcctggcactggccctgctgtgccttgtgctgtccacttgcgtgggcccctacctcttcccgtacttcatccccctcaacggtgaccgcctccttcgcaagtggctgcgagcctacgagagtgctgtctccttccacttcagcaactattttgtgggctttctttccgaggccacggccacgttggcgggggctggctttaccgaggagaaggatcacctggaatgggacctgacggtgtccaagccactgaatgtggagctgcctcggtcaatggtggaagttgtcacaagctggaacctgcccatgtcttattggctaaataactatgttttcaagaatgctctccgcctggggaccttctcggctgtgctggtcacctatgcagccagcgccctcctacatggcttcagtttccacctggctgcggtcctgctgtccctggcttttatcacttacgtggagcatgtcctccggaagcgcctggctcggatcctcagtgcctgtgtcttgtcaaagcggtgcccgccagactgttcgcaccagcatcgcttgggcctgggggtgcgagccttaaacttgctctttggagctctggccatcttccacctggcctacctgggctccctgtttgatgtcgatgtggatgacaccacagaggagcagggctacggcatggcatacactgtccacaagtggtcagagctcagctgggccagtcactgggtcacttttggatgctggatcttctaccgtctcataggctgaggcacatctgtggaccctcataaccctcttaagacccctctcagggtgccactgatgggggatgagggaaggccctctctctactccttgaccccctccatccttgacccccaacacctcaacacacacacacacacacacacacaaaatcacaccattttcatgcctgtcaatccccaccccaccacaaggcaggaagggggtggtgcctgctgggg

SEQ ID NO: 167840 - DNA, 1368 bp, Homo sapiens
  Payload ID: 13017
  Gene Symbol: PORCN
  Gene Name: porcupine homolog (Drosophila)
  Uniprot ID: Q9H237
  ENST ID: ENST00000367574
  CDS Start-End: 1-1368
atggccacctttagccgccaggaatttttccagcagctactgcaaggctgtctcctgcctactgcccagcagggccttgaccagatctggctgctccttgccatctgcctcgcctgccgcctcctctggaggctcgggttgccatcctacctgaagcatgcaagcaccgtggcaggcgggttcttcagcctctaccacttcttccagctgcacatggtttgggtcgtgctgctcagcctcctgtgctacctcgtgctgttcctctgccgacattcctcccatcgaggcgtcttcctatccgtcaccatcctcatctacctactcatgggtgagatgcacatggtagacaccgtgacatggcacaagatgcgaggggcacagatgattgtggccatgaaggcagtgtctctgggcttcgacctggaccggggcgaggtgggtacggtgccctcgccagtggagttcatgggctacctctacttcgtgggcaccatcgtcttcgggccctggatatccttccacagctacctacaagctgtccaaggccgcccactgagctgccggtggctgcagaaggtggcccggagcctggcactggccctgctgtgccttgtgctgtccacttgcgtgggcccctacctcttcccgtacttcatccccctcaacggtgaccgcctccttcgcaagggcaccatggtaaggtggctgcgagcctacgagagtgctgtctccttccacttcagcaactattttgtgggctttctttccgaggccacggccacgttggcgggggctggctttaccgaggagaaggatcacctggaatgggacctgacggtgtccaagccactgaatgtggagctgcctcggtcaatggtggaagttgtcacaagctggaacctgcccatgtcttattggctaaataactatgttttcaagaatgctctccgcctggggaccttctcggctgtgctggtcacctatgcagccagcgccctcctacatggcttcagtttccacctggctgcggtcctgctgtccctggcttttatcacttacgtggagcatgtcctccggaagcgcctggctcggatcctcagtgcctgtgtcttgtcaaagcggtgcccgccagactgttcgcaccagcatcgcttgggcctgggggtgcgagccttaaacttgctctttggagctctggccatcttccacctggcctacctgggctccctgtttgatgtcgatgtggatgacaccacagaggagcagggctacggcatggcatacactgtccacaagtggtcagagctcagctgggccagtcactgggtcacttttggatgctggatcttctaccgtctcataggctga

SEQ ID NO: 167841 - DNA, 619 bp, Homo sapiens
  Payload ID: 13017
  Gene Symbol: PORCN
  Gene Name: porcupine homolog (Drosophila)
  ENST ID: ENST00000470275
  CDS Start-End: 146-406
tctacatgggctgggcagccccaaactgaaatgtgagtgccagagtgcatcctttaagcgaggtctgccccacggacacccgctccctctgtgtccctgctttgacagatctatccatctggccatccatccgtgggggtctgcaatggccacctttagccgccaggaatttttccagcagctactgcaaggctgtctcctgcctactgcccagcagggccttgaccagatctggctgctccttgccatctgcctcgcctgccgcctcctctggaggctcgctgcacatggtttgggtcgtgctgctcagcctcctgtgctacctcgtgctgttcctctgccgacattcctcccatcgaggcgtcttcctatccgtcaccatcctcatctacctactcatgggtgagatgcacatggtagacaccgtgacatggcacaagatgcgaggggcacagatgattgtggccatgaaggcagtgtctctgggcttcgacctggaccggggcgaggtgggtacggtgccctcgccagtggagttcatgggctacctctacttcgtgggcaccatcgtcttcgggccctggatatccttccacagctacctacaagctgtccaagg

SEQ ID NO: 167842 - DNA, 558 bp, Homo sapiens
  Payload ID: 13017
  Gene Symbol: PORCN
  Gene Name: porcupine homolog (Drosophila)
  ENST ID: ENST00000489940
  CDS Start-End: 266-558
gaggctgcccggaggaggcagcggcggcggcagcgcgtcctcggtccccaggaccacggcttctttcctgccagagcgactctaccttggaaaccagggattccccttcccgtcgcccgccccatttgatatatgggcctgaaatgtatgccatcccatcaccatcggactggactgttcacagcactggagagacagaggtccttcattcactccaggtcacaggctatctatccatctggccatccatccgtgggggtctgcaatggccacctttagccgccaggaatttttccagcagctactgcaaggctgtctcctgcctactgcccagcagggccttgaccagatctggctgctccttgccatctgcctcgcctgccgcctcctctggaggctcgggttgccatcctacctgaagcatgcaagcaccgtggcaggcgggttcttcagcctctaccacttcttccagctgcacatggtttgggtcgtgctgctcagcctcctgtgctacctcgtgctgttcctctgccgacattcctcccatcgaggcgtctt

SEQ ID NO: 167843 - DNA, 1328 bp, Homo sapiens
  Payload ID: 13017
  Gene Symbol: PORCN
  Gene Name: porcupine homolog (Drosophila)
  ENST ID: ENST00000472520
  CDS Start-End: 150-302
gggagccgctgctggtcccggccttgcggcctgcgggggaggctgcccggaggaggcagcggcggcggcagcgcgtcctcggtccccaggaccacggcttctttcctgccagatctatccatctggccatccatccgtgggggtctgcaatggccacctttagccgccaggaatttttccagcagctactgcaaggctgtctcctgcctactgcccagcagggccttgaccagatctggctgctccttgccatctgcctcgcctgccgcctcctctggaggctcgtgagatgcacatggtagacaccgtgacatggcacaagatgcgaggtggctgcgagcctacgagagtgctgtctccttccacttcagcaactattttgtgggctttctttccgaggccacggccacgttggcgggggctggctttaccgaggagaaggatcacctggaatgggacctgacggtgtccaagccactgaatgtggagctgcctcggtcaatggtggaagttgtcacaagctggaacctgcccatgtcttattggctaaataactatgttttcaagaatgctctccgcctggggaccttctcggctgtgctggtcacctatgcagccagcgccctcctacatggcttcagtttccacctggctgcggtcctgctgtccctggcttttatcacttacgtggagcatgtcctccggaagcgcctggctcggatcctcagtgcctgtgtcttgtcaaagcggtgcccgccagactgttcgcaccagcatcgcttgggcctgggggtgcgagccttaaacttgctctttggagctctggccatcttccacctggcctacctgggctccctgtttgatgtcgatgtggatgacaccacagaggagcagggctacggcatggcatacactgtccacaagtggtcagagctcagctgggccagtcactgggtcacttttggatgctggatcttctaccgtctcataggctgaggcacatctgtggaccctcataaccctcttaagacccctctcagggtgccactgatgggggatgagggaaggccctctctctactccttgaccccctccatccttgacccccaacacctcaacacacacacacacacacacacacaaaatcacaccattttcatgcctgtcaatccccaccccaccacaaggcaggaagggggtggtgcctgctggggcctagagggggatgcttggggaaacagagaaggggagatccagggcctccccgccttccttcttcctttttatatacaatttgttattgtcaaataaaagtaggaaatattcaa

SEQ ID NO: 167844 - DNA, 1975 bp, Homo sapiens
  Payload ID: 13017
  Gene Symbol: PORCN
  Gene Name: porcupine homolog (Drosophila)
  ENST ID: ENST00000485288
  CDS Start-End: 172-624
gagccgctgctggtcccggccttgcggcctgcgggggaggctgcccggaggaggcagcggcggcggcagcgcgtcctcggtccccaggaccacggcttctttcctgccaggtcacaggctgtgcgtgtgcatgccgaacacccacatgcacacagttggtggctcagtctgatgtacctgacttctcacgccttcccccagtcctccagtaccgtgcctctacatgggctgggcagccccaaactgaaatgtgagtgccagagtgcatcctttaagcgaggtctgccccacggacacccgctccctctgtgtccctgctttgacagatctatccatctggccatccatccgtgggggtctgcaatggccacctttagccgccaggaatttttccagcagctactgcaaggctgtctcctgcctactgcccagcagggccttgaccagatctggctgctccttgccatctgcctcgcctgccgcctcctctggaggctcgctgcacatggtttgggtcgtgctgctcagcctcctgtgctacctcgtgctgttcctctgccgacattcctcccatcgaggcgtcttcctatccgtcaccatcctcatctacctactcatgggtgagatgcacatggtagacaccgtgacatggcacaagatgcgaggggcacagatgattgtggccatgaaggcagtgtctctgggcttcgacctggaccggggcgaggtgggtacggtgccctcgccagtggagttcatgggctacctctacttcgtgggcaccatcgtcttcgggccctggatatccttccacagctacctacaagctgtccaaggccgcccactgagctgccggtggctgcagaaggtggcccggagcctggcactggccctgctgtgccttgtgctgtccacttgcgtgggcccctacctcttcccgtacttcatccccctcaacggtgaccgcctccttcgcaagtggctgcgagcctacgagagtgctgtctccttccacttcagcaactattttgtgggctttctttccgaggccacggccacgttggcgggggctggctttaccgaggagaaggatcacctggaatgggacctgacggtgtccaagccactgaatgtggagctgcctcggtcaatggtggaagttgtcacaagctggaacctgcccatgtcttattggctaaataactatgttttcaagaatgctctccgcctggggaccttctcggctgtgctggtcacctatgcagccagcgccctcctacatggcttcagtttccacctggctgcggtcctgctgtccctggcttttatcacttacgtggagcatgtcctccggaagcgcctggctcggatcctcagtgcctgtgtcttgtcaaagcggtgcccgccagactgttcgcaccagcatcgcttgggcctgggggtgcgagccttaaacttgctctttggagctctggccatcttccacctggcctacctgggctccctgtttgatgtcgatgtggatgacaccacagaggagcagggctacggcatggcatacactgtccacaagtggtcagagctcagctgggccagtcactgggtcacttttggatgctggatcttctaccgtctcataggctgaggcacatctgtggaccctcataaccctcttaagacccctctcagggtgccactgatgggggatgagggaaggccctctctctactccttgaccccctccatccttgacccccaacacctcaacacacacacacacacacacacacaaaatcacaccattttcatgcctgtcaatccccaccccaccacaaggcaggaagggggtggtgcctgctggggcctagagggggatgcttggggaaacagagaaggggagatccagggcctccccgccttccttcttcctttttatatacaatttgttattgtcaaataaaagtaggaaatattc

SEQ ID NO: 167845 - DNA, 745 bp, Homo sapiens
  Payload ID: 13017
  Gene Symbol: PORCN
  Gene Name: porcupine homolog (Drosophila)
  ENST ID: ENST00000528612
  CDS Start-End: 131-391
ggccttgcggcctgcgggggaggctgcccggaggaggcagcggcggcggcagcgcgtcctcggtccccaggaccacggcttctttcctgccagatctatccatctggccatccatccgtgggggtctgcaatggccacctttagccgccaggaatttttccagcagctactgcaaggctgtctcctgcctactgcccagcagggccttgaccagatctggctgctccttgccatctgcctcgcctgccgcctcctctggaggctcgctgcacatggtttgggtcgtgctgctcagcctcctgtgctacctcgtgctgttcctctgccgacattcctcccatcgaggcgtcttcctatccgtcaccatcctcatctacctactcatgggtgagatgcacatggtagacaccgtgacatggcacaagatgcgaggggcacagatgattgtggccatgaaggcagtgtctctgggcttcgacctggaccggggcgaggtgggtacggtgccctcgccagtggagttcatgggctacctctacttcgtgggcaccatcgtcttcgggccctggatatccttccacagctacctacaagctgtccaaggccgcccactgagctgccggtggctgcagaaggtggcccggagcctggcactggccctgctgtgccttgtgctgtccacttgcgtgggcccctacctcttcccgtacttcatccccctcaacggtgaccgcctccttcgcaa

SEQ ID NO: 167846 - DNA, 1371 bp, Homo sapiens
  Payload ID: 13017
  Gene Symbol: PORCN
  Gene Name: porcupine homolog (Drosophila)
  Uniprot ID: Q9H237
  ENST ID: ENST00000537758
  CDS Start-End: 1-1371
atggccacctttagccgccaggaatttttccagcagctactgcaaggctgtctcctgcctactgcccagcagggccttgaccagatctggctgctccttgccatctgcctcgcctgccgcctcctctggaggctcgggttgccatcctacctgaagcatgcaagcaccgtggcaggcgggttcttcagcctctaccacttcttccagctgcacatggtttgggtcgtgctgctcagcctcctgtgctacctcgtgctgttcctctgccgacattcctcccatcgaggcgtcttcctatccgtcaccatcctcatctacctactcatgggtgagatgcacatggtagacaccgtgacatggcacaagatgcgaggggcacagatgattgtggccatgaaggcagtgtctctgggcttcgacctggaccggggcgaggtgggtacggtgccctcgccagtggagttcatgggctacctctacttcgtgggcaccatcgtcttcgggccctggatatccttccacagctacctacaagctgtccaaggccgcccactgagctgccggtggctgcagaaggtggcccggagcctggcactggccctgctgtgccttgtgctgtccacttgcgtgggcccctacctcttcccgtacttcatccccctcaacggtgaccgcctccttcgcaacaagaaacgcaaagccaggtggctgcgagcctacgagagtgctgtctccttccacttcagcaactattttgtgggctttctttccgaggccacggccacgttggcgggggctggctttaccgaggagaaggatcacctggaatgggacctgacggtgtccaagccactgaatgtggagctgcctcggtcaatggtggaagttgtcacaagctggaacctgcccatgtcttattggctaaataactatgttttcaagaatgctctccgcctggggaccttctcggctgtgctggtcacctatgcagccagcgccctcctacatggcttcagtttccacctggctgcggtcctgctgtccctggcttttatcacttacgtggagcatgtcctccggaagcgcctggctcggatcctcagtgcctgtgtcttgtcaaagcggtgcccgccagactgttcgcaccagcatcgcttgggcctgggggtgcgagccttaaacttgctctttggagctctggccatcttccacctggcctacctgggctccctgtttgatgtcgatgtggatgacaccacagaggagcagggctacggcatggcatacactgtccacaagtggtcagagctcagctgggccagtcactgggtcacttttggatgctggatcttctaccgtctcataggctga

SEQ ID NO: 167847 - DNA, 1282 bp, Homo sapiens; identical to SEQ ID NO: 141697
  Payload ID: 13018
  Gene Symbol: HMBS
  Gene Name: Porphobilinogen deaminase
  ENST ID: ENST00000630018
  CDS Start-End: 154-399

SEQ ID NO: 167848 - DNA, 507 bp, Homo sapiens; identical to SEQ ID NO: 141690
  Payload ID: 13018
  Gene Symbol: HMBS
  Gene Name: Porphobilinogen deaminase
  ENST ID: ENST00000629519
  CDS Start-End: 150-507

SEQ ID NO: 167849 - DNA, 755 bp, Homo sapiens; identical to SEQ ID NO: 141693
  Payload ID: 13018
  Gene Symbol: HMBS
  Gene Name: Porphobilinogen deaminase
  ENST ID: ENST00000630812
  CDS Start-End: 195-755

SEQ ID NO: 167850 - DNA, 1155 bp, Homo sapiens; identical to SEQ ID NO: 141692
  Payload ID: 13018
  Gene Symbol: HMBS
  Gene Name: Porphobilinogen deaminase
  ENST ID: ENST00000626431
  CDS Start-End: 595-1155

SEQ ID NO: 167851 - DNA, 1501 bp, Homo sapiens; identical to SEQ ID NO: 141686
  Payload ID: 13018
  Gene Symbol: HMBS
  Gene Name: Porphobilinogen deaminase
  ENST ID: ENST00000627066
  CDS Start-End: 152-1237

SEQ ID NO: 167852 - DNA, 1559 bp, Homo sapiens; identical to SEQ ID NO: 141695
  Payload ID: 13018
  Gene Symbol: HMBS
  Gene Name: Porphobilinogen deaminase
  ENST ID: ENST00000628117
  CDS Start-End: 292-1326

SEQ ID NO: 167853 - DNA, 936 bp, Homo sapiens; identical to SEQ ID NO: 141696
  Payload ID: 13018
  Gene Symbol: HMBS
  Gene Name: Porphobilinogen deaminase
  ENST ID: ENST00000627143
  CDS Start-End: 128-373

SEQ ID NO: 167854 - DNA, 1469 bp, Homo sapiens; identical to SEQ ID NO: 141694
  Payload ID: 13018
  Gene Symbol: HMBS
  Gene Name: Porphobilinogen deaminase
  ENST ID: ENST00000630574
  CDS Start-End: 292-1206

SEQ ID NO: 167855 - DNA, 708 bp, Homo sapiens; identical to SEQ ID NO: 141699
  Payload ID: 13018
  Gene Symbol: HMBS
  Gene Name: Porphobilinogen deaminase
  ENST ID: ENST00000631122
  CDS Start-End: 135-708

SEQ ID NO: 167856 - DNA, 1351 bp, Homo sapiens; identical to SEQ ID NO: 141689
  Payload ID: 13018
  Gene Symbol: HMBS
  Gene Name: Porphobilinogen deaminase
  ENST ID: ENST00000629150
  CDS Start-End: 121-1086

SEQ ID NO: 167857 - DNA, 832 bp, Homo sapiens; identical to SEQ ID NO: 141691
  Payload ID: 13018
  Gene Symbol: HMBS
  Gene Name: Porphobilinogen deaminase
  ENST ID: ENST00000628160
  CDS Start-End: 120-311

SEQ ID NO: 167858 - DNA, 1548 bp, Homo sapiens; identical to SEQ ID NO: 141688
  Payload ID: 13018
  Gene Symbol: HMBS
  Gene Name: Porphobilinogen deaminase
  ENST ID: ENST00000630689
  CDS Start-End: 264-1298

SEQ ID NO: 167859 - DNA, 1347 bp, Homo sapiens; identical to SEQ ID NO: 141698
  Payload ID: 13018
  Gene Symbol: HMBS
  Gene Name: Porphobilinogen deaminase
  ENST ID: ENST00000625884
  CDS Start-End: 105-1097

SEQ ID NO: 167860 - DNA, 1411 bp, Homo sapiens; identical to SEQ ID NO: 141687
  Payload ID: 13018
  Gene Symbol: HMBS
  Gene Name: Porphobilinogen deaminase
  ENST ID: ENST00000627967
  CDS Start-End: 111-1145

SEQ ID NO: 167861 - DNA, 11114 bp, Homo sapiens
  Payload ID: 13019
  Gene Symbol: PGAP1
  Gene Name: post-GPI attachment to proteins 1
  Uniprot ID: Q75T13
  ENST ID: ENST00000354764
  CDS Start-End: 116-2884
cggctccgggggtggcggtcggacagtgtctagcacgctcagtccgggcttggggccccgcggcggagaaggaggtagagggggcggcggcggcggcggcggtggtggcggcaccatgtttcttcactcagttaatctctggaacctggcgttttatgtcttcatggtctttctggcaaccctggggctgtgggatgtcttcttcggcttcgaggagaataagtgcagtatgagctacatgtttgagtacccggagtatcagaaaatagaacttccaaagaaactggcaaaacgctatcccgcatatgagttgtatctttatggagagggatcctatgctgaagaacacaaaattctccctttgacgggtattccagttctctttcttcctggtaatgctggaagttataagcaagttcgttctattggctccattgcacttagaaaagcagaggacattgacttcaagtaccactttgacttctttagtgtgaacttcaatgaagaactggtggctttgtatggtggaagtcttcagaagcagaccaagtttgtacatgaatgtattaaaacaattctcaaactctataagggtcaagaatttgctccaaaaagtgtggcaataattggtcattctatgggtggccttgttgcaagagcattgcttacactgaaaaattttaagcatgatctgataaatcttcttattacacaagccacacctcatgttgctcctgtgatgccattagatcgtttcattacagatttttatacgactgtaaacaactattggattctaaatgctcgacacataaatttaaccacactttctgtagctggaggattccgggattaccaagttcgttcaggattgacttttctaccaaaattaagccatcataccagtgccttatctgttgtgagttcagcagtgcctaagacctgggtctcaacagaccacctctccattgtgtggtgtaaacaattgcagttgactacagttcgagcattctttgatcttattgatgctgatactaaacaaataactcaaaattccaagaagaaactgtcagttttgtatcaccactttataagacacccatcaaaacattttgaggaaaatccagctataatttctgacttaacagggacatctatgtgggttctagtaaaagtgtccaaatggacctatgtagcttacaacgaatctgagaagatatattttacatttcctcttgaaaatcatagaaaaatctacactcatgtctattgtcagagcactatgctggatacaaatagttggatttttgcttgcataaacagcacttctatgtgcctgcaaggggttgatttatcatggaaagctgaactgctgccaacaattaagtatctgacattaagacttcaagactatccatctttgtctcatcttgttgtttatgtaccatctgttcgtggaagtaagtttgttgtagattgtgaattctttaaaaaagagaaaagatacatacagcttcctgtaactcatcttttttcctttggattgtcttcaaggaaagtggtgttaaatacaaatggcctatactacaatctagagcttctgaactttggacagatataccaagcttttaaaatcaacgtggtaagcaagtgctcagcagtcaaagaagaaataaccagtatctatagacttcatattccttggtcttatgaagattcactaaccattgcacaggctccatcttccacagaaatttctctgaaactccatattgctcaaccagaaaacaatacccatgtggcattatttaaaatgtacacgtcatcagactgtcggtacgaggtgacagttaagacttccttttcacaaatacttggacaggtagttagatttcatggtggagctcttcctgcttatgtcgtatctaatatccttcttgcttatagaggacagttatattctcttttctcaacaggttgttgcttagaatatgctaccatgttggataaagaagccaaaccatacaaagttgatccttttgtaattatcattaagtttctgttggggtataaatggtttaaagaattgtgggatgtattattgttaccagaattagatgccgtcattttaacttgtcagagtatgtgtttccccctgatatccttgattctctttctgtttggaacgtgtactgcctactggagtggcctactgtcttctgcatctgtgagacttctttcttcattgtggctagctttgaaaagaccctctgaacttcctaaagatatcaagatgatatcaccagacttgccctttttgacaattgtcttgatcatagttagttggacaacttgtggagcactagccatacttctttcttatctttactatgtgtttaaggttgttcatctgcaagccagcttaacaacttttaagaatagccagcctgtgaatcccaaacactctagaagaagtgaaaagaaatccaatcatcataaagactcctcaatacaccatcttcgtttatctgccaacgatgctgaagatagccttcgcatgcacagtactgtgattaacttactaacatggattgtattactcagcatgccttctctaatttattggctaaagaatcttaggtattattttaaacttaatcctgatccatgtaaacctttggcatttatccttattccgactatggcaattcttggaaatacttacactgtttcaataaaatcaagtaaattgttgaagactacttcacaatttccacttcctctggctgttggtgtgattgcttttgggtcagcacatttatataggcttccatgctttgtcttcattcctcttttactccatgcattatgcaactttatgtaagattggacttaaggaatgatgaagataatttatgtgtttagggccagtgataagagggaacacacagatccatcagtatggacagcaagatcctttggagaagacaagtctatttttacaatattgaaaataggaaattagttttgtaatgtttgagggaagtagttgaagcatggttttgttttgtggtgtggaatccatgtagtaatcatttttgaaaaattcatgaagggatatatggtgatcactatcattgaggactcctgtgcatataaaatagtctgttttatcaactgtacgagaagtctgatatgagagatttagtagatgcagcattatttgcagtctcactgcaagcattctgctcatttcatcaaactttttttcacaaaagtaggttattttgaatttgctatagtttacctattaagaaataagtctttaaataactgatgaaatttatagctgtttggtttctcaaaggttaaatagccacagaaagcctttggttagtttttggcagccaccatgaacaaagtggatcttgtcttcttacatctatgaaaatagagctttgaatggtaaggagatatgttttcttggtaaccaatgcaagattgatgggtggaaacatgattcaaacttacacaatttttcttgctatttttcaaatatgaatcttactatatattctcggtgaacatcaggagactattaaagaggtctgctgttaaatgtaaagaaaaaatgctcgtagctatttgcttcctggtattggagcagttcagttgtttagtttataccattggattcaattcattgcaccatggttgccaaaagtgcctgaggtcataatggattgttaaaataactaaattccagtggttggaaactctaggtttgtaccattttttctgctgtgggaaaaaacaacaacaacaacatgatcaaggtaacatcacatttgatgtataatattatactattaatggaatatcagtagacaactgttaacccattagtagcatgagtataaacagtacacctgaataaattggagacattagccactaggtttaacagtggaatcttgatttgcctaggtgacttctgggattactgtttgacaaataagagtaacattttatttcatttcagaatttacgtcacttttagctacaagagtaggaagaaggtaatcggcaaggcagaagagtatactctttgccttaggatagcgtaaactcaggctgagacatacccggcttatagagttcttctagatgtgtagactgtaaatgcccaaatcctctcaactaaagttttagtgattccacaaagcctctcatgtaaatttccagtgattccaccattgcacttgtgaatatgtatccttgttagtacccagggatgtcctcgagcaccagttttattttatctgccattgcatctggattccattacagcctctcagctgttactgcctgtggacagttacttctgcttactgcctgtagagagttacctaacttctcttctcagttcttcctcaggtcctggctattttggcctcagttgaagggagtcttgctctcatctctgagggttttaagtttgtttgatcccattgttgtcttttctagctttgagcatgtttttcagtattcatattttaacttactgagaacattaaagggaaatgataaactcgtggtggggatatggcagacaggtgcttgtttgtttgagagaagtagcagaagagataaaatacaaagtgctatatgtttcagctggagaggaaagagagagaatttattagattatatacttgtcccatggcataccacgtatatgtttaaatagggacacatctccctatgtttaactatacttataaacaactttgatacacattgcgtcttttattctgtcacctgatattttagtgtatctcaagttacagattacatgtgtccttaaactatttctgaatttggacttagttccatatacagaaagaactttagaaaattcattaatttggatcttctattgatagccataaatattatgtttatgtattctaaaacctctttgtttagttagtactgttcatgaatgtaacaagcttcaatttctcatttgtgagtagtacatttgctttttgtttgtttgtttgtttgtttttgagatggagtctcacgctgtcaccaggctggagtgcagtggcgcgatttcagctcactgcaacctccacctcccaggtgcaagtgatgcccctgcctcagcctcccgagtagctgggactacagacacccgccaccacacctggctaatttttgtatttttagtagagacggggtttcaccatgttggctaggctggtctcaaactcttgacctcgtgatttgcccgcctctgcctccccaaagtgctgggattacaggcgtgagccaccacgcccagccgtacatttactttttaaagcagcagactaggtacactaattctcactcaaatattttcatgggaatgtagttatcaccaagtcctaaagtattatttatgccaaaaaaaatttcattttaaggactacaaaaatgattctaattaaacattttataatcaatagtaggttgggtctttagccattatatgtgtatatatacagacacatatgtatacacttacattttgacagggtcttcattgagtcttgatgcactttaaacccagctggctaccagagatgcgaaggtgggctctttgaagattagcaaaatggacgtttctgtcacttgagaaaaggaaagttctttgcctttaaattacacagttttcatcatgcccacaatctatattattggctggttaaacagcactgccctattagcaatgttaacaaaaatgaaattatttattggcggttatagattatctaattcaggaaatttctgagctcaacttttacagcaactgttatgccttctaatttagcaattgagttatgagtaagttttgtgcttaactcctagaccctattgttgataaccagatcaaatatagtctgtacagaggaaaacactgggaacatttagtatttctaaagcctcctttggagttactactgattgtaatttggaactgataataggtagagattgctaacactgttttttttcctggatcttttttatgccagaaattaaacaggttctgctaactcttttttttctcttggttatcaccagaatgaaaatatttaaagtgatgactctagaaaagccatctgtgcctggttaacattgagtttgagtctcttcaatatatattgatcatgtattgattaatctttattttttcatattttggctagacaaattcagatctatataatggaataccccttcttgagtgaactatactactaatctacatgattatatagtaaggaaaaaagaagaaataactgtaataggcatagtgtttgttgttggttgtcttgtcattcatgtgatactactcatttccaaaattcacacaaacttacatgaggtggattatttgttttgttcattatttagttcctatatgttttttctttagaaacagagtctcattctgtcacccaggctggagtccaatggggcggtcatagttcactgcagccttgaactctttggctcatgtgatcctcccatctcagcctcccacagcaggtgagactacaggtacatgccactgtgcctgactttttaatttttttgtagagacgaggtttcagtttgttgcccaagctgatcttgaactcctggtttcaagcgatcctcccacctcggcctcccaaagtagtgggatttcaggcatgaccacctggcctagttcctatacttttcttaattcttcagacttctcacatttagtatagtgcattcatttcatcttgctgtttattagcaccctttgtggccaagggaaataaaaggtggtaaaattcagttttcagtttagttcttgaaagctctgggaaatggaggaaacacaaaactatgaattaaactagggctgttgatttctgaacccccagataaatcagttgacccacattttcattttaggtgttaggtccaaattagcataatgtcttgcattattattaggttcagtgtgaaactttacagtgctgcatttgaagtttagtaactggttattattaatcatttgggaaaaatgaaaatgtgttgggactttctatgactaggcatttgttgattatttttcatgattgctttttgttttctcattgtgtaggatttgtgaacttgtatattacaggaaacaagatactttgtaaaatttactggggaaaatccatttggagtgcatgacatttgccaggataagaaagcagtaatatgtttgtattataaaattacaccctgccagaaaactttctttcctagtaaggtaaatgtagaagggacttttacagcatagtaagttgattaggagccaaaattttattccagtttttttttgaactaagaatgttttaaattctgtaatgaacttttatgtttacccattactcatgcattctttcacaatatgtttaatagcctgaggaaataggaaagctgtgaagctactaccattctttacttttaataagaataataggaaagaaaagtcaggtcagtaatccaaatccaaatatgtatactgcaaatgctcaagaagtcacattttttgataaattgtattgagtacagaagaacttatatgaatttattatctgttaataacttagttttgacaacagaataacatttggaaattgtgagaataatcaagctgtttttccattaacagtgtaaattcataacatgtccttcaaaaggtgatattctaagctgtcttaattgtctacggttgataacttttaaataaagtacaggactttctgaaagtgtttggcatgttatgctgccaaaaacaatctgtgttttgaaataccaattaatcagttaatttctgaagactttgtataggacttgatatatgagtcagaatctgtctgtactcattctgtacattgtaactttgaacacttatgaaaaactgtatctgttggtgtgttttgattagttagtgtagatttgtttgcgtatttgaattccgattttagtttaggaagactaaaagtagccatttttgtaaagttcatatgctattttttaatgtcatttttgtttttaatatttatacaatagtgatgttactagtaaaaaatgtttatagataacacgtagagctattaactgttcaaaagcctacatgataggcatattttgtatttcgtgttgcactcgttctgtttcatattggactttttacatcccttttttagcaaaaaaaagagacacatttgaattctctttagcataaagctgtgcattggaaactatgtgactgtatccatacggttagcaaaatactctttgccaccaaaggtaaatgaaactgtaaaatacctctggatatttgtgccaatgaacttttcttagcatattaggattaaagcaaaaataatcttttcagtatgtttcatctaggacttacaataaatgtttaaaccatgaaaacttatatttcataccctaatttttctttgaaaatattcaagatttgtagcctagtgtgttctattttgtgtgattgcttgaatgttttctgattttattgggtaaaagtttgcctagtaatgatctttcagcaattcattgaaataattatttgaagtaatcttgcttcagatttaatttgtgatgtacattgttgtacaagccattttagtacaggtgtctcatttatgtagttgaaaggtgactgtggaatttcttttgttttttatgtatttccattcagtctctttatatagtcacatgtttcacaggggaacttgtccactggaacctaacatagtacaaccttttaatatgcgtatcttaaaggaaaatattataaaacaagatattaatactaaagtgttaacattaatatgttgttctcatggaagaaaagtagaaaatgtgataggcttagaaattattttttatcagcattaagtgcttcaatttctccccataaagattctaaggaaatttcagttcctcatattatagttttccccataatttaatattactaagtatttctctgcccagtaatgttgatgcagtttgcataaatagccttggaagtaaggaggcaggacagaaagccaaatatcgaaatctctggccttgatttagtgacagtttattctaatggggaccataggtgttattagtaaaaagatagtgtacaaggcctaagttcagtttacattgttctttgaaatgagttcatcttttgtgttgaataattgtattctaagtaggagatgcctgtatttaacataatcatgctttctatataatcaaatatgtatttgttggaatactggtagaaataaccttcccttcctccactgtgcagtggaaaaaaaactcccgatttatactgtatataaattaggaaattatgttacatatttacatttttaaaaatataaaaatgacatattattttgaagtgattgtattatagtttctgaagcttatgactggctataaatataacaacatacccatgagaaaccagaccaaaattgaatatatatcatcactgtgaccttgaacttatagtcatttgggataaaacagagtgtgccttgaaatgataaagagtgccctgcaattttataactgtacattttattatgggtggtcctctcaaattggccccaaatccttgtcttcgaggttggtgaaataaaagtttaaaataaaagttgactggtatttcctttagtatttccagaactattgctgtagaggcctcccttaattttcagagttctcattttgaattaaagtagacttacgctacatagatgtagaaaattaggtttggcttaggtttctgaaaaaatattctaggagaaggtggtagcattgttctgaacttaccacacttggaaaaactaatcttcaaatgtaattttttgtcttattaatgagtaatctgtcaaagacatgaattctttgacttgtgctcattctttctgaacttattgaggcttatatatatcaaataaggttaatttacacaataattatttttaataattaataaactcattcatgtagtatattttaaaacattatttcctctcatttttccttctcttttttcttcctatatatttttaaggcttcaagagaaaacgggcttcagtttttaaaaaaatgtagacttgcatttttactgtgcttatttaaaataatggatataatttatattaaggtccaaattattttattcacaggataatcatggtctctgataaaagatgcccacatttctgtgtactcacagttgttgtatatttttcaatttcaattttgaaagtaaactcaacacattgttttcccattttacctccactacctactcgccagacaaaaatatagatttctctaaaaacacatacaaagaaaatgtctttccttaaaacatgatcttattgacatgaaggtagtttgagcaagggtatgtaataaaataaatggctctcaacctgcatcaatttttatactatagttaaaaaatttatagaggacaacctatgtgttatgctgagatagactcagtaatcatttgtttgcaaattgattatttttttctcatccatccagaaagtacagtgcataacaacaacacttaacaagtgcagaggaacctgtcctgtagtatataataaaaaatgattgtcaccttgctgatctttccatttaaacatgcatgatctccagtactttgtacaatgtatagtatattaaatacatttatgtgtaattttgtgtgtatttttatatggtataattaaaattattacatttatgtgattgtaattcacaaaaagtactacttactatattctgtagagtgtgttgtgaatgtttttacctgtgtttgagcattatggtgtaggtttaatagatgaatatttgccttcagtctctgctcaggtattaatgtgtagtaatttttggtgctttctttttaatctgtgataatctggtgttctgaatgttcaaaaataaatttggttgaatacgca

SEQ ID NO: 167862 - DNA, 677 bp, Homo sapiens
  Payload ID: 13019
  Gene Symbol: PGAP1
  Gene Name: post-GPI attachment to proteins 1
  ENST ID: ENST00000374738
  CDS Start-End: 130-677
gcgcggctggggctcggctccgggggtggcggtcggacagtgtctagcacgctcagtccgggcttggggccccgcggcggagaaggaggtagagggggcggcggcggcggcggcggtggtggcggcaccatgtttcttcactcagttaatctctggaacctggcgttttatgtcttcatggtctttctggcaaccctggggctgtgggatgtcttcttcggcttcgaggagaataagtgcagtatgagctacatgtttgagtacccggagtatcagagttcagcagtgcctaagacctgggtctcaacagaccacctctccattgtgtggtgtaaacaattgcagttgactacagttcgagcattctttgatcttattgatgctgatactaaacaaataactcaaaattccaagaagaaactgtcagttttgtatcaccactttataagacacccatcaaaacattttgaggaaaatccagctataatttctgacttaacagggacatctatgtgggttctagtaaaagtgtccaaatggacctatgtagcttacaacgaatctgagaagatatattttacatttcctcttgaaaatcatagaaaaatctacactcatgtctattgtcagagcactatgctggatacaaatagttggatttttgcttgcataaacag

SEQ ID NO: 167863 - DNA, 1246 bp, Homo sapiens
  Payload ID: 13019
  Gene Symbol: PGAP1
  Gene Name: post-GPI attachment to proteins 1
  ENST ID: ENST00000409188
  CDS Start-End: 186-1100
tttttcctaacattctagtgttttgaagctgctacaagtgattgatttcgagctttttttaaaaactcctcctttgtacaaaacagaaccgaaattcttcaaaacgaattaagtcatttgcgagtttgaatggaagctggacgaaattgcctcctccagttaacgtggaacccattccccaagagatggaggttctggagagcaagaaaatagaacttccaaagaaactggcaaaacgctatcccgcatatgagttgtatctttatggagagggatcctatgctgaagaacacaaaattctccctttgacgggtattccagttctctttcttcctggtaatgctggaagttataagcaagttcgttctattggctccattgcacttagaaaagcagaggacattgacttcaagtaccactttgacttctttagtgtgaacttcaatgaagaactggtggctttgtatggtggaagtcttcagaagcagaccaagtttgtacatgaatgtattaaaacaattctcaaactctataagggtcaagaatttgctccaaaaagtgtggcaataattggtcattctatgggtggccttgttgcaagagcattgcttacactgaaaaattttaagcatgatctgataaatcttcttattacacaagccacacctcatgttgctcctgtgatgccattagatcgtttcattacagatttttatacgactgtaaacaactattggattctaaatgctcgacacataaatttaaccacactttctgtagctggaggattccgggattaccaagttcgttcaggattgacttttctaccaaaattaagccatcataccagtgccttatctgttgtgagttcagcagtgcctaagacctgggtctcaacagaccacctctccattgtgtggtgtaaacaattgcagttgactacagttcgagcattctttgatcttattgatgctgatactaaacaaataactcaaaattccaagaagaaactgtcagttttgtatcaccactttataagacacccatcaaaacattttgaggaaaatccagctataatttctgacttaacaggaatctgagaagatatattttacatttcctcttgaaaatcatagaaaaatctacactcatgtctattgtcagagcactatgctggatacaaatagttggatttttgcttgcataaacagcacttctatgtgcctgcaaggggttgatttatcat

SEQ ID NO: 167864 - DNA, 2443 bp, Homo sapiens
  Payload ID: 13019
  Gene Symbol: PGAP1
  Gene Name: post-GPI attachment to proteins 1
  Uniprot ID: Q75T13
  ENST ID: ENST00000409475
  CDS Start-End: 115-1893
ggctccgggggtggcggtcggacagtgtctagcacgctcagtccgggcttggggccccgcggcggagaaggaggtagagggggcggcggcggcggcggcggtggtggcggcaccatgtttcttcactcagttaatctctggaacctggcgttttatgtcttcatggtctttctggcaaccctggggctgtgggatgtcttcttcggcttcgaggagaataagtgcagtatgagctacatgtttgagtacccggagtatcagaaaatagaacttccaaagaaactggcaaaacgctatcccgcatatgagttgtatctttatggagagggatcctatgctgaagaacacaaaattctccctttgacgggtattccagttctctttcttcctggtaatgctggaagttataagcaagttcgttctattggctccattgcacttagaaaagcagaggacattgacttcaagtaccactttgacttctttagtgtgaacttcaatgaagaactggtggctttgtatggtggaagtcttcagaagcagaccaagtttgtacatgaatgtattaaaacaattctcaaactctataagggtcaagaatttgctccaaaaagtgtggcaataattggtcattctatgggtggccttgttgcaagagcattgcttacactgaaaaattttaagcatgatctgataaatcttcttattacacaagccacacctcatgttgctcctgtgatgccattagatcgtttcattacagatttttatacgactgtaaacaactattggattctaaatgctcgacacataaatttaaccacactttctgtagctggaggattccgggattaccaagttcgttcaggattgacttttctaccaaaattaagccatcataccagtgccttatctgttgtgagttcagcagtgcctaagacctgggtctcaacagaccacctctccattgtgtggtgtaaacaattgcagttgactacagttcgagcattctttgatcttattgatgctgatactaaacaaataactcaaaattccaagaagaaactgtcagttttgtatcaccactttataagacacccatcaaaacattttgaggaaaatccagctataatttctgacttaacagggacatctatgtgggttctagtaaaagtgtccaaatggacctatgtagcttacaacgaatctgagaagatatattttacatttcctcttgaaaatcatagaaaaatctacactcatgtctattgtcagagcactatgctggatacaaatagttggatttttgcttgcataaacagcacttctatgtgcctgcaaggggttgatttatcatggaaagctgaactgctgccaacaattaagtatctgacattaagacttcaagactatccatctttgtctcatcttgttgtttatgtaccatctgttcgtggaagtaagtttgttgtagattgtgaattctttaaaaaagagaaaagatacatacagcttcctgtaactcatcttttttcctttggattgtcttcaaggaaagtggtgttaaatacaaatggcctatactacaatctagagcttctgaactttggacagatataccaagcttttaaaatcaacgtggtaagcaagtgctcagcagtcaaagaagaaataaccagtatctatagacttcatattccttggtcttatgaagattcactaaccattgcacaggctccatcttccacagaaatttctctgaaactccatattgctcaaccagaaaacaatacccatgtggcattatttaaaatgtacacgtcatcagactgtcggtacgaggtgacagttaagacttccttttcacaaatacttggacaggttgttgcttagaatatgctaccatgttggataaagaagccaaaccatacaaagttgatccttttgtaattatcattaagtttctgttggggtaagttttattatctgtgataatgattttaattgtgttttacatgtaacattatatttggttccataatgcaatataaattttcatacagatttggcagttgacttgtttcattaaatgaggttttttttttctcttaggcaaaggtctaataagtatatcaatgtctacttcaatagtatcatttcaaaagtaattattcactttatgtatatcagtctaaacttagactgcctttaatgtttgtaaataggtgtatatggtccatgatctgtgagtatcctagattcaaacgcaaatcattacagggtattgatgaaacagtgcctctctgatcacttttaaaagtatattttagacctctctaccctagttaacattccattcttaatttagtcacattttcagatttttggttaagcatcaatatgtagatctttttttccatcattacaactaacttggctttct

SEQ ID NO: 167865 - DNA, 6124 bp, Homo sapiens
  Payload ID: 13019
  Gene Symbol: PGAP1
  Gene Name: post-GPI attachment to proteins 1
  ENST ID: ENST00000422444
  CDS Start-End: 1-480
tcaccagacttgccctttttgacaattgtcttgatcatagttagttggacaacttgtggagcactagccatacttctttcttatctttactatgtgtttaaggttgttcatctgcaagccagcttaacaacttttaagaatagccagcctgtgaatcccaaacactctagaagaagtgaaaagaaatccaatcatcataaagactcctcaatacaccatcttcgtttatctgccaacgatgctgaagatagccttcgcatgcacagtactgtgattaacttactaacatggattgtattactcagcatgccttctctaatttattggctaaagaatcttagtaaattgttgaagactacttcacaatttccacttcctctggctgttggtgtgattgcttttgggtcagcacatttatataggcttccatgctttgtcttcattcctcttttactccatgcattatgcaactttatgtaagattggacttaaggaatgatgaagataatttatgtgtttagggccagtgataagagggaacacacagatccatcagtatggacagcaagatcctttggagaagacaagtctatttttacaatattgaaaataggaaattagttttgtaatgtttgagggaagtagttgaagcatggttttgttttgtggtgtggaatccatgtagtaatcatttttgaaaaattcatgaagggatatatggtgatcactatcattgaggactcctgtgcatataaaatagtctgttttatcaactgtacgagaagtctgatatgagagatttagtagatgcagcattatttgcagtctcactgcaagcattctgctcatttcatcaaactttttttcacaaaagtaggttattttgaatttgctatagtttacctattaagaaataagtctttaaataactgatgaaatttatagctgtttggtttctcaaaggttaaatagccacagaaagcctttggttagtttttggcagccaccatgaacaaagtggatcttgtcttcttacatctatgaaaatagagctttgaatggtaaggagatatgttttcttggtaaccaatgcaagattgatgggtggaaacatgattcaaacttacacaatttttcttgctatttttcaaatatgaatcttactatatattctcggtgaacatcaggagactattaaagaggtctgctgttaaatgtaaagaaaaaatgctcgtagctatttgcttcctggtattggagcagttcagttgtttagtttataccattggattcaattcattgcaccatggttgccaaaagtgcctgaggtcataatggattgttaaaataactaaattccagtggttggaaactctaggtttgtaccattttttctgctgtgggaaaaaacaacaacaacaacatgatcaaggtaacatcacatttgatgtataatattatactattaatggaatatcagtagacaactgttaacccattagtagcatgagtataaacagtacacctgaataaattggagacattagccactaggtttaacagtggaatcttgatttgcctaggtgacttctgggattactgtttgacaaataagagtaacattttatttcatttcagaatttacgtcacttttagctacaagagtaggaagaaggtaatcggcaaggcagaagagtatactctttgccttaggatagcgtaaactcaggctgagacatacccggcttatagagttcttctagatgtgtagactgtaaatgcccaaatcctctcaactaaagttttagtgattccacaaagcctctcatgtaaatttccagtgattccaccattgcacttgtgaatatgtatccttgttagtacccagggatgtcctcgagcaccagttttattttatctgccattgcatctggattccattacagcctctcagctgttactgcctgtggacagttacttctgcttactgcctgtagagagttacctaacttctcttctcagttcttcctcaggtcctggctattttggcctcagttgaagggagtcttgctctcatctctgagggttttaagtttgtttgatcccattgttgtcttttctagctttgagcatgtttttcagtattcatattttaacttactgagaacattaaagggaaatgataaactcgtggtggggatatggcagacaggtgcttgtttgtttgagagaagtagcagaagagataaaatacaaagtgctatatgtttcagctggagaggaaagagagagaatttattagattatatacttgtcccatggcataccacgtatatgtttaaatagggacacatctccctatgtttaactatacttataaacaactttgatacacattgcgtcttttattctgtcacctgatattttagtgtatctcaagttacagattacatgtgtccttaaactatttctgaatttggacttagttccatatacagaaagaactttagaaaattcattaatttggatcttctattgatagccataaatattatgtttatgtattctaaaacctctttgtttagttagtactgttcatgaatgtaacaagcttcaatttctcatttgtgagtagtacatttgctttttgtttgtttgtttgtttgtttttgagatggagtctcacgctgtcaccaggctggagtgcagtggcgcgatttcagctcactgcaacctccacctcccaggtgcaagtgatgcccctgcctcagcctcccgagtagctgggactacagacacccgccaccacacctggctaatttttgtatttttagtagagacggggtttcaccatgttggctaggctggtctcaaactcttgacctcgtgatttgcccgcctctgcctccccaaagtgctgggattacaggcgtgagccaccacgcccagccgtacatttactttttaaagcagcagactaggtacactaattctcactcaaatattttcatgggaatgtagttatcaccaagtcctaaagtattatttatgccaaaaaaaatttcattttaaggactacaaaaatgattctaattaaacattttataatcaatagtaggttgggtctttagccattatatgtgtatatatacagacacatatgtatacacttacattttgacagggtcttcattgagtcttgatgcactttaaacccagctggctaccagagatgcgaaggtgggctctttgaagattagcaaaatggacgtttctgtcacttgagaaaaggaaagttctttgcctttaaattacacagttttcatcatgcccacaatctatattattggctggttaaacagcactgccctattagcaatgttaacaaaaatgaaattatttattggcggttatagattatctaattcaggaaatttctgagctcaacttttacagcaactgttatgccttctaatttagcaattgagttatgagtaagttttgtgcttaactcctagaccctattgttgataaccagatcaaatatagtctgtacagaggaaaacactgggaacatttagtatttctaaagcctcctttggagttactactgattgtaatttggaactgataataggtagagattgctaacactgttttttttcctggatcttttttatgccagaaattaaacaggttctgctaactcttttttttctcttggttatcaccagaatgaaaatatttaaagtgatgactctagaaaagccatctgtgcctggttaacattgagtttgagtctcttcaatatatattgatcatgtattgattaatctttattttttcatattttggctagacaaattcagatctatataatggaataccccttcttgagtgaactatactactaatctacatgattatatagtaaggaaaaaagaagaaataactgtaataggcatagtgtttgttgttggttgtcttgtcattcatgtgatactactcatttccaaaattcacacaaacttacatgaggtggattatttgttttgttcattatttagttcctatatgttttttctttagaaacagagtctcattctgtcacccaggctggagtccaatggggcggtcatagttcactgcagccttgaactctttggctcatgtgatcctcccatctcagcctcccacagcaggtgagactacaggtacatgccactgtgcctgactttttaatttttttgtagagacgaggtttcagtttgttgcccaagctgatcttgaactcctggtttcaagcgatcctcccacctcggcctcccaaagtagtgggatttcaggcatgaccacctggcctagttcctatacttttcttaattcttcagacttctcacatttagtatagtgcattcatttcatcttgctgtttattagcaccctttgtggccaagggaaataaaaggtggtaaaattcagttttcagtttagttcttgaaagctctgggaaatggaggaaacacaaaactatgaattaaactagggctgttgatttctgaacccccagataaatcagttgacccacattttcattttaggtgttaggtccaaattagcataatgtcttgcattattattaggttcagtgtgaaactttacagtgctgcatttgaagtttagtaactggttattattaatcatttgggaaaaatgaaaatgtgttgggactttctatgactaggcatttgttgattatttttcatgattgctttttgttttctcattgtgtaggatttgtgaacttgtatattacaggaaacaagatactttgtaaaatttactggggaaaatccatttggagtgcatgacatttgccaggataagaaagcagtaatatgtttgtattataaaattacaccctgccagaaaactttctttcctagtaaggtaaatgtagaagggacttttacagcatagtaagttgattaggagccaaaattttattccagtttttttttgaactaagaatgttttaaattctgtaatgaacttttatgtttacccattactcatgcattctttcacaatatgtttaatagcctgaggaaataggaaagctgtgaagctactaccattctttacttttaataagaataataggaaagaaaagtcaggtcagtaatccaaatccaaatatgtatactgcaaatgctcaagaagtcacattttttgataaattgtattgagtacagaagaacttatatgaatttattatctgttaataacttagttttgacaacagaataacatttggaaattgtgagaataatcaagctgtttttccattaacagtgtaaattcataacatgtccttcaaaaggtgatattctaagctgtcttaattgtctacggttgataacttttaaataaagtacaggactttctgaaagtgtttggcatgttatgctgccaaaaacaatctgtgttttgaaataccaattaatcagttaatttctgaagactttgtataggacttgatatatgagtcagaatctgtctgtactcattctgtacattgtaactttgaacacttatgaaaaactgtatctgttggtgtgttttgattagttagtgtagatttgtttgcgtatttgaattccgattttagtttaggaagactaaaagtagccatttttgtaaagttcatatgctattttttaatgtcatttttgtttttaatatttatacaatagtgatgttactagtaaaaaatgtttatagataacacgtagagctattaactgttcaaaagcctacatgataggcatattttgtatttcgtgttgcactcgttctgtttcatattggactttttacatcccttttttagcaaaaaaaagagacacatttgaattctctttagcataaagctgtgcattggaaactatgtgactgtatccatacggttagcaaaatactctttgccaccaaaggtaaatgaaactgtaaaatacctctggatatttgtgccaatgaacttttcttagcatattaggattaaagcaaaaataatcttttcagtatgtttcatctaggacttacaataaatgtttaaaccatg

SEQ ID NO: 167866 - DNA, 8942 bp, Homo sapiens
  Payload ID: 13019
  Gene Symbol: PGAP1
  Gene Name: post-GPI attachment to proteins 1
  ENST ID: ENST00000423035
  CDS Start-End: 40-192
agagggggcggcggcggcggcggcggtggtggcggcaccatgtttcttcactcagttaatctctggaacctggcgttttatgtcttcatggtctttctggcaaccctggggctgtgggatgtcttcttcggcttcgaggagaataagtgcagtatgagctacatgtttgagtacccggagtatcagagatgagaagaacctgaactaaggcagagtcaaggaaggaggacagcagaggcaggattgtggagataatatttaaatacaaagaaaatagaacttccaaagaaactggcaaaacgctatcccgcatatgagttgtatctttatggagagggatcctatgctgaagaacacaaaattctccctttgacgggtattccagttctctttcttcctggtaatgctggaagttataagcaagttcgttctattggctccattgcacttagaaaagcagaggacattgacttcaagtaccactttgacttctttagtgtgaacttcaatgaagaactggtggctttgtatggtggaagtcttcagaagcagaccaagtttgtacatgaatgtattaaaacaattctcaaactctataagggtcaagaatttgctccaaaaagtgtggcaataattggtcattctatgggtggccttgttgcaagagcattgcttacactgaaaaattttaagcatgatctgataaatcttcttattacacaagccacacctcatgttgctcctgtgatgccattagatcgtttcattacagatttttatacgactgtaaacaactattggattctaaatgctcgacacataaatttaaccacactttctgtagctggaggattccgggattaccaagttcgttcaggattgacttttctaccaaaattaagccatcataccagtgccttatctgttgtgagttcagcagtgcctaagacctgggtctcaacagaccacctctccattgtgtggtgtaaacaattgcagttgactacagttcgagcattctttgatcttattgatgctgatactaaacaaataactcaaaattccaagaagaaactgtcagttttgtatcaccactttataagacacccatcaaaacattttgaggaaaatccagctataatttctgacttaacagggacatctatgtgggttctagtaaaagtgtccaaatggacctatgtagcttacaacgaatctgagaagatatattttacatttcctcttgaaaatcatagaaaaatctacactcatgtctattgtcagagcactatgctggatacaaatagttggatttttgcttgcataaacagcacttctatgtgcctgcaaggggttgatttatcatggaaagctgaactgctgccaacaattaagtatctgacattaagacttcaagactatccatctttgtctcatcttgttgtttatgtaccatctgttcgtggaagtaagtttgttgtagattgtgaattctttaaaaaagagaaaagatacatacagcttcctgtaactcatcttttttcctttggattgtcttcaaggaaagtggtgttaaatacaaatggcctatactacaatctagagcttctgaactttggacagatataccaagcttttaaaatcaacgtggtaagcaagtgctcagcagtcaaagaagaaataaccagtatctatagacttcatattccttggtcttatgaagattcactaaccattgcacaggctccatcttccacagaaatttctctgaaactccatattgctcaaccagaaaacaatacccatgtggcattatttaaaatgtacacgtcatcagactgtcggtacgaggtgacagttaagacttccttttcacaaatacttggacaggtagttagatttcatggtggagctcttcctgcttatgtcgtatctaatatccttcttgcttatagaggacagttatattctcttttctcaacaggttgttgcttagaatatgctaccatgttggataaagaagccaaaccatacaaagttgatccttttgtaattatcattaagtttctgttggggtataaatggtttaaagaattgtgggatgtattattgttaccagaattagatgccgtcattttaacttgtcagagtatgtgtttccccctgatatccttgattctctttctgtttggaacgtgtactgcctactggagtggcctactgtcttctgcatctgtgagacttctttcttcattgtggctagctttgaaaagaccctctgaacttcctaaagatatcaagatgatatcaccagacttgccctttttgacaattgtcttgatcatagttagttggacaacttgtggagcactagccatacttctttcttatctttactatgtgtttaaggttgttcatctgcaagccagcttaacaacttttaagaatagccagcctgtgaatcccaaacactctagaagaagtgaaaagaaatccaatcatcataaagactcctcaatacaccatcttcgtttatctgccaacgatgctgaagatagccttcgcatgcacagtactgtgattaacttactaacatggattgtattactcagcatgccttctctaatttattggctaaagaatcttaggtattattttaaacttaatcctgatccatgtaaacctttggcatttatccttattccgactatggcaattcttggaaatacttacactgtttcaataaaatcaagtaaattgttgaagactacttcacaatttccacttcctctggctgttggtgtgattgcttttgggtcagcacatttatataggcttccatgctttgtcttcattcctcttttactccatgcattatgcaactttatgtaagattggacttaaggaatgatgaagataatttatgtgtttagggccagtgataagagggaacacacagatccatcagtatggacagcaagatcctttggagaagacaagtctatttttacaatattgaaaataggaaattagttttgtaatgtttgagggaagtagttgaagcatggttttgttttgtggtgtggaatccatgtagtaatcatttttgaaaaattcatgaagggatatatggtgatcactatcattgaggactcctgtgcatataaaatagtctgttttatcaactgtacgagaagtctgatatgagagatttagtagatgcagcattatttgcagtctcactgcaagcattctgctcatttcatcaaactttttttcacaaaagtaggttattttgaatttgctatagtttacctattaagaaataagtctttaaataactgatgaaatttatagctgtttggtttctcaaaggttaaatagccacagaaagcctttggttagtttttggcagccaccatgaacaaagtggatcttgtcttcttacatctatgaaaatagagctttgaatggtaaggagatatgttttcttggtaaccaatgcaagattgatgggtggaaacatgattcaaacttacacaatttttcttgctatttttcaaatatgaatcttactatatattctcggtgaacatcaggagactattaaagaggtctgctgttaaatgtaaagaaaaaatgctcgtagctatttgcttcctggtattggagcagttcagttgtttagtttataccattggattcaattcattgcaccatggttgccaaaagtgcctgaggtcataatggattgttaaaataactaaattccagtggttggaaactctaggtttgtaccattttttctgctgtgggaaaaaacaacaacaacaacatgatcaaggtaacatcacatttgatgtataatattatactattaatggaatatcagtagacaactgttaacccattagtagcatgagtataaacagtacacctgaataaattggagacattagccactaggtttaacagtggaatcttgatttgcctaggtgacttctgggattactgtttgacaaataagagtaacattttatttcatttcagaatttacgtcacttttagctacaagagtaggaagaaggtaatcggcaaggcagaagagtatactctttgccttaggatagcgtaaactcaggctgagacatacccggcttatagagttcttctagatgtgtagactgtaaatgcccaaatcctctcaactaaagttttagtgattccacaaagcctctcatgtaaatttccagtgattccaccattgcacttgtgaatatgtatccttgttagtacccagggatgtcctcgagcaccagttttattttatctgccattgcatctggattccattacagcctctcagctgttactgcctgtggacagttacttctgcttactgcctgtagagagttacctaacttctcttctcagttcttcctcaggtcctggctattttggcctcagttgaagggagtcttgctctcatctctgagggttttaagtttgtttgatcccattgttgtcttttctagctttgagcatgtttttcagtattcatattttaacttactgagaacattaaagggaaatgataaactcgtggtggggatatggcagacaggtgcttgtttgtttgagagaagtagcagaagagataaaatacaaagtgctatatgtttcagctggagaggaaagagagagaatttattagattatatacttgtcccatggcataccacgtatatgtttaaatagggacacatctccctatgtttaactatacttataaacaactttgatacacattgcgtcttttattctgtcacctgatattttagtgtatctcaagttacagattacatgtgtccttaaactatttctgaatttggacttagttccatatacagaaagaactttagaaaattcattaatttggatcttctattgatagccataaatattatgtttatgtattctaaaacctctttgtttagttagtactgttcatgaatgtaacaagcttcaatttctcatttgtgagtagtacatttgctttttgtttgtttgtttgtttgtttttgagatggagtctcacgctgtcaccaggctggagtgcagtggcgcgatttcagctcactgcaacctccacctcccaggtgcaagtgatgcccctgcctcagcctcccgagtagctgggactacagacacccgccaccacacctggctaatttttgtatttttagtagagacggggtttcaccatgttggctaggctggtctcaaactcttgacctcgtgatttgcccgcctctgcctccccaaagtgctgggattacaggcgtgagccaccacgcccagccgtacatttactttttaaagcagcagactaggtacactaattctcactcaaatattttcatgggaatgtagttatcaccaagtcctaaagtattatttatgccaaaaaaaatttcattttaaggactacaaaaatgattctaattaaacattttataatcaatagtaggttgggtctttagccattatatgtgtatatatacagacacatatgtatacacttacattttgacagggtcttcattgagtcttgatgcactttaaacccagctggctaccagagatgcgaaggtgggctctttgaagattagcaaaatggacgtttctgtcacttgagaaaaggaaagttctttgcctttaaattacacagttttcatcatgcccacaatctatattattggctggttaaacagcactgccctattagcaatgttaacaaaaatgaaattatttattggcggttatagattatctaattcaggaaatttctgagctcaacttttacagcaactgttatgccttctaatttagcaattgagttatgagtaagttttgtgcttaactcctagaccctattgttgataaccagatcaaatatagtctgtacagaggaaaacactgggaacatttagtatttctaaagcctcctttggagttactactgattgtaatttggaactgataataggtagagattgctaacactgttttttttcctggatcttttttatgccagaaattaaacaggttctgctaactcttttttttctcttggttatcaccagaatgaaaatatttaaagtgatgactctagaaaagccatctgtgcctggttaacattgagtttgagtctcttcaatatatattgatcatgtattgattaatctttattttttcatattttggctagacaaattcagatctatataatggaataccccttcttgagtgaactatactactaatctacatgattatatagtaaggaaaaaagaagaaataactgtaataggcatagtgtttgttgttggttgtcttgtcattcatgtgatactactcatttccaaaattcacacaaacttacatgaggtggattatttgttttgttcattatttagttcctatatgttttttctttagaaacagagtctcattctgtcacccaggctggagtccaatggggcggtcatagttcactgcagccttgaactctttggctcatgtgatcctcccatctcagcctcccacagcaggtgagactacaggtacatgccactgtgcctgactttttaatttttttgtagagacgaggtttcagtttgttgcccaagctgatcttgaactcctggtttcaagcgatcctcccacctcggcctcccaaagtagtgggatttcaggcatgaccacctggcctagttcctatacttttcttaattcttcagacttctcacatttagtatagtgcattcatttcatcttgctgtttattagcaccctttgtggccaagggaaataaaaggtggtaaaattcagttttcagtttagttcttgaaagctctgggaaatggaggaaacacaaaactatgaattaaactagggctgttgatttctgaacccccagataaatcagttgacccacattttcattttaggtgttaggtccaaattagcataatgtcttgcattattattaggttcagtgtgaaactttacagtgctgcatttgaagtttagtaactggttattattaatcatttgggaaaaatgaaaatgtgttgggactttctatgactaggcatttgttgattatttttcatgattgctttttgttttctcattgtgtaggatttgtgaacttgtatattacaggaaacaagatactttgtaaaatttactggggaaaatccatttggagtgcatgacatttgccaggataagaaagcagtaatatgtttgtattataaaattacaccctgccagaaaactttctttcctagtaaggtaaatgtagaagggacttttacagcatagtaagttgattaggagccaaaattttattccagtttttttttgaactaagaatgttttaaattctgtaatgaacttttatgtttacccattactcatgcattctttcacaatatgtttaatagcctgaggaaataggaaagctgtgaagctactaccattctttacttttaataagaataataggaaagaaaagtcaggtcagtaatccaaatccaaatatgtatactgcaaatgctcaagaagtcacattttttgataaattgtattgagtacagaagaacttatatgaatttattatctgttaataacttagttttgacaacagaataacatttggaaattgtgagaataatcaagctgtttttccattaacagtgtaaattcataacatgtccttcaaaaggtgatattctaagctgtcttaattgtctacggttgataacttttaaataaagtacaggactttctgaaagtgtttggcatgttatgctgccaaaaacaatctgtgttttgaaataccaattaatcagttaatttctgaagactttgtataggacttgatatatgagtcagaatctgtctgtactcattctgtacattgtaactttgaacacttatgaaaaactgtatctgttggtgtgttttgattagttagtgtagatttgtttgcgtatttgaattccgattttagtttaggaagactaaaagtagccatttttgtaaagttcatatgctattttttaatgtcatttttgtttttaatatttatacaatagtgatgttactagtaaaaaatgtttatagataacacgtagagctattaactgttcaaaagcctacatgataggcatattttgtatttcgtgttgcactcgttctgtttcatattggactttttacatcccttttttagcaaaaaaaagagacacatttgaattctctttagcataaagctgtgcattggaaactatgtgactgtatccatacggttagcaaaatactctttgccaccaaaggtaaatgaaactgtaaaatacctctggatatttgtgccaatgaacttttcttagcatattaggattaaagcaaaaataatcttttcagtatgtttcatctaggacttacaataaatgtttaaaccatgaaaacttatatttcataccctaatttttctttgaaaatattcaagatttgtagcctagtgtgttctattttgtgtgattgcttgaatgttttctgattttattgggtaaaagtttgcctagtaatgatctttcagcaattcattgaaataattatttgaagtaatcttgcttcagatttaatttgtgatgtacattgttgtacaagccattttagtacaggtgtctcatttatgtagttgaaaggtgactgtggaatttcttttgttttttatgtatttccattcagtctctttatatagtcacatgtttcacaggggaacttgtccactggaacctaacatagtacaaccttttaatatgcgtatcttaaaggaaaatattataaaacaagatattaatactaaa

SEQ ID NO: 167867 - DNA, 2062 bp, Homo sapiens
  Payload ID: 13020
  Gene Symbol: PGAP2
  Gene Name: post-GPI attachment to proteins 2
  Uniprot ID: Q9UHJ9
  ENST ID: ENST00000278243
  CDS Start-End: 202-1149
aggggtcggggtctccagaagcggggaggagccagcggaggatctgggcgcagtttcctctctaagttccgccccgagagcgccggccccgcccccgccgttcgcgctctgaccagcccgcagagccagcccccgaccccgggccacctgggcccccgggttccgccggcactctcgccaccaccgcgtgggtctgacaagatgtaccaggtcccactaccactggatcgggatgggaccctggtacggctccgcttcaccatggtggccctggtcacggtctgctgtccacttgtcgccttcctcttctgcatcctctggtccctgctcttccacttcaaggagacaacggccacacactgtggggccacgccctgcaggatgttctctgcggcctcccagcctttggaccccgatgggaccttgttccggcttcgcttcacagccatggtctggtgggccatcacttttcctgtgttcggcttcttcttctgcatcatctggtccctggtgttccactttgagtacacggtggccactgactgtggggtgcccaattacctgccctcggtgagctcagccatcggcggggaggtgccccagcgctacgtgtggcgtttctgcatcggcctgcactcggcgcctcgcttcttggtggccttcgcctactggaaccactacctcagctgcacctccccgtgttcctgctatcgcccgctctgccgcctcaacttcggcctcaatgtcgtggagaacctcgcgttgctagtgctcacttatgtctcctcctccgaggacttcaccatccacgaaaatgctttcattgtgttcattgcctcatccctcgggcacatgctcctcacctgcattctctggcggttgaccaagaagcacacagtaagtcaggaggatcgcaagtcctacagctggaaacagcggctcttcatcatcaacttcatctccttcttctcggcgctggctgtctactttcggcacaacatgtattgtgaggctggagtgtacaccatctttgccatcctggagtacactgttgtcttaaccaacatggcgttccacatgacggcctggtgggacttcgggaacaaggagctgctcataacctctcagcctgaggaaaagcgattctgaacccttcagtcctgcttgggaggacgcagcccactgcccagaaacaagaaacacgataccattctggccttccccaccccacatcctctcttggccttactgaagatgggggaagggtaagaaggaagggtgtaggccaaggctcaccccagtgctgctggcttctcctctccacccctcatatgggcgtggggtcctcaaacatcacctttacctgagaggccccaagaagctgagctggcagagagctccaccatttggtgctaaaaaaaaaaacgtcctgaggttcatgaccaccatccagtttctggcctttacacagtcacctttcactgaggtcaggagcccctgagcagtggctgctccctgacaaccacagccatttctctgcacgggggtcattcataggactaatgtatttcatgatctactgtgcacatccaggcctgtggccacagtcccctgctaaagttgctcaggtgttctagtcctgacttcacctttttgatttggtgtgtgccctagggtatgtacccttccccatctgagcctcggtgtgtccatgtgtctggcgggggatgggtggactgtatgatttccaaggactctaccagtcagtggttctgatgtcatcgggtggaggtggtgttctatacctaaaggatgacctgctccagaaacagcaccagcacagcatgtattttcttctcttctgaaagttctggcttgtagacccctcccctcctttgcaaaggtatgggatagaggggtcagatgcagatctctactgtaaaatgggctccctggtatctcctgtcttccctactgctccaaaccctaaattttggttgtacattttatttgaaaggaaaataaattttttttttgggccaacagttgcctaggcttgcta

SEQ ID NO: 167868 - DNA, 1843 bp, Homo sapiens
  Payload ID: 13020
  Gene Symbol: PGAP2
  Gene Name: post-GPI attachment to proteins 2
  Uniprot ID: Q9UHJ9
  ENST ID: ENST00000300730
  CDS Start-End: 26-949
agggcctctcgaagtgggcttgtgaatggctagattgggaagcaccggcggggtgtcgggaagggtggtgacgcaacatagagactccgcccccttccttggagcgccgcgactcgggctgagggagctcgggccaatcagagggacggccccagaatggcatggtagatggaacgcagctgagaggtctgacaagatgtaccaggtcccactaccactggatcgggatgggaccctggtacggctccgcttcaccatggtggccctggtcacggtctgctgtccacttgtcgccttcctcttctgcatcctctggtccctgctcttccacttcaaggagacaacggccacacactgtggggtgcccaattacctgccctcggtgagctcagccatcggcggggaggtgccccagcgctacgtgtggcgtttctgcatcggcctgcactcggcgcctcgcttcttggtggccttcgcctactggaaccactacctcagctgcacctccccgtgttcctgctatcgcccgctctgccgcctcaacttcggcctcaatgtcgtggagaacctcgcgttgctagtgctcacttatgtctcctcctccgaggacttcaccatccacgaaaatgctttcattgtgttcattgcctcatccctcgggcacatgctcctcacctgcattctctggcggttgaccaagaagcacacagatcgcaagtcctacagctggaaacagcggctcttcatcatcaacttcatctccttcttctcggcgctggctgtctactttcggcacaacatgtattgtgaggctggagtgtacaccatctttgccatcctggagtacactgttgtcttaaccaacatggcgttccacatgacggcctggtgggacttcgggaacaaggagctgctcataacctctcagcctgaggaaaagcgattctgaacccttcagtcctgcttgggaggacgcagcccactgcccagaaacaagaaacacgataccattctggccttccccaccccacatcctctcttggccttactgaagatgggggaagggtaagaaggaagggtgtaggccaaggctcaccccagtgctgctggcttctcctctccacccctcatatgggcgtggggtcctcaaacatcacctttacctgagaggccccaagaagctgagctggcagagagctccaccatttggtgctaaaaaaaaaaacgtcctgaggttcatgaccaccatccagtttctggcctttacacagtcacctttcactgaggtcaggagcccctgagcagtggctgctccctgacaaccacagccatttctctgcacgggggtcattcataggactaatgtatttcatgatctactgtgcacatccaggcctgtggccacagtcccctgctaaagttgctcaggtgttctagtcctgacttcacctttttgatttggtgtgtgccctagggtatgtacccttccccatctgagcctcggtgtgtccatgtgtctggcgggggatgggtggactgtatgatttccaaggactctaccagtcagtggttctgatgtcatcgggtggaggtggtgttctatacctaaaggatgacctgctccagaaacagcaccagcacagcatgtattttcttctcttctgaaagttctggcttgtagacccctcccctcctttgcaaaggtatgggatagaggggtcagatgcagatctctactgtaaaatgggctccctggtatctcctgtcttccctactgctccaaaccctaaattttggttgtacattttatttgaaaggaaaataaattttttttttgggccaa

SEQ ID NO: 167869 - DNA, 1837 bp, Homo sapiens
  Payload ID: 13020
  Gene Symbol: PGAP2
  Gene Name: post-GPI attachment to proteins 2
  ENST ID: ENST00000396986
  CDS Start-End: 26-961
agggcctctcgaagtgggcttgtgaatggctagattgggaagcaccggcggggtgtcgggaagggtggtgacgcaacatagagactccgcccccttccttggagcgccgcgactcgggctgagggagctcgggccaatcagagggacggccccagaatggcatggtagatggaacgcagctgagaggtctgacaagatgtaccaggtcccactaccactggatcgggatgggaccctggtacggctccgcttcaccatggtggccctggtcacggtctgctgtccacttgtcgccttcctcttctgcatcctctggtccctgctcttccacttcaaggagacaacggccacacactgtggggtgcccaattacctgccctcggtgagctcagccatcggcggggaggtgccccagcgctacgtgtggcgtttctgcatcggcctgcactcggcgcctcgcttcttggtggccttcgcctactggaaccactacctcagctgcacctccccgtgttcctgctatcgcccgctctgccgcctcaacttcggcctcaatgtcgtggagaacctcgcgttgctagtgctcacttatgtctcctcctccgaggacttcaccatccacgaaaatgctttcattgtgttcattgcctcatccctcgggcacatgctcctcacctgcattctctggcggttgaccaagaagcacacagtaagtcaggaggatcgcaagtcctacagctggaaacagcggctcttcatcatcaacttcatctccttcttctcggcgctggctgtctactttcggcacaacatgtattgtgaggctggagtgtacaccatctttgccatcctggagtacactgttgtcttaaccaacatggcgttccacatgacggcctggtgggacttcgggaacaaggagctgctcataacctctcagcctgaggaaaagcgattctgaacccttcagtcctgcttgggaggacgcagcccactgcccagaaacaagaaacacgataccattctggccttccccaccccacatcctctcttggccttactgaagatgggggaagggtaagaaggaagggtgtaggccaaggctcaccccagtgctgctggcttctcctctccacccctcatatgggcgtggggtcctcaaacatcacctttacctgagaggccccaagaagctgagctggcagagagctccaccatttggtgctaaaaaaaaaaacgtcctgaggttcatgaccaccatccagtttctggcctttacacagtcacctttcactgaggtcaggagcccctgagcagtggctgctccctgacaaccacagccatttctctgcacgggggtcattcataggactaatgtatttcatgatctactgtgcacatccaggcctgtggccacagtcccctgctaaagttgctcaggtgttctagtcctgacttcacctttttgatttggtgtgtgccctagggtatgtacccttccccatctgagcctcggtgtgtccatgtgtctggcgggggatgggtggactgtatgatttccaaggactctaccagtcagtggttctgatgtcatcgggtggaggtggtgttctatacctaaaggatgacctgctccagaaacagcaccagcacagcatgtattttcttctcttctgaaagttctggcttgtagacccctcccctcctttgcaaaggtatgggatagaggggtcagatgcagatctctactgtaaaatgggctccctggtatctcctgtcttccctactgctccaaaccctaaattttggttgtacattttatttgaaaggaaaataa

SEQ ID NO: 167870 - DNA, 1798 bp, Homo sapiens
  Payload ID: 13020
  Gene Symbol: PGAP2
  Gene Name: post-GPI attachment to proteins 2
  ENST ID: ENST00000396991
  CDS Start-End: 68-886
acaggtagatggaacgcagctgagaggtctgacaagatgtaccaggtcccactaccactggatcgggatgggaccctggtacggctccgcttcaccatggtggccctggtcacggtctgctgtccacttgtcgccttcctcttctgcatcctctggtccctgctcttccacttcaaggagacaacggccacacactgtggggactgaagcttcaataggagttccaggcattaagatggatggtggagatgcacaagaacatggtcatttccttagactaccccaggtgcccaattacctgccctcggtgagctcagccatcggcggggaggtgccccagcgctacgtgtggcgtttctgcatcggcctgcactcggcgcctcgcttcttggtggccttcgcctactggaaccactacctcagctgcacctccccgtgttcctgctatcgcccgctctgccgcctcaacttcggcctcaatgtcgtggagaacctcgcgttgctagtgctcacttatgtctcctcctccgaggacttcaccatccacgaaaatgctttcattgtgttcattgcctcatccctcgggcacatgctcctcacctgcattctctggcggttgaccaagaagcacacagtaagtcaggaggatcgcaagtcctacagctggaaacagcggctcttcatcatcaacttcatctccttcttctcggcgctggctgtctactttcggcacaacatgtattgtgaggctggagtgtacaccatctttgccatcctggagtacactgttgtcttaaccaacatggcgttccacatgacggcctggtgggacttcgggaacaaggagctgctcataacctctcagcctgaggaaaagcgattctgaacccttcagtcctgcttgggaggacgcagcccactgcccagaaacaagaaacacgataccattctggccttccccaccccacatcctctcttggccttactgaagatgggggaagggtaagaaggaagggtgtaggccaaggctcaccccagtgctgctggcttctcctctccacccctcatatgggcgtggggtcctcaaacatcacctttacctgagaggccccaagaagctgagctggcagagagctccaccatttggtgctaaaaaaaaaaacgtcctgaggttcatgaccaccatccagtttctggcctttacacagtcacctttcactgaggtcaggagcccctgagcagtggctgctccctgacaaccacagccatttctctgcacgggggtcattcataggactaatgtatttcatgatctactgtgcacatccaggcctgtggccacagtcccctgctaaagttgctcaggtgttctagtcctgacttcacctttttgatttggtgtgtgccctagggtatgtacccttccccatctgagcctcggtgtgtccatgtgtctggcgggggatgggtggactgtatgatttccaaggactctaccagtcagtggttctgatgtcatcgggtggaggtggtgttctatacctaaaggatgacctgctccagaaacagcaccagcacagcatgtattttcttctcttctgaaagttctggcttgtagacccctcccctcctttgcaaaggtatgggatagaggggtcagatgcagatctctactgtaaaatgggctccctggtatctcctgtcttccctactgctccaaaccctaaattttggttgtacattttatttgaaaggaaaataaattttttttttgggccaacagttgcctaggcttgct

SEQ ID NO: 167871 - DNA, 1566 bp, Homo sapiens
  Payload ID: 13020
  Gene Symbol: PGAP2
  Gene Name: post-GPI attachment to proteins 2
  ENST ID: ENST00000396993
  CDS Start-End: 407-703
actccgcccccttccttggagcgccgcgactcgggctgagggagctcgggccaatcagagggacggccccagaatggcatggtagatggaacgcagctgagaggtgcccaattacctgccctcggtgagctcagccatcggcggggaggtgccccagcgctacgtgtggcgtttctgcatcggcctgcactcggcgcctcgcttcttggtggccttcgcctactggaaccactacctcagctgcacctccccgtgttcctgctatcgcccgctctgccgcctcaacttcggcctcaatgtcgtggagaacctcgcgttgctagtgctcacttatgtctcctcctccgaggacttcaccatccacgaaaatgctttcattgtgttcattgcctcatccctcgggcacatgctcctcacctgcattctctggcggttgaccaagaagcacacagtaagtcaggaggatcgcaagtcctacagctggaaacagcggctcttcatcatcaacttcatctccttcttctcggcgctggctgtctactttcggcacaacatgtattgtgaggctggagtgtacaccatctttgccatcctggagtacactgttgtcttaaccaacatggcgttccacatgacggcctggtgggacttcgggaacaaggagctgctcataacctctcagcctgaggaaaagcgattctgaacccttcagtcctgcttgggaggacgcagcccactgcccagaaacaagaaacacgataccattctggccttccccaccccacatcctctcttggccttactgaagatgggggaagggtaagaaggaagggtgtaggccaaggctcaccccagtgctgctggcttctcctctccacccctcatatgggcgtggggtcctcaaacatcacctttacctgagaggccccaagaagctgagctggcagagagctccaccatttggtgctaaaaaaaaaaacgtcctgaggttcatgaccaccatccagtttctggcctttacacagtcacctttcactgaggtcaggagcccctgagcagtggctgctccctgacaaccacagccatttctctgcacgggggtcattcataggactaatgtatttcatgatctactgtgcacatccaggcctgtggccacagtcccctgctaaagttgctcaggtgttctagtcctgacttcacctttttgatttggtgtgtgccctagggtatgtacccttccccatctgagcctcggtgtgtccatgtgtctggcgggggatgggtggactgtatgatttccaaggactctaccagtcagtggttctgatgtcatcgggtggaggtggtgttctatacctaaaggatgacctgctccagaaacagcaccagcacagcatgtattttcttctcttctgaaagttctggcttgtagacccctcccctcctttgcaaaggtatgggatagaggggtcagatgcagatctctactgtaaaatgggctccctggtatctcctgtcttccctactgctccaaaccctaaattttggttgtacattttattt

SEQ ID NO: 167872 - DNA, 1772 bp, Homo sapiens
  Payload ID: 13020
  Gene Symbol: PGAP2
  Gene Name: post-GPI attachment to proteins 2
  Uniprot ID: Q9UHJ9
  ENST ID: ENST00000493547
  CDS Start-End: 79-777
ccagagtttctgggatgtgcctcaccgggtctcactgcctgcaaaggtagatggaacgcagctgagaggtctgacaagatgtaccaggtcccactaccactggatcgggatgggaccctggtacggctccgcttcaccatggtggccctggtcacggtctgctgtccacttgtcgccttcctcttctgcatcctctggtccctgctcttccacttcaaggagacaacggccacacactgtggggtgcccaattacctgccctcggtgagctcagccatcggcggggaggtgccccagcgctacgtgtggcgtttctgcatcggcctgcactcggcgcctcgcttcttggtggccttcgcctactggaaccactacctcagctgcacctccccgtgttcctgctatcgcccgctctgccgcctcaacttcggcctcaatgtcgtggagaacctcgcgttgctagtgctcacttatgtctcctcctccgaggacttcaccatccacgaaaatgctttcattgtgttcattgcctcatccctcgggcacatgctcctcacctgcattctctggcggttgaccaagaagcacacagtaagtcaggaggtacggtctatccctagcgggggctccaaggcagcccagaagaaaatcaaggacatctgtcctcaggattcgggatcgcaagtcctacagctggaaacagcggctcttcatcatcaacttcatctccttcttctcggcgctggctgtctactttcggcacaacatgtattgtgaggctggagtgtacaccatctttgccatcctggagtacactgttgtcttaaccaacatggcgttccacatgacggcctggtgggacttcgggaacaaggagctgctcataacctctcagcctgaggaaaagcgattctgaacccttcagtcctgcttgggaggacgcagcccactgcccagaaacaagaaacacgataccattctggccttccccaccccacatcctctcttggccttactgaagatgggggaagggtaagaaggaagggtgtaggccaaggctcaccccagtgctgctggcttctcctctccacccctcatatgggcgtggggtcctcaaacatcacctttacctgagaggccccaagaagctgagctggcagagagctccaccatttggtgctaaaaaaaaaaacgtcctgaggttcatgaccaccatccagtttctggcctttacacagtcacctttcactgaggtcaggagcccctgagcagtggctgctccctgacaaccacagccatttctctgcacgggggtcattcataggactaatgtatttcatgatctactgtgcacatccaggcctgtggccacagtcccctgctaaagttgctcaggtgttctagtcctgacttcacctttttgatttggtgtgtgccctagggtatgtacccttccccatctgagcctcggtgtgtccatgtgtctggcgggggatgggtggactgtatgatttccaaggactctaccagtcagtggttctgatgtcatcgggtggaggtggtgttctatacctaaaggatgacctgctccagaaacagcaccagcacagcatgtattttcttctcttctgaaagttctggcttgtagacccctcccctcctttgcaaaggtatgggatagaggggtcagatgcagatctctactgtaaaatgggctccctggtatctcctgtcttccctactgctccaaaccctaaattttggttgtacat

SEQ ID NO: 167873 - DNA, 1474 bp, Homo sapiens
  Payload ID: 13020
  Gene Symbol: PGAP2
  Gene Name: post-GPI attachment to proteins 2
  ENST ID: ENST00000477358
  CDS Start-End: 104-349
cttccttggagcgccgcgactcgggctgagggagctcgggccaatcagagggacggccccagaatggcatggtagatggaacgcagctgagaggtctgacaagatgtaccaggtcccactaccactggatcgggatgggaccctggtacggctccgcttcaccatggtggccctggtcacggtctgctgtccacttgtcgccttcctcttctgcatcctctggtccctgctcttccacttcaaggagacaacggccacacactgtgggccatccacgaaaatgctttcattgtgttcattgcctcatccctcgggcacatgctcctcacctgcattctctggcggttgaccaagaagcacacagtaagtcaggaggatcgcaagtcctacagctggaaacagcggctcttcatcatcaacttcatctccttcttctcggcgctggctgtctactttcggcacaacatgtattgtgaggctggagtgtacaccatctttgccatcctggagtacactgttgtcttaaccaacatggcgttccacatgacggcctggtgggacttcgggaacaaggagctgctcataacctctcagcctgaggaaaagcgattctgaacccttcagtcctgcttgggaggacgcagcccactgcccagaaacaagaaacacgataccattctggccttccccaccccacatcctctcttggccttactgaagatgggggaagggtaagaaggaagggtgtaggccaaggctcaccccagtgctgctggcttctcctctccacccctcatatgggcgtggggtcctcaaacatcacctttacctgagaggccccaagaagctgagctggcagagagctccaccatttggtgctaaaaaaaaaaacgtcctgaggttcatgaccaccatccagtttctggcctttacacagtcacctttcactgaggtcaggagcccctgagcagtggctgctccctgacaaccacagccatttctctgcacgggggtcattcataggactaatgtatttcatgatctactgtgcacatccaggcctgtggccacagtcccctgctaaagttgctcaggtgttctagtcctgacttcacctttttgatttggtgtgtgccctagggtatgtacccttccccatctgagcctcggtgtgtccatgtgtctggcgggggatgggtggactgtatgatttccaaggactctaccagtcagtggttctgatgtcatcgggtggaggtggtgttctatacctaaaggatgacctgctccagaaacagcaccagcacagcatgtattttcttctcttctgaaagttctggcttgtagacccctcccctcctttgcaaaggtatgggatagaggggtcagatgcagatctctactgtaaaatgggctccctggtatctcctgtcttccctactgctccaaaccctaaattttggttgtacatttt

SEQ ID NO: 167874 - DNA, 1815 bp, Homo sapiens
  Payload ID: 13020
  Gene Symbol: PGAP2
  Gene Name: post-GPI attachment to proteins 2
  ENST ID: ENST00000528216
  CDS Start-End: 53-223
ggagttcggggaggcacagggtagatggaacgcagctgagaggtctgacaagatgtaccaggtcccactaccactggatcgggatgggaccctggtacggctccgcttcaccatggtggccctggtcacggtctgctgtccacttgtcgccttcctcttctgcatcctctggtccctgctcttccacttcaaggagacaacggccacacactgtggggactgaagcttcaataggagttccaggcattaagatggatggtggagatgcacaagaacatggtcatttccttagactaccccaggtgcccaattacctgccctcggtgagctcagccatcggcggggaggtgccccagcgctacgtgtggcgtttctgcatcggcctgcactcggcgcctcgcttcttggtggccttcgcctactggaaccactacctcagctgcacctccccgtgttcctgctatcgcccgctctgccgcctcaacttcggcctcaatgtcgtggagaacctcgcgttgctagtgctcacttatgtctcctcctccgaggacttcaccatccacgaaaatgctttcattgtgttcattgcctcatccctcgggcacatgctcctcacctgcattctctggcggttgaccaagaagcacacagtaagtcaggaggatcgcaagtcctacagctggaaacagcggctcttcatcatcaacttcatctccttcttctcggcgctggctgtctactttcggcacaacatgtattgtgaggctggagtgtacaccatctttgccatcctggagtacactgttgtcttaaccaacatggcgttccacatgacggcctggtgggacttcgggaacaaggagctgctcataacctctcagcctgaggaaaagcgattctgaacccttcagtcctgcttgggaggacgcagcccactgcccagaaacaagaaacacgataccattctggccttccccaccccacatcctctcttggccttactgaagatgggggaagggtaagaaggaagggtgtaggccaaggctcaccccagtgctgctggcttctcctctccacccctcatatgggcgtggggtcctcaaacatcacctttacctgagaggccccaagaagctgagctggcagagagctccaccatttggtgctaaaaaaaaaaacgtcctgaggttcatgaccaccatccagtttctggcctttacacagtcacctttcactgaggtcaggagcccctgagcagtggctgctccctgacaaccacagccatttctctgcacgggggtcattcataggactaatgtatttcatgatctactgtgcacatccaggcctgtggccacagtcccctgctaaagttgctcaggtgttctagtcctgacttcacctttttgatttggtgtgtgccctagggtatgtacccttccccatctgagcctcggtgtgtccatgtgtctggcgggggatgggtggactgtatgatttccaaggactctaccagtcagtggttctgatgtcatcgggtggaggtggtgttctatacctaaaggatgacctgctccagaaacagcaccagcacagcatgtattttcttctcttctgaaagttctggcttgtagacccctcccctcctttgcaaaggtatgggatagaggggtcagatgcagatctctactgtaaaatgggctccctggtatctcctgtcttccctactgctccaaaccctaaattttggttgtacattttatttgaaaggaaaataaattttttttttgggccaacagttgcctaggcttgcta

SEQ ID NO: 167875 - DNA, 1530 bp, Homo sapiens
  Payload ID: 13020
  Gene Symbol: PGAP2
  Gene Name: post-GPI attachment to proteins 2
  ENST ID: ENST00000496834
  CDS Start-End: 362-658
cgaccccgggccacctgggcccccgggttccgccggcactctcgccaccaccgcgtgggtgcccaattacctgccctcggtgagctcagccatcggcggggaggtgccccagcgctacgtgtggcgtttctgcatcggcctgcactcggcgcctcgcttcttggtggccttcgcctactggaaccactacctcagctgcacctccccgtgttcctgctatcgcccgctctgccgcctcaacttcggcctcaatgtcgtggagaacctcgcgttgctagtgctcacttatgtctcctcctccgaggacttcaccatccacgaaaatgctttcattgtgttcattgcctcatccctcgggcacatgctcctcacctgcattctctggcggttgaccaagaagcacacagtaagtcaggaggatcgcaagtcctacagctggaaacagcggctcttcatcatcaacttcatctccttcttctcggcgctggctgtctactttcggcacaacatgtattgtgaggctggagtgtacaccatctttgccatcctggagtacactgttgtcttaaccaacatggcgttccacatgacggcctggtgggacttcgggaacaaggagctgctcataacctctcagcctgaggaaaagcgattctgaacccttcagtcctgcttgggaggacgcagcccactgcccagaaacaagaaacacgataccattctggccttccccaccccacatcctctcttggccttactgaagatgggggaagggtaagaaggaagggtgtaggccaaggctcaccccagtgctgctggcttctcctctccacccctcatatgggcgtggggtcctcaaacatcacctttacctgagaggccccaagaagctgagctggcagagagctccaccatttggtgctaaaaaaaaaaacgtcctgaggttcatgaccaccatccagtttctggcctttacacagtcacctttcactgaggtcaggagcccctgagcagtggctgctccctgacaaccacagccatttctctgcacgggggtcattcataggactaatgtatttcatgatctactgtgcacatccaggcctgtggccacagtcccctgctaaagttgctcaggtgttctagtcctgacttcacctttttgatttggtgtgtgccctagggtatgtacccttccccatctgagcctcggtgtgtccatgtgtctggcgggggatgggtggactgtatgatttccaaggactctaccagtcagtggttctgatgtcatcgggtggaggtggtgttctatacctaaaggatgacctgctccagaaacagcaccagcacagcatgtattttcttctcttctgaaagttctggcttgtagacccctcccctcctttgcaaaggtatgggatagaggggtcagatgcagatctctactgtaaaatgggctccctggtatctcctgtcttccctactgctccaaaccctaaattttggttgtacattttatttgaaaggaaa

SEQ ID NO: 167876 - DNA, 1696 bp, Homo sapiens
  Payload ID: 13020
  Gene Symbol: PGAP2
  Gene Name: post-GPI attachment to proteins 2
  ENST ID: ENST00000532523
  CDS Start-End: 133-681
ttccttggagcgccgcgactcgggctgagggagctcgggccaatcagagggacggccccagaatggcatggtagatggaacgcagctgagaggcaggttccagtctgcgggggagatggagaaggtgccaccatgctgctgcacaaatcccaggatagctggggaatgagaatccagcactttgggcctaggacctggaaggagaggtcttttgggagaggtgcccaattacctgccctcggtgagctcagccatcggcggggaggtgccccagcgctacgtgtggcgtttctgcatcggcctgcactcggcgcctcgcttcttggtggccttcgcctactggaaccactacctcagctgcacctccccgtgttcctgctatcgcccgctctgccgcctcaacttcggcctcaatgtcgtggagaacctcgcgttgctagtgctcacttatgtctcctcctccgaggacttcaccatccacgaaaatgctttcattgtgttcattgcctcatccctcgggcacatgctcctcacctgcattctctggcggttgaccaagaagcacacagtaagtcaggaggatcgcaagtcctacagctggaaacagcggctcttcatcatcaacttcatctccttcttctcggcgctggctgtctactttcggcacaacatgtattgtgaggctggagtgtacaccatctttgccatcctggagtacactgttgtcttaaccaacatggcgttccacatgacggcctggtgggacttcgggaacaaggagctgctcataacctctcagcctgaggaaaagcgattctgaacccttcagtcctgcttgggaggacgcagcccactgcccagaaacaagaaacacgataccattctggccttccccaccccacatcctctcttggccttactgaagatgggggaagggtaagaaggaagggtgtaggccaaggctcaccccagtgctgctggcttctcctctccacccctcatatgggcgtggggtcctcaaacatcacctttacctgagaggccccaagaagctgagctggcagagagctccaccatttggtgctaaaaaaaaaaacgtcctgaggttcatgaccaccatccagtttctggcctttacacagtcacctttcactgaggtcaggagcccctgagcagtggctgctccctgacaaccacagccatttctctgcacgggggtcattcataggactaatgtatttcatgatctactgtgcacatccaggcctgtggccacagtcccctgctaaagttgctcaggtgttctagtcctgacttcacctttttgatttggtgtgtgccctagggtatgtacccttccccatctgagcctcggtgtgtccatgtgtctggcgggggatgggtggactgtatgatttccaaggactctaccagtcagtggttctgatgtcatcgggtggaggtggtgttctatacctaaaggatgacctgctccagaaacagcaccagcacagcatgtattttcttctcttctgaaagttctggcttgtagacccctcccctcctttgcaaaggtatgggatagaggggtcagatgcagatctctactgtaaaatgggctccctggtatctcctgtcttccctactgctccaaaccctaaattttggttgtacattttatttgaaaggaaaataa

SEQ ID NO: 167877 - DNA, 795 bp, Homo sapiens
  Payload ID: 13020
  Gene Symbol: PGAP2
  Gene Name: post-GPI attachment to proteins 2
  ENST ID: ENST00000459679
  CDS Start-End: 93-719
cgccgcgactcgggctgagggagctcgggccaatcagagggacggccccagaatggcatggtagatggaacgcagctgagaggtctgacaagatgtaccaggtcccactaccactggatcgggatgggaccctggtacggctccgcttcaccatggtggccctggtcacggtctgctgtccacttgtcgccttcctcttctgcatcctctggtccctgctcttccacttcaaggagacaacggccacacactgtggggtgcccaattacctgccctcggtgagctcagccatcggcggggaggtgccccagcgctacgtgtggcgtttctgcatcggcctgcactcggcgcctcgcttcttggtggccttcgcctactggaaccactacctcagctgcacctccccgtgttcctgctatcgcccgctctgccgcctcaacttcggcctcaatgtcgtggagaacctcgcgttgctagtgctcacttatgtctcctcctccgaggacttcaccatccacgaaaatgctttcattgtgttcattgcctcatccctcgggcacatgctcctcacctgcattctctggcggttgaccaagaagcacacagtaagtcaggaggtacggtctatccctagcgggggctccaaggcagcccagaagaaaatcaaggacatctgtcctcaggattcgggtaatggtgaggtgggaactgagttctaatgggaaccctggcagaggggtgctggggttggggctggggcttgggaacaaactgagggtggttggtcagaatcta

SEQ ID NO: 167878 - DNA, 830 bp, Homo sapiens
  Payload ID: 13020
  Gene Symbol: PGAP2
  Gene Name: post-GPI attachment to proteins 2
  ENST ID: ENST00000464261
  CDS Start-End: 91-795
ccgcgactcgggctgagggagctcgggccaatcagagggacggccccagaatggcatggtagatggaacgcagctgagaggtctgacaagatgtaccaggtcccactaccactggatcgggatgggaccctggtacggctccgcttcaccatggtggccctggtcacggtctgctgtccacttgtcgccttcctcttctgcatcctctggtccctgctcttccacttcaaggagacaacggccacacactgtggggtgcccaattacctgccctcggtgagctcagccatcggcggggaggtgccccagcgctacgtgtggcgtttctgcatcggcctgcactcggcgcctcgcttcttggtggccttcgcctactggaaccactacctcagctgcacctccccgtgttcctgctatcgcccgctctgccgcctcaacttcggcctcaatgtcgtggagaacctcgcgttgctagtgctcacttatgtctcctcctccgaggacttcaccatccacgaaaatgctttcattgtgttcattgcctcatccctcgggcacatgctcctcacctgcattctctggcggttgaccaagaagcacacagtaagtcaggaggtacggtctatccctagcgggggctccaaggcagcccagaagaaaatcaaggacatctgtcctcaggattcgggtaatggatcgcaagtcctacagctggaaacagcggctcttcatcatcaacttcatctccttcttctcggcgctggctgtctactttcggcacaacatgtattgtgaggctggagtgtacaccatctttgccatcctggagt

SEQ ID NO: 167879 - DNA, 1100 bp, Homo sapiens
  Payload ID: 13020
  Gene Symbol: PGAP2
  Gene Name: post-GPI attachment to proteins 2
  ENST ID: ENST00000465307
  CDS Start-End: 139-774
ctctcctgaacaaaggcgggaacagctctaggccagagtttctgggatgtgcctcaccgggtctcactgcctgcaaaggtagatggaacgcagctgagaggactgaagcttcaataggagttccaggcattaagatggatggtggagatgcacaagaacatggtcatttccttagactaccccaggcaggttccagtctgcgggggagatggagaaggtgccaccatgctgctgcacaaatcccaggatagctggggaatgagaatccagcactttgggcctaggacctggaaggagaggtcttttgggagaggtgcccaattacctgccctcggtgagctcagccatcggcggggaggtgccccagcgctacgtgtggcgtttctgcatcggcctgcactcggcgcctcgcttcttggtggccttcgcctactggaaccactacctcagctgcacctccccgtgttcctgctatcgcccgctctgccgcctcaacttcggcctcaatgtcgtggagaacctcgcgttgctagtgctcacttatgtctcctcctccgaggacttcaccatccacgaaaatgctttcattgtgttcattgcctcatccctcgggcacatgctcctcacctgcattctctggcggttgaccaagaagcacacagtaagtcaggaggatcgcaagtcctacagctggaaacagcggctcttcatcatcaacttcatctccttcttctcggcgctggctgtctactttcggcacaacatgtattgtgaggctggagtgtacaccatctttgccatcctggagtacactgttgtcttaaccaacatggcgttccacatgacggcctggtgggacttcgggaacaaggagctgctcataacctctcagcctgaggaaaagcgattctgaacccttcagtcctgcttgggaggacgcagcccactgcccagaaacaagaaacacgataccattctggccttccccaccccacatcctctcttggccttactgaagatgggggaagggtaagaaggaagggtgtaggccaaggctcaccccagtgctgctggcttctcctctccacccctcatatggg

SEQ ID NO: 167880 - DNA, 483 bp, Homo sapiens
  Payload ID: 13020
  Gene Symbol: PGAP2
  Gene Name: post-GPI attachment to proteins 2
  ENST ID: ENST00000524661
  CDS Start-End: 77-247
gagggagctcgggccaatcagagggacggccccagaatggcatggtagatggaacgcagctgagaggtctgacaagatgtaccaggtcccactaccactggatcgggatgggaccctggtacggctccgcttcaccatggtggccctggtcacggtctgctgtccacttgtcgccttcctcttctgcatcctctggtccctgctcttccacttcaaggagacaacggccacacactgtggggactgaagcttcaataggagttccaggcattaagatggatggtggagatgcacaagaacatggtcatttccttagactaccccaggttccagtctgcgggggagatggagaaggtgccaccatgctgctgcacaaatcccaggatagctggggaatgagaatccagcactttgggcctaggacctggaaggagaggtcttttgggagaggtgcccaattacctgccctcggtgagctcagcc

SEQ ID NO: 167881 - DNA, 798 bp, Homo sapiens
  Payload ID: 13020
  Gene Symbol: PGAP2
  Gene Name: post-GPI attachment to proteins 2
  ENST ID: ENST00000469307
  CDS Start-End: 64-798
ccgggccacctgggcccccgggttccgccggcactctcgccaccaccgcgtgggtctgacaagatgtaccaggtcccactaccactggatcgggatgggaccctggtacggctccgcttcaccatggtggccctggtcacggtctgctgtccacttgtcgccttcctcttctgcatcctctggtccctgctcttccacttcaaggagacaacggccacacactgtggggtgcccaattacctgccctcggtgagctcagccatcggcggggaggtgccccagcgctacgtgtggcgtttctgcatcggcctgcactcggcgcctcgcttcttggtggccttcgcctactggaaccactacctcagctgcacctccccgtgttcctgctatcgcccgctctgccgcctcaacttcggcctcaatgtcgtggagaacctcgcgttgctagtgctcacttatgtctcctcctccgaggacttcaccatccacgaaaatgctttcattgtgttcattgcctcatccctcgggcacatgctcctcacctgcattctctggcggttgaccaagaagcacacagatcgcaagtcctacagctggaaacagcggctcttcatcatcaacttcatctccttcttctcggcgctggctgtctactttcggcacaacatgtattgtgaggctggagtgtacaccatctttgccatcctggagtacactgttgtcttaaccaacatggcgttccacatgacggcctggtgggacttcgggaacaaggagctgctcataacctctcagcct

SEQ ID NO: 167882 - DNA, 1259 bp, Homo sapiens
  Payload ID: 13020
  Gene Symbol: PGAP2
  Gene Name: post-GPI attachment to proteins 2
  Uniprot ID: Q9UHJ9
  ENST ID: ENST00000464906
  CDS Start-End: 90-1037
cgcgactcgggctgagggagctcgggccaatcagagggacggccccagaatggcatggtagatggaacgcagctgagaggtctgacaagatgtaccaggtcccactaccactggatcgggatgggaccctggtacggctccgcttcaccatggtggccctggtcacggtctgctgtccacttgtcgccttcctcttctgcatcctctggtccctgctcttccacttcaaggagacaacggccacacactgtggggccacgccctgcaggatgttctctgcggcctcccagcctttggaccccgatgggaccttgttccggcttcgcttcacagccatggtctggtgggccatcacttttcctgtgttcggcttcttcttctgcatcatctggtccctggtgttccactttgagtacacggtggccactgactgtggggtgcccaattacctgccctcggtgagctcagccatcggcggggaggtgccccagcgctacgtgtggcgtttctgcatcggcctgcactcggcgcctcgcttcttggtggccttcgcctactggaaccactacctcagctgcacctccccgtgttcctgctatcgcccgctctgccgcctcaacttcggcctcaatgtcgtggagaacctcgcgttgctagtgctcacttatgtctcctcctccgaggacttcaccatccacgaaaatgctttcattgtgttcattgcctcatccctcgggcacatgctcctcacctgcattctctggcggttgaccaagaagcacacagtaagtcaggaggatcgcaagtcctacagctggaaacagcggctcttcatcatcaacttcatctccttcttctcggcgctggctgtctactttcggcacaacatgtattgtgaggctggagtgtacaccatctttgccatcctggagtacactgttgtcttaaccaacatggcgttccacatgacggcctggtgggacttcgggaacaaggagctgctcataacctctcagcctgaggaaaagcgattctgaacccttcagtcctgcttgggaggacgcagcccactgcccagaaacaagaaacacgataccattctggccttccccaccccacatcctctcttggccttactgaagatgggggaagggtaagaaggaagggtgtaggccaaggctcaccccagtgctgctggcttctcctctccacccctcatatgggcgtggggtcctcaaacatcacctttacctgagagg

SEQ ID NO: 167883 - DNA, 863 bp, Homo sapiens
  Payload ID: 13020
  Gene Symbol: PGAP2
  Gene Name: post-GPI attachment to proteins 2
  ENST ID: ENST00000464229
  CDS Start-End: 385-669
gccgcgactcgggctgagggagctcgggccaatcagagggacggccccagaatggcatggtagatggaacgcagctgagaggtgcccaattacctgccctcggtgagctcagccatcggcggggaggtgccccagcgctacgtgtggcgtttctgcatcggcctgcactcggcgcctcgcttcttggtggccttcgcctactggaaccactacctcagctgcacctccccgtgttcctgctatcgcccgctctgccgcctcaacttcggcctcaatgtcgtggagaacctcgcgttgctagtgctcacttatgtctcctcctccgaggacttcaccatccacgaaaatgctttcattgtgttcattgcctcatccctcgggcacatgctcctcacctgcattctctggcggttgaccaagaagcacacagatcgcaagtcctacagctggaaacagcggctcttcatcatcaacttcatctccttcttctcggcgctggctgtctactttcggcacaacatgtattgtgaggctggagtgtacaccatctttgccatcctggagtacactgttgtcttaaccaacatggcgttccacatgacggcctggtgggacttcgggaacaaggagctgctcataacctctcagcctgaggaaaagcgattctgaacccttcagtcctgcttgggaggacgcagcccactgcccagaaacaagaaacacgataccattctggccttccccaccccacatcctctcttggccttactgaagatgggggaagggtaagaaggaagggtgtaggccaaggctcaccccagtgctgctggcttctcctctccacccctcatatgggcgtgggg

SEQ ID NO: 167884 - DNA, 931 bp, Homo sapiens
  Payload ID: 13020
  Gene Symbol: PGAP2
  Gene Name: post-GPI attachment to proteins 2
  Uniprot ID: Q9UHJ9
  ENST ID: ENST00000463452
  CDS Start-End: 84-848
cgcagagccagcccccgaccccgggccacctgggcccccgggttccgccggcactctcgccaccaccgcgtgggtctgacaagatgtaccaggtcccactaccactggatcgggatgggaccctggtacggctccgcttcaccatggtggccctggtcacggtctgctgtccacttgtcgccttcctcttctgcatcctctggtccctgctcttccacttcaaggagacaacggccacacactgtggggtgcccaattacctgccctcggtgagctcagccatcggcggggaggtgccccagcgctacgtgtggcgtttctgcatcggcctgcactcggcgcctcgcttcttggtggccttcgcctactggaaccactacctcagctgcacctccccgtgttcctgctatcgcccgctctgccgcctcaacttcggcctcaatgtcgtggagaacctcgcgttgctagtgctcacttatgtctcctcctccgaggacttcaccatccacgaaaatgctttcattgtgttcattgcctcatccctcgggcacatgctcctcacctgcattctctggcggttgaccaagaagcacacagtaagtcaggaggatcgcaagtcctacagctggaaacagcggctcttcatcatcaacttcatctccttcttctcggcgctggctgtctactttcggcacaacatgtattgtgaggctggagtgtacaccatctttgccatcctggagtacactgttgtcttaaccaacatggcgttccacatgacggcctggtgggacttcgggaacaaggagctgctcataacctctcagcctgaggaaaagcgattctgaacccttcagtcctgcttgggaggacgcagcccactgcccagaaacaagaaacacgataccattctggccttccccaccccaca

SEQ ID NO: 167885 - DNA, 894 bp, Homo sapiens
  Payload ID: 13020
  Gene Symbol: PGAP2
  Gene Name: post-GPI attachment to proteins 2
  ENST ID: ENST00000479072
  CDS Start-End: 490-774
cgaccccgggccacctgggcccccgggttccgccggcactctcgccaccaccgcgtgggcaggttccagtctgcgggggagatggagaaggtgccaccatgctgctgcacaaatcccaggatagctggggaatgagaatccagcactttgggcctaggacctggaaggagaggtcttttgggagaggtgcccaattacctgccctcggtgagctcagccatcggcggggaggtgccccagcgctacgtgtggcgtttctgcatcggcctgcactcggcgcctcgcttcttggtggccttcgcctactggaaccactacctcagctgcacctccccgtgttcctgctatcgcccgctctgccgcctcaacttcggcctcaatgtcgtggagaacctcgcgttgctagtgctcacttatgtctcctcctccgaggacttcaccatccacgaaaatgctttcattgtgttcattgcctcatccctcgggcacatgctcctcacctgcattctctggcggttgaccaagaagcacacagatcgcaagtcctacagctggaaacagcggctcttcatcatcaacttcatctccttcttctcggcgctggctgtctactttcggcacaacatgtattgtgaggctggagtgtacaccatctttgccatcctggagtacactgttgtcttaaccaacatggcgttccacatgacggcctggtgggacttcgggaacaaggagctgctcataacctctcagcctgaggaaaagcgattctgaacccttcagtcctgcttgggaggacgcagcccactgcccagaaacaagaaacacgataccattctggccttccccaccccacatcctctcttggccttactgaagatgggggaagggtaa

SEQ ID NO: 167886 - DNA, 810 bp, Homo sapiens
  Payload ID: 13020
  Gene Symbol: PGAP2
  Gene Name: post-GPI attachment to proteins 2
  ENST ID: ENST00000490830
  CDS Start-End: 384-620
ccgcgactcgggctgagggagctcgggccaatcagagggacggccccagaatggcatggtagatggaacgcagctgagaggtgcccaattacctgccctcggtgagctcagccatcggcggggaggtgccccagcgctacgtgtggcgtttctgcatcggcctgcactcggcgcctcgcttcttggtggccttcgcctactggaaccactacctcagctgcacctccccgtgttcctgctatcgcccgctctgccgcctcaacttcggcctcaatgtcgtggagaacctcgcgttgctagtgctcacttatgtctcctcctccgaggacttcaccatccacgaaaatgctttcattgtgttcattgcctcatccctcgggcacatgctcctcacctgcattctctggcggttgaccaagaagcacacagtaagtcaggaggtacggtctatccctagcgggggctccaaggcagcccagaagaaaatcaaggacatctgtcctcaggattcgggtaatggatcgcaagtcctacagctggaaacagcggctcttcatcatcaacttcatctccttcttctcggcgctggctgtctactttcggcacaacatgtattgtgaggctggagtgtacaccatctttgccatcctggagtacactgttgtcttaaccaacatggcgttccacatgacggcctggtgggacttcgggaacaaggagctgctcataacctctcagcctgaggaaaagcgattctgaacccttcagtcctgcttgggaggacgcagcccactgcccagaaacaagaaa

SEQ ID NO: 167887 - DNA, 699 bp, Homo sapiens
  Payload ID: 13020
  Gene Symbol: PGAP2
  Gene Name: post-GPI attachment to proteins 2
  ENST ID: ENST00000464441
  CDS Start-End: 84-380
agaatggcatggtagatggaacgcagctgagagccatccacgaaaatgctttcattgtgttcattgcctcatccctcgggcacatgctcctcacctgcattctctggcggttgaccaagaagcacacagtaagtcaggaggatcgcaagtcctacagctggaaacagcggctcttcatcatcaacttcatctccttcttctcggcgctggctgtctactttcggcacaacatgtattgtgaggctggagtgtacaccatctttgccatcctggagtacactgttgtcttaaccaacatggcgttccacatgacggcctggtgggacttcgggaacaaggagctgctcataacctctcagcctgaggaaaagcgattctgaacccttcagtcctgcttgggaggacgcagcccactgcccagaaacaagaaacacgataccattctggccttccccaccccacatcctctcttggccttactgaagatgggggaagggtaagaaggaagggtgtaggccaaggctcaccccagtgctgctggcttctcctctccacccctcatatgggcgtggggtcctcaaacatcacctttacctgagaggccccaagaagctgagctggcagagagctccaccatttggtgctaaaaaaaaaaacgtcctgaggttcatgaccaccatccagtttctggcctttaca

SEQ ID NO: 167888 - DNA, 745 bp, Homo sapiens
  Payload ID: 13020
  Gene Symbol: PGAP2
  Gene Name: post-GPI attachment to proteins 2
  ENST ID: ENST00000475884
  CDS Start-End: 69-314
tcgggccaatcagagggacggccccagaatggcatggtagatggaacgcagctgagaggtctgacaagatgtaccaggtcccactaccactggatcgggatgggaccctggtacggctccgcttcaccatggtggccctggtcacggtctgctgtccacttgtcgccttcctcttctgcatcctctggtccctgctcttccacttcaaggagacaacggccacacactgtgggccatccacgaaaatgctttcattgtgttcattgcctcatccctcgggcacatgctcctcacctgcattctctggcggttgaccaagaagcacacagatcgcaagtcctacagctggaaacagcggctcttcatcatcaacttcatctccttcttctcggcgctggctgtctactttcggcacaacatgtattgtgaggctggagtgtacaccatctttgccatcctggagtacactgttgtcttaaccaacatggcgttccacatgacggcctggtgggacttcgggaacaaggagctgctcataacctctcagcctgaggaaaagcgattctgaacccttcagtcctgcttgggaggacgcagcccactgcccagaaacaagaaacacgataccattctggccttccccaccccacatcctctcttggccttactgaagatgggggaagggtaagaaggaagggtgtaggccaaggctcaccccagtgctgctggcttctcctctccaccc

SEQ ID NO: 167889 - DNA, 1513 bp, Homo sapiens
  Payload ID: 13020
  Gene Symbol: PGAP2
  Gene Name: post-GPI attachment to proteins 2
  ENST ID: ENST00000532017
  CDS Start-End: 145-315
attcgaccctttccttgccccggtccgccggcgctgctgggaaggcttcctagtctctctgcccgcacttcccgcccagaccacgtgcggagcctgagggccctcttggaaggtagatggaacgcagctgagaggtctgacaagatgtaccaggtcccactaccactggatcgggatgggaccctggtacggctccgcttcaccatggtggccctggtcacggtctgctgtccacttgtcgccttcctcttctgcatcctctggtccctgctcttccacttcaaggagacaacggccacacactgtggggactgaagcttcaataggagttccaggcattaagatggatggtggagatgcacaagaacatggtcatttccttagactaccccaggtgcccaattacctgccctcggtgagctcagccatcggcggggaggtgccccagcgctacgtgtggcgtttctgcatcggcctgcactcggcgcctcgcttcttggtggccttcgcctactggaaccactacctcagctgcacctccccgtgttcctgctatcgcccgctctgccgcctcaacttcggcctcaatgtcgtggagaacctcgcgttgctagtgctcacttatgtctcctcctccgaggacttcaccatccacgaaaatgctttcattgtgttcattgcctcatccctcgggcacatgctcctcacctgcattctctggcggttgaccaagaagcacacagtaagtcaggagtggaagcggcaggaataccactgctcctcggcccatcactcccccagaggcagggacgtgaacacatagtcgtcattcttgctgcccctgcctgtgctcccttccatgaccgctagtgggagccaagggagataaggcccagcccttaggagttagggctgagaggggagcccacgctctcatacccagcaagctgcagagtgatcagacagcccattccctaggatcgcaagtcctacagctggaaacagcggctcttcatcatcaacttcatctccttcttctcggcgctggctgtctactttcggcacaacatgtattgtgaggctggagtgtacaccatctttgccatcctggagtacactgttgtcttaaccaacatggcgttccacatgacggcctggtgggacttcgggaacaaggagctgctcataacctctcagcctgaggaaaagcgattctgaacccttcagtcctgcttgggaggacgcagcccactgcccagaaacaagaaacacgataccattctggccttccccaccccacatcctctcttggccttactgaagatgggggaagggtaagaaggaagggtgtaggccaaggctcaccccagtgctgctggcttctcctctccacccctcatatgggcgtggggtcctcaaacatcacctttacctgagaggccccaagaagctgagctggcagagagctccaccatttggtgctaaaaaaaaaaacgtcctgaggttcatgacc

SEQ ID NO: 167890 - DNA, 879 bp, Homo sapiens
  Payload ID: 13020
  Gene Symbol: PGAP2
  Gene Name: post-GPI attachment to proteins 2
  ENST ID: ENST00000489571
  CDS Start-End: 175-345
gagggacggccccagaatggcatggtaactattcgaccctttccttgccccggtccgccggcgctgctgggaaggcttcctagtctctctgcccgcacttcccgcccagaccacgtgcggagcctgagggccctcttggaaggtagatggaacgcagctgagaggtctgacaagatgtaccaggtcccactaccactggatcgggatgggaccctggtacggctccgcttcaccatggtggccctggtcacggtctgctgtccacttgtcgccttcctcttctgcatcctctggtccctgctcttccacttcaaggagacaacggccacacactgtggggactgaagcttcaataggagttccaggcattaagatggatggtggagatgcacaagaacatggtcatttccttagactaccccaggcaggttccagtctgcgggggagatggagaaggtgccaccatgctgctgcacaaatcccaggatagctggggaatgagaatccagcactttgggcctaggacctggaaggagaggtcttttgggagaggtgcccaattacctgccctcggtgagctcagccatcggcggggaggtgccccagcgctacgtgtggcgtttctgcatcggcctgcactcggcgcctcgcttcttggtggccttcgcctactggaaccactacctcagctgcacctccccgtgttcctgctatcgcccgctctgccgcctcaacttcggcctcaatgtcgtggagaacctcgcgttgctagtgctcacttatgtctcctcctccgaggacttcaccatccacgaaaatgctttcattgtgttcattgcctcatccctcgggcacatgctcctcacctgcattctctgg

SEQ ID NO: 167891 - DNA, 2737 bp, Homo sapiens
  Payload ID: 13021
  Gene Symbol: PGAP3
  Gene Name: post-GPI attachment to proteins 3
  Uniprot ID: Q96FM1
  ENST ID: ENST00000300658
  CDS Start-End: 94-1056
gtagaataaagaacacaggaacttccggttactccggaagtggaagcttcatactcctaagctcctcccccggcggcgagccagggagaaaggatggccggcctggcggcgcggttggtcctgctagctggggcagcggcgctggcgagcggctcccagggcgaccgtgagccggtgtaccgcgactgcgtactgcagtgcgaagagcagaactgctctgggggcgctctgaatcacttccgctcccgccagccaatctacatgagtctagcaggctggacctgtcgggacgactgtaagtatgagtgtatgtgggtcaccgttgggctctacctccaggaaggtcacaaagtgcctcagttccatggcaagtggcccttctcccggttcctgttctttcaagagccggcatcggccgtggcctcgtttctcaatggcctggccagcctggtgatgctctgccgctaccgcaccttcgtgccagcctcctcccccatgtaccacacctgtgtggccttcgcctgggtgtccctcaatgcatggttctggtccacagttttccacaccagggacactgacctcacagagaaaatggactacttctgtgcctccactgtcatcctacactcaatctacctgtgctgcgtcaggaccgtggggctgcagcacccagctgtggtcagtgccttccgggctctcctgctgctcatgctgaccgtgcacgtctcctacctgagcctcatccgcttcgactatggctacaacctggtggccaacgtggctattggcctggtcaacgtggtgtggtggctggcctggtgcctgtggaaccagcggcggctgcctcacgtgcgcaagtgcgtggtggtggtcttgctgctgcaggggctgtccctgctcgagctgcttgacttcccaccgctcttctgggtcctggatgcccatgccatctggcacatcagcaccatccctgtccacgtcctctttttcagctttctggaagatgacagcctgtacctgctgaaggaatcagaggacaagttcaagctggactgaagaccttggagcgagtctgccccagtggggatcctgcccccgccctgctggcctcccttctcccctcaacccttgagatgattttctcttttcaacttcttgaacttggacatgaaggatgtgggcccagaatcatgtggccagcccaccccctgttggccctcaccagccttggagtctgttctagggaaggcctcccagcatctgggactcgagagtgggcagcccctctacctcctggagctgaactggggtggaactgagtgtgctcttagctctaccgggaggacagctgcctgtttcctccccatcagcctcctccccacatccccagctgcctggctgggtcctgaagccctctgtctacctgggagaccagggaccacaggccttagggatacagggggtccccttctgttaccaccccccaccctcctccaggacaccactaggtggtgctggatgcttgttctttggccagccaaggttcacggcgattctccccatgggatcttgagggaccaagctgctgggattgggaaggagtttcaccctgaccattgccctagccaggttcccaggaggcctcaccatactccctttcagggccagggctccagcaagcccagggcaaggatcctgtgctgctgtctggttgagagcctgccaccgtgtgtcgggagtgtgggccaggctgagtgcataggtgacagggccgtgagcatgggcctgggtgtgtgtgagctcaggcctaggtgcgcagtgtggagacgggtgttgtcggggaagaggtgtggcttcaaagtgtgtgtgtgcagggggtgggtgtgttagcgtgggttaggggaacgtgtgtgcgcgtgctggtgggcatgtgagatgagtgactgccggtgaatgtgtccacagttgagaggttggagcaggatgagggaatcctgtcaccatcaataatcacttgtggagcgccagctctgcccaaggcgccacctgggcggacagccaggagctctccatggccaggctgcctgtgtgcatgttccctgtctggtgcccctttgcccgcctcctgcaaacctcacagggtccccacacaacagtgccctccagaagcagcccctcggaggcagaggaaggaaaatggggatggctggggctctctccatcctccttttctccttgccttcgcatggctggccttcccctccaaaacctccattcccctgctgccagcccctttgccatagcctgattttggggaggaggaaggggcgatttgagggagaaggggagaaagcttatggctgggtctggtttcttcccttcccagagggtcttactgttccagggtggccccagggcaggcaggggccacactatgcctgcgccctggtaaaggtgacccctgccatttaccagcagccctggcatgttcctgccccacaggaatagaatggagggagctccagaaactttccatcccaaaggcagtctccgtggttgaagcagactggatttttgctctgcccctgaccccttgtccctctttgagggaggggagctatgctaggactccaacctcagggactcgggtggcctgcgctagcttcttttgatactgaaaacttttaaggtgggagggtggcaagggatgtgcttaataaatcaattccaagcctca

SEQ ID NO: 167892 - DNA, 2533 bp, Homo sapiens
  Payload ID: 13021
  Gene Symbol: PGAP3
  Gene Name: post-GPI attachment to proteins 3
  Uniprot ID: Q96FM1
  ENST ID: ENST00000378011
  CDS Start-End: 44-853
atactcctaagctcctcccccggcggcgagccagggagaaaggatggccggcctggcggcgcggttggtcctgctagctggggcagcggcgctggcgagcggctcccagggcgaccgtgagccggtgtaccgcgactgcgtactgcagtgcgaagagcagaactgctctgggggcgctctgaatcacttccgctcccgccagccaatctacatgagtctagcaggctggacctgtcgggacgactgtaagtatgagtgtatgtgggtcaccgttgggctctacctccaggaaggtcacaaagtgcctcagttccatggcaaggtgtccctcaatgcatggttctggtccacagttttccacaccagggacactgacctcacagagaaaatggactacttctgtgcctccactgtcatcctacactcaatctacctgtgctgcgtcaggaccgtggggctgcagcacccagctgtggtcagtgccttccgggctctcctgctgctcatgctgaccgtgcacgtctcctacctgagcctcatccgcttcgactatggctacaacctggtggccaacgtggctattggcctggtcaacgtggtgtggtggctggcctggtgcctgtggaaccagcggcggctgcctcacgtgcgcaagtgcgtggtggtggtcttgctgctgcaggggctgtccctgctcgagctgcttgacttcccaccgctcttctgggtcctggatgcccatgccatctggcacatcagcaccatccctgtccacgtcctctttttcagctttctggaagatgacagcctgtacctgctgaaggaatcagaggacaagttcaagctggactgaagaccttggagcgagtctgccccagtggggatcctgcccccgccctgctggcctcccttctcccctcaacccttgagatgattttctcttttcaacttcttgaacttggacatgaaggatgtgggcccagaatcatgtggccagcccaccccctgttggccctcaccagccttggagtctgttctagggaaggcctcccagcatctgggactcgagagtgggcagcccctctacctcctggagctgaactggggtggaactgagtgtgctcttagctctaccgggaggacagctgcctgtttcctccccatcagcctcctccccacatccccagctgcctggctgggtcctgaagccctctgtctacctgggagaccagggaccacaggccttagggatacagggggtccccttctgttaccaccccccaccctcctccaggacaccactaggtggtgctggatgcttgttctttggccagccaaggttcacggcgattctccccatgggatcttgagggaccaagctgctgggattgggaaggagtttcaccctgaccattgccctagccaggttcccaggaggcctcaccatactccctttcagggccagggctccagcaagcccagggcaaggatcctgtgctgctgtctggttgagagcctgccaccgtgtgtcgggagtgtgggccaggctgagtgcataggtgacagggccgtgagcatgggcctgggtgtgtgtgagctcaggcctaggtgcgcagtgtggagacgggtgttgtcggggaagaggtgtggcttcaaagtgtgtgtgtgcagggggtgggtgtgttagcgtgggttaggggaacgtgtgtgcgcgtgctggtgggcatgtgagatgagtgactgccggtgaatgtgtccacagttgagaggttggagcaggatgagggaatcctgtcaccatcaataatcacttgtggagcgccagctctgcccaaggcgccacctgggcggacagccaggagctctccatggccaggctgcctgtgtgcatgttccctgtctggtgcccctttgcccgcctcctgcaaacctcacagggtccccacacaacagtgccctccagaagcagcccctcggaggcagaggaaggaaaatggggatggctggggctctctccatcctccttttctccttgccttcgcatggctggccttcccctccaaaacctccattcccctgctgccagcccctttgccatagcctgattttggggaggaggaaggggcgatttgagggagaaggggagaaagcttatggctgggtctggtttcttcccttcccagagggtcttactgttccagggtggccccagggcaggcaggggccacactatgcctgcgccctggtaaaggtgacccctgccatttaccagcagccctggcatgttcctgccccacaggaatagaatggagggagctccagaaactttccatcccaaaggcagtctccgtggttgaagcagactggatttttgctctgcccctgaccccttgtccctctttgagggaggggagctatgctaggactccaacctcagggactcgggtggcctgcgctagcttcttttgatactgaaaacttttaaggtgggagggtggcaagggatgtgcttaataaatcaattccaagcctc

SEQ ID NO: 167893 - DNA, 970 bp, Homo sapiens
  Payload ID: 13021
  Gene Symbol: PGAP3
  Gene Name: post-GPI attachment to proteins 3
  Uniprot ID: Q96FM1
  ENST ID: ENST00000429199
  CDS Start-End: 44-943
atactcctaagctcctcccccggcggcgagccagggagaaaggatggccggcctggcggcgcggttggtcctgctagctggggcagcggcgctggcgagcggctcccagggcgaccgtgagccggtgtaccgcgactgcgtactgcagtgcgaagagcagaactgctctgggggcgctctgaatcacttccgctcccgccagccaatctacatgagtctagcaggctggacctgtcgggacgactgtaagtatgagtgtatgtgggtcaccgttgggctctacctccaggaaggtcacaaagtgcctcagttccatggcaagtggcccttctcccggttcctgttctttcaagagccggcatcggccgtggcctcgtttctcaatggcctggccagcctggtgatgctctgccgctaccgcaccttcgtgccagcctcctcccccatgtaccacacctgtgtggccttcgcctggaaaatggactacttctgtgcctccactgtcatcctacactcaatctacctgtgctgcgtcaggaccgtggggctgcagcacccagctgtggtcagtgccttccgggctctcctgctgctcatgctgaccgtgcacgtctcctacctgagcctcatccgcttcgactatggctacaacctggtggccaacgtggctattggcctggtcaacgtggtgtggtggctggcctggtgcctgtggaaccagcggcggctgcctcacgtgcgcaagtgcgtggtggtggtcttgctgctgcaggggctgtccctgctcgagctgcttgacttcccaccgctcttctgggtcctggatgcccatgccatctggcacatcagcaccatccctgtccacgtcctctttttcagctttctggaagatgacagcctgtacctgctgaaggaatcagaggacaagttcaagctggactgaagaccttggagcgagtctgccccagtg

SEQ ID NO: 167894 - DNA, 804 bp, Homo sapiens
  Payload ID: 13021
  Gene Symbol: PGAP3
  Gene Name: post-GPI attachment to proteins 3
  ENST ID: ENST00000584620
  CDS Start-End: 1-452
cggcgcggttggtcctgctagctggggcagcggcgctggcgagcggctcccagggcgaccgtgagccggtgtaccgcgactgcgtactgcagtgcgaagagcagaactgctctgggggcgctctgaatcacttccgctcccgccagccaatctacatgagtctagcaggctggacctgtcgggacgactgtaagtatgagtgtatgtgggtcaccgttgggctctacctccaggaaggtcacaaagtgcctcagttccatggcaagtggcccttctcccggttcctgttctttcaagagccggcatcggccgtggcctcgtttctcaatggcctggccagcctggtgatgctctgccgctaccgcaccttcgtgccagcctcctcccccatgtaccacacctgtgtggccttcgcctggatgagaaaactgaggcacagcaaggctaaataacttgcccaaggacacacaggaaatgcagagccaggaactgaaccctggcagtctggctgtagggcttgcattcttaatgataccactacctcccaaatctgaggaaagggtgtccctcaatgcatggttctggtccacagttttccacaccagggacactgacctcacagagaaaatggactacttctgtgcctccactgtcatcctacactcaatctacctgtgctgcgtcaggtgagcctgcctgggtggctgcaggggcaaaatcgaaccctgggggcagaaaggggtcacccagccttcccctgggggccttcttcactagtctcccaacacctacgccccccaaccc

SEQ ID NO: 167895 - DNA, 2220 bp, Homo sapiens
  Payload ID: 13021
  Gene Symbol: PGAP3
  Gene Name: post-GPI attachment to proteins 3
  ENST ID: ENST00000579146
  CDS Start-End: 44-490
atactcctaagctcctcccccggcggcgagccagggagaaaggatggccggcctggcggcgcggttggtcctgctagctggggcagcggcgctggcgagcggctcccagggcgaccgtgagccggtgtaccgcgactgcgtactgcagtgcgaagagcagaactgctctgggggcgctctgaatcacttccgctcccgccagccaatctacatgagtctagcaggctggacctgtcgggacgactgtaagtatgagtgtatgtgggtcaccgttgggctctacctccaggaaggtcacaaagtgcctcagttccatggcaagtggcccttctcccggttcctgttctttcaagagccggcatcggccgtggcctcgtttctcaatggcctggccagcctggtgatgctctgccgctaccgcaccttcgtgccagcctcctcccccatgtaccacacctgtgtggccttcgcctggctttctggaagatgacagcctgtacctgctgaaggaatcagaggacaagttcaagctggactgaagaccttggagcgagtctgccccagtggggatcctgcccccgccctgctggcctcccttctcccctcaacccttgagatgattttctcttttcaacttcttgaacttggacatgaaggatgtgggcccagaatcatgtggccagcccaccccctgttggccctcaccagccttggagtctgttctagggaaggcctcccagcatctgggactcgagagtgggcagcccctctacctcctggagctgaactggggtggaactgagtgtgctcttagctctaccgggaggacagctgcctgtttcctccccatcagcctcctccccacatccccagctgcctggctgggtcctgaagccctctgtctacctgggagaccagggaccacaggccttagggatacagggggtccccttctgttaccaccccccaccctcctccaggacaccactaggtggtgctggatgcttgttctttggccagccaaggttcacggcgattctccccatgggatcttgagggaccaagctgctgggattgggaaggagtttcaccctgaccattgccctagccaggttcccaggaggcctcaccatactccctttcagggccagggctccagcaagcccagggcaaggatcctgtgctgctgtctggttgagagcctgccaccgtgtgtcgggagtgtgggccaggctgagtgcataggtgacagggccgtgagcatgggcctgggtgtgtgtgagctcaggcctaggtgcgcagtgtggagacgggtgttgtcggggaagaggtgtggcttcaaagtgtgtgtgtgcagggggtgggtgtgttagcgtgggttaggggaacgtgtgtgcgcgtgctggtgggcatgtgagatgagtgactgccggtgaatgtgtccacagttgagaggttggagcaggatgagggaatcctgtcaccatcaataatcacttgtggagcgccagctctgcccaaggcgccacctgggcggacagccaggagctctccatggccaggctgcctgtgtgcatgttccctgtctggtgcccctttgcccgcctcctgcaaacctcacagggtccccacacaacagtgccctccagaagcagcccctcggaggcagaggaaggaaaatggggatggctggggctctctccatcctccttttctccttgccttcgcatggctggccttcccctccaaaacctccattcccctgctgccagcccctttgccatagcctgattttggggaggaggaaggggcgatttgagggagaaggggagaaagcttatggctgggtctggtttcttcccttcccagagggtcttactgttccagggtggccccagggcaggcaggggccacactatgcctgcgccctggtaaaggtgacccctgccatttaccagcagccctggcatgttcctgccccacaggaatagaatggagggagctccagaaactttccatcccaaaggcagtctccgtggttgaagcagactggatttttgctctgcccctgaccccttgtccctctttgagggaggggagctatgctaggactccaacctcagggactcgggtggcctgcgctagcttcttttgatactgaaaacttttaaggtgggagggtggcaagggatgtgcttaataaatcaattccaagcctca

SEQ ID NO: 167896 - DNA, 538 bp, Homo sapiens
  Payload ID: 13021
  Gene Symbol: PGAP3
  Gene Name: post-GPI attachment to proteins 3
  ENST ID: ENST00000584856
  CDS Start-End: 328-538
aggaaagctactgtggacgccatgcttcattggaccctactctgtgccactctgacctacagccacgttcctcagaacactgagtccccaagactccagaggaggcaggtgttatcattccccattttgcagaagaggaaccttgagccttgagattccacgagctaaaggaactttcccaaggtcacagagctgagctgggaactgagccatggcagatttggcttcacccattaccctcaagagccccagtcaagggtaccaagaggggagacagaggaaagaagtccaggctggacctgtcgggacgactgtaagtatgagtgtatgtgggtcaccgttgggctctacctccaggaaggtcacaaagtgcctcagttccatggcaagtggcccttctcccggttcctgttctttcaagagccggcatcggccgtggcctcgtttctcaatggcctggccagcctggtgatgctctgccgctaccgcaccttcgtgccagcctcctcccccatgtaccacacctgtgtggccttcg

SEQ ID NO: 167897 - DNA, 587 bp, Homo sapiens
  Payload ID: 13021
  Gene Symbol: PGAP3
  Gene Name: post-GPI attachment to proteins 3
  ENST ID: ENST00000577337
  CDS Start-End: 1-135
tcgtttctcaatggcctggccagcctggtgatgctctgccgctaccgcaccttcgtgccagcctcctcccccatgtaccacacctgtgtggccttcgcctggatgagaaaactgaggcacagcaaggctaaataacttgcccaaggacacacaggaaatgcagagccaggaactgaaccctggcagtctggctgtagggcttgcattcttaatgataccactacctcccaaatctgaggaaagggtgtccctcaatgcatggttctggtccacagttttccacaccagggacactgacctcacagagaaaatggactacttctgtgcctccactgtcatcctacactcaatctacctgtgctgcgtcaggaccgtggggctgcagcacccagctgtggtcagtgccttccgggctctcctgctgctcatgctgaccgtgcacgtctcctacctgagcctcatccgcttcgactatggctacaacctggtggccaacgtggctattggcctggtcaacgtggtgtggtggctggcctggtgcctgtggaaccagcggcggctgcctcacgtgcgcaagtgcgtggtgg

SEQ ID NO: 167898 - DNA, 2094 bp, Homo sapiens
  Payload ID: 13021
  Gene Symbol: PGAP3
  Gene Name: post-GPI attachment to proteins 3
  ENST ID: ENST00000619169
  CDS Start-End: 526-1248
cctgtgtggccttcgcctgggtgtccctcaatgcatggttctggtccacagttttccacaccagggacactgacctcacagagaaaatggactacttctgtgcctccactgtcatcctacactcaatctacctgtgctgcgtcaggcctggtcaacgtggtgtggtggctggcctggtgcctgtggaaccagcggcggctgcctcacgtgcgcaagtgcgtggtggtggtcttgctgctgcaggggctgtccctgctcgagctgcttgacttcccaccgctcttctgggtcctggatgcccatgccatctggcacatcagcaccatccctgtccacgtcctctttttcagctttctggaagatgacagcctgtacctgctgaaggaatcagaggacaagttcaagctggactgaagaccttggagcgagtctgccccagtggggatcctgcccccgccctgctggcctcccttctcccctcaacccttgagatgattttctcttttcaacttcttgaacttggacatgaaggatgtgggcccagaatcatgtggccagcccaccccctgttggccctcaccagccttggagtctgttctagggaaggcctcccagcatctgggactcgagagtgggcagcccctctacctcctggagctgaactggggtggaactgagtgtgctcttagctctaccgggaggacagctgcctgtttcctccccatcagcctcctccccacatccccagctgcctggctgggtcctgaagccctctgtctacctgggagaccagggaccacaggccttagggatacagggggtccccttctgttaccaccccccaccctcctccaggacaccactaggtggtgctggatgcttgttctttggccagccaaggttcacggcgattctccccatgggatcttgagggaccaagctgctgggattgggaaggagtttcaccctgaccattgccctagccaggttcccaggaggcctcaccatactccctttcagggccagggctccagcaagcccagggcaaggatcctgtgctgctgtctggttgagagcctgccaccgtgtgtcgggagtgtgggccaggctgagtgcataggtgacagggccgtgagcatgggcctgggtgtgtgtgagctcaggcctaggtgcgcagtgtggagacgggtgttgtcggggaagaggtgtggcttcaaagtgtgtgtgtgcagggggtgggtgtgttagcgtgggttaggggaacgtgtgtgcgcgtgctggtgggcatgtgagatgagtgactgccggtgaatgtgtccacagttgagaggttggagcaggatgagggaatcctgtcaccatcaataatcacttgtggagcgccagctctgcccaaggcgccacctgggcggacagccaggagctctccatggccaggctgcctgtgtgcatgttccctgtctggtgcccctttgcccgcctcctgcaaacctcacagggtccccacacaacagtgccctccagaagcagcccctcggaggcagaggaaggaaaatggggatggctggggctctctccatcctccttttctccttgccttcgcatggctggccttcccctccaaaacctccattcccctgctgccagcccctttgccatagcctgattttggggaggaggaaggggcgatttgagggagaaggggagaaagcttatggctgggtctggtttcttcccttcccagagggtcttactgttccagggtggccccagggcaggcaggggccacactatgcctgcgccctggtaaaggtgacccctgccatttaccagcagccctggcatgttcctgccccacaggaatagaatggagggagctccagaaactttccatcccaaaggcagtctccgtggttgaagcagactggatttttgctctgcccctgaccccttgtccctctttgagggaggggagctatgctaggactccaacctcagggactcgggtggcctgcgctagcttcttttgatactgaaaacttttaaggtgggagggtggcaagggatgtgcttaataaatcaattccaagcctc

SEQ ID NO: 167899 - DNA, 2632 bp, Homo sapiens
  Payload ID: 13021
  Gene Symbol: PGAP3
  Gene Name: post-GPI attachment to proteins 3
  ENST ID: ENST00000614824
  CDS Start-End: 12-971
agggagaaaggatggccggcctggcggcgcggttggtcctgctagctggggcagcggcgctggcgagcggctcccagggcgaccgtgagccggtgtaccgcgactgcgtactgcagtgcgaagagcagaactgctctgggggcgctctgaatcacttccgctcccgccagccaatctacatgagtctagcaggctggacctgtcgggacgactgtaagtatgagtgtatgtgggtcaccgttgggctctacctccaggaaggtcacaaagtgcctcagttccatggcaagtggcccttctcccggttcctgttctttcaagagccggcatcggccgtggcctcgtttctcaatggcctggccagcctggtgatgctctgccgctaccgcaccttcgtgccagcctcctcccccatgtaccacacctgtgtggccttcgcctgggtgtccctcaatgcatggttctggtccacagttttccacaccagggacactgacctccagagaaaatggactacttctgtgcctccactgtcatcctacactcaatctacctgtgctgcgtcaggaccgtggggctgcagcacccagctgtggtcagtgccttccgggctcctgctgctcatgctgaccgtgcacgtctcctacctgagcctcatccgcttcgactatggctacaacctggtggccaacgtggctattggcctggtcaacgtggtgtggtggctggcctggtgcctgtggaaccagcggcggctgcctcacgtgcgcaagtgcgtggtggtggtcttgctgctgcaggggctgtccctgctcgagctgcttgacttcccaccgctcttctgggtcctggatgcccatgccatctggcacatcagcaccatccctgtccacgtcctctttttcagctttctggaagatgacagcctgtacctgctgaaggaatcagaggacaagttcaagctggactgaagaccttggagcgagtctgccccagtggggatcctgcccccgccctgctggcctcccttctcccctcaacccttgagatgattttctcttttcaacttcttgaacttggacatgaaggatgtgggcccagaatcatgtggccagcccaccccctgttggccctcaccagccttggagtctgttctagggaaggcctcccagcatctgggactcgagagtgggcagcccctctacctcctggagctgaactggggtggaactgagtgtgctcttagctctaccgggaggacagctgcctgtttcctccccatcagcctcctccccacatccccagctgcctggctgggtcctgaagccctctgtctacctgggagaccagggaccacaggccttagggatacagggggtccccttctgttaccaccccccaccctcctccaggacaccactaggtggtgctggatgcttgttctttggccagccaaggttcacggcgattctccccatgggatcttgagggaccaagctgctgggattgggaaggagtttcaccctgaccattgccctagccaggttcccaggaggcctcaccatactccctttcagggccagggctccagcaagcccagggcaaggatcctgtgctgctgtctggttgagagcctgccaccgtgtgtcgggagtgtgggccaggctgagtgcataggtgacagggccgtgagcatgggcctgggtgtgtgtgagctcaggcctaggtgcgcagtgtggagacgggtgttgtcggggaagaggtgtggcttcaaagtgtgtgtgtgcagggggtgggtgtgttagcgtgggttaggggaacgtgtgtgcgcgtgctggtgggcatgtgagatgagtgactgccggtgaatgtgtccacagttgagaggttggagcaggatgagggaatcctgtcaccatcaataatcacttgtggagcgccagctctgcccaaggcgccacctgggcggacagccaggagctctccatggccaggctgcctgtgtgcatgttccctgtctggtgcccctttgcccgcctcctgcaaacctcacagggtccccacacaacagtgccctccagaagcagcccctcggaggcagaggaaggaaaatggggatggctggggctctctccatcctccttttctccttgccttcgcatggctggccttcccctccaaaacctccattcccctgctgccagcccctttgccatagcctgattttggggaggaggaaggggcgatttgagggagaaggggagaaagcttatggctgggtctggtttcttcccttcccagagggtcttactgttccagggtggccccagggcaggcaggggccacactatgcctgcgccctggtaaaggtgacccctgccatttaccagcagccctggcatgttcctgccccacaggaatagaatggagggagctccagaaactttccatcccaaaggcagtctccgtggttgaagcagactggatttttgctctgcccctgaccccttgtccctctttgagggaggggagctatgctaggactccaacctcagggactcgggtggcctgcgctagcttcttttgatactgaaaacttttaaggtgggagggtggcaagggatgtgcttaa

SEQ ID NO: 167900 - DNA, 7568 bp, Homo sapiens
  Payload ID: 13022
  Gene Symbol: KCMF1
  Gene Name: potassium channel modulatory factor 1
  Uniprot ID: Q9P0J7
  ENST ID: ENST00000409785
  CDS Start-End: 360-1505
gcggggggtgggccgggggaggggaggagcgggatttgcggagcgccgcgccgctgccgggagccggcaggcccgagagtgaccggagtcacggcgggcgccggcggagctgcggcgtcggacccgcctcctggaggagctcagccccgaccaggcccggccccattcccgccccgcgccgcctccccgccgccgccgccgccgccgccgcgggagcgctcccctgcccaccccgcccccgcggccgagcccgggagtcgagtgggagtcggccggccggcgcgggcagcgccgggaccccgcgggggacactgcagccggagcccgggaggggccgcgccgccaccgtctgaactaggatgtcccgacatgaaggtgtcagctgtgatgcatgtttaaaaggaaattttcgaggtcgcagatataagtgtttaatttgctacgattacgatctttgtgcatcttgttatgaaagtggtgcaacaacaacaaggcatacaactgaccacccaatgcagtgcatattaacaagggtagattttgatttatactatggtggggaagctttctctgtagagcagccacagtcttttacttgtccctattgtggaaaaatgggctatacggagacatctcttcaagaacatgttacttctgaacatgcagaaacatcaacagaagtgatttgtccaatatgtgcagcgttacctggaggcgatcctaatcatgtcacggatgactttgcagctcatcttacacttgaacacagagcccctagagatttagatgaatcgagtggtgttcgacatgtacgtagaatgtttcaccctggccggggattaggaggtcctcgtgctcgtagatcaaacatgcactttactagcagttctactggtggactttcttcttctcagagttcatattctccaagcaatagggaagccatggatcctatagctgagcttttatctcagttatcaggagtgagacgttctgcaggaggacagcttaattcctctggcccttccgcttctcagttacaacaactgcagatgcagctgcagctagaacggcagcatgcccaggcagcacggcaacaactggagaccgcacgcaacgcaacccggcgtactaacacaagcagtgtcaccactacaatcacacaatccacagcaacaaccaacatagctaatacagaaagcagtcagcagactctacagaattcccagtttcttttaacaaggttgaatgatcctaaaatgtctgaaacggagcgccagtccatggaaagcgagcgtgcagaccgcagcctgtttgtccaagagctccttctgtccactttagtgcgtgaagagagctcatcctcagatgaggatgatcggggggagatggcagattttggtgctatgggctgtgtagatattatgcctttagatgttgctttagaaaacctaaatttaaaagagagtaataaaggaaatgagcctccaccacctcctctttgatgacatcccaattcgcagacaatgtcctctgtgctgtatttgccaatgaaagtggacaacaactatcttgggtttgtttggtgattgtaatttcaggtctgtcactcttgttacattgtgtacattcaaaaggaagagagaaaatatatatgataatcatttccacttaactaatttttacttctagcaggtaaatgtaggtagcagtgcaggggtgatctctgcttcctgtaccttgacatgcaaaaggctctcctaatactccacattcaaactgaagaggaaaattgaaatctctaatgaagctgctgtgtgtatttatgaatattaatgaataaaaactgcttggatggtttaccttaactactgcatgaggttttttgcagcgtgcatgagttttagtgaccttgttatttaagaagttaaatacaaggagtaaaacttaaaaaaaaaatacaaagcccaaagctttcccaaacattattcaatggttacacgacgaagtagcttttgaataatgtctgcctgaatcacctttctttgtgtgcctcctacgcacaaagccagctctgcagtggaatctggggattatagccgggtgtggcactccgccctgtgtgactgtcctgtcgccctgttagtcatcttgcctgtgtggagctcagcctgtctctttaactcatctgtagaagacacaccagtaaagctactgttggaatctgctgcaggggcctttgtgtgccctaaaaacaaatcctgttcatgtttgtttaaagtttttactttttgtggttgtttaaaattttttcaattgttaaatatgttttattcaggtgtagatgaatttcatttattgactgttcaacagagttaacctgaattatgttgtctttgtttttaaaaatctcacattctcaatcatattttgcattatttatgtatttgctttgtagtttgctgagacagatcagtatcaggggagctttgaggatttgccttcccagatttgtcagtatattacaaccaaattcttaatgctaattttagcaccttttatttattgggttttttctggcataaaaagtaaagccttttaattgaatcatgccacctatatgcctatattattaatcctatgtgtaaaaaaaatgtacagctttttttgggtttgttttggggtttggaagggccgggttattttttatttcctgtttcagtttttgtgcatagactttcacaatagctccaaggcagggacagcgggtttgggggttgggagggcagtttttggaatgtaaatttaggacttttaaaaaggtgcgcacagcttctgataaatttataactagacttaacctaatcatgtctcgttccagttctcttttctctgagcccttttcaaagtctcctctctttctcctgtcatccttttcctttcctgtccgtgtatctccgtttcttcaacatgacaagcatacagacttgaacacccctccggtgttcttccgagaactgtgaagtccatgttcatccaaatgtaaccaaaaaagaagtcaccctacatgtctgaaaaactgttgcttctcctctgaaacttcaaactccaacgatttccaaatacaatagctttgttttctttagttctgtaatggataatgtttaaaggaaaactttacaccaggcttctggttacactagaagtcaagcccattagggattttcattttttttcatttggttgttgagaagtttcaaaaatcagttttcaagctgtggtctttcaaacacatctgcacataagtcacacatttcaataaagcattttcaagactgttgaccacttgaatttctttggtgttagtggattaacctaaccattactctgagattttatatctctaatccagtattttttttctttttatgctaaacatgggagatcctggttttgtgtgaatgcattattttggatgtgagaaataaatgccaattatatgtactttcccttttctgcacaaattctgggaaaatgtaaaagccttcattttttaacatggttttagggaacaactgtaagtccattcagagcagtttaatttagatgatcacttttaacactgcagaagacctaaggagtcataagattccatctcatgtagaatactgtatattaattattttttaccagatattttacaaatacctcacctcatcctgtatgtaatcaataatgtattattttagggtagaacgacacagaatatcaatataaaaatatattcaagcccttgaaattcttgtgtcctttttctttagtttctgaatgaaaatcttattactggatgtactattgaataaaaattaattgcaaagactttgatggagacaaaatcaaaatataccactgtttattttggcagcaccttcaaatttctaaggaccagatcctgaattttgagaattttttgtttcgttgagttttgagtgtctaggatataagtttataaatgttctacagtgcttgtctttacttcctgtttagaaatcatttaaatctttcccctcgaggtgctctggaagaagtttaatttcagctctgaacaagtagaaataactgtgcttccttgtatggctgcaatcataagacagaatttctgtggttggctaccgtgaaatctttgtatttatattgcattgttttgttaaaaaaaaaaaaatccacagaagtagaacctaggtttgctactaacaaagtagtggattcttataattaggctcaggtaaagtaagagaaaacttctctccctgtggcccccagagaaatgaagtaggatagcagattacactattagaaataatagacgtaacaaaaaaaatccagcccattatccccaccccccattttccctctcaatattagaaatttcaataatatgctgacagattttcaaaggtcaccaaggcttttgtgtttttttccggtctgtgggccacagttaaaagaacgggtaacaggttcagagttctcttgatacgtccaagccttagtttccaggaaaaaagctaggctcctcactgcaaatattaacgctttatatatttactccatggatgttggggtaagcacatatatcaatagttcatagctctagttaaggacaaagtgggttggggggtagaaggagaatactagagaggttacggtagcaggtggctgcagaaaagaatcttttgaatgggattcctgtaacagtgttcagtaccaatattaagtctactgtaagtggggtctgatatggcttactgatacaggcatgtgtaaaaaactaagtgtgatggaggaatgggtgctaaaagctcttaacagttttgtagagaagccctgcagccgtgtttactatatatgacatgcctgtttcttagtttgcatgcacagtttaaggggcacatgcaatattggtttcatgtgcagtaaaaattaaaacacggctgagcgtggtggctcacgcctgtaatcccagcactttgcgaggccgaggcgggtggatcacgaggtcgagtttgagaccattttggccagcatagtgaaaccccatctctactaaaaaatacaaaaagttagctgggcatggtggcaggcacctgtaatcccagctactcgggaggctgaggcaggagaatcgcttgaacctgggaggcagaggttgcagtgagctgagatcacgccgccattgcactccagcccgggcgacggtgcaagactctgtctcaaaaaaaaaaaaaattaaaacactaggtacgaaattatcccagaattatacgcgaaagttggtgttcatgctggaaaacagttacggttatctgtgctctttctaaagctcaactagacactaaaacagttctctccttgagaccggaagtgggatgggggtgggcaggtggaagggaagaggctggggaggagcctctcatctcatctcatttcagcctcaacagtaattgaaaccctatgcctggcctggagtgggtagaggttagggttagagtgcaggatggagcagcagtctgcagactttcaggttgtgacgatgtcatgaaattctgtgctattaaacatggctatgtctgagtcagtcattacggtattccaaagccaaattcaagtgactgtttttctgaatagtataaaaatctaattccctgtgcttatcggcttcaactgtgcttacacaacgtttgtttctaattcgtactcttgcctcttggtttctgtagtttttcaacccatttctgtcagtgttctataaatgcatacattcgttatttaaggaaccctgcagcagacctcgaataaaatgtgacttgatgtttgttgccacttcctcaacttggttagcaaattcaagttttgaaagacgattcgtctcagagaagttgatcctgaacctccacgtcacattttagtcggttgctattaggtgggtaatgcctaataacatgggttcctcaaatcacaaaggagaatgctctcaagtcctcatgttaactttagtaagtcagttaactttacagcaactaaagagatcaattaaaaagaacccttaagtctgactgtcccaggtaactttacttgctgtacagatagtgcacagatatggatgagggctgcacatggctgatttgaaaacccatgtggggccgggtgtggtggctcacgcctgtaatcccagcactttgggaggccaaggcgggtggatcacgaggttagttcaggaccagcctggccaagatggtgaaaccccatctctactaaaaatacgaaaattagctgggcttggtggcagatgcctgtaattcctgctactcgggaggctgaggcagagaattgcttgaacccgggaggcggaggttgcagtgagccgagattgcgccactgcactccagcctgggcgacacagtgagactctcctcaaaacaaaaaaaaaagaaagaaaacccatgtgggccgcatgtgcacagcctggggctgctttccacaggcctggataatgatgtttctcttcaaggaggcctttactaaccacagggaacctagcatctgactgtgtccttggcagacagtgcatgtagcctgtagaatgttggctcctctgtctatagaaaccatcagttcgctgctctctcattcatacatactttttgagttcccagtaggtacgaagctttgtctaaacattatttaccaactgcgatttttacagacttcccctgtaagaattttctaaaagagcctttctcccttacacaattgaaacgttttcaaaggtcatcaagccggttgcgtttggtcagtcacgtgaccaatcagagctggtgagtgagctgctcccttaaatctaccaaattagactgacagcatttggaatctgcctcacacataagagatccatattcatttaatagtgaagccagcccagaagcatcctcttctgtaagctggatggagtcccagctctctctccttgtatataaggagaccacaccctgtatataaggttttcttgaggtagatgcagcaatattcctggggtaagattctataatactcctgtattggcaagtggactggaccaacagacacaggcctcagccactgtcgctagggactgaaggagagttcatggattcttaccccctagtcatgaaagctattctggccagccttgaatccatttaattttgcccacgagaacctttcatgacaattaacaagacactagtttccccataaaagtccatttttaaatatatagtatgctaattagcagtgtctgttgaattgccctatcggatagcagccaccatgtgtgctgaccactcacgattcagacttaccttggaaaatatcacactgacgatacagtactttagaataaattgcatattgtatcaggctccgagactaatttgtactgaacccttgatatagattaccttttataacatcaccacctgtcatgaagcttatctgttttctgatttgaataaactttgtgttgtgca

SEQ ID NO: 167901 - DNA, 625 bp, Homo sapiens
  Payload ID: 13022
  Gene Symbol: KCMF1
  Gene Name: potassium channel modulatory factor 1
  ENST ID: ENST00000453448
  CDS Start-End: 178-625
atgtgctgcctaccagaccaggttttggaaaatgacgatggtgtcagctgtgatgcatgtttaaaaggaaattttcgaggtcgcagatataagtgtttaatttgctacgattacgatctttgtgcatcttgttatgaaagtggtgcaacaacaacaaggcatacaactgaccacccaatgcagtgcatattaacaagggtagattttgatttatactatggtggggaagctttctctgtagagcagccacagtcttttacttgtccctattgtggaaaaatgggctatacggagacatctcttcaagaacatgttacttctgaacatgcagaaacatcaacagaagtgatttgtccaatatgtgcagcgttacctggaggcgatcctaatcatgtcacggatgactttgcagctcatcttacacttgaacacagagcccctagagatttagatgaatcgagtggtgttcgacatgtacgtagaatgtttcaccctggccggggattaggaggtcctcgtgctcgtagatcaaacatgcactttactagcagttctactggtggactttcttcttctcagagttcatattctccaagcaatagggaagccatggatcctatagctg

SEQ ID NO: 167902 - DNA, 560 bp, Homo sapiens
  Payload ID: 13022
  Gene Symbol: KCMF1
  Gene Name: potassium channel modulatory factor 1
  ENST ID: ENST00000428691
  CDS Start-End: 420-560
gagtgtccccgcctgcgggcgaccgcggggctggcgggaaggctctgcggccaagggacgggaagccctcgccgcctggagcccgccccggcctcgcggctaggcctcggcgcgtccctgggctcgggtaaccaagttcccggggtggatccgaccccgccgcagcaagcaaactccctgctcagtcacccaggcggagcagggctcgctccccgcggccctggtgccctcgccggcatgtgctgcctaccagaccaggttttggaaaatgacgatggtgaggtgtcagctgtgatgcatgtttaaaaggaaattttcgaggtcgcagatataagtgtttaatttgctacgattacgatctttgtgcatcttgttatgaaagtggtgcaacaacaacaaggcatacaactgaccacccaatgcagtgcatattaacaagggtagattttgatttatactatggtggggaagctttctctgtagagcagccacagtcttttacttgtccctattgtggaaaaatgggctatacggagacatctcttcaagaacatgttact

SEQ ID NO: 167903 - DNA, 661 bp, Homo sapiens
  Payload ID: 13022
  Gene Symbol: KCMF1
  Gene Name: potassium channel modulatory factor 1
  ENST ID: ENST00000456682
  CDS Start-End: 631-661
gcggggggtgggccgggggaggggaggagcgggatttgcggagcgccgcgccgctgccgggagccggcaggcccgagagtgaccggagtcacggcgggcgccggcggagctgcggcgtcggacccgcctcctggaggagctcagccccgaccaggcccggccccattcccgccccgcgccgcctccccgccgccgccgccgccgccgccgcgggagcgctcccctgcccaccccgcccccgcggccgagcccgggagtcgagtgggagtcggccggccggcgcgggcagcgccgggaccccgcgggggacactgcagccggagcccgggaggggccgcgccgccaccgtctgaactaggatgtcccgacatgaaggccagaggtccctgttgctgtgcatatattattagccgagtatatgatgggaaggctttctaaacagctcttagaccctgttttcagtgctcagtggtacacagtctttgcattgcctgtgtcagctgtgatgcatgtttaaaaggaaattttcgaggtcgcagatataagtgtttaatttgctacgattacgatctttgtgcatcttgttatgaaagtggtgcaacaacaacaaggcatacaactgaccacccaatgcagtgcatattaacaagggtagattttg

SEQ ID NO: 167904 - DNA, 1527 bp, Homo sapiens
  Payload ID: 13023
  Gene Symbol: KCNRG
  Gene Name: potassium channel regulator
  Uniprot ID: Q8N5I3
  ENST ID: ENST00000312942
  CDS Start-End: 241-1059
agttcctcatctgttgctttttcattttgtatactgcaagttcccaggcaactcgaatttgcaaacacagccatggatacactatttaccttacagtagtttcctgggaatctaagtctggtttttgttattcttccctcccctccactgcataatcatgtataactagcaacatttatggttataggttgatttcctaagtgtggctgatggtagcctctagtttgaagtgagggaagaatgagtagtcaggaactggtcactttgaatgtgggagggaagatattcacgacaaggttttctacgataaagcagtttcctgcttctcgtttggcacgcatgttagatggcagagaccaagaattcaagatggttggtggccagatttttgtagacagagatggtgatttgtttagtttcatcttagattttttgagaactcaccagcttttattacccactgaattttcagactatcttaggcttcagagagaggctcttttctatgaacttcgttctctagttgatctcttaaacccatacctgctacagccaagacctgctcttgtggaggtacatttcctaagccggaacactcaagcttttttcagggtgtttggctcttgcagcaaaacaattgagatgctaacagggaggattacagtgtttacagaacaaccttcagcgccgacctggaatggtaactttttccctcctcagatgaccttacttccactgcctccacaaagaccttcttaccatgacctggttttccagtgtggttctgacagcactactgataaccaaactggagtcaggtatgtttctataaaacctgataaccgaaaattggccaacggaacaaatgtcctcggcttactgattgacactttattaaaggaaggctttcatttggtcagcactagaacagtatcttctgaagacaaaactgaatgctatagctttgaaaggataaaaagccctgaagtgctcatcacgaatgaaacaccaaaaccagagactatcatcataccagagcaatctcagataaagaaatgaagttgtctatcctcttttaaagagaaattgccatttttcttgtttcattacgtatttagggcatacatgttagccaaatctacactcagcctaactcttggcttcatctgctgccatgccgtctctgggcaaccaggccccaactgtgcttaagccataatgcctgctgctctctagacaactccatgtacttggtgctttggtatatgttctaccttcaatacatctttccctttctcttcttcatgaatgcttatgagccgagattgcgccactgcacactagcttgggtgacagaggaagactgtctcaaaaaaaaaaaaattgatcaaactgatggataccctaagtaccctgacttgatcattacaccttctatgcatgcaacaaaatgccacgtgtaccccataaatatgtagaaatattatatgtaaataaatagttgggccttccgtattttcccactta

SEQ ID NO: 167905 - DNA, 1623 bp, Homo sapiens
  Payload ID: 13023
  Gene Symbol: KCNRG
  Gene Name: potassium channel regulator
  Uniprot ID: Q8N5I3
  ENST ID: ENST00000360473
  CDS Start-End: 241-930
agttcctcatctgttgctttttcattttgtatactgcaagttcccaggcaactcgaatttgcaaacacagccatggatacactatttaccttacagtagtttcctgggaatctaagtctggtttttgttattcttccctcccctccactgcataatcatgtataactagcaacatttatggttataggttgatttcctaagtgtggctgatggtagcctctagtttgaagtgagggaagaatgagtagtcaggaactggtcactttgaatgtgggagggaagatattcacgacaaggttttctacgataaagcagtttcctgcttctcgtttggcacgcatgttagatggcagagaccaagaattcaagatggttggtggccagatttttgtagacagagatggtgatttgtttagtttcatcttagattttttgagaactcaccagcttttattacccactgaattttcagactatcttaggcttcagagagaggctcttttctatgaacttcgttctctagttgatctcttaaacccatacctgctacagccaagacctgctcttgtggaggtacatttcctaagccggaacactcaagcttttttcagggtgtttggctcttgcagcaaaacaattgagatgctaacagggaggattacagtgtttacagaacaaccttcagcgccgacctggaatggtaactttttccctcctcagatgaccttacttccactgcctccacaaagaccttcttaccatgacctggttttccagtgtggttctgacagcactactgataaccaaactggagtcaggctggtatgcaatggcgtgatctcggctcaccacaacctccgcctctggggttcaagtgattctcctgcctcagcctcccgagtagctgggattacaggtatgtttctataaaacctgataaccgaaaattggccaacggaacaaatgtcctcggcttactgattgacactttattaaaggaaggctttcatttggtcagcactagaacagtatcttctgaagacaaaactgaatgctatagctttgaaaggataaaaagccctgaagtgctcatcacgaatgaaacaccaaaaccagagactatcatcataccagagcaatctcagataaagaaatgaagttgtctatcctcttttaaagagaaattgccatttttcttgtttcattacgtatttagggcatacatgttagccaaatctacactcagcctaactcttggcttcatctgctgccatgccgtctctgggcaaccaggccccaactgtgcttaagccataatgcctgctgctctctagacaactccatgtacttggtgctttggtatatgttctaccttcaatacatctttccctttctcttcttcatgaatgcttatgagccgagattgcgccactgcacactagcttgggtgacagaggaagactgtctcaaaaaaaaaaaaattgatcaaactgatggataccctaagtaccctgacttgatcattacaccttctatgcatgcaacaaaatgccacgtgtaccccataaatatgtagaaatattatatgtaaataaatagttgggccttccgtattttcccact

SEQ ID NO: 167906 - DNA, 5052 bp, Homo sapiens
  Payload ID: 13024
  Gene Symbol: KCNMB1
  Gene Name: potassium channel subfamily M regulatory beta subunit 1
  Uniprot ID: Q16558
  ENST ID: ENST00000274629
  CDS Start-End: 444-1019
agaatcatttcctatttctggcatctttgccagcccacagagacagagagaagaagaaatatttccaaatataccaggctgatctttcgtagtttctcagtcttgctgtctgttgttgtttgaaatctgtttcccacgagactctgggaagatggaggtgcagggcttgggtaacagctgccttcctcagggctgggtacctgctctccgagtctgtgtctccaggctgtgtgctcagacttgaccatgtttgggcatggaggcttgccccagatggggaccaaaagctgcttccctggagacgggcggggaggccaaacttcctgctgaagctctgtggcctcttttggggtgggggcgggggtccaggcagaaagaaactgtctgctgctcaagacccacaggacgccgggaagactaaatgatcactgcccccagtgaatatggtgaagaagctggtgatggcccagaagcggggagagacacgagccctttgcctgggtgtaaccatggtggtgtgtgccgtcatcacctactacatcctggtcacgactgtgctgcccctctaccagaaaagcgtgtggacccaggaatccaagtgccacctgattgagaccaacatcagggaccaggaggagctgaagggcaagaaggtgccccagtacccatgcctgtgggtcaacgtgtcagctgccggcaggtgggctgtgctgtaccacacggaggacactcgggaccagaaccagcagtgctcctacatcccaggcagcgtggacaattaccagacggcccgggccgacgtggagaaggtcagagccaaattccaagagcagcaggtcttctactgcttctccgcacctcgggggaacgaaaccagcgtcctattccagcgcctctacgggccccaggccctcctcttctccctcttctggcccaccttcctgctgaccggtggcctcctcattatcgccatggtgaagagcaaccagtacctgtccatcctggcggcccagaagtagagccatccatccatgccataccacttgtcagggcacaggggactggctgggcccccagggctgctccccacttgcagcacaatgccttctccacctgccctcccactcttccagtccaatccacgctgtcttctgttgcaggactaacctttgagaaatccttttgtgaagtcattgcctgctcaagaatgtacagtggctccccaatgccttggaggccataaggccagccagttctagctctctattacctgtccccactcaactgactcatacctgtttccggctgcatcactatgtgccccacagagaacgatgatcgtcacctctgtgcctgagttctccctgttgtctcaaagcggtacccatcctcccccagaagctgtccccagcgagcctcccttctttgtttgaattctctaataagagcaacagcagctcccatttctagaacacatttacagtattactattttctaggatataaagtgccatatatatttttaattccaatattaataaatgtatgccaaacaacaatcagctgcaaggaaacacatgagaactcatcaaaattttagcggtgggatggtggttaatttctgttttcttccttatcccctttttatttttgctgcttttctaaatttttgattataggaagggtgtgtttcgtttgcttttaatcagaaaagccatggtagatgccattttggaaaagttgaaagagtgtgtccccctcacagaaaaagatggaagtgggtctggggacggagttgggttccagtcagagacaggccattcagaacacacaatcttaaaaacccctctgggccgggcgcggtggctcactcctgtaatcccagcactttgggaggccgaggctggtggatcacgaggtcaggagatcaagaccatcctggctaacatggtgaaaccccgtctctactaaaaatacaaaaaattagccaggcgtggtggtgggcacctgtggtcccagctactcaggaggctgaggcaggagaatggcgtgaacccggggttcggagcttgcagtgagccgagattgtgccactgcactccagcctggtgatagaacaagactccgtctcaaaaaaaaaacaaaaaacaaaaaatgaaaaacaaccctctggaggaaaggtcatgatatagaggaggatttgttatttaaattgagggtatggactctggcactgagcctgctggggaagcctatctcagatttgaaaagggcaaaatgggaagaagccatcacctttaccattcccactccaggaagttttcctagaacgatgactgtccaagtgtggtccctgggccagcagcatcaggatcctgtggcagcttgtgagaaatgcacactctcaggcccctgtcccagccccaccacgccagaagccctgcacggggtgggggtagcaatgttctgtgttctaacaatgcgtaggggattctgtggcacacctcgagccagagaactaccggtgtaggaagtgagcgtcctgtcgcgaggattttcagagcaggtgagtgaccattcggcagggccagtcctgagctgggtgtgaagttaggctggtgtctgaagtttcttccagtgttgtgagtccaagatgcagatcttgggtttgaatcctgtctctactctgcccgatttcatctctttgattcttagttttttcatctataaaagaaggactctttctggatagttgggagggctgaaggaatgtttgacacatcataggtgtttaaaatggcaactatagttttttttgtttgttttgtgtgtgtgtttttttcttaactttcattttaagttgcagggtacacgttcaggtttgttacataggtacacttgtgtcaagggagtttgttgtgcagattatttcatcacccaggtattaagtctagtacccattattaaagaaaatgtggtacgtatacgtcatggaatattatgcagccataaaaaggaaggagatcatgtcctttgcagggacatggatggagctggaggccaaatattatccttagcaaactaacacagggacacaaaactaaatactgtatattctcacttataagtgggagctaaatgatgaaaacacatggacacaaagaggggaacaacacacactgaggcctattggagggcgggaggtaggaggagggagaggatcagggaaaaagagctattgttagtaacaagaaaaagtcggccgggcgtggtggctcacacctgtaatcccagcactttgggaggccgaggtgggcagatcacgaggtcaggagatcgagaccatcctggctaacacggtgaaaccctgtctctactaaaaaatagaaaaaatcatagccgggcgtggtggtagccgcctgtagtcccagctgctcaggaggctgaggcagaagaatggcgtgaacccgggaggcggagcttgcagtgagccgagatcgcgccacggcactccagcctgggtaacagagcaagactctgtctcaaaaaaaaaaaaaaaaaaaaaaaaaaaagaataagtcatgaatactcagaaacttccagaagttatactgacaatgttatctggcatgtatgggtgcttatttattctgtgccaggcactgtactaattagtttgccttggaaaaaaaaatgagatactcctgaacctgcctcacagatgatgagaagcaacagaggacagtggctaagtatgtggacttgggatgtgcactgtttgggttcaaattccagctgtgctgttcacaagctgggtgactttggacgaataacctttctgtgcctgtttcctcgtttgcaaaacgaaactgataatagtatctttccatagagttttggcatgaaacaaatttttatgtaaatttcctaggatagtgacatatggtaagtgctatctaagttactatgaaaaactgaggctgtaagaggtaactggccaaggccatctgtaaagtgaggggctaggactcaagcctggagctgtgtgttccagtacctggcatctcaaccacagaactcagcagagccagctgtgaagggctgagggacagagccagctgtgaagggctgaggggcagagccagctgtgaagggctgaggggcagagccagctgtgaagggctgagggacacagccactcaaagccacaggggccaggcagggagctgcgttgcatccctggaacccaggtgccctcatgcaggttggagttctgaggggaggccctggcatctgcaccagcatctgccaattccagccagggagcccagaggtatccctgtggcctccagtttcttacctggtggaccttccttccaaaggcaggcagctcatcattccctggaattttttccttctggggtcagggaagtctcaaaggtcctcatgtgagtcttttaagaaagtcttaattgtaatattgtactatagttttgcaaaatattaaatattaccattggggacattaggtagagggggcacggaatgtctctgtattatttcgtaaagcttcatgtgaatctacaattatctcaaaaatttaagttaaaaaaggaagaaaaataagaaaggaagtcccaacttggagtctgatttaaagggtctattttgtcaatggtttccatgcacctgaatttgggactaaaatacacagaaactcagaatacccaaacaatccctgcaggggaaaaggccatgttcctctagaaaaattagtatgtgaggatgcctaacccccactgtcccataaattattaatgatgaccttcatttgcttgagatagatgttctcctcctgtcaataaagactggccttctagcaaatgccacaactgtctgctgctcacagaactttatgcacgggataagcatgaaataatgggaatttaggcatgatggagttagaccctgtgcctacgtgtttttttgcaataatatctgcctgggagcagagaaccttcatcagttcttaataaaccactctgctaatga

SEQ ID NO: 167907 - DNA, 1733 bp, Homo sapiens
  Payload ID: 13024
  Gene Symbol: KCNMB1
  Gene Name: potassium channel subfamily M regulatory beta subunit 1
  Uniprot ID: Q16558
  ENST ID: ENST00000521859
  CDS Start-End: 401-793
cagagagaagaagaaatatttccaaatataccaggctgatctttcgtagtttctcagtcttgctgtctgttgttgtttgaaatctgtttcccacgagactctgggaagatggaggtgcagggcttgggtaacagctgccttcctcagggctgggtacctgctctccgagtctgtgtctccaggctgtgtgctcagacttgaccatgtttgggcatggaggcttgccccagatggggaccaaaagctgcttccctggagacgggcggggaggccaaacttcctgctgaagctctgtggcctcttttggggtgggggcgggggtccaggcagaaagaaactgtctgctgctcaagacccacaggacgccgggaagactaaatgatcactgcccccagtgaatatggtgaagaagctggtgatggcccagaagcggggagagacacgagccctttgcctgggtgtaaccatggtggtgtgtgccgtcatcacctactacatcctggtcacgactgtgctgcccctctaccagaaaagcgtgtggacccaggaatccaagtgccacctgattgagaccaacatcagggaccaggaggagctgaagggcaagaaggtgccccagtacccatgcctgtgggtcaacgtgtcagctgccggcaggtgggctgtgctgtaccacacggaggacactcgggaccagaaccagcaggtactgaactggagggatggggacacatccctttatccctgtcaggtgtgtgagcctgttcctaactgtccctgtccccgaggctgagaaagatcaacccacttgaccaggtctcacagctggaatgagactgagccagccctagctcttctgtgttggagtcacacagacctgggtttgaatctgccgctaactggctgtgtaaacataggcaggccacttagcctctcacctcctcagtttccacccttgtaaagtggaatgctaatgctgcaccttgaagagctgttatcaagtcagagacgctgtatataaagtgccacgcttgatgctgagtggatagtgggcactcaaacaaaagcagtgattagtgttagtactttcattctacaacctcagtcaaatgagggaccaggcccagggccagatcctcaaagtggaatcccggtgactccccaggaaaccagggactcagggctggagtaacctccataaacaaacatttagatggtttttccatccttgcatcccaacatcccaccctccccctccaaaacacaaaactcaccaccatatcctttcctaaagcgatcagttggcccatattctgtctctcttccttccttctttctttccttcttttttccctttcttccctccttctttcttttcttttttttcccctccctccttccctccctctctccctcccttccttccttccttccttccttccttgtttccttctttcctcctctcatttatttattcaacagccattgagcacctcctgtgtcaagcctgtaggactcaagaggagagagctcatgcatgaacagtgcctagcagggaagaattggcaccggggagaagaacagaggaagttacaggggttagaggagggggatgttttccagctgacaatgatgggggtatcagaaaggctcttggtgagattgcaccattgcactccagcctggcaacaagagtgaaactccatctcaaaaaaaaaaaaaaaaaaaagaaa

SEQ ID NO: 167908 - DNA, 2271 bp, Homo sapiens
  Payload ID: 13025
  Gene Symbol: KCNMB2
  Gene Name: potassium channel subfamily M regulatory beta subunit 2
  Uniprot ID: Q9Y691
  ENST ID: ENST00000358316
  CDS Start-End: 73-780
tctaggtctttttgccattcctccaggacatccaccataaggaaaggagaccctggaccaacattctctaagatgtttatatggaccagtggccggacctcttcatcttatagacatgatgaaaaaagaaatatttaccagaaaatcagggaccatgacctcctggacaaaaggaaaacagtcacagcactgaaggcaggagaggaccgagctattctcctgggactggctatgatggtgtgctccatcatgatgtattttctgctgggaatcacactcctgcgctcatacatgcagagcgtgtggaccgaagagtctcaatgcaccttgctgaatgcgtccatcacggaaacatttaattgctccttcagctgtggtccagactgctggaaactttctcagtacccctgcctccaggtgtacgttaacctgacttcttccggggaaaagctcctcctctaccacacagaagagacaataaaaatcaatcagaagtgctcctatatacctaaatgtggaaaaaattttgaagaatccatgtccctggtgaatgttgtcatggaaaacttcaggaagtatcaacacttctcctgctattctgacccagaaggaaaccagaagagtgttatcctaacaaaactctacagttccaacgtgctgttccattcactcttctggccaacctgtatgatggctgggggtgtggcaattgttgccatggtgaaacttacacagtacctctccctactatgtgagaggatccaacggatcaatagataaatgcaaaaatggataaaataatttttgttaaagctcaaatactgttttctttcattcttcaccaaagaaccttaagtttgtaacgtgcagtctgttatgagttccctaatatattcttatatgtagagcaataatgcaaaagctgttctatatgcaaacatgatgtctttattattcaggagaataaataactgttttgtgttggttggtggttttcataatcttatttctgtactggaactagtactttcttctctcattccgccaaaacagggctcagttattcatttgccaagcttcgtggaggaatgtaggtgacatcaatgtgataaagtctgtgttctgagttgtcagatctcttgaagacaatatttttcatcacttattgtttactaaagctacagccaaaaatatttttttttcttattctaaactgagccctatagcaagtgaagggaccagatttcctaattaaaggaagttaggtacttttcttgtattttttaccatatcactgtaaagaagaggggaaacccagccagctactttttttcatcactttttattcataacttcagatttgtaaaactaatttccaaaatataagctgttttcattagccagttctataatatcttcctgtgatttatgtagaaaatgaacacaccccttttccatttaagaccctgctactgtgtgaagagatgatacttacaaggagtgtcattacctgtgagctgactgaatgttggtaggtgctccattacaatccaggaaagtctgtgttactgatatttgtgtggaaatctttatttcacttcaatttaaccattagatggtaaaattaagatgctacttgttggtaaaaattggtggactggtttcaatgggtaaatgtgttgtggcaaattaatgtgttggaatattgctctttgtgaatttgtgcttaagtcaatgaatgtgtagtatctccttctgacaagcattccctattgggattttaaagctatgtgcacagaatattagtctcttctacatgttttatttttctatttataattcccttttttgttgttatattttatacacagaatagatcttttttctaacacatatttgaactgaataacagacttaaagaaagcctttgttcacattgctatttacttttgtgtttgggggaaaatacgagggattgattttaaataaaaaacattccatctttcatttaatatcaatatcaaaagaagaagacaaacatctatctttctcatctatatttaagtacctttttgtaatgtagtatcaaagttttttaggtaatgcaaaattttacaaatcatttgtggaatgaatggtaaaactaatctgatgaaatggaaaattattctgcaatattgtaattcatagtttgacttttcataagcaaataaatccctaggatgtaatcaggacttcaaatgtgtaattaaatttttttaaaaaaaatct

SEQ ID NO: 167909 - DNA, 554 bp, Homo sapiens
  Payload ID: 13025
  Gene Symbol: KCNMB2
  Gene Name: potassium channel subfamily M regulatory beta subunit 2
  ENST ID: ENST00000437510
  CDS Start-End: 143-554
aaatccctctgtgctgttttgagtgaaacagggaaccagcgtccgccatctgacagttcctccaggtcttttaaggtctttttgccattcctccaggacatccaccataaggaaaggagaccctggaccaacattctctaagatgtttatatggaccagtggccggacctcttcatcttatagacatgatgaaaaaagaaatatttaccagaaaatcagggaccatgacctcctggacaaaaggaaaacagtcacagcactgaaggcaggagaggaccgagctattctcctgggactggctatgatggtgtgctccatcatgatgtattttctgctgggaatcacactcctgcgctcatacatgcagagcgtgtggaccgaagagtctcaatgcaccttgctgaatgcgtccatcacggaaacatttaattgctccttcagctgtggtccagactgctggaaactttctcagtacccctgcctccaggtgtacgttaacctgacttcttccggggaaaagctcctcctctaccacacagaagagacaataaaaa

SEQ ID NO: 167910 - DNA, 1455 bp, Homo sapiens
  Payload ID: 13025
  Gene Symbol: KCNMB2
  Gene Name: potassium channel subfamily M regulatory beta subunit 2
  Uniprot ID: Q9Y691
  ENST ID: ENST00000452583
  CDS Start-End: 544-1251
agtgcagggcgatgtcggtctgggaaggaagactgtgagccctctctccctttttaatatgagaattcgaaagcagtggggaagtgatgttggacctatcacagcattgctaacagacagcctattacagtatttaataaaaacagaaacagcatgcctatcataggctaataaatcctacctcctgcacgctttaaaacagtatgaagcagctttaacggagctccagataactaatttcaagcatggctgtctagcgtgcctgtcactcctattgtccttccaaactctttcagacattttgagcagggagtattaaagctatgagttagaaagggttgtgacattaatggtccacaaaggctttaggcacaagaggtaatgatgattaccggtggctatttggaggactgcaccggatcgctgtcattaaaaattaagcgtggcttttgaggaagatgtgacaactaccggaggtctttttgccattcctccaggacatccaccataaggaaaggagaccctggaccaacattctctaagatgtttatatggaccagtggccggacctcttcatcttatagacatgatgaaaaaagaaatatttaccagaaaatcagggaccatgacctcctggacaaaaggaaaacagtcacagcactgaaggcaggagaggaccgagctattctcctgggactggctatgatggtgtgctccatcatgatgtattttctgctgggaatcacactcctgcgctcatacatgcagagcgtgtggaccgaagagtctcaatgcaccttgctgaatgcgtccatcacggaaacatttaattgctccttcagctgtggtccagactgctggaaactttctcagtacccctgcctccaggtgtacgttaacctgacttcttccggggaaaagctcctcctctaccacacagaagagacaataaaaatcaatcagaagtgctcctatatacctaaatgtggaaaaaattttgaagaatccatgtccctggtgaatgttgtcatggaaaacttcaggaagtatcaacacttctcctgctattctgacccagaaggaaaccagaagagtgttatcctaacaaaactctacagttccaacgtgctgttccattcactcttctggccaacctgtatgatggctgggggtgtggcaattgttgccatggtgaaacttacacagtacctctccctactatgtgagaggatccaacggatcaatagataaatgcaaaaatggataaaataatttttgttaaagctcaaatactgttttctttcattcttcaccaaagaaccttaagtttgtaacgtgcagtctgttatgagttccctaatatattcttatatgtagagcaataatgcaaaagctgttctatatgcaaacatgatgtctttattattcaggagaataaataactgttttgtgttg

SEQ ID NO: 167911 - DNA, 599 bp, Homo sapiens
  Payload ID: 13025
  Gene Symbol: KCNMB2
  Gene Name: potassium channel subfamily M regulatory beta subunit 2
  ENST ID: ENST00000455865
  CDS Start-End: 300-599
gctgggcaccgttctgttttctttcttttcttaatcctatccaagtatgcagtacgctcttgggtcgtctcatgagacccaggggcatgttggaaagaactgagagaaagagcaacaaagcggcgagtggtgtgagagggcagcacgcgctgtggggcccttccagagaaatgtactgaaaaagtctacgcaatgtctgggatttgctaaacaatacctggaaagcagacaggtctttttgccattcctccaggacatccaccataaggaaaggagaccctggaccaacattctctaagatgtttatatggaccagtggccggacctcttcatcttatagacatgatgaaaaaagaaatatttaccagaaaatcagggaccatgacctcctggacaaaaggaaaacagtcacagcactgaaggcaggagaggaccgagctattctcctgggactggctatgatggtgtgctccatcatgatgtattttctgctgggaatcacactcctgcgctcatacatgcagagcgtgtggaccgaagagtctcaatgcaccttgctgaatgcgtccatcacggaaacatttaattgctccttcagc

SEQ ID NO: 167912 - DNA, 2552 bp, Homo sapiens
  Payload ID: 13025
  Gene Symbol: KCNMB2
  Gene Name: potassium channel subfamily M regulatory beta subunit 2
  Uniprot ID: Q9Y691
  ENST ID: ENST00000432997
  CDS Start-End: 353-1060
ctgtgcttcagtgggcttttcactacctttagttagttgcactaggctggttgctgtttaccttgcatggttgactgctctcttctcacattgtgtgccaggaagggcactgcaccttggtataaatgctgctgggcaccgttctgttttctttcttttcttaatcctatccaagtatgcagtacgctcttgggtcgtctcatgagacccaggggcatgttggaaagaactgagagaaagagcaacaaagcggcgagtggtgtgagagggcagcacgcgctgtgggtctttttgccattcctccaggacatccaccataaggaaaggagaccctggaccaacattctctaagatgtttatatggaccagtggccggacctcttcatcttatagacatgatgaaaaaagaaatatttaccagaaaatcagggaccatgacctcctggacaaaaggaaaacagtcacagcactgaaggcaggagaggaccgagctattctcctgggactggctatgatggtgtgctccatcatgatgtattttctgctgggaatcacactcctgcgctcatacatgcagagcgtgtggaccgaagagtctcaatgcaccttgctgaatgcgtccatcacggaaacatttaattgctccttcagctgtggtccagactgctggaaactttctcagtacccctgcctccaggtgtacgttaacctgacttcttccggggaaaagctcctcctctaccacacagaagagacaataaaaatcaatcagaagtgctcctatatacctaaatgtggaaaaaattttgaagaatccatgtccctggtgaatgttgtcatggaaaacttcaggaagtatcaacacttctcctgctattctgacccagaaggaaaccagaagagtgttatcctaacaaaactctacagttccaacgtgctgttccattcactcttctggccaacctgtatgatggctgggggtgtggcaattgttgccatggtgaaacttacacagtacctctccctactatgtgagaggatccaacggatcaatagataaatgcaaaaatggataaaataatttttgttaaagctcaaatactgttttctttcattcttcaccaaagaaccttaagtttgtaacgtgcagtctgttatgagttccctaatatattcttatatgtagagcaataatgcaaaagctgttctatatgcaaacatgatgtctttattattcaggagaataaataactgttttgtgttggttggtggttttcataatcttatttctgtactggaactagtactttcttctctcattccgccaaaacagggctcagttattcatttgccaagcttcgtggaggaatgtaggtgacatcaatgtgataaagtctgtgttctgagttgtcagatctcttgaagacaatatttttcatcacttattgtttactaaagctacagccaaaaatatttttttttcttattctaaactgagccctatagcaagtgaagggaccagatttcctaattaaaggaagttaggtacttttcttgtattttttaccatatcactgtaaagaagaggggaaacccagccagctactttttttcatcactttttattcataacttcagatttgtaaaactaatttccaaaatataagctgttttcattagccagttctataatatcttcctgtgatttatgtagaaaatgaacacaccccttttccatttaagaccctgctactgtgtgaagagatgatacttacaaggagtgtcattacctgtgagctgactgaatgttggtaggtgctccattacaatccaggaaagtctgtgttactgatatttgtgtggaaatctttatttcacttcaatttaaccattagatggtaaaattaagatgctacttgttggtaaaaattggtggactggtttcaatgggtaaatgtgttgtggcaaattaatgtgttggaatattgctctttgtgaatttgtgcttaagtcaatgaatgtgtagtatctccttctgacaagcattccctattgggattttaaagctatgtgcacagaatattagtctcttctacatgttttatttttctatttataattcccttttttgttgttatattttatacacagaatagatcttttttctaacacatatttgaactgaataacagacttaaagaaagcctttgttcacattgctatttacttttgtgtttgggggaaaatacgagggattgattttaaataaaaaacattccatctttcatttaatatcaatatcaaaagaagaagacaaacatctatctttctcatctatatttaagtacctttttgtaatgtagtatcaaagttttttaggtaatgcaaaattttacaaatcatttgtggaatgaatggtaaaactaatctgatgaaatggaaaattattctgcaatattgtaattcatagtttgacttttcataagcaaataaatccctaggatgtaatcaggacttcaaatgtgtaattaaatttttttaaaaaaaatcta

SEQ ID NO: 167913 - DNA, 1563 bp, Homo sapiens
  Payload ID: 13025
  Gene Symbol: KCNMB2
  Gene Name: potassium channel subfamily M regulatory beta subunit 2
  Uniprot ID: Q9Y691
  ENST ID: ENST00000420517
  CDS Start-End: 652-1359
tatagttaaggaggatttggaaatctgatccagtgcagggcgatgtcggtctgggaaggaagactgtgagccctctctccctttttaatatgagaattcgaaagcagtggggaagtgatgttggacctatcacagcattgctaacagacagcctattacagtatttaataaaaacagaaacagcatgcctatcataggctaataaatcctacctcctgcacgctttaaaacagtatgaagcagctttaacggagctccagataactaatttcaagcatggctgtctagcgtgcctgtcactcctattgtccttccaaactctttcagacattttgagcagggagtattaaagctatgagttagaaagggttgtgacattaatggtccacaaaggctttaggcacaagaggtaatgatgattaccggtggctatttggaggactgcaccggatcgctgtcattaaaaattaagcgtggcttttgaggaagatgtgacaactaccggagggcccttccagagaaatgtactgaaaaagtctacgcaatgtctgggatttgctaaacaatacctggaaagcagacaggtctttttgccattcctccaggacatccaccataaggaaaggagaccctggaccaacattctctaagatgtttatatggaccagtggccggacctcttcatcttatagacatgatgaaaaaagaaatatttaccagaaaatcagggaccatgacctcctggacaaaaggaaaacagtcacagcactgaaggcaggagaggaccgagctattctcctgggactggctatgatggtgtgctccatcatgatgtattttctgctgggaatcacactcctgcgctcatacatgcagagcgtgtggaccgaagagtctcaatgcaccttgctgaatgcgtccatcacggaaacatttaattgctccttcagctgtggtccagactgctggaaactttctcagtacccctgcctccaggtgtacgttaacctgacttcttccggggaaaagctcctcctctaccacacagaagagacaataaaaatcaatcagaagtgctcctatatacctaaatgtggaaaaaattttgaagaatccatgtccctggtgaatgttgtcatggaaaacttcaggaagtatcaacacttctcctgctattctgacccagaaggaaaccagaagagtgttatcctaacaaaactctacagttccaacgtgctgttccattcactcttctggccaacctgtatgatggctgggggtgtggcaattgttgccatggtgaaacttacacagtacctctccctactatgtgagaggatccaacggatcaatagataaatgcaaaaatggataaaataatttttgttaaagctcaaatactgttttctttcattcttcaccaaagaaccttaagtttgtaacgtgcagtctgttatgagttccctaatatattcttatatgtagagcaataatgcaaaagctgttctatatgcaaacatgatgtctttattattcaggagaataaataactgttttgtgttg

SEQ ID NO: 167914 - DNA, 608 bp, Homo sapiens
  Payload ID: 13025
  Gene Symbol: KCNMB2
  Gene Name: potassium channel subfamily M regulatory beta subunit 2
  ENST ID: ENST00000422927
  CDS Start-End: 168-248
gctcttgggtcgtctcatgagacccaggggcatgttggaaagaactgagagaaagagcaacaaagcggcgagtggtgtgagagggcagcacgcgctgtgggtctttttgccattcctccaggacatccaccataaggaaaggagaccctggaccaacattctctaagatgtttatatggaccagtggccggacctcttcatcttatagacatgatgaaaaaagtagagacggggtttcaccatgttagccaggatgatctcaatcgtctgatcttgtgatccgcccgcctcggcatccgaaagtgctgggattacaggcatgagccaccacacccggccaaatctcataaatatttaccagaaaatcagggaccatgacctcctggacaaaaggaaaacagtcacagcactgaaggcaggagaggaccgagctattctcctgggactggctatgatggtgtgctccatcatgatgtattttctgctgggaatcacactcctgcgctcatacatgcagagcgtgtggaccgaagagtctcaatgcaccttgctgaatgcgtccatcacggaaacatttaattgctccttcagctgtggtccagactgct

SEQ ID NO: 167915 - DNA, 2214 bp, Homo sapiens
  Payload ID: 13025
  Gene Symbol: KCNMB2
  Gene Name: potassium channel subfamily M regulatory beta subunit 2
  ENST ID: ENST00000617329
  CDS Start-End: 73-723
tctaggtctttttgccattcctccaggacatccaccataaggaaaggagaccctggaccaacattctctaagatgtttatatggaccagtggccggacctcttcatcttatagacatgatgaaaaaagaaatatttaccagaaaatcagggaccatgacctcctgggactggctatgatggtgtgctccatcatgatgtattttctgctgggaatcacactcctgcgctcatacatgcagagcgtgtggaccgaagagtctcaatgcaccttgctgaatgcgtccatcacggaaacatttaattgctccttcagctgtggtccagactgctggaaactttctcagtacccctgcctccaggtgtacgttaacctgacttcttccggggaaaagctcctcctctaccacacagaagagacaataaaaatcaatcagaagtgctcctatatacctaaatgtggaaaaaattttgaagaatccatgtccctggtgaatgttgtcatggaaaacttcaggaagtatcaacacttctcctgctattctgacccagaaggaaaccagaagagtgttatcctaacaaaactctacagttccaacgtgctgttccattcactcttctggccaacctgtatgatggctgggggtgtggcaattgttgccatggtgaaacttacacagtacctctccctactatgtgagaggatccaacggatcaatagataaatgcaaaaatggataaaataatttttgttaaagctcaaatactgttttctttcattcttcaccaaagaaccttaagtttgtaacgtgcagtctgttatgagttccctaatatattcttatatgtagagcaataatgcaaaagctgttctatatgcaaacatgatgtctttattattcaggagaataaataactgttttgtgttggttggtggttttcataatcttatttctgtactggaactagtactttcttctctcattccgccaaaacagggctcagttattcatttgccaagcttcgtggaggaatgtaggtgacatcaatgtgataaagtctgtgttctgagttgtcagatctcttgaagacaatatttttcatcacttattgtttactaaagctacagccaaaaatatttttttttcttattctaaactgagccctatagcaagtgaagggaccagatttcctaattaaaggaagttaggtacttttcttgtattttttaccatatcactgtaaagaagaggggaaacccagccagctactttttttcatcactttttattcataacttcagatttgtaaaactaatttccaaaatataagctgttttcattagccagttctataatatcttcctgtgatttatgtagaaaatgaacacaccccttttccatttaagaccctgctactgtgtgaagagatgatacttacaaggagtgtcattacctgtgagctgactgaatgttggtaggtgctccattacaatccaggaaagtctgtgttactgatatttgtgtggaaatctttatttcacttcaatttaaccattagatggtaaaattaagatgctacttgttggtaaaaattggtggactggtttcaatgggtaaatgtgttgtggcaaattaatgtgttggaatattgctctttgtgaatttgtgcttaagtcaatgaatgtgtagtatctccttctgacaagcattccctattgggattttaaagctatgtgcacagaatattagtctcttctacatgttttatttttctatttataattcccttttttgttgttatattttatacacagaatagatcttttttctaacacatatttgaactgaataacagacttaaagaaagcctttgttcacattgctatttacttttgtgtttgggggaaaatacgagggattgattttaaataaaaaacattccatctttcatttaatatcaatatcaaaagaagaagacaaacatctatctttctcatctatatttaagtacctttttgtaatgtagtatcaaagttttttaggtaatgcaaaattttacaaatcatttgtggaatgaatggtaaaactaatctgatgaaatggaaaattattctgcaatattgtaattcatagtttgacttttcataagcaaataaatccctaggatgtaatcaggacttcaaatgtgtaattaaatttttttaaaaaaaatct

SEQ ID NO: 167916 - DNA, 1485 bp, Homo sapiens
  Payload ID: 13026
  Gene Symbol: KCNMB3
  Gene Name: potassium channel subfamily M regulatory beta subunit 3
  Uniprot ID: Q9NPA1
  ENST ID: ENST00000314235
  CDS Start-End: 513-1352
tgccctgcgagaatgtatctcatcctttgctggagcaggtttgcaggcacagtggagagaggagagaagaaatgaagggacacttatgcagaaccatgagtggccagagaggaggagaaggagggtgagaggagcaaagaagccatgacaacttcataattctgagtggactgggcagtggccagaaattctggtggtggatatgctgcctttccaacaggtgaatatgaaagaataagtcaaaccctgttcaggacgctgttaattccaaatgtgaactttttgagtcattctttccatgtggaattcaaaggagaatgtaaacaaattttcaggagggacgtgcaatatccctgaaagataacaaagttcgtaacacttatttacatacaacattctctagttattgattaaacagatctctacagacttgcatgaggcaacatttcttaggcttgtttgctacaatatctttaaaaatacttgattacacatcactttagcttatttagatggacttttcaccaagctctgaactgggatttcattttgttgcattcatcctgctcacgagacacaggacagcctttcctgcctcagggaagaagagagagacagactacagtgatggagacccactagatgtgcacaagaggctgccatccagtgctggagaggaccgagccgtgatgctggggtttgccatgatgggcttctcagtcctaatgttcttcttgctcggaacaaccattctaaagccttttatgctcagcattcagagagaagaatcgacctgcactgccatccacacagatatcatggacgactggctggactgtgccttcacctgtggtgtgcactgccacggtcaggggaagtacccgtgtcttcaggtgtttgtgaacctcagccatccaggtcagaaagctctcctacattataatgaagaggctgtccagataaatcccaagtgcttttacacacctaagtgccaccaagatagaaatgatttgctcaacagtgctctggacataaaagaattcttcgatcacaaaaatggaacccccttttcatgcttctacagtccagccagccaatctgaagatgtcattcttataaaaaagtatgaccaaatggctatcttccactgtttattttggccttcactgactctgctaggtggtgccctgattgttggcatggtgagattaacacaacacctgtccttactgtgtgaaaaatatagcactgtagtcagagatgaggtaggtggaaaagtaccttatatagaacagcatcagttcaaactgtgcattatgaggaggagcaaaggaagagcagagaaatcttaagacggtggccaaattaaagtgctggccttcagatgtctgtgatttctgcaactgaggacctaattatgcctgtctgcaaactaataatgtaaaaggtaataattaaagtatcatattttcatgtgggaaaaaa

SEQ ID NO: 167917 - DNA, 1228 bp, Homo sapiens
  Payload ID: 13026
  Gene Symbol: KCNMB3
  Gene Name: potassium channel subfamily M regulatory beta subunit 3
  Uniprot ID: Q9NPA1
  ENST ID: ENST00000349697
  CDS Start-End: 262-1095
gcagcaaaccacgcaggtccttcttgatcatctagaactgaccgctccgccttgccaggagtctgcagaaccacgtggctagcctgcctgaagttctcacctctccaggaaggcggggggcttctaatggctgcagctgcgctgggggctgggggctcccgctgggactccacttccgtggatgtctaagcttcacctttcttgcgcccgcaggggcatgactcaggtgaaagggagccattttctcagacccctggcctcatgcagcccttcagcatccccgtgcaaatcacacttcagggcagccggaggcgccaggggaggacagcctttcctgcctcagggaagaagagagagacagactacagtgatggagacccactagatgtgcacaagaggctgccatccagtgctggagaggaccgagccgtgatgctggggtttgccatgatgggcttctcagtcctaatgttcttcttgctcggaacaaccattctaaagccttttatgctcagcattcagagagaagaatcgacctgcactgccatccacacagatatcatggacgactggctggactgtgccttcacctgtggtgtgcactgccacggtcaggggaagtacccgtgtcttcaggtgtttgtgaacctcagccatccaggtcagaaagctctcctacattataatgaagaggctgtccagataaatcccaagtgcttttacacacctaagtgccaccaagatagaaatgatttgctcaacagtgctctggacataaaagaattcttcgatcacaaaaatggaacccccttttcatgcttctacagtccagccagccaatctgaagatgtcattcttataaaaaagtatgaccaaatggctatcttccactgtttattttggccttcactgactctgctaggtggtgccctgattgttggcatggtgagattaacacaacacctgtccttactgtgtgaaaaatatagcactgtagtcagagatgaggtaggtggaaaagtaccttatatagaacagcatcagttcaaactgtgcattatgaggaggagcaaaggaagagcagagaaatcttaagacggtggccaaattaaagtgctggccttcagatgtctgtgatttctgcaactgaggacctaattatgcctgtctgcaaactaataatgtaaaaggtaataattaaagtatcatattttcatgtgggaaaaaa

SEQ ID NO: 167918 - DNA, 1608 bp, Homo sapiens
  Payload ID: 13026
  Gene Symbol: KCNMB3
  Gene Name: potassium channel subfamily M regulatory beta subunit 3
  Uniprot ID: Q9NPA1
  ENST ID: ENST00000392685
  CDS Start-End: 641-1468
gttcaccagacaccctgccctgcgagaatgtatctcatcctttgctggagcaggtttgcaggcacagtggagagaggagagaagaaatgaagggacacttatgcagaaccatgagtggccagagaggaggagaaggagggtgagaggagcaaagaagccatgacaacttcataattctgagtggactgggcagtggccagaaattctggtggtggatatgctgcctttccaacaggtgaatatgaaagaataagtcaaaccctgttcaggacgctgttaattccaaatgtgaactttttgagtcattctttccatgtggaattcaaaggagaatgtaaacaaattttcaggagggacgtgcaatatccctgaaagataacaaagttcgtaacacttatttacatacaacattctctagttattgattaaacagatctctacagacttgcatgaggcaacatttcttaggcttgtttgctacaatatctttaaaaatacttgattacacatcactttagcttatttagatggacttttcaccaagctctgaactgggatttcattttgttgcattcatcctgctcacgagacacaggtaggcagcaaatgagattatccctccagtccccatggattggaaatgttcccccttctttatgagctcactgcagtatctccttctccctttccccaaaggacagcctttcctgcctcagggaagaagagagagacagactacagtgatggagacccactagatgtgcacaagaggctgccatccagtgctggagaggaccgagccgtgatgctggggtttgccatgatgggcttctcagtcctaatgttcttcttgctcggaacaaccattctaaagccttttatgctcagcattcagagagaagaatcgacctgcactgccatccacacagatatcatggacgactggctggactgtgccttcacctgtggtgtgcactgccacggtcaggggaagtacccgtgtcttcaggtgtttgtgaacctcagccatccaggtcagaaagctctcctacattataatgaagaggctgtccagataaatcccaagtgcttttacacacctaagtgccaccaagatagaaatgatttgctcaacagtgctctggacataaaagaattcttcgatcacaaaaatggaacccccttttcatgcttctacagtccagccagccaatctgaagatgtcattcttataaaaaagtatgaccaaatggctatcttccactgtttattttggccttcactgactctgctaggtggtgccctgattgttggcatggtgagattaacacaacacctgtccttactgtgtgaaaaatatagcactgtagtcagagatgaggtaggtggaaaagtaccttatatagaacagcatcagttcaaactgtgcattatgaggaggagcaaaggaagagcagagaaatcttaagacggtggccaaattaaagtgctggccttcagatgtctgtgatttctgcaactgaggacctaattatgcctgtctgcaaactaataatgtaaaaggtaataattaaagtatcatattttcatgtgggaaaaaatttaaaa

SEQ ID NO: 167919 - DNA, 2055 bp, Homo sapiens
  Payload ID: 13026
  Gene Symbol: KCNMB3
  Gene Name: potassium channel subfamily M regulatory beta subunit 3
  Uniprot ID: Q9NPA1
  ENST ID: ENST00000392686
  CDS Start-End: 943-1716
gttcctggttctccagcaggaactgagagcaagggtcaggaggcgacaggtccaagtacagtagacactcaaagtgaaccctcagatatgaaagagccagatgaagaaaagaatgaccaacagggagaggcattggactcattgcagaagagaaagaacaagaaaaagaaaaagaagaggaaaaaatccccagtacccatagaaacccttaaagatgtttaaaaagagttaacttatcagaacacagatttaagtgaaattaaggaagaagagcaggtaaagtctactgacagaaagtcagcagtggaagcccaaaacgaggtgactgaaaatccaaaacagaaaattgcagcagaaagcagtgaaaatgttgattgtccagagaatcctaaaatgaagttggatggaaaacttgaccaagaaggcaatgatgtaaaaacagcagctgaggaggtactagctggtagagacacattagattttgaggatgtcacagttcaatcatcaggcccgagggctggtggtgaagaattagatgaaggtgttgcaaaagataatgctaaaatagctggtgccacttaaagcaatcctgaagaaccagagagcgaagatgcagatcactgcaccgtacccaaaaatgaaagtccctcacaggacattagtgatgcctgtgaagcagaaagtacagagaggtgtgggatgtcagaacatccaagtcagaccatcaggaaagctttagacagcaatagcctaaaaaaccatgacttgttggcaccaggaggagagccgggggacttcaatccagaaagcagagaagataccagaggagggaacgagaagggcaaaagcaaagaagaccgtaccatgtcctaagctgaggcaggcggcaggcgtggtgcacaggaagtctgagtgtgaggggctcttttctctccactgccaatgacagcctttcctgcctcagggaagaagagagagacagactacagtgatggagacccactagatgtgcacaagaggctgccatccagtgctggagaggaccgagccgtgatgctggggtttgccatgatgggcttctcagtcctaatgttcttcttgctcggaacaaccattctaaagccttttatgctcagcattcagagagaagaatcgacctgcactgccatccacacagatatcatggacgactggctggactgtgccttcacctgtggtgtgcactgccacggtcaggggaagtacccgtgtcttcaggtgtttgtgaacctcagccatccaggtcagaaagctctcctacattataatgaagaggctgtccagataaatcccaagtgcttttacacacctaagtgccaccaagatagaaatgatttgctcaacagtgctctggacataaaagaattcttcgatcacaaaaatggaacccccttttcatgcttctacagtccagccagccaatctgaagatgtcattcttataaaaaagtatgaccaaatggctatcttccactgtttattttggccttcactgactctgctaggtggtgccctgattgttggcatggtgagattaacacaacacctgtccttactgtgtgaaaaatatagcactgtagtcagagatgaggtaggtggaaaagtaccttatatagaacagcatcagttcaaactgtgcattatgaggaggagcaaaggaagagcagagaaatcttaagacggtggccaaattaaagtgctggccttcagatgtctgtgatttctgcaactgaggacctaattatgcctgtctgcaaactaataatgtaaaagcgtgatgttacagactgcagagttaaagaaaagcagacattgacagtttctgatgagcataaacagtaagtgcagtcacaggccaaacttcttgctaggaacagcaagactgggaagaggtcttaaatttagtgatactgttattattctatattctcaatatagtaacacatgcatcttgctgtgtcaaatgctttctgggccatcattaaaaggacattaaaaacgtttttcttctaatgaa

SEQ ID NO: 167920 - DNA, 1004 bp, Homo sapiens
  Payload ID: 13026
  Gene Symbol: KCNMB3
  Gene Name: potassium channel subfamily M regulatory beta subunit 3
  Uniprot ID: Q9NPA1
  ENST ID: ENST00000497599
  CDS Start-End: 293-814
acagtgcaaagagagagaagcagcttcggctgcagcaaaccacgcaggtccttcttgatcatctagaactgaccgctccgccttgccaggagtctgcagaaccacgtggctagcctgcctgaagttctcacctctccaggaaggcggggggcttctaatggctgcagctgcgctgggggctgggggctcccgctgggactccacttccgtggatgtctaagcttcacctttcttgcgcccgcaggggcatgactcaggtgaaagggagccattttctcagacccctggcctcatgcagcccttcagcatccccgtgcaaatcacacttcagggcagccggaggcgccaggggaggacagcctttcctgcctcagggaagaagagagagacagactacagtgatggagacccactagatgtgcacaagaggctgccatccagtgctggagaggaccgagccgtgatgctggggtttgccatgatgggcttctcagtcctaatgttcttcttgctcggaacaaccattctaaagccttttatgctcagcattcagagagaagaatcgacctgcactgccatccacacagatatcatggacgactggctggactgtgccttcacctgtggtgtgcactgccacggtcaggggaagtacccgtgtcttcaggtgtttgtgaacctcagccatccaggtcagaaagctctcctacattataatgaagaggctgtccagataaatcccaagcgtgatgttacagactgcagagttaaagaaaagcagacattgacagtttctgatgagcataaacagtaagtgcagtcacaggccaaacttcttgctaggaacagcaagactgggaagaggtcttaaatttagtgatactgttattattctatattctcaatatagtaacacatgcatcttgctgtgtcaaatgctttctgggccatcattaaaaggacattaaaaacgtttttcttctaatgaatgcagtataccacag

SEQ ID NO: 167921 - DNA, 7246 bp, Homo sapiens
  Payload ID: 13026
  Gene Symbol: KCNMB3
  Gene Name: potassium channel subfamily M regulatory beta subunit 3
  Uniprot ID: Q9NPA1
  ENST ID: ENST00000485523
  CDS Start-End: 260-1033
tacagagaggtgtgggatgtcagaacatccaagtcagaccatcaggaaagctttagacagcaatagcctaaaaaaccatgacttgttggcaccaggaggagagccgggggacttcaatccagaaagcagagaagataccagaggagggaacgagaagggcaaaagcaaagaagaccgtaccatgtcctaagctgaggcaggcggcaggcgtggtgcacaggaagtctgagtgtgaggggctcttttctctccactgccaatgacagcctttcctgcctcagggaagaagagagagacagactacagtgatggagacccactagatgtgcacaagaggctgccatccagtgctggagaggaccgagccgtgatgctggggtttgccatgatgggcttctcagtcctaatgttcttcttgctcggaacaaccattctaaagccttttatgctcagcattcagagagaagaatcgacctgcactgccatccacacagatatcatggacgactggctggactgtgccttcacctgtggtgtgcactgccacggtcaggggaagtacccgtgtcttcaggtgtttgtgaacctcagccatccaggtcagaaagctctcctacattataatgaagaggctgtccagataaatcccaagtgcttttacacacctaagtgccaccaagatagaaatgatttgctcaacagtgctctggacataaaagaattcttcgatcacaaaaatggaacccccttttcatgcttctacagtccagccagccaatctgaagatgtcattcttataaaaaagtatgaccaaatggctatcttccactgtttattttggccttcactgactctgctaggtggtgccctgattgttggcatggtgagattaacacaacacctgtccttactgtgtgaaaaatatagcactgtagtcagagatgaggtaggtggaaaagtaccttatatagaacagcatcagttcaaactgtgcattatgaggaggagcaaaggaagagcagagaaatcttaagacggtggccaaattaaagtgctggccttcagatgtctgtgatttctgcaactgaggacctaattatgcctgtctgcaaactaataatgtaaaaggtaataattaaagtatcatattttcatgtgggaaaaaatttaaaagcctcattttgtattctatttatttctataaatacatacaaattcaccatcttttctaatcccaatctctttccaaatgagctaaggaagcactgttttttttcctgtatagcaaaatgagttcaagatattctttgcctaatttcagctctagctagaaccagtcaatatggaaataaacaatgagggtatctaatctactgaacactgaaccatcagcctaactctatgcaatatagtcatactaaaatatttctcataaaaaagttcttaacagtttgttcactatacaaagacaaaaatctggtagaaaacttaagaaaacatggagctaacatatttattatagttttttttttttttcctttttgagatggagttttgctcgtcgcccaggctggagcacagtggcacagtcttggctcactgtgacctctgcctcctgggttcaagcaattctcttgcttcagcttcctaagtagctgggattacaggtgtgcaccaccacgcccagctaatttttgtatttttagtgtagacagggtttcaccatgttggtcaggctggtcttgagctcctgacctcaggtgatttgcccgccttggcctcccaaagtgctgggaatacaggcatgagccactgcgcttggctttagtttgttctttaccagtctagacagcagaggaaagctgctgcctagaaaattcactaagtttagagttactagtatttagccttgtcatgtaccatgtaatttttctttcagtaacatttttctagttaattaagcttttcataagctcatttcactttgtgcactttctggtgggaaaaatgggccagaaatatgaagaagctatactggattttaacattcatctcagatgatccacatcgtattaggctggtgcaaaagtaattccagtttttgctgttaacttttaatggcgaaaaaccgcaattatttttgcatcaacctaatagaaaagaagtcccacatggatagtcaacaattgtctgtactttaattaatgaatcaaccatggttattaaatgatgtcataaggctctcaacaaatgctttccaggttgattaagccgaatctatgagtggaaaagagattttggtctgattttccaaagtgcctcaaagtatctttaaaattttattatactcaaaaatcttaaattatggacagtggaatgagacatttgaagctacttttgtatgtagatgtaatcaaacaaaaaactgattctaagtcagtttaatcccttttagcaattaatttcgacacatattactaaattagctgaatacagcaatattgacttgatgagtaatgaataatcttggtgttttcctttctagtgtgcaatggtggaaagaacatgtgtctcagagtaggatttatttgactttgtaggccataattacaactttgggcaaataagctaacctgtgtaaacctttcttttctcatctataaaatggggataacccgttctttcacgcagttgttattttatggaataagcaaagtagggcaggtgaaactttagcttagcttctagcatctagtagcagtgctcaaaaatgttagatcatttatttaaaaatctgctaggttataacattcagtgagccttggtacttttcactggacagctggtatagaggctagggatagggagctgcagttcattttccatgcccctacctgagttctcttggctaaatgtgatacgcatttaaggcccagaacctgctgtttaaaaggttgtggtaaactattttgtataccaaagacttctctgtaataaagtatgtaagtacacatgaacatttgatgtgcacgcacattttaaatcatctgcacattgagattctacacttttctcaagggcacatctctattccgtttttgtaaatttgacttctacctaacaatatgcagttgctgggattttttttttccctaacaaattcaaaactgctaatttaaaatataaagcgtgtgtttcaattaccacagttttccatttagataggagctacctgattcattccagcaaagagagagattatccctggagaacaaagtcaattcaaaattatttaaaccatttggcaaataaataaaatttaagtaattatttgcttaattgctcagaaatactaagttgttaatgcctatgtgcattaatggtcaaagaaaagcccacacttaccttttgcaatgtttatgagaactgaaagcaaaaccagtttgcttctagcctaacttcatttctaggttctgatcttcaaacgacttggaaaaaagtctacttacctattgcatatacatacatacattcatacatatatgtatatacatatatttcttaaaatacaagcatataattctttatgcttaaaggaagtaaatatttaaacatacattcctttaatattcatcactttactggggtagaaaaattggcttttaaggtataatagtttcagattttcaatcaagtattcttagtcattactgaaaagaactcaaattcagctaaattttgattattagcaacaccggcttgcttttcaaaaggaatggcaaaagagaattatcacagttttttgcttatgtagtacactaaggattgtttggacacaaaaagtaatttttctttttttttttaataaacagcgtgatgttacagactgcagagttaaagaaaagcagacattgacagtttctgatgagcataaacagtaagtgcagtcacaggccaaacttcttgctaggaacagcaagactgggaagaggtcttaaatttagtgatactgttattattctatattctcaatatagtaacacatgcatcttgctgtgtcaaatgctttctgggccatcattaaaaggacattaaaaacgtttttcttctaatgaatgcagtataccacaggacttcaattcactgaatgacaaaatatagagaaataaacttgctacaattaatggggccaaaagggtggttcgaatttcttgataaagcttccaggtgaacatctgacgtgttagtagtcttcttttggtagtgccacattccccaaggtattaaaatgttatgctccaaaagggtatattcttttagattttattcaacccaattaggtctgaggactgaatcacactgaaaccattaacttcatttgaaactcaaaacatttttgaaatcagatgaaggccaagttctccaacctctcttaggaacataagttaaattgaacaagggacttttaaaaatgaaataaaaacaaaattaaataaaaatgaaataaatagataatgattttggaaattcatactagaattaagtttagtctaattatattttaatatgaaacaatgaaggttttctgcctccttgccaacctagaaaaattgacaaaaataagaatacctaaaagtatacatggttcttagcataaccacaaaattattatagtgacagattaaataaggttgcagatagattcatagactttaactggctaaaaaaatacatttaaaaaccttttctgtacttacctacatgaggaatggagtatactgttggtagaaaaatcatttacctaactactgtatacgcacaagggactaatttttttcctccactaaaactcttatatgtagttgtgtacaaattaagtcagaaaatttcctcatggctcacacctgtcactttatgctaactagcaaggctggaatattaacatacctaaaatcaagcagaagaaatggcactgcactaataaaaaggaggtgcaaaaccttaagtggaataggtgcatgaagtttatttaaagactaacatcccaacttgggaaactcctaataaattctaaactcttccgaattttagaaccttgatatttctttacaccttttataaaagatgcctcttgactagggctaagcaagcagtgtgtacacaaacagaattgtgtgcaagtatacacacaccaaatgcactaataatgaagaagagagaacaaaatgaatttcaaatgccgaattcgggaacctcctcaaactattgcctttttcaaatggctggaccaacgattaaacttcagccaagtttttttcttaaggtcttccatatcattaaaaacaaggcatgccaactctgactttataaatctaaaattcagtgatctgcacagtttctgagcttgaagtattgaattgtgactcatctatttttttttcccattttccttctgaggtagagttaccaatccaattttatcaggaccacagatattttgagctaaaccccatgatcttttcatacagtaaaaataatttttatgaaaaaagaaagcaggcttcccaggccatggcacatagatatatttacaatttttaatgtaataattaaaaatggtattgtttatattttaaaaaacagcccagctgtattattctgtcaccaagaattattaattgaggatgctgtcaatgctgaattttatagttcagccttcacaatcccatccatgatgaagagttgattctcttacggtatacaatatactctcacaactttcagccttctcttaaagacatgccccaaatgagcaggatggatataaagaatgtaattcattcaaacaactcctccctgttctgccccctcccctcacattcccctcttctcaaaaacatctgaagtatgaaagttgtctttaaatagtaaaagcaccacaatctattaacaccacatattatctttaaacttaaatattttagtgatgtcttggacatcaaaataatttcttaaggtggactcttgagtatgtgggtccagcccaggtctgcagtttgtgcagacatagaaaaaagaggaactttaaatattcagaaaaagttaacaggctagctttaaaatactgctggaaattaaatttcttcagagttggcaagcatgggctattgatcaaagtatgaattaaacggatttacatcattaagaaaaaacaaatccgtgttattgtgctgtgaaatttccatgatgcctttcaaataggctgctcacaatttttttataattccaaatcactcgatttttgatggaaaaaagaatacagatggactgtgttttacctatgtgaaagtcaccaatccatttaaaataaaatccaagagggcatatacagtctaatcaagtcatcattttcctgattaataagaactacactttacacaaaatactttatcagcagctgttttcatcaaaaaatcaagtcagtttcacagttgaaaaagttacacattaaaatattttacaattcattatatattcaccaggttcccattttctaatgggcttttaatataaagcagaatagaagggaaaatctcaaagttgattactttgacactaagttttacataggacactaagaaccacaaaaagcttaggttctattgtaaaatagcaaccaaattccattcttcttttaaaaatccaattagaaacatcttttttaaaaaaacaaattccacaataagagtaacagatttcaaattaacagtagtctaaaaatcttcaaaataaatggttttgtatagctgagaatatggtagaaagtgaaagcataattttccaacagtcatttcttactacagtgtgtttaaaattatttttattacttttagactttttctcaaaataattattcaaggaaatatttcttaagtggcccaataaaactgtagagccaatagtcagttacaccatattcaaggacaaggatagtcagctatagataggaactgtctaaaccacgagaactgatctctgatactgaagtacccagaagtggctatattatcactgacttgaaacagatcttagtcacccatgtagcatttaattcaatgtttggttctttgcctcatttctttcttaggtcacaatctatagtctttatagaatttgtctacatttcttctaatagaattaatttggttgtagtaacttttgaaaataaatgtaaatggtgaaatcg

SEQ ID NO: 167922 - DNA, 475 bp, Homo sapiens
  Payload ID: 13026
  Gene Symbol: KCNMB3
  Gene Name: potassium channel subfamily M regulatory beta subunit 3
  ENST ID: ENST00000486944
  CDS Start-End: 1-195
tgcttttacacacctaagtgccaccaagatagaaatgatttgctcaacagtgctctggacataaaagaattcttcgatcacaaaaatggaacccccttttcatgcttctacagtccagccagccaatctgaagatgtcattcttataaaaaacgtgatgttacagactgcagagttaaagaaaagcagacattgacagtttctgatgagcataaacagtaagtgcagtcacaggccaaacttcttgctaggaacagcaagactgggaagaggtcttaaatttagtgatactgttattattctatattctcaatatagtaacacatgcatcttgctgtgtcaaatgctttctgggccatcattaaaaggacattaaaaacgtttttcttctaatgaatgcagtataccacaggacttcaattcactgaatgacaaaatatagagaaataaacttgctacaattaatggggccaaaa

SEQ ID NO: 167923 - DNA, 4731 bp, Homo sapiens
  Payload ID: 13027
  Gene Symbol: KCNMB4
  Gene Name: potassium channel subfamily M regulatory beta subunit 4
  Uniprot ID: Q86W47
  ENST ID: ENST00000258111
  CDS Start-End: 460-1092
gctcgccccagctcagacactcctagccttggggcagctgccgggcgagtcagcggagtagcggccagcgggcgatggagacagagagacacccgacgagaggaggcggggtgggggaggcggggagagtgcgggggcggaggctggcagggggcgctggaagctggagcggtccgtgcgctccccgcgcccgagggtgcaggaggctctgaagcggctgctgcaccgcggggcccaggcggcggctggggggctggggggcgctgccgccgccgccgccgggggcgtcgctggcctcggcccctttgttctcgcgcgctccccctcgccgcccactcccctgctgtcgcgcggcggcggcggtggcggcggcggctcctcccgcccgaggcagtcgggctcggcgccgggggcgggagggggcggggggagcacgccagccgccgagagtggggggcgatggcgaagctccgggtggcttacgagtacacggaagccgaggacaagagcatccggctcggcttgtttctcatcatctccggcgtcgtgtcgctcttcatcttcggcttctgctggctgagtcccgcgctgcaggatctgcaagccacggaggccaattgcacggtgctgtcggtgcagcagatcggcgaggtgttcgagtgcaccttcacctgtggcgccgactgcaggggcacctcgcagtacccctgcgtccaggtctacgtgaacaactctgagtccaactctagggcgctgctgcacagcgacgagcaccagctcctgaccaaccccaagtgctcctatatccctccctgtaagagagaaaatcagaagaatttggaaagtgtcatgaattggcaacagtactggaaagatgagattggttcccagccatttacttgctattttaatcaacatcaaagaccagatgatgtgcttctgcatcgcactcatgatgagattgtcctcctgcattgcttcctctggcccctggtgacatttgtggtgggcgttctcattgtggtcctgaccatctgtgccaagagcttggcggtcaaggcggaagccatgaagaagcgcaagttctcttaaaggggaaggaggcttgtagaaagcaaagtacagaagctgtactcatcggcacgcgtccacctgcggaacctgtgtttcctggcgcaggagatggacagggccacgacagggctctgagaggctcatccctcagtggcaacagaaacaggcacaactggaagacttggaacctcaaagcttgtattccatctgctgtagcaatggctaaagggtcaagatcttagctgtatggagtaactatttcagaaaaccctataagaagttcattttctttcaaaagtaacagtatattatttgtacagtgtagtatacaaaccattatgatttatgctacttaaaaatattaaaatagagtggtctgtgttattttctatttccttttttatgcttagaacaccagggtttaaaaaaaaaaaaaaggtgaggacatctgggtctcatttgcttctgctaggttaaacttttacttgacaacaaggattcctgctgaagtctgaaccttactgtgtaaccctcagtttccactattaaagagtatcttttgacgtctgcttggaaaatgaatagtatactggtaactcagtctccagtcacctctgtgtctcttaagcaagagattctaaaagattgggaaaacatatcctccaacacctgcctttgcctaaccattatttttcaccagattacttcttaagagagggaggtgattctgaagaaggcttctatctcaaaaagcactgggcttccttattcatctgttcttgttgtttttgacggagttaaaaaagtttgtgtgcaatacaatatacatgatgtgaaggacactcttcagcttagtgaaacgctgttttcatttttttttttttttgtaggtcagaaaaaaacaacaaaatcagttcaagcatttttttttctttgtccttgccttgatgttatgagtattaaaaccaggaggattgctgccattgtgcagtttgcttagacaaacctggagatgcaacccagctcacatcattgctactgatgagctttctgtgcctttatcaaaagttgattgagaagaccatatttctttgtatctttttataaactcaaattccaagtatcaaatcgcaggtctcagtgaacatcaaacctatttactacatagaatcaaacctttgtttaggtgagatgtacatcgttagtggaggaaaaactgacaacctaatttcatttgttttcttctgatactcttcagacatgcctctattagaataaaggtaaactggaatttaaagacaagttcccctcagttatttccatggagctgtaatatgtatatatggagtgatggtttcctgacctttagtccacataccaatgttttcttttttcttttttttttttttttttgagatggtgtctcactctgttgccaggctggagtgcagtggcacgatctcggctcactacagtctccacctcctgggttcaagtcattcctctgcctcagcctcccgagtagctgggactacaggcacgcaccaccacgcctggctaatttttttgtatttttagtagagacggggtttcaccgtgttagccaggatggtctcaatctcctgaccttgtgatctgcccacttcacctcccaaagtgctgggattacaggccaatgttttcttaatcttagaatgtgaataactgaaaatcatagtctgtggaaaggtgttgaattgagtataatcttcttctgtttatttttgtgttttgttttttaacagatgggtatcttgctatgttgcccaggatggagtgcagtagctattcacaggtatgatcatagcacactgcagcctcaagctcctgggctcaagcgatccccctccctcagcctcccaagtatctggggttactggtgtgcaccaccgtgcttggctccaataattttttttctaattcaaaagttacagtttcactgtgaaaaaggccttgaacacactatttatgacatcttttgaggcagctccagtgccttgacttcaatcccagtttccggttgcagcatccttgttgtcttagcaacacagtgaactattctgaagcatagagtaacacgaaactgggagtccgagaaataatcatctctgcatcacattatgggagacgaagtctgctttatccattttatctttattcagttgtctatgattaattgattacagagtagtagattagaatagtgcatggatatacatttgtgttgaaaaaaggggaagttgatatatatcaatcttagttttcatttatcagtttgatattcatgcatttacactaaacgcttccatttatcccgaaaaagtatatgcaactgtattctgtaggttgatttttggaaaaggggagaagcacactgaattcataaggtcacatgtagtcttaaggtcttacttgcttacagccaattaaatttgaagcaccttatttatacttgttaaaggtaaaacccaaaagaacaagcagaggacattttaaggtcataaaaggtaaataagcttaccttcttaatgttttcattctctttttgtataaatcagaaaatgatctaaactgctgtaacaaagagaccccaaaatatgatggctcatgtaagataatttatttttttctcacatagcaatccagaagtggcttcatttcacaaggtattcaagggatataggagtcatctaccttgttagttctcttaatacccaagggtattgttctttccatggtcaaagctggctcaagacttcctagcctgtgaaaaaagaagaaggtggagcaagccatttcctttttaggaaattacagccatcacttctgcccaccgtccattcatgaatacttactatatagctatacctagcttcaagaaagcctgggacgtgtctctaactagatggacatgtgccctactaaaactccagggaaagggttctattactaaagctaaaaagaggggaatgaatactagagttaaagacaaaaatgatagcagccaatggcccatgccgtgataatctgctgagcaggcatgatggagatcccttgcccagcagaaagtgttccttggtgaaatcatgaatctgctatctaggagaaactcccttgtccattgtcttctgtggccactagtttgacctctaggaaagtcttgctcgtcagcttctgtggccccgtctgaaacttttgagggacatcgcagcttttgcagcccctgcttgctggtgcagacttttagacctagattgccttagagactgaaaaatatacgcttttataggccggggttttagttcatttgactgtaataaagacgtcaatgccgtttttaatgtttgactgctgacatctttcaagactcacctttcccttctcccttatgctgcacatctgggcaagctgatggaagcatgggtgcctcctcctttggccccagcaggaagttcaaatcacgcaagccctggcatgcatgcaggaagcttcaccccagcctcacactctaagacggataaaagccaaaccaattaagccgtttctcgaccctcctgggagcctgccctatctccctggaaagtctcagtatgtgagtaataaacctttttataccca

SEQ ID NO: 167924 - DNA, 472 bp, Homo sapiens
  Payload ID: 13027
  Gene Symbol: KCNMB4
  Gene Name: potassium channel subfamily M regulatory beta subunit 4
  ENST ID: ENST00000531884
  CDS Start-End: 1-134
gctcctatatccctccctgtaagagagaaaatcagaagaatttggaaagtgtcatgaattggcaacagtactggaaagatgagattggttcccagccatttacttgctattttaatcaacatcaaaggtcttgatgattacccctctttatttctgagaactcaggaagcatctccggcaggggttatccttaataggcccccgatctcagggttttaagaatcacattgggaaaaccgacagatggataaaaaataattaccacacagtaccagatgatgtgcttctgcatcgcactcatgatgagattgtcctcctgcattgcttcctctggcccctggtgacatttgtggtgggcgttctcattgtggtcctgaccatctgtgccaagagcttggcggtcaaggcggaagccatgaagaagcgcaagttctcttaaaggggaaggaggcttgtagaaagcaaagtacag

SEQ ID NO: 167925 - DNA, 1715 bp, Homo sapiens
  Payload ID: 13028
  Gene Symbol: KCTD1
  Gene Name: potassium channel tetramerization domain containing 1
  Uniprot ID: Q719H9
  ENST ID: ENST00000317932
  CDS Start-End: 112-885
tacagctcccgtcactagctttttctcctcaagcctgcactgcacaccaactgggacggagggtgcagatgaataaaggcaaatccatcaccaaaagacagtcggcccaatatgtcaagacctctgatcactagatcccctgcatctccactgaacaaccaaggcatccctactccagcacaactcacaaaatccaatgcgcctgtccacattgatgtgggcggccacatgtacaccagcagcctggccaccctcaccaaataccctgaatccagaatcggaagactttttgatggtacagagcccattgttttggacagtctcaaacagcactatttcattgacagagatggacagatgttcagatatatcttgaattttctacgaacatccaaactcctcattcctgatgatttcaaggactacactttgttatatgaagaggcaaaatattttcagcttcagcccatgttgttggagatggaaagatggaagcaggacagagaaactggtcgattttcaaggccctgtgagtgcctcgtcgtgcgtgtggccccagacctcggagaaaggatcacgctaagcggtgacaaatccttgatagaagaagtatttccagagatcggcgacgtgatgtgtaactctgtcaatgcaggctggaatcacgactcgacgcacgtcatcaggtttccactaaatggctactgtcacctcaactcagtccaggtcctcgagaggttgcagcaaagaggatttgaaatcgtgggctcctgtgggggaggagtagactcgtcccagttcagcgaatacgtccttcggcgggaactgaggcggacgccccgtgtaccctccgtcatccggataaagcaagagcctctggactaaatggacatatttcttatgcaaaaaggaaaacacacacaaccaataactcaaacaaaaaagggacatttatgtgcagttgggacagcaaaccaagtcctggacgtaaaatcgaataaaagacacatttatatccaatagagaccacacctgtattcatatgggaacaattggaatagtgatatcctcaaggtgtaaaaaatatataaatatatatatatatgtcaaaaggtaggaaatgcaaaaaagaaaaaaaaaaaaggtgacagccgcagttggtgctgtgatggccgtgaagtgtcctgggccttccgaggcctctgacaaataaacaagccatgagtggtgaggacacagtctccttacagtttccattgccaacaacagccatccatatttcttttttcctttgtctttctttttcctttttttttaaaaaaacaaaacaaacaaaacaccttgaatcaagtttgtttgtatatggaggttccacgtctttctttaggcagggaccaggcaggacttcagaaaaaccctcatgagcacattgcaaagatgttagacatgaaattttaaatgtagtttgtacagaagtcacacttttttgtccacctcacagatgtgaactttactttgttttaaaactgatcagttttgccaaggggccagaattattccttgttagaattgctccagttcaagtctgctgctttcctacaatttttcaaattttataatgtattaaatacaataaactctgtttaaaaaataaggtctgtgtgaaacacacatgtgggggtgaggctggattaaagtgaaattttttctttttg

SEQ ID NO: 167926 - DNA, 2103 bp, Homo sapiens
  Payload ID: 13028
  Gene Symbol: KCTD1
  Gene Name: potassium channel tetramerization domain containing 1
  Uniprot ID: Q719H9
  ENST ID: ENST00000408011
  CDS Start-End: 561-1334
ctggaccggcgcggacttgccccagacctacggggagcgccccaggtctttaatgacagcttaaatgtggctgttggaaaagtcgaaagggatgtggctgacgtggggcgtgtttcgctcctttgcaagagtcggaaagggagttgggagccgcgcggctggccccaggcccccgcgcctcgccgccagcaagtaggtgggggagccgccgccgccgccagccccatcccgctcccaagcctcgcccgctgcgccctggccgcgggcgccgagagggtgcggggcctcgccgtgcctcctccaccctgctcattaacctgcctgctccgctccgctccgggcggccccagacacgggtttcccgcggcagcacccgcggcccgcccggcgcagccgccgccccgaccccccggctccggggggcaatgagggggcagtggaaggggcactgctcctcgggcattacttagagaaacgagaccgtcccgccctctcgccggccctccctctctcccgcccgggcccgcgcaattctccgccagagggacagtcggcccaatatgtcaagacctctgatcactagatcccctgcatctccactgaacaaccaaggcatccctactccagcacaactcacaaaatccaatgcgcctgtccacattgatgtgggcggccacatgtacaccagcagcctggccaccctcaccaaataccctgaatccagaatcggaagactttttgatggtacagagcccattgttttggacagtctcaaacagcactatttcattgacagagatggacagatgttcagatatatcttgaattttctacgaacatccaaactcctcattcctgatgatttcaaggactacactttgttatatgaagaggcaaaatattttcagcttcagcccatgttgttggagatggaaagatggaagcaggacagagaaactggtcgattttcaaggccctgtgagtgcctcgtcgtgcgtgtggccccagacctcggagaaaggatcacgctaagcggtgacaaatccttgatagaagaagtatttccagagatcggcgacgtgatgtgtaactctgtcaatgcaggctggaatcacgactcgacgcacgtcatcaggtttccactaaatggctactgtcacctcaactcagtccaggtcctcgagaggttgcagcaaagaggatttgaaatcgtgggctcctgtgggggaggagtagactcgtcccagttcagcgaatacgtccttcggcgggaactgaggcggacgccccgtgtaccctccgtcatccggataaagcaagagcctctggactaaatggacatatttcttatgcaaaaaggaaaacacacacaaccaataactcaaacaaaaaagggacatttatgtgcagttgggacagcaaaccaagtcctggacgtaaaatcgaataaaagacacatttatatccaatagagaccacacctgtattcatatgggaacaattggaatagtgatatcctcaaggtgtaaaaaatatataaatatatatatatatgtcaaaaggtaggaaatgcaaaaaagaaaaaaaaaaaaggtgacagccgcagttggtgctgtgatggccgtgaagtgtcctgggccttccgaggcctctgacaaataaacaagccatgagtggtgaggacacagtctccttacagtttccattgccaacaacagccatccatatttcttttttcctttgtctttctttttcctttttttttaaaaaaacaaaacaaacaaaacaccttgaatcaagtttgtttgtatatggaggttccacgtctttctttaggcagggaccaggcaggacttcagaaaaaccctcatgagcacattgcaaagatgttagacatgaaattttaaatgtagtttgtacagaagtcacacttttttgtccacctcacagatgtgaactttactttgttttaaaactgatcagttttgccaaggggccagaattattccttgttagaattgctccagttcaagtctgctgctttcctacaatttttcaaattttataatgtattaaatacaataaactctgtttaaaaaataa

SEQ ID NO: 167927 - DNA, 1705 bp, Homo sapiens
  Payload ID: 13028
  Gene Symbol: KCTD1
  Gene Name: potassium channel tetramerization domain containing 1
  Uniprot ID: Q719H9
  ENST ID: ENST00000417602
  CDS Start-End: 102-875
cttttccagtttccgaggtgcccgcccccgcgcgcctgaggcagcgcagcccggagggcgaacgaatggcggttggcaaactttgagacagtcggcccaatatgtcaagacctctgatcactagatcccctgcatctccactgaacaaccaaggcatccctactccagcacaactcacaaaatccaatgcgcctgtccacattgatgtgggcggccacatgtacaccagcagcctggccaccctcaccaaataccctgaatccagaatcggaagactttttgatggtacagagcccattgttttggacagtctcaaacagcactatttcattgacagagatggacagatgttcagatatatcttgaattttctacgaacatccaaactcctcattcctgatgatttcaaggactacactttgttatatgaagaggcaaaatattttcagcttcagcccatgttgttggagatggaaagatggaagcaggacagagaaactggtcgattttcaaggccctgtgagtgcctcgtcgtgcgtgtggccccagacctcggagaaaggatcacgctaagcggtgacaaatccttgatagaagaagtatttccagagatcggcgacgtgatgtgtaactctgtcaatgcaggctggaatcacgactcgacgcacgtcatcaggtttccactaaatggctactgtcacctcaactcagtccaggtcctcgagaggttgcagcaaagaggatttgaaatcgtgggctcctgtgggggaggagtagactcgtcccagttcagcgaatacgtccttcggcgggaactgaggcggacgccccgtgtaccctccgtcatccggataaagcaagagcctctggactaaatggacatatttcttatgcaaaaaggaaaacacacacaaccaataactcaaacaaaaaagggacatttatgtgcagttgggacagcaaaccaagtcctggacgtaaaatcgaataaaagacacatttatatccaatagagaccacacctgtattcatatgggaacaattggaatagtgatatcctcaaggtgtaaaaaatatataaatatatatatatatgtcaaaaggtaggaaatgcaaaaaagaaaaaaaaaaaaggtgacagccgcagttggtgctgtgatggccgtgaagtgtcctgggccttccgaggcctctgacaaataaacaagccatgagtggtgaggacacagtctccttacagtttccattgccaacaacagccatccatatttcttttttcctttgtctttctttttcctttttttttaaaaaaacaaaacaaacaaaacaccttgaatcaagtttgtttgtatatggaggttccacgtctttctttaggcagggaccaggcaggacttcagaaaaaccctcatgagcacattgcaaagatgttagacatgaaattttaaatgtagtttgtacagaagtcacacttttttgtccacctcacagatgtgaactttactttgttttaaaactgatcagttttgccaaggggccagaattattccttgttagaattgctccagttcaagtctgctgctttcctacaatttttcaaattttataatgtattaaatacaataaactctgtttaaaaaataaggtctgtgtgaaacacacatgtgggggtgaggctggattaaagtgaaattttttctttttg

SEQ ID NO: 167928 - DNA, 731 bp, Homo sapiens
  Payload ID: 13028
  Gene Symbol: KCTD1
  Gene Name: potassium channel tetramerization domain containing 1
  ENST ID: ENST00000580638
  CDS Start-End: 107-731
ggctgcttttccagtttccgaggtgcccgcccccgcgcgcctgaggcagcgcagcccggagggcgaacgaatggcggttggcaaactttgagacagtcggcccaatatgtcaagacctctgatcactagatcccctgcatctccactgaacaaccaaggcatccctactccagcacaactcacaaaatccaatgcgcctgtccacattgatgtgggcggccacatgtacaccagcagcctggccaccctcaccaaataccctgaatccagaatcggaagactttttgatggtacagagcccattgttttggacagtctcaaacagcactatttcattgacagagatggacagatgttcagatatatcttgaattttctacgaacatccaaactcctcattcctgatgatttcaaggactacactttgttatatgaagaggcaaaatattttcagcttcagcccatgttgttggagatggaaagatggaagcaggacagagaaactggtcgattttcaaggccctgtgagtgcctcgtcgtgcgtgtggccccagacctcggagaaaggatcacgctaagcggtgacaaatccttgatagaagaagtatttccagagatcggcgacgtgatgtgtaactctgtcaatgcaggctggaatcacgactcgacgcacgtcatcaggtttccactaaatggctactgtcacctcaactcagtccaggtcctcgaga

SEQ ID NO: 167929 - DNA, 1425 bp, Homo sapiens
  Payload ID: 13028
  Gene Symbol: KCTD1
  Gene Name: potassium channel tetramerization domain containing 1
  Uniprot ID: Q719H9
  ENST ID: ENST00000580059
  CDS Start-End: 407-1180
gcccgccccgcagggctgctacgccgaggctctgaacggggcggcacggcaccactcccaccacccccccacccatccctcccaccaccaccgcccccagccgccctcgctggggaacacttacatcctccccaaagacagccaggtcgggcccgacgtgaaatccgaggctgcgcccaagcgcgccctgtacgagtctgtgttcgggtcgggggaaatctgcggccccacttcccccaaaagactttgtatccgcccctcggagcctgtggatgcggtggtggtggtttccgtgaaacacgaccccctgcctcttcttccagaagccaatgggcacagaagcaccaattctcccacaatagtttcacctgctattgtttcccccacccaggacagtcggcccaatatgtcaagacctctgatcactagatcccctgcatctccactgaacaaccaaggcatccctactccagcacaactcacaaaatccaatgcgcctgtccacattgatgtgggcggccacatgtacaccagcagcctggccaccctcaccaaataccctgaatccagaatcggaagactttttgatggtacagagcccattgttttggacagtctcaaacagcactatttcattgacagagatggacagatgttcagatatatcttgaattttctacgaacatccaaactcctcattcctgatgatttcaaggactacactttgttatatgaagaggcaaaatattttcagcttcagcccatgttgttggagatggaaagatggaagcaggacagagaaactggtcgattttcaaggccctgtgagtgcctcgtcgtgcgtgtggccccagacctcggagaaaggatcacgctaagcggtgacaaatccttgatagaagaagtatttccagagatcggcgacgtgatgtgtaactctgtcaatgcaggctggaatcacgactcgacgcacgtcatcaggtttccactaaatggctactgtcacctcaactcagtccaggtcctcgagaggttgcagcaaagaggatttgaaatcgtgggctcctgtgggggaggagtagactcgtcccagttcagcgaatacgtccttcggcgggaactgaggcggacgccccgtgtaccctccgtcatccggataaagcaagagcctctggactaaatggacatatttcttatgcaaaaaggaaaacacacacaaccaataactcaaacaaaaaagggacatttatgtgcagttgggacagcaaaccaagtcctggacgtaaaatcgaataaaagacacatttatatccaatagagaccacacctgtattcatatgggaacaattggaatagtgatatcctcaaggtgtaaaaaatatataaatatatatatatatgtcaaaaggtaggaaatgcaaaaaa

SEQ ID NO: 167930 - DNA, 588 bp, Homo sapiens
  Payload ID: 13028
  Gene Symbol: KCTD1
  Gene Name: potassium channel tetramerization domain containing 1
  ENST ID: ENST00000578973
  CDS Start-End: 288-588
cttacatcctccccaaagacagccaggtcgggcccgacgtgaaatccgaggctgcgcccaagcgcgccctgtacgagtctgtgttcgggtcgggggaaatctgcggccccacttcccccaaaagactttgtatccgcccctcggagcctgtggatgcggtggtggtggtttccgtgaaacacgaccccctgcctcttcttccagaagccaatgggcacagaagcaccaattctcccacaatagtttcacctgctattgtttcccccacccaggacagtcggcccaatatgtcaagacctctgatcactagatcccctgcatctccactgaacaaccaaggcatccctactccagcacaactcacaaaatccaatgcgcctgtccacattgatgtgggcggccacatgtacaccagcagcctggccaccctcaccaaataccctgaatccaggactacactttgttatatgaagaggcaaaatattttcagcttcagcccatgttgttggagatggaaagatggaagcaggacagagaaactggtcgattttcaaggccctgtgagtgcctcgtcgtgcgtgtggcccc

SEQ ID NO: 167931 - DNA, 1747 bp, Homo sapiens
  Payload ID: 13028
  Gene Symbol: KCTD1
  Gene Name: potassium channel tetramerization domain containing 1
  Uniprot ID: Q719H9
  ENST ID: ENST00000579973
  CDS Start-End: 141-914
ccaccacctgcctcaccagtagctgggactacagctcccgtcactagctttttctcctcaagcctgcactgcacaccaactgggacggagggtgcagatgaataaaggcaaatccatcaccaaaagacagtcggcccaatatgtcaagacctctgatcactagatcccctgcatctccactgaacaaccaaggcatccctactccagcacaactcacaaaatccaatgcgcctgtccacattgatgtgggcggccacatgtacaccagcagcctggccaccctcaccaaataccctgaatccagaatcggaagactttttgatggtacagagcccattgttttggacagtctcaaacagcactatttcattgacagagatggacagatgttcagatatatcttgaattttctacgaacatccaaactcctcattcctgatgatttcaaggactacactttgttatatgaagaggcaaaatattttcagcttcagcccatgttgttggagatggaaagatggaagcaggacagagaaactggtcgattttcaaggccctgtgagtgcctcgtcgtgcgtgtggccccagacctcggagaaaggatcacgctaagcggtgacaaatccttgatagaagaagtatttccagagatcggcgacgtgatgtgtaactctgtcaatgcaggctggaatcacgactcgacgcacgtcatcaggtttccactaaatggctactgtcacctcaactcagtccaggtcctcgagaggttgcagcaaagaggatttgaaatcgtgggctcctgtgggggaggagtagactcgtcccagttcagcgaatacgtccttcggcgggaactgaggcggacgccccgtgtaccctccgtcatccggataaagcaagagcctctggactaaatggacatatttcttatgcaaaaaggaaaacacacacaaccaataactcaaacaaaaaagggacatttatgtgcagttgggacagcaaaccaagtcctggacgtaaaatcgaataaaagacacatttatatccaatagagaccacacctgtattcatatgggaacaattggaatagtgatatcctcaaggtgtaaaaaatatataaatatatatatatatgtcaaaaggtaggaaatgcaaaaaagaaaaaaaaaaaaggtgacagccgcagttggtgctgtgatggccgtgaagtgtcctgggccttccgaggcctctgacaaataaacaagccatgagtggtgaggacacagtctccttacagtttccattgccaacaacagccatccatatttcttttttcctttgtctttctttttcctttttttttaaaaaaacaaaacaaacaaaacaccttgaatcaagtttgtttgtatatggaggttccacgtctttctttaggcagggaccaggcaggacttcagaaaaaccctcatgagcacattgcaaagatgttagacatgaaattttaaatgtagtttgtacagaagtcacacttttttgtccacctcacagatgtgaactttactttgttttaaaactgatcagttttgccaaggggccagaattattccttgttagaattgctccagttcaagtctgctgctttcctacaatttttcaaattttataatgtattaaatacaataaactctgtttaaaaaataaggtctgtgtgaaacacacatgtgggggtgaggctggattaaagtgaaattttttctttttgaaa

SEQ ID NO: 167932 - DNA, 814 bp, Homo sapiens
  Payload ID: 13028
  Gene Symbol: KCTD1
  Gene Name: potassium channel tetramerization domain containing 1
  ENST ID: ENST00000580191
  CDS Start-End: 34-814
aaaaggggacttggagagagactttgtgcttcaatgtttcaggacagtcggcccaatatgtcaagacctctgatcactagatcccctgcatctccactgaacaaccaaggcatccctactccagcacaactcacaaaatccaatgcgcctgtccacattgatgtgggcggccacatgtacaccagcagcctggccaccctcaccaaataccctgaatccagaatcggaagactttttgatggtacagagcccattgttttggacagtctcaaacagcactatttcattgacagagatggacagatgttcagatatatcttgaattttctacgaacatccaaactcctcattcctgatgatttcaaggactacactttgttatatgaagaggcaaaatattttcagcttcagcccatgttgttggagatggaaagatggaagcaggacagagaaactggtcgattttcaaggccctgtgagtgcctcgtcgtgcgtgtggccccagacctcggagaaaggatcacgctaagcggtgacaaatccttgatagaagaagtatttccagagatcggcgacgtgatgtgtaactctgtcaatgcaggctggaatcacgactcgacgcacgtcatcaggtttccactaaatggctactgtcacctcaactcagtccaggtcctcgagaggttgcagcaaagaggatttgaaatcgtgggctcctgtgggggaggagtagactcgtcccagttcagcgaatacgtccttcggcgggaactgaggcggacgccccgtgtaccctccgtcatccggataaagc

SEQ ID NO: 167933 - DNA, 4163 bp, Homo sapiens
  Payload ID: 13029
  Gene Symbol: KCTD10
  Gene Name: potassium channel tetramerization domain containing 10
  Uniprot ID: Q9H3F6
  ENST ID: ENST00000228495
  CDS Start-End: 283-1224
acaccttgcctcccctctggcagctgaaatagcggaggtgggataaatgccctccccagccgagaaaagctggaacccactccggccggggaggctggaaagaaaactggcccctaggcgcacaacggacggcttaagacgttgccctctgcggggcggaagtggggtgcggacagcggaagttatcgctccggccccgcctccgcccccggctggcgtgagctgggtgtttcctgcctctctcagtccgggtttggagactcctgcgtcctccgacttttcatggaagagatgtcaggagaaagtgtggtgagctcagcggtgccagcggctgctacccgcaccacttccttcaagggcacgagccccagctccaaatacgtgaagctgaatgtgggtggagccctctactataccaccatgcagacgctgaccaagcaggacaccatgctgaaggccatgttcagcgggcgcatggaagtgctcaccgacagtgaaggctggatcctcattgaccgctgtgggaagcactttggtacgatactcaactaccttcgagacggggcggtgcctttacccgagagccgccgggagatcgaggagctgctagcagaagccaagtactacctagtccaaggcctggtggaagagtgccaggcggccctacaaaacaaagatacttatgagcctttctgcaaggtccctgtgatcacctcatccaaggaagaacaaaaacttatagcgacttcaaataagccagccgtgaagttgctctacaacagaagtaacaacaaatactcatataccagcaattctgacgacaatatgttgaaaaacattgaactgtttgataagctgtctctgcgctttaacggaagggtcctgttcataaaggatgttattggggatgaaatctgctgctggtccttttatggtcagggccggaagattgctgaagtctgttgtacctccatcgtctatgccactgagaagaaacagaccaaggtggagtttcccgaagcccggatttatgaggagaccctgaacattttgctgtatgaggcccaggatggccggggacctgacaatgcgctcctggaggccacaggcggggcggcggggcgctcccaccacctggacgaggacgaggagcgggagcggatcgagcgcgtgcggaggatccacatcaagcgccctgatgaccgggcccacctccaccagtgagcaggcaagagaccgagccgccctcctctcaccgcccccactccctgccgtgctacacccagatcctgtgcaggctgccgggccccttctgcttcccttggagcctggagatacttttgtaacaagccagatgattattttggtattgcttgacaaggcaaattgattgtcttgacccaggcgtatgacccctgtcgttgaacaagctgtgtctaagatctctacttttcatgagaatctgagactctttggagccaggctttctcggttctcagaggaaaagtatgaatgagtgtgaagtgtatgtgagaacttttgtttgcaatatttatttttgtgggtgtcgacttcctatgtgggctttttgggtgacactcccttaagggttcagtttgacaattctgagagttgtcctgcagttggaggccaccagaggtatctgagctccctgcttcctatttcataatcctccagccccagcaggtccactcctggttcctgtgtgtttggcccgggcacaatccccactgctttgctagacgtgctttctgccatgtggctttgggcctagagcttgttgataattgcagcttgtggcagtggaaatatggctgaatgagcgtctaaatcgttgagaccagtgcaactttgggtgcaaggctttgtttagggatcaagccttttgccaccttgggctggtctttggcctggtgctcactgggaccccatatgtctgcgtaggagcagaactttccatggcagtaagtgtccagctctgtttctggttctttccccaactccagccccgtccagttgttctcctgattgacccgactccactccaggaaggccatctgaccctgtgacaggcatagctcataaactacccctccctgggatcccgctcctcttcagcctccttccccatgaagctgggctaactttctaagtcattttgcttagaaattcagtgtggcccataccctttgtcctcccagcctggcatccaggcagggacaccctcacaccaccagccccagggagcttccctgctataaacacagacccccttgtctttgcctctgatttttacacagtgtagagtggccagcagtgaacaggttgaggatgtgcgggtagatagataactttgggtctggtttgtgtctgtgttcatgtttgtttaagggatatgtgtgactgtgggtggggacgtgtgcttgtggggcacaggtggcggcccctgctggagcccggctgggcgcagcgcctatgtaggacgggtgttctcagtgacctacctcccaggctcctctgcacctgcaaaggaacaggagtgagtcgtgactgacaggggtggttgagactagactaggtagagtagttaccaggagatgtgaatgtgcgtcaggtgatggatgggtttgtcaagggaatcgttaccgttttataccaaaggtattaacatgggcagcctttgacacatgtattccaaaaacgagtttatattttcaaacggtttttacagcttagactttgtacttactgccctgcctgtgacagttgtatgccttcattttgtatccaacagcaaagtctacaataaaactttaaaacaatcatgactgaatgtcaaaatcgtgtattgggcagatgctttttaaactgtcgtgtgagaaacttttatattaggccatttggattttattaagtgctaaggaaagagggcttacaaaatgtttcgtaaatattttatactgtttaagtgttaaacaccaaccctgtctttcttttgggttgagcttttttagaaagtcgaagtgaatgttggccaggaaaatggaaaagccattgtataaatttttttttgaggcggagtcttgctctattggccaggctggagtgtagtggcaccatctccacttaccacaacttgtgcctcctgggttcaagcgattctgctgcctcagcctcccgagtagctgggattgcaggtacccatcagcccatgcccagctaattttgtatttttagtagagatggggtttcaccatgttggccaggctggtcttgaactcctgaccctgtgatccgaccaccttggcctcccaaagtgctgggattacaggtgtgagtcaccacacctggctgcatagtgttttaaatgtttgtgtgaagaatgagtttgtggaacaatttgatttgctgtggcctctatgcctaatgagctagtgtttctggcagctctctctacccaactttgcacttgtagttttgagtctttgtctctctggaatatgaacaggtttataaaacattccatggtgaacaattctgtcggctgcattatagccatgagtgaatagacagcattggctggtccaagctctgttattgagtatacaaggaactgatttttcttatgttagcactaagggcaaaaaccaatatttataatgtaagcactatccaggtaaaacactggcccaagatttggtaaagagatttcattgcaatgtaataactacagttttttacaaattggaacagctttggtgtgtcgtaatcaagggttttttttgtttgtttgtttcaaataagccatctgattgtggtgactggggcccatgtccaagacaattcctggcatattctgtcaccctcccgtggggcgatcactgtgtggggaccccattccccagttaaagtgtgtctctgtaccttacaacagcgattcaggacccaagtgtgaacaacactcagcccgccctctggagcgtgtgctgtctttagggccctacccaaagtcactgtaacagttaagtgtgtcattaacctttctgtctctttgcgccataaaaaaatgctcaaagttttagatgtagccactgtatgttgtacaaacgttggcgacatgtaaaataaaagtcataaaatgc

SEQ ID NO: 167934 - DNA, 2493 bp, Homo sapiens
  Payload ID: 13029
  Gene Symbol: KCTD10
  Gene Name: potassium channel tetramerization domain containing 10
  ENST ID: ENST00000440541
  CDS Start-End: 98-331
tcgctccggccccgcctccgcccccggctggcgtgagctgggtgtttcctgcctctctcagtccgggtttggagactcctgcgtcctccgacttttcatggaagagatgtcaggagaaagtgtggtgagctcagcggtgccagcggctgctacccgcaccacttccttcaagggcacgagccccagctccaaatacgtgaagctgaatgtgggtggagccctctactataccaccatgcagacgctgaccaagcaggacaccatgctgaaggccatgttcagcgggcgcatggaagtgctcaccgacagtgaagaacaaagatacttatgagcctttctgcaaggtccctgtgatcacctcatccaaggaagaacaaaaacttatagcgacttcaaataagccagccgtgaagttgctctacaacagaagtaacaacaaatactcatataccagcaattctgacgacaatatgttgaaaaacattgaactgtttgataagctgtctctgcgctttaacggaagggtcctgttcataaaggatgttattggggatgaaatctgctgctggtccttttatggtcagggccggaagattgctgaagtctgttgtacctccatcgtctatgccactgagaagaaacagaccaaggtggagtttcccgaagcccggatttatgaggagaccctgaacattttgctgtatgaggcccaggatggccggggacctgacaatgcgctcctggaggccacaggcggggcggcggggcgctcccaccacctggacgaggacgaggagcgggagcggatcgagcgcgtgcggaggatccacatcaagcgccctgatgaccgggcccacctccaccagtgagcaggcaagagaccgagccgccctcctctcaccgcccccactccctgccgtgctacacccagatcctgtgcaggctgccgggccccttctgcttcccttggagcctggagatacttttgtaacaagccagatgattattttggtattgcttgacaaggcaaattgattgtcttgacccaggcgtatgacccctgtcgttgaacaagctgtgtctaagatctctacttttcatgagaatctgagactctttggagccaggctttctcggttctcagaggaaaagtatgaatgagtgtgaagtgtatgtgagaacttttgtttgcaatatttatttttgtgggtgtcgacttcctatgtgggctttttgggtgacactcccttaagggttcagtttgacaattctgagagttgtcctgcagttggaggccaccagaggtatctgagctccctgcttcctatttcataatcctccagccccagcaggtccactcctggttcctgtgtgtttggcccgggcacaatccccactgctttgctagacgtgctttctgccatgtggctttgggcctagagcttgttgataattgcagcttgtggcagtggaaatatggctgaatgagcgtctaaatcgttgagaccagtgcaactttgggtgcaaggctttgtttagggatcaagccttttgccaccttgggctggtctttggcctggtgctcactgggaccccatatgtctgcgtaggagcagaactttccatggcagtaagtgtccagctctgtttctggttctttccccaactccagccccgtccagttgttctcctgattgacccgactccactccaggaaggccatctgaccctgtgacaggcatagctcataaactacccctccctgggatcccgctcctcttcagcctccttccccatgaagctgggctaactttctaagtcattttgcttagaaattcagtgtggcccataccctttgtcctcccagcctggcatccaggcagggacaccctcacaccaccagccccagggagcttccctgctataaacacagacccccttgtctttgcctctgatttttacacagtgtagagtggccagcagtgaacaggttgaggatgtgcgggtagatagataactttgggtctggtttgtgtctgtgttcatgtttgtttaagggatatgtgtgactgtgggtggggacgtgtgcttgtggggcacaggtggcggcccctgctggagcccggctgggcgcagcgcctatgtaggacgggtgttctcagtgacctacctcccaggctcctctgcacctgcaaaggaacaggagtgagtcgtgactgacaggggtggttgagactagactaggtagagtagttaccaggagatgtgaatgtgcgtcaggtgatggatgggtttgtcaagggaatcgttaccgttttataccaaaggtattaacatgggcagcctttgacacatgtattccaaaaacgagtttatattttcaaacggtttttacagcttagactttgtacttactgccctgcctgtgacagttgtatgccttcattttgtatccaacagcaaagtctacaataaaactttaaaacaatcatg

SEQ ID NO: 167935 - DNA, 554 bp, Homo sapiens
  Payload ID: 13029
  Gene Symbol: KCTD10
  Gene Name: potassium channel tetramerization domain containing 10
  ENST ID: ENST00000542262
  CDS Start-End: 44-554
ctctcagtccgggtttggagactcctgcgtcctccgacttttcatggaagagatgtcaggagaaagtgtggtgagctcagcggtgccagcggctgctacccgcaccacttccttcaagggcacgagccccagctccaaatacgtgaagctgaatgtgggtggagccctctactataccaccatgcagacgctgaccaagcaggacaccatgctgaaggccatgttcagcgggcgcatggaagtgctcaccgacagtgaaggctggatcctcattgaccgctgtgggaagcactttggtacgatactcaactaccttcgagacggggcggtgcctttacccgagagccgccgggagatcgaggagctgctagcagaagccaagtactacctagtccaaggcctggtggaagagtgccaggcggccctacaaccagccgtgaagttgctctacaacagaagtaacaacaaatactcatataccagcaattctgacgacaatatgttgaaaaacattgaactgtttgataagctgtctctgcgctttaacggaaggg

SEQ ID NO: 167936 - DNA, 568 bp, Homo sapiens
  Payload ID: 13029
  Gene Symbol: KCTD10
  Gene Name: potassium channel tetramerization domain containing 10
  ENST ID: ENST00000542954
  CDS Start-End: 205-568
tgtgtacatctcaacccttcagcagagaaccccgcggtgtgaaacttgaacaaagatacttatgagcctttctgcaaggtccctgtgatcacctcatccaaggaagaacaaaaacttatagcgacttcaaataagccagccgtgaagttgctctacaacagaagtaacaacaaatactcatataccagcaattctgacgacaatatgttgaaaaacattgaactgtttgataagctgtctctgcgctttaacggaagggtcctgttcataaaggatgttattggggatgaaatctgctgctggtccttttatggtcagggccggaagattgctgaagtctgttgtacctccatcgtctatgccactgagaagaaacagaccaaggtggagtttcccgaagcccggatttatgaggagaccctgaacattttgctgtatgaggcccaggatggccggggacctgacaatgcgctcctggaggccacaggcggggcggcggggcgctcccaccacctggacgaggacgaggagcgggagcggatcgagcgcgtgcggaggatccacatca

SEQ ID NO: 167937 - DNA, 3096 bp, Homo sapiens
  Payload ID: 13029
  Gene Symbol: KCTD10
  Gene Name: potassium channel tetramerization domain containing 10
  ENST ID: ENST00000540089
  CDS Start-End: 1064-1462
gatgatgcttggctgtctgttgaaggaatgagagactctgaaagctgtttgtgcatggaaggtccttgttgtccactgggctgcattgtgggtgataaggcagactttttcagcgggacccccaactgtcagaatctgtaagccattttgggggaagcaggtggtgttcctgaagaggaatcctctactctcctcctgcctgacgggtctaggcctggccggctgcctttggggatctggaaggggaaggagctggggttgctcatcacttagtgtgatgttcacttgtccccccgttttcagaatcgcagctcagccctgtcctctaccgtgcaaaccactgcaggaagatggccctttcttctgcctgcatggggacggagatggatttggggatctttccagtgcttccgcccactggtttcagctttccccctctccttggttaacgctcacctgtgacctttctaccctcaaatttttgactttttttactggtctgctgacctcacttctcccattctttttccccttatgggtttatgcttttttttttaattcctctgcagtcatggtagtggggttttaggagcttttgattaaaacacgtttctgctgccacgtcaagggtttatttttgagtggcttcctgggctgtggaaaatgtgtcatcattgttagtacttactcagcatcctggcctatcatggtcatagccaaagagcagacttactgggaaattcaactccctgtcttcccccatctagttcactggtggtgagaatccttctctcttcccagccatgactgccccatctcccctcgccagagcctgtccagccggtcaactttaaaaatgcagtgctaggcaggcctcctaggctgaaagcatgttttgttccagcagaacaaagatacttatgagcctttctgcaaggtccctgtgatcacctcatccaaggaagaacaaaaacttatagcgacttcaaataagccagccgtgaagttgctctacaacagaagtaacaacaaatactcatataccagcaattctgacgacaatatgttgaaaaacattgaactgtttgataagctgtctctgcgctttaacggaagggtcctgttcataaaggatgttattggggatgaaatctgctgctggtccttttatggtcagggccggaagattgctgaagtctgttgtacctccatcgtctatgccactgagaagaaacagaccaaggtggagtttcccgaagcccggatttatgaggagaccctgaacattttgctgtatgaggcccaggatggccggggacctgacaatgcgctcctggaggccacaggcggggcggcggggcgctcccaccacctggacgaggacgaggagcgggagcggatcgagcgcgtgcggaggatccacatcaagcgccctgatgaccgggcccacctccaccagtgagcaggcaagagaccgagccgccctcctctcaccgcccccactccctgccgtgctacacccagatcctgtgcaggctgccgggccccttctgcttcccttggagcctggagatacttttgtaacaagccagatgattattttggtattgcttgacaaggcaaattgattgtcttgacccaggcgtatgacccctgtcgttgaacaagctgtgtctaagatctctacttttcatgagaatctgagactctttggagccaggctttctcggttctcagaggaaaagtatgaatgagtgtgaagtgtatgtgagaacttttgtttgcaatatttatttttgtgggtgtcgacttcctatgtgggctttttgggtgacactcccttaagggttcagtttgacaattctgagagttgtcctgcagttggaggccaccagaggtatctgagctccctgcttcctatttcataatcctccagccccagcaggtccactcctggttcctgtgtgtttggcccgggcacaatccccactgctttgctagacgtgctttctgccatgtggctttgggcctagagcttgttgataattgcagcttgtggcagtggaaatatggctgaatgagcgtctaaatcgttgagaccagtgcaactttgggtgcaaggctttgtttagggatcaagccttttgccaccttgggctggtctttggcctggtgctcactgggaccccatatgtctgcgtaggagcagaactttccatggcagtaagtgtccagctctgtttctggttctttccccaactccagccccgtccagttgttctcctgattgacccgactccactccaggaaggccatctgaccctgtgacaggcatagctcataaactacccctccctgggatcccgctcctcttcagcctccttccccatgaagctgggctaactttctaagtcattttgcttagaaattcagtgtggcccataccctttgtcctcccagcctggcatccaggcagggacaccctcacaccaccagccccagggagcttccctgctataaacacagacccccttgtctttgcctctgatttttacacagtgtagagtggccagcagtgaacaggttgaggatgtgcgggtagatagataactttgggtctggtttgtgtctgtgttcatgtttgtttaagggatatgtgtgactgtgggtggggacgtgtgcttgtggggcacaggtggcggcccctgctggagcccggctgggcgcagcgcctatgtaggacgggtgttctcagtgacctacctcccaggctcctctgcacctgcaaaggaacaggagtgagtcgtgactgacaggggtggttgagactagactaggtagagtagttaccaggagatgtgaatgtgcgtcaggtgatggatgggtttgtcaagggaatcgttaccgttttataccaaaggtattaacatgggcagcctttgacacatgtattccaaaaacgagtttatattttcaaacggtttttacagcttagactttgtacttactgccctgcctgtgacagttgtatgccttcattttgtatccaacagcaaagtctacaataaaactttaaaacaatcatgactgaatgtc

SEQ ID NO: 167938 - DNA, 491 bp, Homo sapiens
  Payload ID: 13029
  Gene Symbol: KCTD10
  Gene Name: potassium channel tetramerization domain containing 10
  ENST ID: ENST00000540355
  CDS Start-End: 180-491
gggacccccaactgtcagaatctaacaaagatacttatgagcctttctgcaaggtccctgtgatcacctcatccaaggaagaacaaaaacttatagcgacttcaaataagccagccgtgaagttgctctacaacagaagtaacaacaaatactcatataccagcaattctgacgacaatatgttgaaaaacattgaactgtttgataagctgtctctgcgctttaacggaagggtcctgttcataaaggatgttattggggatgaaatctgctgctggtccttttatggtcagggccggaagattgctgaagtctgttgtacctccatcgtctatgccactgagaagaaacagaccaaggtggagtttcccgaagcccggatttatgaggagaccctgaacattttgctgtatgaggcccaggatggccggggacctgacaatgcgctcctggaggccacaggcggggcggcggggcgctcccaccacctg

SEQ ID NO: 167939 - DNA, 574 bp, Homo sapiens
  Payload ID: 13029
  Gene Symbol: KCTD10
  Gene Name: potassium channel tetramerization domain containing 10
  ENST ID: ENST00000535546
  CDS Start-End: 215-574
gatgcttggctgtctgttgaaggaatgagagactctgaaagctgtttgtgcatggaagaacaaagatacttatgagcctttctgcaaggtccctgtgatcacctcatccaaggaagaacaaaaacttatagcgacttcaaataagccagccgtgaagttgctctacaacagaagtaacaacaaatactcatataccagcaattctgacgacaatatgttgaaaaacattgaactgtttgataagctgtctctgcgctttaacggaagggtcctgttcataaaggatgttattggggatgaaatctgctgctggtccttttatggtcagggccggaagattgctgaagtctgttgtacctccatcgtctatgccactgagaagaaacagaccaaggtggagtttcccgaagcccggatttatgaggagaccctgaacattttgctgtatgaggcccaggatggccggggacctgacaatgcgctcctggaggccacaggcggggcggcggggcgctcccaccacctggacgaggacgaggagcgggagcggatcgagcgcgtgcggaggatccac

SEQ ID NO: 167940 - DNA, 866 bp, Homo sapiens
  Payload ID: 13029
  Gene Symbol: KCTD10
  Gene Name: potassium channel tetramerization domain containing 10
  ENST ID: ENST00000540411
  CDS Start-End: 3-866
agatgtcaggagaaagtgtggtgagctcagcggtgccagcggctgctacccgcaccacttccttcaagggcacgagccccagctccaaatacgtgaagctgaatgtgggtggagccctctactataccaccatgcagacgctgaccaagcaggacaccatgctgaaggccatgttcagcgggcgcatggaagtgctcaccgacagtgaaggctggatcctcattgaccgctgtgggaagcactttggtacgatactcaactaccttcgagacggggcggtgcctttacccgagagccgccgggagatcgaggagctgctagcagaagccaagtactacctagtccaaggcctggtggaagagtgccaggcggccctacaaaacaaagatacttatgagcctttctgcaaggtccctgtgatcacctcatccaaggaagaacaaaaacttatagcgacttcaaataagccagccgtgaagttgctctacaacagaagtaacaacaaatactcatataccagggtcctgttcataaaggatgttattggggatgaaatctgctgctggtccttttatggtcagggccggaagattgctgaagtctgttgtacctccatcgtctatgccactgagaagaaacagaccaaggtggagtttcccgaagcccggatttatgaggagaccctgaacattttgctgtatgaggcccaggatggccggggacctgacaatgcgctcctggaggccacaggcggggcggcggggcgctcccaccacctggacgaggacgaggagcgggagcggatcgagcgcgtgcggaggatccacatcaagcgccctgatgaccgggcccacctccaccagtga

SEQ ID NO: 167941 - DNA, 564 bp, Homo sapiens
  Payload ID: 13029
  Gene Symbol: KCTD10
  Gene Name: potassium channel tetramerization domain containing 10
  ENST ID: ENST00000542858
  CDS Start-End: 39-564
agtccgggtttggagactcctgcgtcctccgacttttcatggaagagatgtcaggagaaagtgtggtgagctcagcggtgccagcggctgctacccgcaccacttccttcaagggcacgagccccagctccaaatacgtgaagctgaatgtgggtggagccctctactataccaccatgcagacgctgaccaagcaggacaccatgctgaaggccatgttcagcgggcgcatggaagtgctcaccgacagtgaaggctggatcctcattgaccgctgtgggaagcactttggtacgatactcaactaccttcgagacggggcggtgcctttacccgagagccgccgggagatcgaggagctgctagcagaagccaagtactacctagtccaaggcctggtggaagagtgccaggcggccctacaagtccctgtgatcacctcatccaaggaagaacaaaaacttatagcgacttcaaataagccagccgtgaagttgctctacaacagaagtaacaacaaatactcatataccagcaattctgacgacaatatgttgaaaaaca

SEQ ID NO: 167942 - DNA, 2940 bp, Homo sapiens
  Payload ID: 13029
  Gene Symbol: KCTD10
  Gene Name: potassium channel tetramerization domain containing 10
  ENST ID: ENST00000537165
  CDS Start-End: 39-233
agtccgggtttggagactcctgcgtcctccgacttttcatgggccctgacatggcaggtgatatccaggccactgttgggtgccatggagttggggagagttggccagaagagttggataaccttgaattgaatattgtccatgactgtcgcgttgcttctgctgttgcaagctgcctccctttactcccagtcccatttacaaaaataacgtttgtgttttaccagttatagttgtagtacccattcattatagaaaatctggaaaagctagacaattctttttcagtttcagggaatagttcaaacaagttatgtgctgtcagtgccctgcagccaaaaagcacgaggagcatacctgtagtcaagcaaagttgggtttatttccttgttgcattggggtggggaagaactgtgggacatctcagagaagggctgtgggcttgtgttgggtgatttgagagacagttcagagaagtggggctttgctctgtgttggatgctgctgggaagcagggctaattctgtgattgggtctcagtgattcctgacttgaaagcaggaagaatggaaggaggctaaacctctcattggtaaagcagcagctataactcctattagccaggataggggatctttggtcatttttgtattttggataatgtttatgtttttgtctgtgtccggacatgatgactgaatggtcctgtttttgtcttgtcgcaagggcacagagtggccttgtctgagggtgatgtgctgtgaaaaactgttgatgttcaatgggaatggtagggccagccgtgggggctaccccagattcagcaaagattctgcccacccttgcacatctccacctctacagttttacctgttcatttcagacatgtttgctctgagtacacatgtgccggataccaatctcactttccaggcctgcgtaaatcagccactgtatccatttctttgagatgtacagagagtcagccatgctatcagggagatggtagtgggatcttgctcttttgggcagcactagtctaggaggtctaattttgcaataacttggttccaaaagtttccatgtctgttgtttagtcctcagaaacaccttctccctacaggaagtgataggagtgccagctggaatcccattcaacttcataaagcttatttcatctgtgatgcagctgaaaaatgacacttagctagctattgagtggtacatggcaataaggaaatgtaaagagacctgggcagtgctttaggctgttttagggtgcagccagggtgttcatgtatacaggtgctaggcagaaaggaagtgcttataacacaagagttaggggcacccttgtgcctgcagggtcgacaggcagggtcagtgtatgaggctttttgggtgggttttgggacaaactaggggatgcatggccctctctaggggtcatccaataccccagctctgaccagttgttcccctgctagcccagttggcctctgattttaggagaagccagaagtccagatttttctgtgagctctccttagttgtccacattggaagcaaacttttaaatgctgtgtatgcgtggcccaagcaaaacacatctggaggccagattgaatccacaggctgaaagcagtcaaccaggcctgatgtcatgaccctgtatcctctccactggcaggaagagatgtcaggagaaagtgtggtgagctcagcggtgccagcggctgctacccgcaccacttccttcaagggcacgagccccagctccaaatacgtgaagctgaatgtgggtggagccctctactataccaccatgcagacgctgaccaagcaggacaccatgctgaaggccatgttcagcgggcgcatggaagtgctcaccgacagtgaaggctggatcctcattgaccgctgtgggaagcactttggtacgatactcaactaccttcgagacggggcggtgcctttacccgagagccgccgggagatcgaggagctgctagcagaagccaagtactacctagtccaaggcctggtggaagagtgccaggcggccctacaacagaacaaagatacttatgagcctttctgcaaggtccctgtgatcacctcatccaaggaagaacaaaaacttatagcgacttcaaataagccagccgtgaagttgctctacaacagaagtaacaacaaatactcatataccagcaattctgacgacaatatgttgaaaaacattgaactgtttgataagctgtctctgcgctttaacggaagggtcctgttcataaaggatgttattggggatgaaatctgctgctggtccttttatggtcagggccggaagattgctgaagtctgttgtacctccatcgtctatgccactgagaagaaacagaccaaggtggagtttcccgaagcccggatttatgaggagaccctgaacattttgctgtatgaggcccaggatggccggggacctgacaatgcgctcctggaggccacaggcggggcggcggggcgctcccaccacctggacgaggacgaggagcgggagcggatcgagcgcgtgcggaggatccacatcaagcgccctgatgaccgggcccacctccaccagtgagcaggcaagagaccgagccgccctcctctcaccgcccccactccctgccgtgctacacccagatcctgtgcaggctgccgggccccttctgcttcccttggagcctggagatacttttgtaacaagccagatgattattttggtattgcttgacaaggcaaattgattgtcttgacccaggcgtatgacccctgtcgttgaacaagctgtgtctaagatctctacttttcatgagaatctgagactctttggagccaggctttctcggttctcagaggaaaagtatgaatgagtgtgaagtgtatgtg

SEQ ID NO: 167943 - DNA, 538 bp, Homo sapiens
  Payload ID: 13029
  Gene Symbol: KCTD10
  Gene Name: potassium channel tetramerization domain containing 10
  ENST ID: ENST00000541077
  CDS Start-End: 28-141
ggagactcctgcgtcctccgacttttcatggctggatcctcattgaccgctgtgggaagcactttggtacgatactcaactaccttcgagacggggcggtgcctttacccgagagccgccgggagatcgaggagctgctagcagaagccaagtactacctagtccaaggcctggtggaagagtgccaggcggccctacaaccatgactgccccatctcccctcgccagagcctgtccagccggtcaactttaaaaatgcagtgctaggcaggcctcctaggctgaaagcatgttttgttccagcagaacaaagatacttatgagcctttctgcaaggtccctgtgatcacctcatccaaggaagaacaaaaacttatagcgacttcaaataagccagccgtgaagttgctctacaacagaagtaacaacaaatactcatataccagcaattctgacgacaatatgttgaaaaacattgaactgtttgataagctgtctctgcgctttaacggaagggtcctgttcataaaggatgtta

SEQ ID NO: 167944 - DNA, 2783 bp, Homo sapiens
  Payload ID: 13030
  Gene Symbol: KCTD11
  Gene Name: potassium channel tetramerization domain containing 11
  Uniprot ID: Q693B1
  ENST ID: ENST00000333751
  CDS Start-End: 782-1480
acttcctgggggcggagaggacctcagcggctgcggcgacacccagggaaggcggcgcggccgggtcccgaaactcctggctgtttccatcagagccctcggacactcccagcccgggctgagcacgcatcgtcgctccccggcggatacaagggggctccgccatccgctcccgtcagttcggcctccatctcctgggacccgcgccggcagccaggccaggcctctgagtggccccagagccctggctggactcgtccacggcggcagcgatctgcccggggtctcggaggccatcccttcagagtcggccctgtgctcgccaccgtcacctgctggttggattccggaaacccactgtctgaagaccacagaggggtgtcgctgaccaccccaaatcggatacgtccagacctcaagctcccttcccctctctggctgccctctgctcttttcatctcttctctcaaccttttggggatttctgtgtcctgacaccacctccccatccaccaccaaagtagccggggtgagccccaaaccttactgggtgtgctccacctgtgcctccaacccagcgaatctgacagcttcgacccaattctgcacacacccaggaagttctgccttttcttttctttcggtgtctcctgtacttcccaaaatttctcctcctcctgtgccctcttcgcccccctcctttgggggccccgtgaccctgaatgtggggggcacactatattccaccactttggagaccctgacccgcttcccagactctatgctgggggccatgtttagggccggcacccccatgccccccaacctcaattcccaaggaggcggccactacttcatcgaccgggatggcaaggccttccggcacatcctcaatttcctgaggctgggccgcctggacctgccccgtgggtacggagagacagcgctgctcagggcagaggctgacttctaccagatccggcccctcctggacgcgctgcgggaactggaggcctctcaggggacccctgcacccacagctgccctgctccacgcagatgtagatgtcagcccccgcctggtgcacttctctgctcgccggggaccccatcactatgagctgagctccgtccaggtggacaccttccgagccaaccttttctgcaccgactctgagtgtctaggtgctttgcgggcccgatttggtgtggccagtggggatagggcagaggggagcccacattttcatctggagtgggccccccgccccgtggaactccccgaggtggagtatgggagactggggctgcagccgctgtggactggggggccaggagagcggcgggaggtggtgggcaccccaagcttcctggaggaggtgctgcgggtggctctcgagcacggcttccgactagactctgtcttccccgaccccgaagacctgctcaactccaggtctctgcgctttgtccggcactgaggatgctgttctcagtttgactgtggggaggagagagaatggggtactagcacccctgaagcctctttccagctctgcttcaggagctatgagagtcgggactctcctgcacctgactggagctcagatgtgggcaggaattcccaaacctgagcccaccaaggactcacaagtggtccagaaggtctcaacctgtgctgaccctgggaggggtagggaaggttctctcagcttgttcttgcctaaggctgagcacctccagtctctccttgatttggagctcagtgtttaagggcttggaaaaggggggaacatctctttacccagactagacctagcaaaaccctggaaggatattgaggtctggggaaaagggaggactttgcattttcccaatgcggtctcttggaccatggcttctactcctgaagctgggtggcctggcctggcctgaccaatgagaggccagaacactctggaacatcggaagaggagttctttgctatgttccaagccatctactgagggaggcagaaaggccacaacccaccctaggttgatgtatgggagctaggacagtccccatggcaatggggctggagcatccctcatctggaagaatcccatactgatggcagggctggccagggggaagagggtagtatctgtgggtcctggcctttcttcatgtgtgcgtgcatatcagcccgtgtggctgactgatgtataggtccctggcatcctggttcatatctgtgttgctgactacagtgtctgtgatgtccgcatgtccaggcctgtttggggttgcctagcgactcttctggcacagggtgtgtctgtggtatacctgtgaggtggttgacaattagtagtttaatcacagggtgtgtgtgtgtgtgtgtgtgtgtgtgtttatgtgcacgcatgtatatgcatcaccacgtagccaggaggggcctgttggggtttgagtcactgggatcttcctggtgagaggtaagagaagtcactgggcttagctgggcctctgaggcctgtatggaactcttggttgctgaggcaaccatggacctgttgctaggagatagctggggaaggcccaaggccgcccagggcagagagaggagacgaagagtttgggacagtgggggaggagatgggaagggatgggatttctgggtcccagagcgggtgggatactcacgcacagcttcttcactggtggggggtggggcacacattatttctcactggtcatgatttacaagaagaaaaataaaactgcttttggaaccacaaa

SEQ ID NO: 167945 - DNA, 6225 bp, Homo sapiens
  Payload ID: 13031
  Gene Symbol: KCTD12
  Gene Name: potassium channel tetramerization domain containing 12
  Uniprot ID: Q96CX2
  ENST ID: ENST00000377474
  CDS Start-End: 243-1220
gcgggcaaggcgggcggagcgcactggaactcaagggggcgcacagcggcgcgctcgcaccgctcggctccgcgcggctctaggaggtggcggcggtggcggtggcggcggtggcggcggcggcggcggcggggcgcagggctgagcgagcgtccgggttccggggctccggggaaggcggttgcagctcctgagtgcagcgcggcttcctgccactgtcccggcccggccacctctctgtcatggctctggcggacagcacacgtggattacccaacgggggcggcggcgggggcggcagtggctcctcgtcgtcctccgcggagccaccgctcttccccgacatcgtggagctgaacgtggggggccaggtgtacgtgacccggcgctgcacggtggtgtcggtgcccgactcgctgctctggcgcatgttcacgcagcagcagccgcaggagctggcccgggacagcaaaggccgcttctttctggaccgggacggcttcctcttccgctacatcctggattacctgcgggacttgcagctcgtgctgcccgactacttccccgagcgcagccggctgcagcgcgaggccgagtacttcgagctgccagagctcgtgcgccgcctcggggcgccccagcagcccggcccggggccgccgccctcgcggcgcggggtgcacaaggagggctcgctgggtgacgagctgctgccgcttggctactcggagcccgaacagcaggagggcgcctctgccggggcgccgtcgcccacgctggagctggctagccgcagtccgtccgggggcgcggcgggcccgctgctcacgccgtcccagtcgctggacggcagccggcgctcgggctacatcaccatcggctaccgcggctcctacaccatcgggcgggacgcgcaggcggacgccaagttccggcgagtggcgcgcatcaccgtttgcggaaagacgtcgctggccaaggaggtgtttggggacaccctgaacgaaagccgggaccccgaccgtcccccggagcgctacacctcgcgctattacctcaagttcaacttcctggagcaggccttcgacaagctgtccgagtcgggcttccacatggtggcgtgcagctccacgggcacctgcgcctttgccagcagcaccgaccagagcgaggacaagatctggaccagctacaccgagtacgtcttctgcagggagtgagctccccagaccccctcgccactccagcgcccagtccttctcctgcccgagagatgattacagagcctcttgtcccacctttgtcccctggctgctgccctcccattctccccctccagtagtagctgggtgagacctgtccgcccaccttccctccactacagaacctgcagccgcaaatcctctgggctgcttcgtcttctttggacctcctgaaccgagagaacccagaggaacccccaccccacccccacctaccactccatgctttctctactccctgcctcaaaccacccctcccccagatggtacttcagtttggatctattgggggagtgtggccacagaccgggggatgattgaattgttcagaacctgattggaccgtgtccaatgtgcggaagatttccttgaaatcttctcaagctcttatgactcactgggggtttaagagatcaggattggttccactgtctggggttagtgttttacaaggtcattacacagtctttttgacctcttttgaaggtagagttttagaaggctggatggaagattctgagcctggaattaggaccccatggaggcagttcagtaactaaactaataaagttttgaaaagttacacgtaaagtagaagaatctagtgcgtgggacagtaaaggatcctttctcgtacagaataaaaggtctcagcctgtagcttaaacttatagaaagtgatccgcctgcctgcagaggcgcccttttcagctgctgctcgccagaagcccttgattccactggttgacatggcagcagttactggcaagagggagaaaggacgctgccgcctaagagtgcaaggctgctcaggtctccaagcgccgtaggaggtcacctggcagtgactgtagggagctgggtcatagtgcacgtcgtgggtattaggaaagcctgtattctttcaatgaatgtcagtaggaccttcctttagctgtaagacttggtgggcggggtggggtggggagggaggaaagggtaggaagggtgggaagggagaagcagacatagtcatttatgatttgaaagttggaagtttgtaccatctgtttgagtatatgcacatttaaaaaatatcatatagtaaatgcaaacatgccaagtattttataaagattaataacagacctactcttacctggcagtttacttaacttactgttttgagtcctaaacttagagttgttaatgcttatatataatctaaccaaagagttacccagtagggttttagtttttgaacttttattttcttgttgattataaatcctgattttggaatctattgcgcaaaagaagtttcattttggttacttagacctaagatcacttattaaaaatccttattttctccaagcccagcaaacgttgacttctgggcaaacctgaaaacctgaaaatgccactttcatgcagtttgtttgaagttaagtggaatcctttcaaatgacgagctgcagagaactcagcaccaagggctgcctatctgtagatagctgtaaaatggaatatttttaaatgaaggcaaataagtacttaaaagtgagctgagcaataaaatggtccaataataggtaaatgcaacagaaacagaaggagacctggttgccttatgcctttactcttacatggaataaattcccaatgcatatcctatgtaaaccataagtgaagggaaataaacctcgtcatgctccatgctgtgaggtgtcctttggatattctgtgatgacagagaagcctattttgttttgttttcagcatctttctctgatgtacgtttttaaggattttgtaagagctgttttcagtgtttaaattagtgctatttttccttgtttttaaaaatgaatctcgtactgtatcttactatgtccatacagatgttacaaatcgacagttttattcttagactcatgtgatccaagctgtatataccatatataaacattttacatgaatcatttagttttttaattcatttactaatgctataaaatttcctatattaccccagtaatttgcatcagctggtttatatactaaagcaacatgttttgatgagtttcttacatccttatcgaggaattgggttaggaaaaaatacataattgtaaaactgagtttgctgtattatactttttttcttgagtattagttgtattactaatcatatgttgattaactgtctacttaaagtcaaggtacctgtatttttaatccactaatttttttttagttgggaaatagatttcaggtcttttattagactaacattttttgagaagtaaaattgacttcatatacaaagcctgtaattttaggcgaaatggaagcagaaatctaggaagttgtgcttgcttgtatgttgagtttggtctcagactaagtaatgcatcagaattcatctgtttgaagcctgaaataatttaggactctgattcactgaccaaaagtcagtgttgcagagatttctctaccccgtatggtattttgttagattgttcaacaggaagcacatgattgagaacatcttgggacagaccaaaaccactgacagatggcaaggctcggcgattctgatttcccttctcaaatctgctcaactccaagagtcttgagaaactgctaaaattttgcctctgtcactcaagtcttacaaatgttatcttgtaaacctttgaggtgaactattccactgtcttgtacataggcatcttattcactgcaccctgtcacacccagcaccccccgccccgcacattatttgaaagactgggaatttaatggttagggacagtaaatctacttctttttccagggacgactgtcccctctaaagttaaagtcaatacaagaaaactgtctatttttagcctaaagtaaaggctgtgaagaaaattcattttacattgggtagacagtaaaaaacaagtaaaataacttgacatgagcacctttagatcccttcccctccatgggctttgggccacagaatgaacctttgaggcctgtaaagtggattgtaatttcctataagctgtaatagtggaggtattgtgggttcatttgagtaagccctccaaagataccattcaaataacctgggagaatgtcataaattattcagataattaacactgcatgaatctgattcagaggcatgcatttacatatgttgccctaattaccatttgatgatcataaatacaagtgaatgacattggacttttagtaacaaacttaatttttaaaaaggtgtagacaatggtggttaaaaaaaaaaaaaaaacaggtaccaggttctgtgtgtttgcaccaagtaattgacatgttttttaatacatgtggaccatgaacagtattcattctactttttcaaatgatatgctgtagaaaatattccttgaagatgtgagatttaaaaatttttccctttcaatgttgttatgtattctactggtttttgattgatagcacagtgataaatcataatactagacaaaattgtcttctctttcaaaccagagccatatatatgtctgtatatatgggacctactgcttctctgaggaaatgcataatctgttaatatcagacaaaatgagcaattggcagtgctcataatatattccaatttttattggaattttcgatggaatgttatttcaataaagccatgtaaggtgaaactttgataactttttactcttcaagttagggtaaattctgatccaatattcaattcatttgtgtactcccacatgcaaaatgctaaattacaatgcagacattaagaaaaagtattgactggaggggttgaattccttgagaatttattttatagtctaaatcacaaatactttactcaatttagtttttaaaatagtaaactgaatatttttgttgtaagcctatcagagtcaatccttcgtttggaattgttttcctgtttttccttactataaatcatttaaaaactgaattcattttcttagatggcataagtctgtctcttgagaaataagtaaaatactcctattttcagtatctgtagcacctgaaataggtctttgtatagccagaaacaagttatgttgaagttagcttttctttgtcaacagttttggacaataaaaatctgaaagtattaacacttgattttctactggggcccttcaaacttggttggaagaaattcaaccagaatatctacattagagtataatcatgtgtggtaggaagatggactagttaatcaagatttgttgtcacttaaattttttgtgatttttttccaagccagtttttttaaattctaaatgtgttttgaggtatgggtacattaattgtaatgtaaactattatacaactgtttttgcgactttataggcaggtaaattttgctattactattgaatacaaatgacaattcatttatgaccactcaaacagcgttagtaaccatttagtgacaaaggattaaaacatccatctggatgttaattttgaagatgtaaattatatgttgtttaaatttttccaggcatctgaaaaccttatctgctagacaatgtaagattcacacagagttatctgggattctgattttttaaatagtacatatcattaaaccattttctctaaatgtaagaagagcagaaaaaatcttataagattatcagatttttctaatgacacagaaatgtaagaaaaaaatccctttatattgaaaaaagatgcagtcaaagtcttttcagacatgcccaaactttgagaatttcttcaaccatctaatgctataaagatttttgttcttcctgttcacaaccagttgtataacagaaatactagctactgttttccttcctgtgtgtgaagtaatgaatcattgattatgtgacttgttatgtattcaattaaacactaaagaataaaacattcactcctttaattattcctc

SEQ ID NO: 167946 - DNA, 1685 bp, Homo sapiens
  Payload ID: 13032
  Gene Symbol: KCTD13
  Gene Name: potassium channel tetramerization domain containing 13
  Uniprot ID: Q8WZ19
  ENST ID: ENST00000308768
  CDS Start-End: 177-1166
ttccgggtggtgcgagcgagatggggcggagggccggtcttgcagagtagctgcggtgagtgggcgtgtgcgccgagcggtctggcccaagggctgggggccggccgagggtcttcgggagcaggccgcagggcgcggagagatcctgggatcgccgtccgccgctgctacccggcatgtcggcggaggcctcgggcccggctgccgccgcggccccgtccctggaagcccccaagccctcgggtctcgagcctggccccgccgcctacggtctcaagccgctgaccccgaacagcaaatacgtgaagctgaacgtgggcggctcgttgcactacaccacgctgcgcaccctcacgggacaggacaccatgctcaaagccatgttcagcggccgcgtggaggtgctgaccgatgccggaggttgggtgctgattgaccggagcggccgtcactttggtacaatcctcaattacctgcgggatgggtctgtgccactgccggagagtacgagagaactgggggagctgctgggcgaagcacgctactacctggtgcagggcctgattgaggactgccagctggcgctgcagcaaaaaagggagacgctgtccccgctgtgcctcatccccatggtgacatctccccgggaggagcagcagctcctggccagcacctccaagcccgtggtgaagctcctgcacaaccgcagtaacaacaagtactcctacaccagcacttcagatgacaacctacttaagaacatcgagctgttcgacaagctggccctgcgcttccacgggcggctactcttcctcaaggatgtcctgggggacgagatctgctgctggtctttctacgggcagggccgcaaaatcgccgaggtgtgctgcacctccattgtctatgctacggagaagaagcagaccaaggtggaatttccagaggcccggatcttcgaggagaccctgaacatcctcatctacgagactccccggggcccagacccagccctcctggaggccacagggggagcagctggagctggtggggctggccgcggggaggatgaagagaaccgagagcaccgtgtccgcaggatccatgtccggcgccatatcacccacgacgagcgtcctcatggccaacaaattgtcttcaaggactgacctctgaccctccccctgccttcctcttgccttgggacccagtccctctctctttccctccccttcccagacttttgccccggctctgctggccaagtcgtgggtcctcctctgtcccttcattgcatggcacagctcactttggcccttctccacccatcccaaccccattgctaacaacatggtacattccggccccaccactcagagccttccgaagccaacacttgtccccaccctggccctgcgtccttccctctccagctggttaagagggatttagaattccctttctctttttttagtgcatcgtccatgccaaagtgtgcggcccttcctgacatcaccacagtctgagcagcctcccgcgtcctgcaggttacttgatgaagaaggtggtggtcctagggcattggagaagttatgcggcttgttcaaggtcatgcagctggaagatggtggtggtaggacaggaagtccgttgggcctgattctgctgccttctagtcaacgctcctt

SEQ ID NO: 167947 - DNA, 601 bp, Homo sapiens
  Payload ID: 13032
  Gene Symbol: KCTD13
  Gene Name: potassium channel tetramerization domain containing 13
  ENST ID: ENST00000568995
  CDS Start-End: 1-423
tactacctggtgcagggcctgattgaggactgccagctggcgctgcagcaaaaaagggagacgctgtccccgctgtgcctcatccccatggtgacatctccccgggaggagcagcagctcctggccagcacctccaagcccgtggtgaagctcctgcacaaccgcagtaacaacaagtactcctacaccagcacttcagatgacaacctacttaagaacatcgagctgttcgacaagctggccctgcgcttccacgggcggctactcttcctcaaggatgtcctgggggacgagatctgctgctggtctttctacgggcagggccgcaaaatcgccgaggtgtgctgcacctccattgtctatgctacggagaagaagcagaccaagtgcatcgtccatgccaaagtgtgcggcccttcctgacatcaccacagtctgagcagcctcccgcgtcctgcagggtagtccgccccctcctccccaccatcctccctacctccttaactttgtactagactggcctgggcctgcccagctcagcgttatcagtctgtttcatattatttattattttaattttctattaaattattgaaataaa

SEQ ID NO: 167948 - DNA, 2528 bp, Homo sapiens
  Payload ID: 13032
  Gene Symbol: KCTD13
  Gene Name: potassium channel tetramerization domain containing 13
  Uniprot ID: Q8WZ19
  ENST ID: ENST00000568000
  CDS Start-End: 1003-1992
gggattgggtgctaggtcccacgacattagctgggattctaagacctttgctcagctgctgcggccaccactgacacgccctctgctcctcaaatacggagaacagttcagtgttcctgcctgaggatctctgcatttgccttccctctgcctggaactcttccctcacatccgcttcccagcttcagctcggcatcacctcctcagagaggccttccatccttggtgcccgggcaccactgctacccgttttggcctctgttttttttttttttttcaaaggacgttatgttgcccaggctagagtgcaacggtccgatcacggattactgcagcttccaactcctggcttcaagcgctccttctgcctcggcctcccgagtagctaggcttacaggctggggttacaggtgtgagccacagcgcccggccgctttggcctcctttaagagcttccctccgcgctttgttcgcagttctggtcacagtctgttcagtgcgcggggctgggaggcgggaaactgcccaatgcccagacctctctgtctgtttcccctcaagctcgtgaagctctctgacagcagagacccaatcacgaggtggagacttcgctttccacatcgggcagggggtcggccgcatcctcgatctggtcctggtgactcgagaccagagaggagcgcacgtcgacccgcccggggaacccgcaggccacacgccaaacctctacgggatcccccagcgaggccactgcgcatgctccatactcgcagccccgcccccattcaggggcggggccgcgcctgcgcagctgcccggcgccggcttccgggtggtgcgagcgagatggggcggagggccggtcttgcagagtagctgcggtgagtgggcgtgtgcgccgagcggtctggcccaagggctgggggccggccgagggtcttcgggagcaggccgcagggcgcggagagatcctgggatcgccgtccgccgctgctacccggcatgtcggcggaggcctcgggcccggctgccgccgcggccccgtccctggaagcccccaagccctcgggtctcgagcctggccccgccgcctacggtctcaagccgctgaccccgaacagcaaatacgtgaagctgaacgtgggcggctcgttgcactacaccacgctgcgcaccctcacgggacaggacaccatgctcaaagccatgttcagcggccgcgtggaggtgctgaccgatgccggaggttgggtgctgattgaccggagcggccgtcactttggtacaatcctcaattacctgcgggatgggtctgtgccactgccggagagtacgagagaactgggggagctgctgggcgaagcacgctactacctggtgcagggcctgattgaggactgccagctggcgctgcagcaaaaaagggagacgctgtccccgctgtgcctcatccccatggtgacatctccccgggaggagcagcagctcctggccagcacctccaagcccgtggtgaagctcctgcacaaccgcagtaacaacaagtactcctacaccagcacttcagatgacaacctacttaagaacatcgagctgttcgacaagctggccctgcgcttccacgggcggctactcttcctcaaggatgtcctgggggacgagatctgctgctggtctttctacgggcagggccgcaaaatcgccgaggtgtgctgcacctccattgtctatgctacggagaagaagcagaccaaggtggaatttccagaggcccggatcttcgaggagaccctgaacatcctcatctacgagactccccggggcccagacccagccctcctggaggccacagggggagcagctggagctggtggggctggccgcggggaggatgaagagaaccgagagcaccgtgtccgcaggatccatgtccggcgccatatcacccacgacgagcgtcctcatggccaacaaattgtcttcaaggactgacctctgaccctccccctgccttcctcttgccttgggacccagtccctctctctttccctccccttcccagacttttgccccggctctgctggccaagtcgtgggtcctcctctgtcccttcattgcatggcacagctcactttggcccttctccacccatcccaaccccattgctaacaacatggtacattccggccccaccactcagagccttccgaagccaacacttgtccccaccctggccctgcgtccttccctctccagctggttaagagggatttagaattccctttctctttttttagtgcatcgtccatgccaaagtgtgcggcccttcctgacatcaccacagtctgagcagcctcccgcgtcctgcagggtagtccgccccctcctccccaccatcctccctacctccttaactttgtactagactggcctgggcctgcccagctcagcgttatcagtctgtttcatattatttattattttaattttctattaaattattgaaataaagttaagttgagaaactg

SEQ ID NO: 167949 - DNA, 1773 bp, Homo sapiens
  Payload ID: 13032
  Gene Symbol: KCTD13
  Gene Name: potassium channel tetramerization domain containing 13
  ENST ID: ENST00000561540
  CDS Start-End: 204-833
gcgcctgcgcagctgcccggcgccggcttccgggtggtgcgagcgagatggggcggagggccggtcttgcagagtagctgcggtgagtgggcgtgtgcgccgagcggtctggcccaagggctgggggccggccgagggtcttcgggagcaggccgcagggcgcggagagatcctgggatcgccgtccgccgctgctacccggcatgtcggcggaggcctcgggcccggctgccgccgcggccccgtccctggaagcccccaagccctcgggtctcgagcctggccccgccgcctacggtctcaagccgctgaccccgaacagcaaatacgtgaagctgaacgtgggcggctcgttgcactacaccacgctgcgcaccctcacgggacaggacaccatgctcaaagccatgttcagcggccgcgtggaggtgctgaccgatgccggaggttgggtgctgattgaccggagcggccgtcactttggtacaatcctcaattacctgcgggatgggtctgtgccactgccggagagtacgagagaactgggggagctgctgggcgaagcacgctactacctggtgcagggcctgattgaggactgccagctggcgctgcaggtgagggccttcggagtccccatgcctatgttcctgggagagctgcccaagcaggtattagagcagaaaaaaggagatatggggtatggcttggagagcctggctttggctggccataaccccagagaatttgaggtgccatcttctgcatccctgccgcctcaggcagcacccccaccccagcctcatgccaggacctttgcaatggttaaatagctgctctctacttcccactgttcctatgcagccagtccagctgttacactcgcacctgagtaattatctttcagcacaaccccgatctattctctctcttgcttagaaatcctaaatagctccctcatgtcactagggaaaaacatctaaatttaaattgaaatataataacctctgcgatctggccctatcctgggaggcagcattctcccatggcttccgccccccaggagctttctaattcttttttttttttaaacagtgaaattctttattcaaatgaaatctcacagaagcagggccactcccagtaaaacagggttggggattctagagaccccacctgctaggctccacttttgtggaccccttagggttctgaggagcagagcttggaaagtgaagccaggacataagggttctgtgtcacctctgtcacagctgactcagtgaccttcagtgagtccattcctacctctgggattctgtcctcgggttccgaaagacagggaagggagaaaaataagtacaaagtagtgagttttacataaagcctgttattctgttctatttttacaatgttaaaaatgtcctttcttttatgttacaatagtaagagaagattataaaagtttctttttgaatgccctttatagattaaaaggttgcctccctgaacaacttttgtctcagggaatacttactggttcttgaagcccaaaggtgtagaactcctttggacaatatccatgtttttcaaactttttgattgcctgccatagggaaaaaatgcattttagtactcattatatataactgaaataacagttctataaaaagatacttttagtgaaatgtactctgataatctttctttttaatgctgtttgggacccattacttatttcatgacccattaataaattaccacttgcatttg

SEQ ID NO: 167950 - DNA, 1860 bp, Homo sapiens
  Payload ID: 13032
  Gene Symbol: KCTD13
  Gene Name: potassium channel tetramerization domain containing 13
  ENST ID: ENST00000566842
  CDS Start-End: 1-363
aaagccatgttcagcggccgcgtggaggtgctgaccgatgccggaggttgggtgctgattgaccggagcggccgtcactttggtacaatcctcaattacctgcgggatgggtctgtgccactgccggagagtacgagagaactgggggagctgctgggcgaagcacgctactacctggtgcagggcctgattgaggactgccagctggcgctgcagcaaaaaagggagacgctgtccccgctgtgcctcatccccatggtgacatctccccgggaggagcagcagctcctggccagcacctccaagcccgtggtgaagctcctgcacaaccgcagtaacaacaagtactcctacaccaggtgaccgccggggtgcggggcactgggcgggaccctgggatgcagcacagccctgcttctgcccaaggcgagggccacggccacacggggggcctacaagaacatctgtgcctgctcgcagattcggcttcgcctcttacccctgacgctctaggaactggcagagtcctcccccttgaggtcagtactgttgtgagctccattttacagatgaggaggtcgggacaccaagaggtgaagtaacttgcctagtgtcacccagttaaaaaatggggacaccaggacccccggggaggtggcctggctcccggtccctcactggagctgctgtgctgtgctgtgctgggatttgctcagcgcatgtggcttcccttctgagacccgtttagcctggccccaggggtggaggaggctctctgttgagcaccaaagccctgggcaggagcagaggactgggaatgcatccaggcccgtcttctgggggtacagagggaggggtgccaactgcgctgaggcctcctggtcccctggtccccagcacttcagatgacaacctacttaagaacatcgagctgttcgacaagctggccctgcgcttccacgggcggctactcttcctcaaggatgtcctgggggacgagatctgctgctggtctttctacgggcagggccgcaaaatcgccgaggtgtgctgcacctccattgtctatgctacggagaagaagcagaccaaggtggaatttccagaggcccggatcttcgaggagaccctgaacatcctcatctacgagactccccggggcccagacccagccctcctggaggccacagggggagcagctggagctggtggggctggccgcggggaggatgaagagaaccgagagcaccgtgtccgcaggatccatgtccggcgccatatcacccacgacgagcgtcctcatggccaacaaattgtcttcaaggactgacctctgaccctccccctgccttcctcttgccttgggacccagtccctctctctttccctccccttcccagacttttgccccggctctgctggccaagtcgtgggtcctcctctgtcccttcattgcatggcacagctcactttggcccttctccacccatcccaaccccattgctaacaacatggtacattccggccccaccactcagagccttccgaagccaacacttgtccccaccctggccctgcgtccttccctctccagctggttaagagggatttagaattccctttctctttttttagtgcatcgtccatgccaaagtgtgcggcccttcctgacatcaccacagtctgagcagcctcccgcgtcctgcagggtagtccgccccctcctccccaccatcctccctacctccttaactttgtactagactggcctgggcctgcccagctcagcgttatcagtctgtttcatattatttattattttaattttctattaaattattgaaataaagttaagttgag

SEQ ID NO: 167951 - DNA, 264 bp, Homo sapiens
  Payload ID: 13032
  Gene Symbol: KCTD13
  Gene Name: potassium channel tetramerization domain containing 13
  ENST ID: ENST00000566413
  CDS Start-End: 1-245
caatcctcaattacctgcgggatgggtctgtgccactgccggagagtacgagagaactgggggagctgctgggcgaagcacgctactacctggtgcagggcctgattgaggactgccagctggcgctgcagtccagggcatactccggtttctccagttgttccagaaatgtgtttttacagctggttcatcaaaccagggtccagtctagatcttcacgttgcatctggttatctgcaagttaacaatggaaagcatgacttt

SEQ ID NO: 167952 - DNA, 1691 bp, Homo sapiens
  Payload ID: 13033
  Gene Symbol: KCTD14
  Gene Name: potassium channel tetramerization domain containing 14
  Uniprot ID: Q9BQ13
  ENST ID: ENST00000353172
  CDS Start-End: 46-813
aggggcgggcagccaggggcacttccgctggcccaagtgatctgcatgtggcagggctgcgcagtggagcggccagtgggcaggatgacgagccagacccctctgccccagtccccccggcccaggcggccaacgatgtctactgttgtggagctgaacgtcgggggtgagttccacaccaccaccctgggtaccctgaggaagtttccgggctcaaagctggcagagatgttctctagcttagccaaggcctccacggacgcggagggccgcttcttcatcgaccgccccagcacctatttcagacccatcctggactacctgcgcactgggcaagtgcccacacagcacatccctgaagtgtaccgtgaggctcagttctacgaaatcaagcctttggtcaagctgctggaggacatgccacagatctttggtgagcaggtgtctcggaagcagtttttgctgcaagtgccgggctacagcgagaacctggagctcatggtgcgcctggcacgtgcagaagccataacagcacggaagtccagcgtgcttgtgtgcctggtggaaactgaggagcaggatgcatattattcagaggtcctgtgttttctgcaggataagaagatgttcaagtctgttgtcaagtttgggccctggaaggcggtcctagacaacagcgacctcatgcactgcctggagatggacattaaggcccaggggtacaaggtattctccaagttctacctgacgtaccccaccaaaagaaacgaattccattttaacatttattcattcaccttcacctggtggtgatcctcaggagcagagactgttatgaattctggcgtggcttatgaaattaaaagttgccatcaaagccattttcttttaatttcacaaacatcaggcaatttccagggttggtctagagtcttgccactaaatattgatcactcgtttaaggactttccactccattgcaactgatgccactatatttgcctagcaacttgcagctacttccttttcaaagcctcatgtatctcccagacccttctcttgaagtccaataacaagaccaagtaagaatgtttcaacaatgcgttggcaagagatgtgagatgacaacaggaacatacaagatactgtgaatctagatgttctgacctaaagatgtagtctacatagccccagcttggggtccaatccatctgtccctggcatgtgccttcatgtagtaggtgctttcctgatcccctttgcgagatgctgtgggtgctaacacctcagagctgtcctcttctctagagtggaggttttcaaagtgcatcatcagcattacctgtgaacttgctggaaatacaaatcctcaggccccacctcagacctactgaatcagaatctctgggggttggcacagcattctgatttaccaaaccctccaagtgattttgatgtattctaattttgagaccatctctagaaaagaattgctacctcttgtatggaggtacaaaagactgacctcttacatcaaggaacttcctttcccagagctcctcatggaatcaagctgaagtcagtcttcttctgagagcacattcttactcagtttttttcctctgtcctacgctgcttccctcactccccttctcctaagagcactccatcaataaaccacttgcacgaga

SEQ ID NO: 167953 - DNA, 904 bp, Homo sapiens
  Payload ID: 13033
  Gene Symbol: KCTD14
  Gene Name: potassium channel tetramerization domain containing 14
  Uniprot ID: Q9BQ13
  ENST ID: ENST00000533144
  CDS Start-End: 227-904
actgagccgatctctttctttcctgctcctgcccttgcgaactgattctgtggactccttttttgctgtttctgggggaaatctcggcagatcactcgcttttctcggagtcctccccggtttactgtcagggggtgacattggcctctgttgcttgtccccaggatccctctctgacacccctgctgtgtttgctgtggggagttctgctgccaccacccattagatgtctactgttgtggagctgaacgtcgggggtgagttccacaccaccaccctgggtaccctgaggaagtttccgggctcaaagctggcagagatgttctctagcttagccaaggcctccacggacgcggagggccgcttcttcatcgaccgccccagcacctatttcagacccatcctggactacctgcgcactgggcaagtgcccacacagcacatccctgaagtgtaccgtgaggctcagttctacgaaatcaagcctttggtcaagctgctggaggacatgccacagatctttggtgagcaggtgtctcggaagcagtttttgctgcaagtgccgggctacagcgagaacctggagctcatggtgcgcctggcacgtgcagaagccataacagcacggaagtccagcgtgcttgtgtgcctggtggaaactgaggagcaggatgcatattattcagaggtcctgtgttttctgcaggataagaagatgttcaagtctgttgtcaagtttgggccctggaaggcggtcctagacaacagcgacctcatgcactgcctggagatggacattaaggcccaggggtacaaggtattctccaagttctacctgacgtaccccaccaaaagaaacgaattccattttaacatttattcattcaccttcacctggtggtga

SEQ ID NO: 167954 - DNA, 4918 bp, Homo sapiens
  Payload ID: 13034
  Gene Symbol: KCTD15
  Gene Name: potassium channel tetramerization domain containing 15
  Uniprot ID: Q96SI1
  ENST ID: ENST00000284006
  CDS Start-End: 253-957
gtaactccaggacgagaccggagcgacccgcgcagcgagcataggcggcgaagctgcgcccggcgcccgagaccggcagctgcgtggggcgggggctgcgcccgagcccgatctgccggctccgagcagtggtctcggaaagagggtcgtggtcccgcacggatgcgcttgttgggagaaaccttggagattcacggcaaggcgtaaagcctggggcttccaacgatactctgggcagggatggaagcctagatgcctcaccgcaaggagcggccgagcgggtcctcgcttcacacacacggcagcaccggcaccgcggagggaggaaacatgtcccggctgtctctcacccggtcgcctgtgtctcccctggctgcccagggcatccccctgccagcccagctcaccaagtccaatgcacctgtgcacatcgatgtgggcggccacatgtacaccagcagcctggccacgctcaccaagtaccctgactccaggataagccgcctcttcaatggcactgaacccatcgtcctggacagtttgaagcaacattatttcattgaccgggatggggagattttccgctacgtcctgagcttcctgcggacgtccaagctgctgcttccggatgactttaaggacttcagtctgctgtacgaggaggcgcgctactatcagctccagcccatggtgcgcgagctggagcgctggcagcaggagcaggagcagcggcgccgcagccgggcctgtgactgcctggtggtgcgcgtcacgcccgacttgggcgagcggatcgcactcagcggcgagaaggccctcatcgaggaggtcttccccgagaccggagacgtcatgtgcaactccgtcaacgccggctggaaccaggaccccacgcacgtcatccgcttcccgctcaatggctactgccggctcaactcggtacaggatgttctataaaaatggcccagagtattttcaacaaagcgtgcttcatttgacacccagagtctgactttggattcgaactaaacccaggcaacaggcgaggcaggacagaggctgagtggaaaggtggtctggagccccttccctctccctgctgacctgggagtcgcaggcacccaccagctgccaagagaatccctggaccggctcttcctggatgggtccaagaattggacagctcagatggagtgagggcctattttccaacagctcttcgcagacccaagagcttggcacatttccgggttagggtggaatgggctttgcagggaagagggccccctgtgcacgcattccacagcctgtcggtcagaacttgctagttgcaggagacgggtgttacacgcagtcatcagacctcaccctcacagaggcacaaacccacatagttgtggacgcctgcagagactcaaatattgagaggacttctcctttttctctccctccagagctcccacgagctgatgcacccccaggcttcaaaccacctggaatgcacagctcagggaagctggtggatgcctagaggctgaaggacagggaactctccattattggggcaggactcagggaggacacttggggccatgtgtctggagagagggcataggttacaccctacagaataaagaagggacccaaagcctctttttgcctcccggaatcaaggccctgagggcagcaggatggtggcctgggtggggtcgtccaactaggtttgctaacctgaggggtcactgggcctggccacttctgtccctctggtggtggaacccagcacgtggttctgtagggacctttgtcagtgagcaagactgagatcgtcacaggagaaggtgcccttgctggctgccccagcaggcacccacctccctgccaggccaagccaggtgtcctcttgcagcttggccttgatgacctctgtttcttcctgggcaggtcctggagcggctgttccagaggggtttcagcgtggctgcgtcctgtgggggcggtgtggactcctcccagttcagcgagtatgtgctttgccgggaggagcggcggccgcagcccacccccactgctgttcgaatcaagcaggaacccctggactaggccctgcttcagtgcccacctgggcccccccagggacctggaaacagtgctggggagttctgcctgtgtatacttggccgtgggcatgagaccgagggtgaggctggagggtccaaagctggcccagcgagcaccagggtcccaggtgtcatggcaacagaacgtgggatgctggaggcatgcctgcagaaggactgttgatgcgacccaaagatacagcggtgggatctctgctgccagctctcccagcccctcagcttcgcagcctggcgcagcatcctctgaggccccggggcctgttggggcggggttggaagagccgtctgcagctacttcagaggagctgtttatccctctccacgcggggcagactctggcgggtctcctagcgtccgagagatggcttattttctacagtatttaaaatggatgcagccctaactgcaaaagtcagagaggctgacaaggaccaatgcttctttatctggtgctcagttctcagtcagacgtgcagcatggctgcagggtggaccagctgcctggcattcaggcccagatgcctgcagggctggggctctcgggacagatgcagggatgtgtgctgcagggctgctgggaggagagtggtgggggcctgagggctgagtgattctgtaaccacctgagaccttcacgtttgctgccgttgggggctcaggctgcactccccgggtcacctgacctgctgcccaggggcttccagtcctgtctgtgtggactggcacctgggctgctggagaagtctcctcccgttcggaccagcctcagggctgcacgttacctcaggaatgggccccaccatgaaggggcccatctgtcagcagcgtcttctaggtccccagctcagggagccatccccagctccagttttctcatgcgaatatgcacagttttaattcacgttgttacactagcctgccgatgagacccagacacaggcagacctggcgctcttgacccctgattccagtgaggactggccctgaggagtccttgcagacctgctgcctcccccacgacaggcccaaagatggaccccccctggccttgtgacagctccccaagtgttctccggtggagaaactgcagaggactggtgggcggggctccccagccatcaccatcctgtgtacaatggctgtagacttgtatatggctcctttaatattgtaaagatgctgatgtacaattgtcgtgcatttgtgtgaacacattgcgttcccagtccatgccataaatgatgctctcaagcaaaagactggaggctctgtcctgtgcagaagcagcagccagactcccgcattcgatgttgtgcagggaggtttgggggcggaacggattcctcccttggatccttcagttcccatcgaggaataacccgcagcagtggtggaggaaggtcagtggctgggtcctgagcttggtgttatttattgcatttgggtgcctgtcccctcagggcagcacagattctgaattctgattcacagtccctagccagatgggaactgggaaagagacagaaggcgtctgggtgcttttgaaccctgtctcaaatgtttgggattttctctctcactattctttggttggggatgatgtcctctttagacccccacgtaatggtatgagaaggtggcaggcagtggctcagccagccagggggcaccaagtcatgcagccagcgtgagacctgcagttcacctaagcacagaacgagatctcagtatgcctccatgtaaacagattcacataggcctccaatttcaatgagaccttttgcattttttctcaaagcccttatgttctaacccatgagaaccattttacctgccctctaagggccaccagcttcgacctgcctcaggggacagcagcacagaccagtggctccctgtccaaggccgcagagcagacgccatcccactgtacaatcgaatttgctggacaaacttgataggtttctctgcttagcaacgagcctatagttagttggcacatctgcgttttggcatctgaggctcccatctgagtggaggagaaagtgttgtgtttattagcaggaagtcttgtgaaaacagctcgctgctgtgtatgtttatggatttttctgatataacagccagcatggttaccgagtggtagagattctcgaacattctcaaactctctttttgggtaaatgattgtgctaaaaataaaatttattaataaagaaggggaaaaaggagtaactctacctgactaaatgttactctaatttatttatttctttactaattaagtaaaaccaggaagtatgattttacatcaaccagagaatttctgaatttatagggaaacactatgtccccataatgatgctataattctaatatatctagtccccataaacagtaagtacaaattatcattcctttaaagcatttttacacttcctggaatgagtatattatcagcaatcttttgtcaaatgccagccgtataaatgttacttctgctctttgtaaacctcaaaactcattattcttgattataagcaactggacagaaccatgccaaagcttccccgtttcccaccaaacccctgccagtgagtgcagagaactcgcaaagccacagcaggcggtctcagccaccgtcccgctcacaggggcccaatgccaggtcacaacactaagaatatctttcaaaaaatgtgtcttttttttttttttttttaaagctactgcttgactgttccttagaataaataaaggatattttataaattaca

SEQ ID NO: 167955 - DNA, 2555 bp, Homo sapiens
  Payload ID: 13034
  Gene Symbol: KCTD15
  Gene Name: potassium channel tetramerization domain containing 15
  Uniprot ID: Q96SI1
  ENST ID: ENST00000430256
  CDS Start-End: 409-1260
attttgtgtgtaaatgagcgtggcattctgctcacttctctctgctcgggcgggcggggctcggcggcgggcgggcagggacccgggtctcccgccgcagctggagaagcgggtcactaccgggccagtttggaaacctgtgggccctcccgaccgctatcgctgaggcccctgcaacaggcgggccagggcgcactggggctgggtgctgggtttgatgctggtgctggtggaatgaacttgtatctctcactgcacccacttttgtgcttctgacttaagcagtggtctcggaaagagggtcgtggtcccgcacggatgcgcttgttgggagaaaccttggagattcacggcaaggcgtaaagcctggggcttccaacgatactctgggcagggatggaagcctagatgcctcaccgcaaggagcggccgagcgggtcctcgcttcacacacacggcagcaccggcaccgcggagggaggaaacatgtcccggctgtctctcacccggtcgcctgtgtctcccctggctgcccagggcatccccctgccagcccagctcaccaagtccaatgcacctgtgcacatcgatgtgggcggccacatgtacaccagcagcctggccacgctcaccaagtaccctgactccaggataagccgcctcttcaatggcactgaacccatcgtcctggacagtttgaagcaacattatttcattgaccgggatggggagattttccgctacgtcctgagcttcctgcggacgtccaagctgctgcttccggatgactttaaggacttcagtctgctgtacgaggaggcgcgctactatcagctccagcccatggtgcgcgagctggagcgctggcagcaggagcaggagcagcggcgccgcagccgggcctgtgactgcctggtggtgcgcgtcacgcccgacttgggcgagcggatcgcactcagcggcgagaaggccctcatcgaggaggtcttccccgagaccggagacgtcatgtgcaactccgtcaacgccggctggaaccaggaccccacgcacgtcatccgcttcccgctcaatggctactgccggctcaactcggtacaggtcctggagcggctgttccagaggggtttcagcgtggctgcgtcctgtgggggcggtgtggactcctcccagttcagcgagtatgtgctttgccgggaggagcggcggccgcagcccacccccactgctgttcgaatcaagcaggaacccctggactaggccctgcttcagtgcccacctgggcccccccagggacctggaaacagtgctggggagttctgcctgtgtatacttggccgtgggcatgagaccgagggtgaggctggagggtccaaagctggcccagcgagcaccagggtcccaggtgtcatggcaacagaacgtgggatgctggaggcatgcctgcagaaggactgttgatgcgacccaaagatacagcggtgggatctctgctgccagctctcccagcccctcagcttcgcagcctggcgcagcatcctctgaggccccggggcctgttggggcggggttggaagagccgtctgcagctacttcagaggagctgtttatccctctccacgcggggcagactctggcgggtctcctagcgtccgagagatggcttattttctacagtatttaaaatggatgcagccctaactgcaaaagtcagagaggctgacaaggaccaatgcttctttatctggtgctcagttctcagtcagacgtgcagcatggctgcagggtggaccagctgcctggcattcaggcccagatgcctgcagggctggggctctcgggacagatgcagggatgtgtgctgcagggctgctgggaggagagtggtgggggcctgagggctgagtgattctgtaaccacctgagaccttcacgtttgctgccgttgggggctcaggctgcactccccgggtcacctgacctgctgcccaggggcttccagtcctgtctgtgtggactggcacctgggctgctggagaagtctcctcccgttcggaccagcctcagggctgcacgttacctcaggaatgggccccaccatgaaggggcccatctgtcagcagcgtcttctaggtccccagctcagggagccatccccagctccagttttctcatgcgaatatgcacagttttaattcacgttgttacactagcctgccgatgagacccagacacaggcagacctggcgctcttgacccctgattccagtgaggactggccctgaggagtccttgcagacctgctgcctcccccacgacaggcccaaagatggaccccccctggccttgtgacagctccccaagtgttctccggtggagaaactgcagaggactggtgggcggggctccccagccatcaccatcctgtgtacaatggctgtagacttgtatatggctcctttaatattgtaaagatgctgatgtacaattgtcgtgcatttgtgtgaacacattgcgttcccagtccatgccataaatgatgctctcaagcaaaa

SEQ ID NO: 167956 - DNA, 577 bp, Homo sapiens
  Payload ID: 13034
  Gene Symbol: KCTD15
  Gene Name: potassium channel tetramerization domain containing 15
  ENST ID: ENST00000590771
  CDS Start-End: 393-577
gggggcgagagagaaagtaactccaggacgagaccggagcgacccgcgcagcgagcataggcggcgaagctgcgcccggcgcccgagaccggcagctgcgtggggcgggggctgcgcccgagcccgatctgccggctccgagcttagcaaagaagcgacttcagaagaagcgatttagtgaaatcgtctcaagctgccgcagctcagccagtttaatcacccccagagagccgaacaactgcgagcgcaatgggacacaaaatcatttttggtctcggaaagagggtcgtggtcccgcacggatgcgcttgttgggagaaaccttggagattcacggcaaggcgtaaagcctggggcttccaacgatactctgggcagggatggaagcctagatgcctcaccgcaaggagcggccgagcgggtcctcgcttcacacacacggcagcaccggcaccgcggagggaggaaacatgtcccggctgtctctcacccggtcgcctgtgtctcccctggctgcccagggcatccccctgccagcccagctcaccaagtccaatgcacctgtgcacatcgatgt

SEQ ID NO: 167957 - DNA, 1211 bp, Homo sapiens
  Payload ID: 13034
  Gene Symbol: KCTD15
  Gene Name: potassium channel tetramerization domain containing 15
  Uniprot ID: Q96SI1
  ENST ID: ENST00000588881
  CDS Start-End: 338-1189
ataggcggcgaagctgcgcccggcgcccgagaccggcagctgcgtggggcgggggctgcgcccgagcccgatctgccggctccgagcagtggtctcggaaagagggtcgtggtcccgcacggatgcgcttgttgggagaaaccttggagattcacggcaaggcgtaaagcctggggcttccaacggtgactacggcacagaggagagttactgagtgcctctggggaggagcagtagaaagggtccattggctgatctgcttgctctgtgcttcctcctggccacctggccatctcctgatgcctcggggatactctgggcagggatggaagcctagatgcctcaccgcaaggagcggccgagcgggtcctcgcttcacacacacggcagcaccggcaccgcggagggaggaaacatgtcccggctgtctctcacccggtcgcctgtgtctcccctggctgcccagggcatccccctgccagcccagctcaccaagtccaatgcacctgtgcacatcgatgtgggcggccacatgtacaccagcagcctggccacgctcaccaagtaccctgactccaggataagccgcctcttcaatggcactgaacccatcgtcctggacagtttgaagcaacattatttcattgaccgggatggggagattttccgctacgtcctgagcttcctgcggacgtccaagctgctgcttccggatgactttaaggacttcagtctgctgtacgaggaggcgcgctactatcagctccagcccatggtgcgcgagctggagcgctggcagcaggagcaggagcagcggcgccgcagccgggcctgtgactgcctggtggtgcgcgtcacgcccgacttgggcgagcggatcgcactcagcggcgagaaggccctcatcgaggaggtcttccccgagaccggagacgtcatgtgcaactccgtcaacgccggctggaaccaggaccccacgcacgtcatccgcttcccgctcaatggctactgccggctcaactcggtacaggtcctggagcggctgttccagaggggtttcagcgtggctgcgtcctgtgggggcggtgtggactcctcccagttcagcgagtatgtgctttgccgggaggagcggcggccgcagcccacccccactgctgttcgaatcaagcaggaacccctggactaggccctgcttcagtgcccacctg

SEQ ID NO: 167958 - DNA, 632 bp, Homo sapiens
  Payload ID: 13034
  Gene Symbol: KCTD15
  Gene Name: potassium channel tetramerization domain containing 15
  ENST ID: ENST00000587658
  CDS Start-End: 295-632
ggggcagagaccctgggagggcggccagggagcgggggaggggcggcctggcccccggctccgctccagccccgaccgactggcagcccagtttcttcccaagtcccgcccccagccccgggcgccgcggcggcggctgctctcctctttgtaaccgaggagtcaagaaattggtctcggaaagagggtcgtggtcccgcacggatgcgcttgttgggagaaaccttggagattcacggcaaggcgtaaagcctggggcttccaacgatactctgggcagggatggaagcctagatgcctcaccgcaaggagcggccgagcgggtcctcgcttcacacacacggcagcaccggcaccgcggagggaggaaacatgtcccggctgtctctcacccggtcgcctgtgtctcccctggctgcccagggcatccccctgccagcccagctcaccaagtccaatgcacctgtgcacatcgatgtgggcggccacatgtacaccagcagcctggccacgctcaccaagtaccctgactccaggataagccgcctcttcaatggcactgaacccatcgtcctggacagtttgaagcaacattatttcattgaccgggatggggagattttccgctacgt

SEQ ID NO: 167959 - DNA, 622 bp, Homo sapiens
  Payload ID: 13034
  Gene Symbol: KCTD15
  Gene Name: potassium channel tetramerization domain containing 15
  ENST ID: ENST00000587559
  CDS Start-End: 237-622
tttttgtcgccaggcgcgggcgcgcggagctaattgcgactctaatcctctgccccgcggcgcagccgagccccgagccaggagtcgccgcgcgcgcccgttcgcgctggcagtggtctcggaaagagggtcgtggtcccgcacggatgcgcttgttgggagaaaccttggagattcacggcaaggcgtaaagcctggggcttccaacgatactctgggcagggatggaagcctagatgcctcaccgcaaggagcggccgagcgggtcctcgcttcacacacacggcagcaccggcaccgcggagggaggaaacatgtcccggctgtctctcacccggtcgcctgtgtctcccctggctgcccagggcatccccctgccagcccagctcaccaagtccaatgcacctgtgcacatcgatgtgggcggccacatgtacaccagcagcctggccacgctcaccaagtaccctgactccaggataagccgcctcttcaatggcactgaacccatcgtcctggacagtttgaagcaacattatttcattgaccgggatggggagattttccgctacgtcctgagcttcctgcggacgtccaagctgctgcttccggatgactttaa

SEQ ID NO: 167960 - DNA, 534 bp, Homo sapiens
  Payload ID: 13034
  Gene Symbol: KCTD15
  Gene Name: potassium channel tetramerization domain containing 15
  ENST ID: ENST00000590906
  CDS Start-End: 303-534
atcacccccagagagccgaacaactgcgagcgcaatgggacacaaaatcatttttggtctcggaaagagggtcgtggtcccgcacggatgcgcttgttgggagaaaccttggagattcacggcaaggcgtaaagcctggggcttccaacggtgactacggcacagaggagagttactgagtgcctctggggaggagcagtagaaagggtccattggctgatctgcttgctctgtgcttcctcctggccacctggccatctcctgatgcctcggggatactctgggcagggatggaagcctagatgcctcaccgcaaggagcggccgagcgggtcctcgcttcacacacacggcagcaccggcaccgcggagggaggaaacatgtcccggctgtctctcacccggtcgcctgtgtctcccctggctgcccagggcatccccctgccagcccagctcaccaagtccaatgcacctgtgcacatcgatgtgggcggccacatgtacaccagcagcctggccacgctcaccaagtacc

SEQ ID NO: 167961 - DNA, 1625 bp, Homo sapiens
  Payload ID: 13034
  Gene Symbol: KCTD15
  Gene Name: potassium channel tetramerization domain containing 15
  Uniprot ID: Q96SI1
  ENST ID: ENST00000589786
  CDS Start-End: 250-1101
gtaactccaggacgagaccggagcgacccgcgcagcgagcataggcggcgaagctgcgcccggcgcccgagaccggcagctgcgtggggcgggggctgcgcccgagcccgatctgccggctccgagtggtctcggaaagagggtcgtggtcccgcacggatgcgcttgttgggagaaaccttggagattcacggcaaggcgtaaagcctggggcttccaacgatactctgggcagggatggaagcctagatgcctcaccgcaaggagcggccgagcgggtcctcgcttcacacacacggcagcaccggcaccgcggagggaggaaacatgtcccggctgtctctcacccggtcgcctgtgtctcccctggctgcccagggcatccccctgccagcccagctcaccaagtccaatgcacctgtgcacatcgatgtgggcggccacatgtacaccagcagcctggccacgctcaccaagtaccctgactccaggataagccgcctcttcaatggcactgaacccatcgtcctggacagtttgaagcaacattatttcattgaccgggatggggagattttccgctacgtcctgagcttcctgcggacgtccaagctgctgcttccggatgactttaaggacttcagtctgctgtacgaggaggcgcgctactatcagctccagcccatggtgcgcgagctggagcgctggcagcaggagcaggagcagcggcgccgcagccgggcctgtgactgcctggtggtgcgcgtcacgcccgacttgggcgagcggatcgcactcagcggcgagaaggccctcatcgaggaggtcttccccgagaccggagacgtcatgtgcaactccgtcaacgccggctggaaccaggaccccacgcacgtcatccgcttcccgctcaatggctactgccggctcaactcggtacaggtcctggagcggctgttccagaggggtttcagcgtggctgcgtcctgtgggggcggtgtggactcctcccagttcagcgagtatgtgctttgccgggaggagcggcggccgcagcccacccccactgctgttcgaatcaagcaggaacccctggactaggccctgcttcagtgcccacctgggcccccccagggacctggaaacagtgctggggagttctgcctgtgtatacttggccgtgggcatgagaccgagggtgaggctggagggtccaaagctggcccagcgagcaccagggtcccaggtgtcatggcaacagaacgtgggatgctggaggcatgcctgcagaaggactgttgatgcgacccaaagatacagcggtgggatctctgctgccagctctcccagcccctcagcttcgcagcctggcgcagcatcctctgaggccccggggcctgttggggcggggttggaagagccgtctgcagctacttcagaggagctgtttatccctctccacgcggggcagactctggcgggtctcctagcgtccgagagatggcttattttctacagtatttaaaatggatgcagccctaactgcaaaagtcagagaggctgacaaggaccaatgcttctttatctggtgctcagttctcagtcagacgtgcagcatggctgca

SEQ ID NO: 167962 - DNA, 571 bp, Homo sapiens
  Payload ID: 13034
  Gene Symbol: KCTD15
  Gene Name: potassium channel tetramerization domain containing 15
  ENST ID: ENST00000588637
  CDS Start-End: 324-571
actctaatcctctgccccgcggcgcagccgagccccgagccaggagtcgccgcgcgcgcccgttcgcgctggcagtggtctcggaaagagggtcgtggtcccgcacggatgcgcttgttgggagaaaccttggagattcacggcaaggcgtaaagcctggggcttccaacggtgactacggcacagaggagagttactgagtgcctctggggaggagcagtagaaagggtccattggctgatctgcttgctctgtgcttcctcctggccacctggccatctcctgatgcctcggggatactctgggcagggatggaagcctagatgcctcaccgcaaggagcggccgagcgggtcctcgcttcacacacacggcagcaccggcaccgcggagggaggaaacatgtcccggctgtctctcacccggtcgcctgtgtctcccctggctgcccagggcatccccctgccagcccagctcaccaagtccaatgcacctgtgcacatcgatgtgggcggccacatgtacaccagcagcctggccacgctcaccaagtaccctgactccaggataag

SEQ ID NO: 167963 - DNA, 666 bp, Homo sapiens
  Payload ID: 13034
  Gene Symbol: KCTD15
  Gene Name: potassium channel tetramerization domain containing 15
  ENST ID: ENST00000590385
  CDS Start-End: 1-492
ttcattgaccgggatggggagattttccgctacgtcctgagcttcctgcggacgtccaagctgctgcttccggatgactttaaggacttcagtctgctgtacgaggaggcgcgctactatcagctccagcccatggtgcgcgagctggagcgctggcagcaggagcaggagcagcggcgccgcagccgggcctgtgactgcctggtggtgcgcgtcacgcccgacttgggcgagcggatcgcactcagcggcgagaaggccctcatcgaggaggtcttccccgagaccggagacgtcatgtgcaactccgtcaacgccggctggaaccaggaccccacgcacgtcatccgcttcccgctcaatggctactgccggctcaactcggtacaggtgagggctgcacgctgccccctccccgccgcacccccggcgtccgcggagccctccaggggcagagtgagctggagggaggcgcgatccctgaaacggtgaagccccccgtgccatcctacaaaaaaggcaacaatgtgtcgatgcataatttatgtccctctcataattaaatgatggcgcctgggggatggacttaaaaaaatcgatctgtactttttttttttttttccaaaaggatgttctataaaaatggcccagagtattttcaacaaa

SEQ ID NO: 167964 - DNA, 2313 bp, Homo sapiens
  Payload ID: 13035
  Gene Symbol: KCTD16
  Gene Name: potassium channel tetramerization domain containing 16
  Uniprot ID: Q68DU8
  ENST ID: ENST00000512467
  CDS Start-End: 671-1957
agcaattgctgcttactcgtaggtaggaggaggagtttctcagacctaggtgatggaggaagactgggaggcgctaaaatgagacagacggagtcccctctcctgtccacaaactacaatgcctacaatgcctcggtgtcagcatttactgtgattcaagcactgtgctaaagtgtttttcatatgtcatgaaaagttgtgccagaaaattatggtttgaacatgggcagttttctcctaccgtcagctatatccacaagcatcacatgaagtggagatctggcagctctgtgtatttcagtcaagttccacaatgaaacctgacaataatggtaaaaaccaatacggacatctgagtaactggggaattggcctgccttgcatgtgagcttgatggaagattggatatagacgagttgattatattttatgaagtagcagctcactaccatccaccatccagggtttaaactactttttcagcatcacttcacctgtggactcttatacattttgatttcttgggggaaaaatactgggataagaggaggtcattttttaataagttagcatccttttccctttcttacaagttgatccaaaggataaggctgtgactccattggattgcacctttaaatcaaaatagcagcagcagaagaaagggacaatggctctgagtggaaactgtagtcgttattatcctcgagaacaagggtccgcagttcccaactccttccctgaggtggtagagctgaatgtcgggggtcaagtttattttactcgccattccacattgataagcatccctcattccctcctgtggaaaatgttttccccaaagagagacacggctaatgatctagccaaggactccaagggaaggtttttcattgacagagatggattcttgttccgttatattctggactatctcagggacaggcaggtggtcctgcctgatcactttccagaaaaaggaagactgaaaagggaagctgaatacttccagctcccagacttggtcaaactcctgacccccgatgaaatcaagcaaagcccagatgaattctgccacagtgactttgaagatgcctcccaaggaagcgacacaagaatctgccccccttcctccctgctccctgccgaccgcaagtggggtttcattactgtgggttacagaggatcctgcaccttgggcagagagggacaggcagatgccaagtttcggagagttccccggattttggtttgtggaaggatttccttggcaaaagaagtctttggagaaactttgaatgaaagcagagaccctgatcgagccccagaaagatacacctccagattttatctcaaattcaagcacctggaaagggcttttgatatgttgtcagagtgtggattccacatggtggcctgtaactcatcggtgacagcatctttcatcaaccaatatacagatgacaagatctggtcaagctacactgaatatgtcttctaccgtgagccttccagatggtcaccctcacactgcgattgctgctgcaagaatggcaaaggtgacaaagaaggggagagcggcacgtcttgcaatgacctctccacatctagctgcgacagccagtctgaggccagctctccccaggagacggtcatctgtggtcccgtgacacgccagaccaacatccagactctggaccgtcccatcaagaagggccctgtccagctgatccaacagtcagagatgcggcggaaaagcgacttactccggactctgacttcaggctccagggaatcgaacatgagcagcaaaaaaaaagctgttaaagaaaagctctcaattgaggaggagctggagaaatgtatccaggatttcctaaaaatcaaaattccagatcggtttcctgagagaaaacatccttggcaatctgaacttttaaggaagtatcatctataagggagggctgggggcgggaaaagaaaaaaaaaagtcattttgaaattaacctcctaaaaggaattcatattttaaaggaaaaaaatacaactaatgatgcacatttcttagaacacaatagtccattgatatactactgcctactttacctagttcaccttaacatgtaaatccacagggtagatttctttctagatgtggaagtacaagaaaatcttttttagttatttgtttgtttacttcgtcccatgtgctaactatcttatatataatgagagccagctacgtaaaagtagctgagaggccttgggagtcatttatcccaaactgggttttttctctcatccttctacctc

SEQ ID NO: 167965 - DNA, 13950 bp, Homo sapiens
  Payload ID: 13035
  Gene Symbol: KCTD16
  Gene Name: potassium channel tetramerization domain containing 16
  Uniprot ID: Q68DU8
  ENST ID: ENST00000507359
  CDS Start-End: 1092-2378
ccgaggaggacgtgactcggagctgcctccgctttctccaagccatattcctttaagatgatgtaatagtcatttccctggatggtttcttgcctgcactgctgaaacaacagcatccgaactgcactgggaactgtggaaccacccagctccgccgccagagaagccggagccccgggccccccgccggcatctctgcgctgcgttggcctctggctcgcaccggctcccacctggctgggaacatgggagtccgtttgcccttgccggcaggtggggtggctacctgggaccctagcagggcacatctctccatctttctgcttctgggctttctgaaaagcttctaagtcctggtacctcttgcaactctcttctaaggatcctttccaaagatttctttttccatttttcttttcccctggggaagctttggttgaatattttctctgctttacttcttcaacccaacctcctctcatcagggcttaactttttttgcgacttgttttaacttaagatacggaatgaacacatatgtacctacatacatacataaatacaaataggcatttatataaatgcatatatataatagttattttccaagagcacacctctctggcacttttcattgatacctcggtcgtttacctgtttgggatttgacaagatccagactcagtttggctgtggattttgattgctttacaaatggttattattatttttttcacaagaactgggtctccagcactcactaagacggacatctgagtaactggggaattggcctgccttgcatgtgagcttgatggaagattggatatagacgagttgattatattttatgaagtagcagctcactaccatccaccatccagggtttaaactactttttcagcatcacttcacctgtggactcttatacattttgatttcttgggggaaaaatactgggataagaggaggtcattttttaataagttagcatccttttccctttcttacaagttgatccaaaggataaggctgtgactccattggattgcacctttaaatcaaaatagcagcagcagaagaaagggacaatggctctgagtggaaactgtagtcgttattatcctcgagaacaagggtccgcagttcccaactccttccctgaggtggtagagctgaatgtcgggggtcaagtttattttactcgccattccacattgataagcatccctcattccctcctgtggaaaatgttttccccaaagagagacacggctaatgatctagccaaggactccaagggaaggtttttcattgacagagatggattcttgttccgttatattctggactatctcagggacaggcaggtggtcctgcctgatcactttccagaaaaaggaagactgaaaagggaagctgaatacttccagctcccagacttggtcaaactcctgacccccgatgaaatcaagcaaagcccagatgaattctgccacagtgactttgaagatgcctcccaaggaagcgacacaagaatctgccccccttcctccctgctccctgccgaccgcaagtggggtttcattactgtgggttacagaggatcctgcaccttgggcagagagggacaggcagatgccaagtttcggagagttccccggattttggtttgtggaaggatttccttggcaaaagaagtctttggagaaactttgaatgaaagcagagaccctgatcgagccccagaaagatacacctccagattttatctcaaattcaagcacctggaaagggcttttgatatgttgtcagagtgtggattccacatggtggcctgtaactcatcggtgacagcatctttcatcaaccaatatacagatgacaagatctggtcaagctacactgaatatgtcttctaccgtgagccttccagatggtcaccctcacactgcgattgctgctgcaagaatggcaaaggtgacaaagaaggggagagcggcacgtcttgcaatgacctctccacatctagctgcgacagccagtctgaggccagctctccccaggagacggtcatctgtggtcccgtgacacgccagaccaacatccagactctggaccgtcccatcaagaagggccctgtccagctgatccaacagtcagagatgcggcggaaaagcgacttactccggactctgacttcaggctccagggaatcgaacatgagcagcaaaaaaaaagctgttaaagaaaagctctcaattgaggaggagctggagaaatgtatccaggatttcctaaaaatcaaaattccagatcggtttcctgagagaaaacatccttggcaatctgaacttttaaggaagtatcatctataagggagggctgggggcgggaaaagaaaaaaaaaagtcattttgaaattaacctcctaaaaggaattcatattttaaaggaaaaaaatacaactaatgatgcacatttcttagaacacaatagtccattgatatactactgcctactttacctagttcaccttaacatgtaaatccacagggtagatttctttctagatgtggaagtacaagaaaatcttttttagttatttgtttgtttacttcgtcccatgtgctaactatcttatatataatgagagccagctacgtaaaagtagctgagaggccttgggagtcatttatcccaaactgggttttttctctcatccttctacctccctcctttgaatgagggtatggtagaaaaagatctggcccaatggcataagtttggaatttttaattttggtttttccttttgtttatggggttggggggaatggcagatttatatgacttttcactcaaatctatatgtgccagtttatattgactccgtatgcatgagtatttgtgcaacacaagcacaactaagtatgtatatacacatgacgcacacgatgccagggcctagacctcccaagggctgtgctcctgctcccagcagccctctcttagaatatttcagatggatgagcttctgactctttcttaaaattcttttgggaagatttcccagcctttcttcacaacactttctaacatcaaatgactctcatcatcaacaaattgtattccttattgtgaaattaataccctcaggctccattttactgctttgctctttgtctgcattaagagaggatgaggagagctggtcaaacattccttgtgttaaaaaaatcaaacattcatatccacaaaattttctgctaaatgactccacactcagccttctctaccctgaactgaattatcacccttttctccatgttttcagagttcttactgcccacagtttaatggtgtggcctttccacataatccacattaagttctgtgttcctgtgttgttgtggaactaaggacaacacacagtacttgaataagggtccggccttttgtttgttttagagaaagttgtattccacacacaacctaataatttcttataaaaattttaaactacaaagctacatttttacttgcttgtagccgtttttgtttgcctttgggattcgggctttggctgtgcccatgctaggatttagctgtgtcatttttatgatgtctgtaacaacccaacaaggtaactgaagctccagagttaaggtttcagatttctaaatgaaactatctttttcaattacatcctgacttgtatagacacagccaaaaagaaactgttaatagccatccgtccatgtaactctgtattttactaaggtaccaatagctctttcatagacttgtgctacaagaaggttaaaagaccagttttattttcagcattcctcatgcatttcagtggtaaccaaaaaataatttgtcaattaatagttgtgtgccaagcactcctaatttgttttattgcgtgtgtgtgcatgtgtgtatgtgtatcacaggtaataaaggcaattggatgatatctgtaggaggaaaacaatgactaatttcttccttttgaaatctttcattgatgcacatttattatgtaagatgttctgtcttgatttctgttcttagtgatgattagtatatgaatatctttctgaatttttgtaattctcgccttcacactaggatgacagactcagctaatgtttccttgtcctgaaggtttgaatggagttgaaagttttacataagtgaaaaagaaagtttatcttgggagttgagttgtcaagagaattataatttatgaatttaagtggtattcttttctgtattaatatattagcagatatttggtcttaactacaacatagctttgtttgtaaacttaccagtatgtcttgattcttttcaatgtttcttgatagcacatggcaataccatcatcctaataacagaagatcttgcaaagaatcacagagcttaatgggtcaagaagttgaatttggggaaaatatcctgaaactcactttggtcaaatgattattgtgttgtcactggaagtactgtcaaagactttgggggtctaactaaaatggccaaagttccaacttccttaaatttcagacctgactgtaatggcctcaagatagagagatacccttataagagtaaagaattaagatgatagtcaacccaatatttctactacattctttaaacaggaaattaaacactgcaaaaggagtgttcgtggcagtgttcctctgacccctgacctgtcatgagttttctctgctctgacattccttatacatccagtgaacaaagctggaatagaaaacctgtttaaaaccatcacaacagcaatatttttattctgggccacctctcgactggcactcatcccatggtaaaatattcaagtaactaagacaacagcatggcatttatttgtgtgagtgtttatatagaaatgaacatagacctggccagtaaaaggctctgaggaggcttaaagtacctagtttgagtggagttatcaagtgaggtccaggtagcctgcaacactggaaatgagttctgggtaagtgagttataagagtacatgctctagtaactctggtagtcactgtgactcgggcatgtttccctgaagttaaaatagtttttagaactttttgtttaattctgaagaaaacaatatatatggtttacttctcgaacattggttatgacaagggccataaattgctaatataaagaagttagtagtattgagtggatacaatgaatggggaatcacatgtgtagagccccaacttagattgccttctgggaaatcccgcgatactaaaatccagtgagctttgggagatcattccctaaaggtatgtgggttgtctgaagtcagaaacatatttacaaagtccttctacccactatcaaaaatgaactgatctgcattcagcaggaaaaggggaagacaggaatgtaaaactactagatcatatggtattgtgattttctttcccctgctaggaaaaaattgcactgaaatgctgacaaaaaataatgaaatgaagtggcttccaaaatatgcactgatgttatcctttgtatttataggcacagttatcttactgaaaatgcatgcatggtgaattaaaataaaagggggaacaatgcacaaataataagcgttccctttgctctttattcctttatagttgtatctattccaaccaattcattttgggggaacacatttattaagggatgttgacatggaatttttctcttttcaattagccttgttagattcagaggaatctttatccataggcacaggtgtgttgcttgttctgggccccattactgcctgcgcttctggattacttttgctttcctgggctttagattcttctctgaggatcctttgttggtgtcagacaaaacatgttacaatgagacaaaaggaaggcatgtatggtgttttgtaaaattacttgacaccagctcccacaatgggaaccaaattttgattcttatacattttcctttgctacaattccaaccttcaactttgtatctactatagtgtagatctgtgaatttgagtgctggtattttctgccactatataccatgccatggaatttgactagccttggtcttctagatgatctttactagaattaataatactctttctgtgaacttttaggaagaattctttgtcacctccacctgacataccaattttcaaaagaaaaacgaagggagtttatttttccttatggtgactctgtggcagataaatgtttttgccaatttgcatgctggtttataggtttagcatgggccatttctctctttaatgtcttggtattgttggtgtcttgcaatcttgatgccccacagtttcaatttatttattttcttttatattgtcaaaatagcacactagagaaagaaccagagtgaacattctgtatcctgagttacaatggagttacatgtcatttgtatagaactgtataatgattaatatctgcagagaaattagaccaaatgaaacctgctggaataggtttgatttatattgccttcatcattctggtttcagacgaaatggttattgctctctacccctgctgaaagaatagagtcttaaactttaataatcacagccttgtgatgcaaacacagagcttatttgtttgaaatgcctattattctcatcttgctgtatacgttggaatggagattctttttccagtgatctccattgcaaactttttaatagtgttttttaatactcagtatgcacaaaaatcatgtgtagcacttgtaaaaatgcagattccttcaacctaacttcaaagagtctgattcagaaacttgaagcagggcaaagaaatttgtattttgagctagtctccttaataattttgatgaggattgtctatagaccttactttgaaaaattctgctgtttagggaatatgcagaggccaagagttcctttactccttagaagcacttcctcattttctcttactttcttcccactacaaataagtcaaagcatgcattattcattatcttaagagaaaacacccaaagaaaaatatcctaagactagggcagaatagattttcatgaattctttgccatttcatctgctgtctgtcaaccataaccctttctccatattgtgtgtgtatgtgtatgtgtatgtgtatgggttttttcccaaaataaaagcctgcattattatagtcttagctctgggtagatgggagcatatctctgagtgagatgtattctaatgatacccaacaagaaataaaaataatgatctttcccaaggagagttgtttatttctaggcccttacttagtatgagtgggaggaaattgaaagtgatccataatttaatggtgtatatggccccaaaggtgattccattaactgcacataaaatataaccaaaatgaatatggaatgattagtgaattcagctatatttaaccaatcaaatcctgcgccattgaactgctaaatttgtccaatttgactcaatcaggactatgaagctctcagataattgaagatcctgaaccctgacattaactaaaaacttgaagccaaactgatgtgtaagaataaatgcaaaaaaaaaaaaaaaagaaaaagaaaaagaaagcaagaaagagtgaattcaaaagggtttcaatgatccaattgaccctattcatttaacagagtaactggatacataccaaattcccacgttataagaaagatgaaaatagagatcatgcttgtcatgatcatgagtgaatatttgagtaaatattgccaaaggaaagtgaaggatgtttaatgaaactgatgaacatgagcaactaattatgttaaattggccaagattaaaacaaaaatggttaaatttgattcagtttgttgccctctctcctctacttcctaagtgggatcccttttctgtcccggcttcctaatgttcaaaaaatgtttctcttgcttgtgaacaaattttgttgccaattaggtaaaaaatgttaagttcccagactgtcatccttgcattatttaggaaatttacttttaaaaggataaagaaaaatgtgcctggcctagcaactatcaagggcttgtcctggaggagggtgggggtaatcttcctgttaatcagctttgtaaaacacttatatgccaaccagagggtttattaagtctcttgtctccagcaacctcctccatcttatcagtttatttttagaattgacctttagataatttacctgcatttgcacagtgaaaaatcaacataactttatattctcttcctgctgatgtggtctccatccatcacaaatggaagcagaactgatgcttagtaaagtaatgagagttgctttcaaattacattagtgtgcatgtgtgtgtgtgcacatggccatgtgcaatttttaggtttatgtcagctcagtggataatgtgcgtgggagtgctatccgagtgcatggaaaaagcctttggttacatagtttaacagctttttagttcagcacaatagtttgtctctactgtggatgtcagtccttgagaatgttaagtaaagcttgagcttgtctcctcatgtgaaattcaaacaatactaatttctggggaaaaatcaaactcatatccatgtatatagtgaagagtagcatcttattcaaaaaaagaatgtatttttgaaagctaagatagacatagaatacatattaatcatcagtagtcttttttaattgcagccagtgatcagtggtttatctataccctttaggtgagagacagagagaaacaatttcaggaaactctccttgattcatgtgggttatgtgcatttaaggccgtggctctcaaccaggagtggttttgcataccagagatcttttggcaatgcctggagatattttttgtttcatgatttgaggggtgctactgacaattaatgggtataggccagagatgctgctaaagatcctacagtgtactggaaagccctccataacaaaaagttatccagcccacaatgtcaatagtgcttagcttgagaaactctaaattaagcatgagtttaaatttgtcaaggcatttttttttctgtaccatatacgggaagtcttccaggtcaataaataggataaaatagaaaaataaaaatcggaaccagtttaaatgtgtatagaaattatatgtatggaaattatttgaagttagacataattatctctttatgcagatgtgaaagctgagatttacagaaataggaaactttttccagggatctggtagtgatgaggaaggcctgtagtttaggtgtcttgtgttcttctacttcagtctttctgcctcagaaaaattatacttcagtgatgttgtcaatctttcaacagctaaatgtgtttgttgtgaagcactctgggatccttttcagtttacatgatcctgttaaagatgtttcccaagctgatcaacagtagaccacaaagtgctctcagaaatgaaactagtaagggggagaaagtgttttgagcaggccaatgatttcattgtctgtaactgcttatcataccctttgttactttgagttgaatattccctctctgaggatggtaaaatcttattggaaaatatgtttcctagactcacccaggggtggctcccaagtccttgtttccaaacatgtgacaagtctaagcacaagtccttgctactgagtcttattgtttagtttatatacactgactttattagaacacaatttgtgtctgaaatgatttgacatttttcttttaatgtatcataccaatatcccagggatggaattatggtagggtcattctaattccattttatacaagggaaactaaggacccagaaagtttaaatcggtcatttatttgtttgtttatgcatatatccagcaaatatttgttgggtacatactatatataggtcactgtcgtgagcattataatgtctaagcaatcaaatttggagtaaagaacttgaattaagttcattcaattcctagactaacattatttctatatgtagttctgatcagtattctagaattatggtttaaatatccagttataaataatatatattacagatttattattatgtacctgaaactctactgagtacttttcatgccttatctcatttaatcctatcataatccaatgaagtaagccctaccactatcctctctttacagatgaggtcagtgaggctcagaaagataaagtagcacataaaggctcatagctaaaaagtggcagagccagattttcctctgagtttattagactctaaaggctgctggcttaaccatctctttgtacaatctgttctctctgttctctgaactttgcctgtttctcctctctcctatgctaaacaaggtgagatcccagcctgacatccttcctaaaagtcatcagttttttttgtttgtttgtgacttgtatctgcctaggaggtaaagaaagggcagatttgctacagcttgtactttatgccacaaaaattttcaagggggcaataatgttgtagaacaagtatctggtgagtactgataccctaagaaactcaccgtgataagctagcttccacgtctggagaaaatgacacctgcaattgcttgctgtgctgcacacaggtcactagggcaagcttcaggagaagtaaaataggtgtatgagcgtgtttatatgtgtttatgcatgagtgtatctaggtatctgctattttcatcttttggcttgttaaacagtctcaggtttttattcaagacaggtcaaaagcccaaatgtgattaactgccctcagcatctcattgttactgttataagttgggaaaaagagaggcagctttagaaaagaaacttcaccgaaatacgtgcatgcatgtgtgagtgtgtgtgtgtgaggagtgtgtgtatttatgtgtgttttgtgtttatgtataaaattatgtatatatatgtacatatgtgtgtacatctatcttaatgtgtatatataaatatatatctatagctgtacatatgtatacacccataaacaaagctcatagtttaaaactttggaattttcagtttggagaacttattattattacaatttatatttggtttcctagacggtctaatatagttctaatttccaaaattctcttccactaaaagtggatatatttatttatggtgccgagaacattaacaaaatatttagatttaatatctatgaataataaaccaaaaaaagtgcatttaaggaaacaccaaacttgtaaaaactggctctcttatccaaaccatttgttggaatttcaaactacatgttttcacacttcttcattccaaaaaaaaaaaaaaaaccaaaccagaaaaaacccaaaacactaccaaatgaacagtgataatgtttaagaagaaaaagaaaaatgtaggtgtatgatagcacaaattcaatggttattgccctagtggtgcttcacttacctattggttaatttattatatcctggttaatttcactttatcactgatgagggttcctgtgtccctacatgatttatcggtggagctaattatctatttatttaaagctatagtaaataatttataatatgcatattgtaaatagatactaaaagtcatgggcacattgtaataatcacaaagttttagtctcctgcaaataacacttgaagtctgtttatacaatacccaaatagttgctcaaagaaagaacaatgtaagtcaaatacaagaaaaccttacttacctattttggcattttacagacataacaaccaaattaacgaattttggccatcttaagaatacagtaagttgtgtactcattcatagccacatgctttgcatattactggggaatgtgaaaaatatttaaagtcaacctatgcaaacagagattccctgctgctccttgggatcagtttgtatgcacacaagcccatgccttcaactgatagtcctagcacagatccctcctcccagagatctgtcaggtgtgcccacacaacagaagcacttgtaaactaattaagcacggtcactgaatccttttttcaccagccttctaaagatgttgtcttaaaaacataagaaagaaaatccatttttttaaagcaatgaaatgttctaattaggtttgaggacatttgaaggagcgattgttttttccccaaaattttggagcagaggggacgttttacatcatcctaacttcatgttcctctgtcattttattttatttatttatttttaattccaaaggagaaagttgaatcaggaaaatttgtcttaaaatatactgcttagtttagagacggacaaactaatgtatttttgtaaatcatgggtggcggatgtcaaaatctctcattaattaccctgtttttttctttaaggaaattgattcatgaataattggaaaggtattctagttaagacacacagaaacacaaacttagcggagctgcacttcagagagtcccactgtaatctgttaatagaatctgctttaaatgagtcactccttagactggcaatgacacccagcttagtctgtaaaatcaggaatctttgtgttggctgaaggaacttagtaatcttagttgaattcctcttccccatgtctttcaaaaccagagcactgggtcgaacctaacccacaaaataattcgtccaaattaaattgacttttttacataacatcagcaccaccccttacacttttaaagttaaagaccctgttgatcaggttacctggaaatttcaagtgcatctgaccagggattatcaagctccttgtgacatctgtttctgatgctgtgaatgtgatgtcaccacaaatagaggattctgaattttgctggtactaatgctgagtggtgacttattggggccttgctcatgttactttttcctgacgtcattcaagcacttgatgacttgggtcagtttgttgcacattgatgaataacaagtgacacccaatgaaattacctcttctcctttccaatgcagttcgcttgtacataaatgtaacgtcatattgtttacaggttatttttgtgcgtaattgtgatagcagatttagctcaaactttaaaggaatttgtttactgactggtgttaaaatgaatgtgcttattacagtataaacatcattaattatggactcacatgaatgcatgtctacatgtcgtcagttctcagcagctcagttattcagcaaaaagtctgcagtctgtgaatagcaaatatacataaactactgtgactctaataactctaactgtttttaccttgggatgtaacactgtagatcttcgcctgctgtatttctttcttacctatttgtttttgcgagaaaaacatgatagaaaatgctactactaattgtcccaatggaattgcacatcattttggcaatcattggttcactcagaaggcaaccgcctatagatggaacagccctgagcaacatataaatatatacatacatatctatgtatgcaatatctacactgcgaattactaccatctattctcactgccaatggaaacaaactactcttttctttggattcattgatggatataaaaaattaatttgctattaactgctttcatattctgtttagttcttatagtatggtaaatgatacaggtgcagtatcagtattgtaaaattgtatggtgaaaactacaaaagtcattctgtggatatattttaaaaggaagaacagaaactatatttcagattcttgtgtgaatataattacagaataggtaactatttttatgtgtttccataaatgactccatttcatatgcattgtaatttagcacaaatcataataaatcatttggtaaca

SEQ ID NO: 167966 - DNA, 1691 bp, Homo sapiens
  Payload ID: 13036
  Gene Symbol: KCTD17
  Gene Name: potassium channel tetramerization domain containing 17
  Uniprot ID: Q8N5Z5
  ENST ID: ENST00000402077
  CDS Start-End: 2-895
gatgcagacgccgcggccggcgatgaggatggaggccggggaggcagcgccgccggcgggggcgggcggccgcgccgcaggcggctggggcaagtgggtgcggctcaacgtggggggcacggtgttcctgaccacccggcagacgctgtgccgcgagcagaagtccttcctcagccgcctgtgccagggggaagagctgcagtcggaccgggatgagaccggggcctacctcattgaccgtgaccccacctacttcgggcccatcctgaacttcctccggcatggcaagctggtgctggacaaggacatggctgaggagggggtcctggaggaagccgagttctacaacatcggcccgctgatccgcatcatcaaagaccggatggaagagaaggactacacggtcacccaggtcccacccaagcacgtgtaccgcgtgctgcagtgccaggaggaggagctcacgcaaatggtctccaccatgtctgatggctggcgcttcgagcagctggtgaacatcggctcctcctacaactacggcagcgaggaccaggcagagttcctgtgtgtggtgtccaaggagctccacagcaccccaaacgggctgagctcagagtccagccgcaaaaccaagagcacggaggagcagctggaggagcagcagcagcaggaggaggaggtggaggaggtggaggtggaacaggtgcaggtggaggcagatgcacaggagaaaggttcccgtccgcaccctctcagacctgaggctgagcttgcagtgagggcttctcctcggcccctcgcccgcccccagagctgccatccctgctgttacaagccagaggcacccggatgtgaggccccagatcacctccagggacttggggttcccatctgaaatcctttatttttgtaccatggggtgggccccgggcctgagaaggaagaagcaccctctccccggcctcctctgtctgcacccgtggggctgtgacttactcctgcctccaggggcggggcggggcccccctgggacctcttaaggcccaaggtgggccccaggacctctgggcagagtggactgctcatggcagatgtgtggcaatgtctggctgtgtctctccggcacctgcgtcccctctcccgggctcccctgctgcatggtggatgtgctccttcctggcccggtcacattgcctccttgagccttagtccagggggtcactcctcccaccccacctacctcacagggttgttgtgagggtgcacagaggagcaaagtccctgaaggccctcaggcagtatataggggccgcccaccttcagctgccctgggatgggaaggacccagcccgacccctgggcataacactgtgtttgcaaatggagattcaggtattggggatgcaggttgtggggagctggcctggcagagtaggggtagttggcttggccttctctttggtgatcccacccccagccatttgcattgctggcccagcgcctggcctggggggcggggagaggcagcagaaggggctgggcaggggcggtggaggactcaggaactgcccggggagagtgggtatggcggctgagccaggggccctcctgtgtttgacttcccgggatgggtccttgcttctcagctgtgtccgaccccaccatgtaataaaacccaaaggaacagccca

SEQ ID NO: 167967 - DNA, 1763 bp, Homo sapiens
  Payload ID: 13036
  Gene Symbol: KCTD17
  Gene Name: potassium channel tetramerization domain containing 17
  Uniprot ID: Q8N5Z5
  ENST ID: ENST00000403888
  CDS Start-End: 2-967
gatgcagacgccgcggccggcgatgaggatggaggccggggaggcagcgccgccggcgggggcgggcggccgcgccgcaggcggctggggcaagtgggtgcggctcaacgtggggggcacggtgttcctgaccacccggcagacgctgtgccgcgagcagaagtccttcctcagccgcctgtgccagggggaagagctgcagtcggaccgggatgagaccggggcctacctcattgaccgtgaccccacctacttcgggcccatcctgaacttcctccggcatggcaagctggtgctggacaaggacatggctgaggagggggtcctggaggaagccgagttctacaacatcggcccgctgatccgcatcatcaaagaccggatggaagagaaggactacacggtcacccaggtcccacccaagcacgtgtaccgcgtgctgcagtgccaggaggaggagctcacgcaaatggtctccaccatgtctgatggctggcgcttcgagcagctggtgaacatcggctcctcctacaactacggcagcgaggaccaggcagagttcctgtgtgtggtgtccaaggagctccacagcaccccaaacgggctgagctcagagtccagccgcaaaaccaagagcacggaggagcagctggaggagcagcagcagcaggaggaggaggtggaggaggtggaggtggaacaggtgcaggtggaggcagatgcacaggagaaagcccagtcatctcaggatcccgctaaccttttctccctcccaccactgcctcctcctccgcttcccgctggaggttcccgtccgcaccctctcagacctgaggctgagcttgcagtgagggcttctcctcggcccctcgcccgcccccagagctgccatccctgctgttacaagccagaggcacccggatgtgaggccccagatcacctccagggacttggggttcccatctgaaatcctttatttttgtaccatggggtgggccccgggcctgagaaggaagaagcaccctctccccggcctcctctgtctgcacccgtggggctgtgacttactcctgcctccaggggcggggcggggcccccctgggacctcttaaggcccaaggtgggccccaggacctctgggcagagtggactgctcatggcagatgtgtggcaatgtctggctgtgtctctccggcacctgcgtcccctctcccgggctcccctgctgcatggtggatgtgctccttcctggcccggtcacattgcctccttgagccttagtccagggggtcactcctcccaccccacctacctcacagggttgttgtgagggtgcacagaggagcaaagtccctgaaggccctcaggcagtatataggggccgcccaccttcagctgccctgggatgggaaggacccagcccgacccctgggcataacactgtgtttgcaaatggagattcaggtattggggatgcaggttgtggggagctggcctggcagagtaggggtagttggcttggccttctctttggtgatcccacccccagccatttgcattgctggcccagcgcctggcctggggggcggggagaggcagcagaaggggctgggcaggggcggtggaggactcaggaactgcccggggagagtgggtatggcggctgagccaggggccctcctgtgtttgacttcccgggatgggtccttgcttctcagctgtgtccgaccccaccatgtaataaaacccaaaggaacagccca

SEQ ID NO: 167968 - DNA, 559 bp, Homo sapiens
  Payload ID: 13036
  Gene Symbol: KCTD17
  Gene Name: potassium channel tetramerization domain containing 17
  ENST ID: ENST00000431531
  CDS Start-End: 371-559
attagaagctctccagccgccccggatcggggcctctccttctcctttggggctgtggacagggagagacctgggacctttcctccctcccaaaggggactcctgctctggggaaggagtcgacgaggctacttctcccgctctttgggatgtgggtggcggaggggtgcagggagctagctggatggaggagccctggggcgccttctgagcgggctgaatctagaaggagcgttggcccagcgggcactatttctgagcacccaccctgactctgctgcacactgcctgccgcgaccttgagtcggacccttccctgcactgcgctcagcctccttcctcatctgtaacacgaagggctggtctgaagatgacctctaaggtctcctgtcccccatccgtgaccctccgatgctgtggcctttggcaagtcgcctcacctctcaatgtctccgatctctctgatgagaccggggcctacctcattgaccgtgaccccacctacttcgggcccatcctgaacttcctccggcatggcaagctggtgctggacaaggac

SEQ ID NO: 167969 - DNA, 451 bp, Homo sapiens
  Payload ID: 13036
  Gene Symbol: KCTD17
  Gene Name: potassium channel tetramerization domain containing 17
  ENST ID: ENST00000421900
  CDS Start-End: 1-314
ggggcacggtgttcctgaccacccggcagacgctgtgccgcgagcagaagtccttcctcagccgcctgtgccagggggaagagctgcagtcggaccgggatgagaccggggcctacctcattgaccgtgaccccacctacttcgggcccatcctgaacttcctccggcatggcaagctggtgctggacaaggacatggctgaggagggggtcctggaggaagccgagttctacaacatcggcccgctgatccgcatcatcaaagaccggatggaagagaaggactacacggtcacccaggtgccctctatgtgacccttctgcccacaggtcccacccaagcacgtgtaccgcgtgctgcagtgccaggaggaggagctcacgcaaatggtctccaccatgtctgatggctggcgcttcgagcagctggtgaacatcggctcctcctacaa

SEQ ID NO: 167970 - DNA, 1438 bp, Homo sapiens
  Payload ID: 13036
  Gene Symbol: KCTD17
  Gene Name: potassium channel tetramerization domain containing 17
  ENST ID: ENST00000456470
  CDS Start-End: 1-542
ggcagacgctgtgccgcgagcagaagtccttcctcagccgcctgtgccagggggaagagctgcagtcggaccgggatgagaccggggcctacctcattgaccgtgaccccacctacttcgggcccatcctgaacttcctccggcatggcaagctggtgctggacaaggacatggctgaggagggggtcctggaggaagccgagttctacaacatcggcccgctgatccgcatcatcaaagaccggatggaagagaaggactacacggtcacccaggtcccacccaagcacgtgtaccgcgtgctgcagtgccaggaggaggagctcacgcaaatggtctccaccatgtctgatggctggcgcttcgagcagctggtgaacatcggctcctcctacaactacggcagcgaggaccaggcagagttcctgtgtgtggtgtccaaggagctccacagcaccccaaacgggctgagctcagagtccagccgcaaaaccaaggttcccgtccgcaccctctcagacctgaggctgagcttgcagtgagggcttctcctcggcccctcgcccgcccccagagctgccatccctgctgttacaagccagaggcacccggatgtgaggccccagatcacctccagggacttggggttcccatctgaaatcctttatttttgtaccatggggtgggccccgggcctgagaaggaagaagcaccctctccccggcctcctctgtctgcacccgtggggctgtgacttactcctgcctccaggggcggggcggggcccccctgggacctcttaaggcccaaggtgggccccaggacctctgggcagagtggactgctcatggcagatgtgtggcaatgtctggctgtgtctctccggcacctgcgtcccctctcccgggctcccctgctgcatggtggatgtgctccttcctggcccggtcacattgcctccttgagccttagtccagggggtcactcctcccaccccacctacctcacagggttgttgtgagggtgcacagaggagcaaagtccctgaaggccctcaggcagtatataggggccgcccaccttcagctgccctgggatgggaaggacccagcccgacccctgggcataacactgtgtttgcaaatggagattcaggtattggggatgcaggttgtggggagctggcctggcagagtaggggtagttggcttggccttctctttggtgatcccacccccagccatttgcattgctggcccagcgcctggcctggggggcggggagaggcagcagaaggggctgggcaggggcggtggaggactcaggaactgcccggggagagtgggtatggcggctgagccaggggccctcctgtgtttgacttcccgggatgggtccttgcttctcagctgtgtccgaccccaccatgtaataaaac

SEQ ID NO: 167971 - DNA, 1502 bp, Homo sapiens
  Payload ID: 13036
  Gene Symbol: KCTD17
  Gene Name: potassium channel tetramerization domain containing 17
  ENST ID: ENST00000610767
  CDS Start-End: 5-667
gaggatgcagacgccgcggccggcgatgaggatggaggccggggaggcagcgccgccggcgggggcgggcggccgcgccgcaggcggctggggcaagtgggtgcggctcaacgtggggggcacggtgttcctgaccacccggcagacgctgtgccgcgagcagaagtccttcctcagccgcctgtgccagggggaagagctgcagtcggaccgggatgagaccggggcctacctcattgaccgtgaccccacctacttcgggcccatcctgaacttcctccggcatggcaagctggtgctggacaaggacatggctgaggagggggtcctggaggaagccgagttctacaacatcggcccgctgatccgcatcatcaaagaccggatggaagagaaggactacacggtcacccaggtcccacccaagcacgtgtaccgcgtgctgcagtgccaggaggaggagctcacgcaaatggtctccaccatgtctgatggctggcgcttcgagcagctggtgaacatcggctcctcctacaactacggcagcgaggaccaggcagagttcctgtgtgtggtgtccaaggagctccacagcaccccaaacgggctgagctcagagtccagccgcaaaaccaagctgttacaagccagaggcacccggatgtgaggccccagatcacctccagggacttggggttcccatctgaaatcctttatttttgtaccatggggtgggccccgggcctgagaaggaagaagcaccctctccccggcctcctctgtctgcacccgtggggctgtgacttactcctgcctccaggggcggggcggggcccccctgggacctcttaaggcccaaggtgggccccaggacctctgggcagagtggactgctcatggcagatgtgtggcaatgtctggctgtgtctctccggcacctgcgtcccctctcccgggctcccctgctgcatggtggatgtgctccttcctggcccggtcacattgcctccttgagccttagtccagggggtcactcctcccaccccacctacctcacagggttgttgtgagggtgcacagaggagcaaagtccctgaaggccctcaggcagtatataggggccgcccaccttcagctgccctgggatgggaaggacccagcccgacccctgggcataacactgtgtttgcaaatggagattcaggtattggggatgcaggttgtggggagctggcctggcagagtaggggtagttggcttggccttctctttggtgatcccacccccagccatttgcattgctggcccagcgcctggcctggggggcggggagaggcagcagaaggggctgggcaggggcggtggaggactcaggaactgcccggggagagtgggtatggcggctgagccaggggccctcctgtgtttgacttcccgggatgggtccttgcttctcagctgtgtccgaccccaccatgtaataaaacccaaaggaacagccc

SEQ ID NO: 167972 - DNA, 2940 bp, Homo sapiens
  Payload ID: 13037
  Gene Symbol: KCTD18
  Gene Name: potassium channel tetramerization domain containing 18
  Uniprot ID: Q6PI47
  ENST ID: ENST00000359878
  CDS Start-End: 512-1792
cgcgtccgccccgcggcgtccggcggccgcgccgagggtctggcgggccgcaggtcagtctgggaagctgccgacccgccccacccccccggtgcggaagagccgggcgcgggatgggccgcgggcccggaaggcggcggggcgccctgaggaagggcacgggccgcgctggtaacgcgcgcgccccgggctgcaggctcgggcttcgggccgatttggggtctccaggccgcggaagaccgtggcggggctttctggctccccagctcctcccggctcttcccgcttcggaagaggagtgtgagccccttgagcgatgtttttcaaagtggggttcgcgggcagatcccgacccctcctcagactttctgaggaactgtgtgctgtggccggagtgtcttcgttttcccaagcgtccctgatggttttgatgcagagggagaccaagacatcattgttttgaagtttctgaaagtgttgggcggcaaaaattcaggtgcctgggggagaaatggaaggccacaaggcagaagaagaggtgctagatgttctccgactgaacgtgggtggctgtatttacacagcccggcgggagtccttgtgccgcttcaaggactccatgttggcatctatgttcagtggtcgctttcctctaaaaacagatgagtcaggggcttgtgttattgaccgtgatggacgtctatttaaataccttttggattaccttcatggagaagttcagattcccacagatgagcaaacccgcatcgccctacaggaagaggctgattactttggcatcccttatccatacagcctgtctgaccatttggccaatgaaatggagacatattctttaaggtcaaatatagaacttaaaaaggctttaacagacttctgtgattcatatggcttagtctgcaataaaccaacagtttgggttctccactatcttaacacatctggtgcaagctgtgagagtagaattattggtgtatatgccacaaaaactgatggaacagacgctattgaaaagcagctgggaggaagaattcacagcaaaggcatttttaaaagagaggcgggaaataatgttcagtacatttggagctattattcagtagcagagttgaagaaaatgatggatgcctttgatgcttgggaaggaaaaggtgttagctactggcgggtgcctcatgagctgatagagtgttggactctagaagaacggcctttacttggaagcctgcgtcacatggctccaattcgaaagaggcgactgataacgttcaatgaagcggacgaaagtgtgaactataagactggtcctaagccagttagatttttgggcccttccacaagtacccaaattaaagtcaagaactcggcctcagtcacggtgtctccagccagtgccatccagacgtcggctggggcgacagcaaaccggtttcaaagtggtagccgcagaaaggcagctcagcgctctgcaccttccagagccacggccctggtgggcacgggggcacctgggcatcctcaggcttcccctggggctgcgagcgctgaaaatggaggcacgcacttacctccagctaaggtgctactctccgacaagaagcctacaccccagcgggtgataaagctgaagaggactccgctgtgcgccaccgcgccttgcctgccctcccccacggccacgaggcaggccaactccctcaagccgcttcccggcgaagctgcccgtgccttgggagtgcggactgagaacgggaagaacaagggaaattgatgaaagtggtggacttgaaatttcccgttcatctcccaaagctttcaacccattcgacgcaaagaagtgacactttcttaatgcagcagaggggaagcttaggtttatgttgaggattctgttcctggaattgtgtgagctaggaatggaggaggggagactttcaatggttaaggctccatttctcattttcccaacttttatatgattgtctatgggcagtttgaatttctggttttcaatttattttttaatgattaattcgtattaaggcaacaagacagtacaacaaataatctctagagaggtccactttgttgctgaagtaaacgttacttgttgcaacccgaggatgggcatgaggtttggccttaggtattcctgtctgggaaaatggagggggtgatattagtggttccctgtactatatcacagccaagagagattagagagagaaaatgtagatcaaggcgagctgcctacaaattactctgtctccaaaggcaacgtgaaaagaaatgatggggaggaaaaaaccccatagattgaattagcactttgactctcacttaattcaacgattttctttcctagattggcttttcttactcttttctgttagtagatttatttataaacaccacaagaagatctcttgggatcagaattatataatatctttgaagtaaattattaaaatatcctatttaatttgaatagtgaagttttgaaaatactttgaaaaagagaagtaaaagtttaactttttaactaaagttagtatttgtttttcagaaatgaccactgaagattcattctgattatacaatatgatttttatgcataaaatttccatgtaacttgaatttaatatttttaaacagaatattttgactaatcctctattttttcatgactattcagttgtgtgtgtttattcgtaaatgttatgttttgtaattggatcacatatttctactttcagtgagagtatgccttcactatgttaaaaaataagctcataaaacagggtactttttattcaaatgcttatcattgtactttcattgctttgaaagagtaaagtaagtatactcaaaacattacgttttacaaaatcaaataaaacttttccataaaaagtggta

SEQ ID NO: 167973 - DNA, 2556 bp, Homo sapiens
  Payload ID: 13037
  Gene Symbol: KCTD18
  Gene Name: potassium channel tetramerization domain containing 18
  Uniprot ID: Q6PI47
  ENST ID: ENST00000409157
  CDS Start-End: 134-1414
acttccgcgtccgccccgcggcgtccggcggccgcgccgagggtctggcgggccgcagagggagaccaagacatcattgttttgaagtttctgaaagtgttgggcggcaaaaattcaggtgcctgggggagaaatggaaggccacaaggcagaagaagaggtgctagatgttctccgactgaacgtgggtggctgtatttacacagcccggcgggagtccttgtgccgcttcaaggactccatgttggcatctatgttcagtggtcgctttcctctaaaaacagatgagtcaggggcttgtgttattgaccgtgatggacgtctatttaaataccttttggattaccttcatggagaagttcagattcccacagatgagcaaacccgcatcgccctacaggaagaggctgattactttggcatcccttatccatacagcctgtctgaccatttggccaatgaaatggagacatattctttaaggtcaaatatagaacttaaaaaggctttaacagacttctgtgattcatatggcttagtctgcaataaaccaacagtttgggttctccactatcttaacacatctggtgcaagctgtgagagtagaattattggtgtatatgccacaaaaactgatggaacagacgctattgaaaagcagctgggaggaagaattcacagcaaaggcatttttaaaagagaggcgggaaataatgttcagtacatttggagctattattcagtagcagagttgaagaaaatgatggatgcctttgatgcttgggaaggaaaaggtgttagctactggcgggtgcctcatgagctgatagagtgttggactctagaagaacggcctttacttggaagcctgcgtcacatggctccaattcgaaagaggcgactgataacgttcaatgaagcggacgaaagtgtgaactataagactggtcctaagccagttagatttttgggcccttccacaagtacccaaattaaagtcaagaactcggcctcagtcacggtgtctccagccagtgccatccagacgtcggctggggcgacagcaaaccggtttcaaagtggtagccgcagaaaggcagctcagcgctctgcaccttccagagccacggccctggtgggcacgggggcacctgggcatcctcaggcttcccctggggctgcgagcgctgaaaatggaggcacgcacttacctccagctaaggtgctactctccgacaagaagcctacaccccagcgggtgataaagctgaagaggactccgctgtgcgccaccgcgccttgcctgccctcccccacggccacgaggcaggccaactccctcaagccgcttcccggcgaagctgcccgtgccttgggagtgcggactgagaacgggaagaacaagggaaattgatgaaagtggtggacttgaaatttcccgttcatctcccaaagctttcaacccattcgacgcaaagaagtgacactttcttaatgcagcagaggggaagcttaggtttatgttgaggattctgttcctggaattgtgtgagctaggaatggaggaggggagactttcaatggttaaggctccatttctcattttcccaacttttatatgattgtctatgggcagtttgaatttctggttttcaatttattttttaatgattaattcgtattaaggcaacaagacagtacaacaaataatctctagagaggtccactttgttgctgaagtaaacgttacttgttgcaacccgaggatgggcatgaggtttggccttaggtattcctgtctgggaaaatggagggggtgatattagtggttccctgtactatatcacagccaagagagattagagagagaaaatgtagatcaaggcgagctgcctacaaattactctgtctccaaaggcaacgtgaaaagaaatgatggggaggaaaaaaccccatagattgaattagcactttgactctcacttaattcaacgattttctttcctagattggcttttcttactcttttctgttagtagatttatttataaacaccacaagaagatctcttgggatcagaattatataatatctttgaagtaaattattaaaatatcctatttaatttgaatagtgaagttttgaaaatactttgaaaaagagaagtaaaagtttaactttttaactaaagttagtatttgtttttcagaaatgaccactgaagattcattctgattatacaatatgatttttatgcataaaatttccatgtaacttgaatttaatatttttaaacagaatattttgactaatcctctattttttcatgactattcagttgtgtgtgtttattcgtaaatgttatgttttgtaattggatcacatatttctactttcagtgagagtatgccttcactatgttaaaaaataagctcataaaacagggtactttttattcaaatgcttatcattgtactttcattgctttgaaagagtaaagtaagtatactcaaaacattacgttttacaaaatcaaataaaacttttccataaaaa

SEQ ID NO: 167974 - DNA, 2958 bp, Homo sapiens
  Payload ID: 13038
  Gene Symbol: KCTD19
  Gene Name: potassium channel tetramerization domain containing 19
  Uniprot ID: Q17RG1
  ENST ID: ENST00000304372
  CDS Start-End: 57-2837
gggaaccgttattggccgggtcacaagcccgcccgcccgctgctggagccgcgaccatggaggagtctggcatggctcatgaatcagcagaggacttgtttcatttcaacgtagggggctggcatttctcagttcccagaagcaaactctctcagtttccagactccctgctgtggaaagaggcttcagccttgacctcttcagaaagccagaggctatttatcgacagagatggttccacatttaggcacgtgcactattacctctacacctccaaactctccttctccagttgtgcagaactgaacttgctgtatgagcaagcattgggtttgcagctgatgcctttgctgcagactctagataacctgaaggaagggaaacaccatctacgcgtacggcctgcagacctacctgttgctgagagagcatctctgaactactggcgtacatggaagtgtattagcaaaccctcagaatttccaattaaaagcccagcctttacaggcctacatgataaggcacctctggggctcatggacacacccctgttagacacagaagaggaggtgcactactgcttcctgcccctagacctggtggccaaatatcccagcctagtgactgaagacaacctgctgtggctggctgagacggtggccctcatcgagtgcgagtgcagcgagttccgcttcattgtgaattttcttcgctcacagaagattttactaccggataatttctccaacattgatgtattagaagcagaagtggaaattctggaaatccctgcactcactgaagccgtaaggtggtaccggatgaacatgggtggctgttccccgaccacctgttctcccctgagccccgggaagggggcccgcacagccagcctggagtccgtgaaaccgctctacacaatggccctgggtctgctggtcaagtacccggactctgcgctgggccagcttcgcatcgagagcacgctagacggaagccgactgtacatcacagggaatggcgtcctctttcagcacgtcaagaactggctggggacttgccggctgcccctgacagagaccatttccgaggtatatgagctctgtgccttcctagacaaaagggacatcacctacgagccaatcaaagttgctttgaagactcatctggagccaaggactttggcacccatggatgtgctcaatgagtggacggcagagatcactgtgtattccccacaacagatcatcaaagtgtatgttggaagccactggtacgcaaccaccctgcagacactgctgaagtatccagaactgctgtccaaccctcagagagtgtactggatcacatatggacaaaccctgctcatccacggggatggccagatgttccgacacattctcaacttcctgagacttggcaaactgtttttaccatctgaatttaaggaatggcccctcttctgccaggaggtggaggaataccacattccatccctctcagaagcccttgcacaatgtgaagcatacaagtcatggactcaggagaaagaatctgaaaatgaagaagctttttccatcaggaggctgcatgtggtgacagaagggccagggtcactggtggagttcagtagagacactaaagaaaccacagcctacatgcctgtggacttcgaagactgcagtgacaggactccatggaacaaggctaagggaaacctggtcaggtccaaccagatggatgaggctgagcagtacactcggcccatccaggtgtccctatgccgaaatgccaagagggctggcaaccctagcacatactcacactgccgtggcttgtgtaccaatcctggacactgggggagccaccctgagagccccccaaagaagaaatgcaccacaatcaacctcacacagaaatctgaaaccaaagaccctcccgccactcccatgcaaaaactcatctccctggtgagagaatgggacatggtcaattgcaaacagtgggaattccagccactgacagccacacggagcagccccttggaggaggccaccctgcagctccccttgggaagcgaggctgcttcccagcccagcacctcagctgcctggaaagcccattccacagcctcagagaaggatccaggaccacaggcaggggctggagctggagcgaaagacaaggggccagagccaaccttcaagccatacttacccccaaaaagagctggcaccctgaaggactggagcaagcagaggaccaaggagagagaaagccctgcccctgagcagcctctgcccgaggccagtgaggtggacagcctaggggttatcctcaaagtgactcacccccccgtggtgggcagcgatggcttctgcatgttctttgaggacagcatcatctataccacggagatggacaacctcaggcacacaacacccacagccagtccccagccccaagaagtgactttcctgagtttctctctgtcctgggaagagatgttttatgcacagaaatgtcactgcttcctggctgacatcatcatggattccatcaggcaaaaggaccccaaagccatcacagccaaggtggtctccctggccaatcggctgtggaccctgcacatcagccccaagcagtttgtggtagatttgctggccatcaccggcttcaaggatgaccggcacacccaggagcgcctgtacagctgggtggagcttacactgcccttcgccaggaaatatggccgatgcatggacctgctcatccagaggggcctgtctaggtctgtctcttactccatcctgggaaagtacctacaagaggactagggtgcccagagatgcagcccctcatgccccacccgccaagtctcattttaattggagatagcccagaatgcatgtgcccatcagagggtacatatcagtctattttttattataaacaaat

SEQ ID NO: 167975 - DNA, 528 bp, Homo sapiens
  Payload ID: 13038
  Gene Symbol: KCTD19
  Gene Name: potassium channel tetramerization domain containing 19
  ENST ID: ENST00000567976
  CDS Start-End: 125-528
ggcgggtgtccccttcttccctcaacgctccacgtgcgtccctcctgaagctgcgtgctcagtcaaagaggacgaccatccccaataaaggaggaccagtcttcagtcaagggaggagtctggcatggctcatgaatcagcagaggacttgtttcatttcaacgtagggggctggcatttctcagttcccagaagcaaactctctcagtttccagactccctgctgtggaaagaggcttcagccttgacctcttcagaaagccagaggctatttatcgacagagatggttccacatttaggcacgtgcactattacctctacacctccaaactctccttctccagttgtgcagaactgaacttgctgtatgagcaagcattgggtttgcagctgatgcctttgctgcagactctagataacctgaaggaagggaaacaccatctacgcgtacggcctgcagacctacctgttgctgagagagcatctctgaactactggcgtacatggaagtgtattagcaaaccctc

SEQ ID NO: 167976 - DNA, 702 bp, Homo sapiens
  Payload ID: 13038
  Gene Symbol: KCTD19
  Gene Name: potassium channel tetramerization domain containing 19
  ENST ID: ENST00000562721
  CDS Start-End: 8-148
cgcgaccatggtacggagcccgctctggcgggggcgccaaaagcaccaaagcggcgaatgggggccgctgtggccaaggattggggctaagtggaggagtctggcatggctcatgaatcagcagaggacttgtttcatttcaacgtagggggctggcatttctcagttcccagaagcaaactctctcagtttccagactccctgctgtggaaagaggcttcagccttgacctcttcagaaagccagaggctatttatcgacagagatggttccacatttaggcacgtgcactattacctctacacctccaaactctccttctccagttgtgcagaactgaacttgctgtatgagcaagcattgggtttgcagctgatgcctttgctgcagactctagataacctgaaggaagggaaacaccatctacgcgtacggcctgcagacctacctgttgctgagagagcatctctgaactactggcgtacatggaagtgtattagcaaaccctcagaatttccaattaaaagcccagcctttacaggcctacatgataaggcacctctggggctcatggacacacccctgttagacacagaagaggaggtgcactactgcttcctgcccctagacctggtggccaaatatcccagcctagtgactgaagacaacctgctgtggctggctgagacggtggccctcatc

SEQ ID NO: 167977 - DNA, 423 bp, Homo sapiens
  Payload ID: 13038
  Gene Symbol: KCTD19
  Gene Name: potassium channel tetramerization domain containing 19
  ENST ID: ENST00000566295
  CDS Start-End: 196-423
aaaaattagccgggtgtggtggcacggcctgtagtcccagctactcgggaggctgaggcaggagaatcgcttgaacccgggaggtggaggttgcagtgaaccgagattgcaccactgcactccagcctgggcgacctgagtgacagagccagaccttgtctcaaaaaaaaaaaaaaaaaaaaggaggagtctggcatggctcatgaatcagcagaggacttgtttcatttcaacgtagggggctggcatttctcagttcccagaagcaaactctctcagtttccagactccctgctgtggaaagaggcttcagccttgacctcttcagaaagccagaggctatttatcgacagagatggttccacatttaggcacgtgcactattacctctacacctccaaactctccttctccagttgtgca

SEQ ID NO: 167978 - DNA, 530 bp, Homo sapiens
  Payload ID: 13038
  Gene Symbol: KCTD19
  Gene Name: potassium channel tetramerization domain containing 19
  ENST ID: ENST00000562841
  CDS Start-End: 1-348
tgcaaacagtgggaattccagccactgacagccacacggagcagccccttggaggaggccaccctgcagctccccttgggaagcgaggctgcttcccagcccagcacctcagctgcctggaaagcccattccacagcctcagagaaggatccaggaccacaggcaggggctggagctggagcgaaagacaaggggccagagccaaccttcaagccatacttacccccaaaaagagctggcaccctgaaggactggagcaagcagaggaccaaggagagagcttacactgcccttcgccaggaaatatggccgatgcatggacctgctcatccagaggggcctgtctaggtctgtctcttactccatcctgggaaagtacctacaagaggactagggtgcccagagatgcagcccctcatgccccacccgccaagtctcattttaattggagatagcccagaatgcatgtgcccatcagagggtacatatcagtctattttttattataaacaaataaaagattaaatcac

SEQ ID NO: 167979 - DNA, 3635 bp, Homo sapiens
  Payload ID: 13039
  Gene Symbol: KCTD2
  Gene Name: potassium channel tetramerization domain containing 2
  Uniprot ID: Q14681
  ENST ID: ENST00000322444
  CDS Start-End: 7-798
tccaagatggcggaactgcagctggacccggcgatggcggggctgggagggggcggcgggagtggggtgggcgacgggggtggcccagtccgcgggccccccagcccacgcccggctggccccacgccccgcgggcacggccgcccggctgccgccgtcgcgcagccgctggagccgggtcccggaccacccgagcgggcagggggcggcggcgcggcccgctgggtcaggctgaacgtgggaggcacctacttcgtgaccaccagacagaccttaggccgggagcccaagtcatttctctgccgcctctgctgccaggaggacccggagctggactcagacaaggatgagacaggagcctatctgattgacagggaccccacctactttggtcctatcctcaactacctccgccacgggaaactcatcatcactaaggagttggcagaagaaggtgtgctggaggaagcggagttttacaacatcgcgtcccttgtgcggctggttaaggaaaggatacgggacaatgagaacagaacttcacaaggccccgtgaagcacgtgtacagagtcctgcagtgtcaggaagaagagctcacgcagatggtgtccacgatgtccgacggctggaaattcgaacagctcatcagcatcggatcttcctataactacggcaatgaggatcaggcagaattcctctgtgttgtctccagagaactaaataattctaccaatggcatcgtcatagagccgagcgaaaaggcgaagattcttcaggagagaggatcgcggatgtaaactaagaccccgaaaactccagaccttcaggagagcagtcagcagagcccctctgtgaagtgaaacctcactcctgtccagtgaccgagccactgcaaagcacagctgatcctggccccctgtgaagaagtgttctggtcaaaactaaaggaactccctccccacctgcaggactccgaagacagtgcgacttctggctgcagaataccttttcagaaacctgctttcatttgcttagccagtattagaacagatctttacaacagcagctgggctgggttcccagtcggagcctttcggggatctgggggatgagggcggaaggcctagctccttggaaatggcctgtactttaaggacgctggagccaagaggattgttcccgtgccgtgccatggtttcaccctatgtgtgccacaatggacgttagcagctgcttcggaacaccgtccctcctatgcaccctccaagacgtgcagcagatgcaaagggttctagctgcagtttgtcgaattgaggttttaggtaaagcatagagttgccagagtaccccgcattcccatgaatagagcctccaaggaaagggaggatggggtgtcctttgttgtggttggaggttggtgatcattgctctggatttggggctcccggctgccaccacatgcagctttgcctcacctttctccagcagccgggaccctctggagagcttgttttccctccaagaagaggtttgagacaggcggcatcctgcactgagtcagacaagtgggagctgtaggaactgcacctgcagcctcttcttactccccattgaccctgtcttccttccctggctttttcaactggaccaaagatgaaggcacttatggaccctttgatggcttggagtggggaaggctgtttctttgaaagttgccaaatgtgttatgttgtgtctcagagagagttatttctgtgactctcttggaaatgccttgactgaatgtgcaatatttgtgtctcttggtttctaaccttggcggacctgctcccctctgtactgtccccagtggtatgtatgtatgtgctaggcagtctggggaccccctgtgtctctgaccacccccctgacccccgccattactttcttttctggagtgccatgctggcgaggatccggatgcggcagcaccctctttcgggctgcatccacagagtttgtgtccacactttctctccgagcatgtgggtctcgctgagcagtcatggaatgcggtagagccaggggaccctgtctgccccgaataactttcagtagtatggcagatggcacagagaaagggaaggggctctggggacttctccttctatgaaagcctcctcgagccaggtgctcctgggcaccttcagaagtgatgtcctgtgtgctccacagctcacctgcttgccaaggtacgtctgggtagtagtttctggaaatgactgcagactgtgccaaatgtcttttgagcttctgacctgaccatgcccagatggcataacttttccctaggaccctcagtctccttgtttctctgtatctgtagcatagcatagaacccggtatacaggggtttctgctgacacatcaacgtctacacacctatgcgccacattttacagctgtaaagtgttagatgaactgccgtcctcagtaaaagcagccaccccttcaagagtcacaggcatccatccagtcgtatctttcagagaaaaaaaaagttagatgtagccaaggaaagtagtgatcacgggaaggactgctctgagccgggtaggatggaggactttggaagaggcgctccttggccaggtccaatgagtaacatcagactgacagaggaaaagcagcttggtttgcggccttgtgcccagtctcgttgaggcgcttgtccctgtctgctttcctggggcatgcctgatcagcgtgggctggagctcctagaccaaccccagctttctcaccaggttcagcaaggaggcctgggggtcagacaccaatgttgagcacctcctgagggcgccgtttccttcattcctcttagattccatagttgccgccatgaaaagactgctcttgagccccaaggcacaggcacgtgctctgggaaatagacaggagtggtatttccgccctctcggagggctggtgttcaccaagtttccctcctcgctgcaacccaatgacacctgtattgttccagcgctccaggactctgggttcttaagatttctgggagcgttgttcacccaccccctttaggaaccaggctggtgttcttgcttgaaagcgttgtgccctctgagtgtctggctgatcacatcagagaggtctgcgtggcagtttggggctgtcacgtgaccagtgacccacactctctgctgcccagtactgccaagtggggagggtcctgcctttttctctgccccaggtctgggacgcaggtgatgccagccaggcccaggagtgcccagcatcccccaactgatgacacagtagcactgattctgtcttttcctcagaatctggcctttttccatggcaatgaggtggggcccagcctcctctaaagtgactttgtttctgcacagttgtaactgctcttggggatgtcagtgaggctgggagcagggagccacgggatgctgagagaggaggcccgagaggacaccccaccctccagcgtggcctttgatccagacttagggacgaggctgtcactggtgggcaccctctgttcctgtttgtgtgtttgaatagtctgaaatgctgtgactttttttgtgtgaataaagatatgaaacttctgaatctc

SEQ ID NO: 167980 - DNA, 3582 bp, Homo sapiens
  Payload ID: 13039
  Gene Symbol: KCTD2
  Gene Name: potassium channel tetramerization domain containing 2
  ENST ID: ENST00000375286
  CDS Start-End: 68-292
tctccctgccgagaaatgggccggcccggctgcgcgcgggcagcagcggtggcggcggcggtccaagatggcggaactgcagctggacccggcgatggcggggctgggagggggcgccgggtcccggaccacccgagcgggcagggggcggcggcgcggcccgctgggtcaggctgaacgtgggaggcacctacttcgtgaccaccagacagaccttaggccgggagcccaagtcatttctctgccgcctctgctgccaggaggacccggagctggactcagacaaggatgagacaggagcctatctgattgacagggaccccacctactttggtcctatcctcaactacctccgccacgggaaactcatcatcactaaggagttggcagaagaaggtgtgctggaggaagcggagttttacaacatcgcgtcccttgtgcggctggttaaggaaaggatacgggacaatgagaacagaacttcacaaggccccgtgaagcacgtgtacagagtcctgcagtgtcaggaagaagagctcacgcagatggtgtccacgatgtccgacggctggaaattcgaacagctcatcagcatcggatcttcctataactacggcaatgaggatcaggcagaattcctctgtgttgtctccagagaactaaataattctaccaatggcatcgtcatagagccgagcgaaaaggcgaagattcttcaggagagaggatcgcggatgtaaactaagaccccgaaaactccagaccttcaggagagcagtcagcagagcccctctgtgaagtgaaacctcactcctgtccagtgaccgagccactgcaaagcacagctgatcctggccccctgtgaagaagtgttctggtcaaaactaaaggaactccctccccacctgcaggactccgaagacagtgcgacttctggctgcagaataccttttcagaaacctgctttcatttgcttagccagtattagaacagatctttacaacagcagctgggctgggttcccagtcggagcctttcggggatctgggggatgagggcggaaggcctagctccttggaaatggcctgtactttaaggacgctggagccaagaggattgttcccgtgccgtgccatggtttcaccctatgtgtgccacaatggacgttagcagctgcttcggaacaccgtccctcctatgcaccctccaagacgtgcagcagatgcaaagggttctagctgcagtttgtcgaattgaggttttaggtaaagcatagagttgccagagtaccccgcattcccatgaatagagcctccaaggaaagggaggatggggtgtcctttgttgtggttggaggttggtgatcattgctctggatttggggctcccggctgccaccacatgcagctttgcctcacctttctccagcagccgggaccctctggagagcttgttttccctccaagaagaggtttgagacaggcggcatcctgcactgagtcagacaagtgggagctgtaggaactgcacctgcagcctcttcttactccccattgaccctgtcttccttccctggctttttcaactggaccaaagatgaaggcacttatggaccctttgatggcttggagtggggaaggctgtttctttgaaagttgccaaatgtgttatgttgtgtctcagagagagttatttctgtgactctcttggaaatgccttgactgaatgtgcaatatttgtgtctcttggtttctaaccttggcggacctgctcccctctgtactgtccccagtggtatgtatgtatgtgctaggcagtctggggaccccctgtgtctctgaccacccccctgacccccgccattactttcttttctggagtgccatgctggcgaggatccggatgcggcagcaccctctttcgggctgcatccacagagtttgtgtccacactttctctccgagcatgtgggtctcgctgagcagtcatggaatgcggtagagccaggggaccctgtctgccccgaataactttcagtagtatggcagatggcacagagaaagggaaggggctctggggacttctccttctatgaaagcctcctcgagccaggtgctcctgggcaccttcagaagtgatgtcctgtgtgctccacagctcacctgcttgccaaggtacgtctgggtagtagtttctggaaatgactgcagactgtgccaaatgtcttttgagcttctgacctgaccatgcccagatggcataacttttccctaggaccctcagtctccttgtttctctgtatctgtagcatagcatagaacccggtatacaggggtttctgctgacacatcaacgtctacacacctatgcgccacattttacagctgtaaagtgttagatgaactgccgtcctcagtaaaagcagccaccccttcaagagtcacaggcatccatccagtcgtatctttcagagaaaaaaaaagttagatgtagccaaggaaagtagtgatcacgggaaggactgctctgagccgggtaggatggaggactttggaagaggcgctccttggccaggtccaatgagtaacatcagactgacagaggaaaagcagcttggtttgcggccttgtgcccagtctcgttgaggcgcttgtccctgtctgctttcctggggcatgcctgatcagcgtgggctggagctcctagaccaaccccagctttctcaccaggttcagcaaggaggcctgggggtcagacaccaatgttgagcacctcctgagggcgccgtttccttcattcctcttagattccatagttgccgccatgaaaagactgctcttgagccccaaggcacaggcacgtgctctgggaaatagacaggagtggtatttccgccctctcggagggctggtgttcaccaagtttccctcctcgctgcaacccaatgacacctgtattgttccagcgctccaggactctgggttcttaagatttctgggagcgttgttcacccaccccctttaggaaccaggctggtgttcttgcttgaaagcgttgtgccctctgagtgtctggctgatcacatcagagaggtctgcgtggcagtttggggctgtcacgtgaccagtgacccacactctctgctgcccagtactgccaagtggggagggtcctgcctttttctctgccccaggtctgggacgcaggtgatgccagccaggcccaggagtgcccagcatcccccaactgatgacacagtagcactgattctgtcttttcctcagaatctggcctttttccatggcaatgaggtggggcccagcctcctctaaagtgactttgtttctgcacagttgtaactgctcttggggatgtcagtgaggctgggagcagggagccacgggatgctgagagaggaggcccgagaggacaccccaccctccagcgtggcctttgatccagacttagggacgaggctgtcactggtgggcaccctctgttcctgtttgtgtgtttgaatagtctgaaatgctgtgactttttttgtgtgaataaagatatgaaacttctgaatctcaagaa

SEQ ID NO: 167981 - DNA, 993 bp, Homo sapiens
  Payload ID: 13039
  Gene Symbol: KCTD2
  Gene Name: potassium channel tetramerization domain containing 2
  ENST ID: ENST00000581589
  CDS Start-End: 583-777
gatgcccaggagagggaatggaaacctggagctgggagtgaggttagagctgtaagatccaagacccagggagacaagaggaccctggggacgaataggaacagctgagcaagggatgctggaatcgaccttggtctctagttcgactcccgtgcaacgtgttgaggaggagccacctcctccaagcgcctaaagccgacccagaaacgcctcccaatccctccacaccgcggctcccgggatccgaagctggggagctgcttctgtccaatcaggctttgcatcccgggacgcttccggttatggcgtcattatgcagccagggatgagacaggagcctatctgattgacagggaccccacctactttggtcctatcctcaactacctccgccacgggaaactcatcatcactaaggagttggcagaagaaggtgtgctggaggaagcggagttttacaacatcgcgtcccttgtgcggctggttaaggaaaggatacgggacaatgagaacagaacttcacaaggccccgtgaagcacgtgtacagagtcctgcagtgtcaggaagaagagctcacgcagatggtgtccacgatgtccgacggctggaaattcgaacagctcatcagcatcggatcttcctataactacggcaatgaggatcaggcagaattcctctgtgttgtctccagagaactaaataattctaccaatggcatcgtcatagagccgagcgaaaaggcgaagattcttcaggagagaggatcgcggatgtaaactaagaccccgaaaactccagaccttcaggagagcagtcagcagagcccctctgtgaagtgaaacctcactcctgtccagtgaccgagccactgcaaagcacagctgatcctggccccctgtgaagaagtgttctggtcaaaactaaaggaactccctccccacctgcaggactccgaagacagtgcgacttctggctgcagaataccttttcag

SEQ ID NO: 167982 - DNA, 1339 bp, Homo sapiens
  Payload ID: 13040
  Gene Symbol: KCTD20
  Gene Name: potassium channel tetramerization domain containing 20
  ENST ID: ENST00000265344
  CDS Start-End: 123-506
ttctggctgcgcggcctgcgcgcgcctcccgggcggattccagccccgagcgggacagcgcggcggggagcgacgagatttctctctgatcaaacggacagttcaggactcagaatctaaggatgaatgttcaccgtggcagtgacagtgacaggttattgcggcaggaggccagctgcttagtggatgatactttagctgtagcccaagaaaaagaagcaaacagcctggcttcatctggtcctcataatcttacttatcctctaggtcccaggaatgaaggatgtttggaccaggaagagagtacaacttcactcggcccaatgagaagggagagtatgagattgctgaaggcatcagtgcaactgtatttcgcacagtgctggattattacaaaaccggtatcatcaattgtcctgatggcatctctatcccagatcttagagatacttgtgattatctctgcattaattttgacttcaacactatccgatgtcaagatctgagtgctttactccatgaactgtctaatgacggtgctcataagcagtttgatcactacctcgaagagctcatcttgcccatcatggtgggctgtgccaagaaaggagaacgagagtgccacattgttgtgctgacggatgaggattctgtggactgggatgaagaccaccctccaccaatgggggaggaatattcccaaattctttatagctccaagctctacagattcttcaaatatattgagaatagggatgttgcaaaaacagtgttaaaggaacggggcctaaaaaacattcgcattggaattgaaggttaccctacctgtaaagaaaaaattaagagaaggcctggcggccggtctgaagtcatctataattatgtacaacgccccttcatccagatgtcatgggaaaaggaagaagggaagagtcgccatgtggatttccagtgtgttcgaagcaaatccctcacgaatctggtagctgctggagatgatgtcttggaggaccaggagatattaatgcatcacccaccccaagtggatgaacttgaccggctaaatgccccactttctcagatggcttctaacgactttcaggattagggccagctgtgggtctactccttgttggagcccatctcacctgggatgcctgcagccagccctccctcgtgatttgtctcaccttgagtaggagacatgcttctcccctaaccttttcctttctgccataattaacatatgtccttttcagtaagtccatgcctctggcaggggatgaagaagtactcactggtaattagctaccatctttgcagcagccctggtaacttg

SEQ ID NO: 167983 - DNA, 5619 bp, Homo sapiens
  Payload ID: 13040
  Gene Symbol: KCTD20
  Gene Name: potassium channel tetramerization domain containing 20
  Uniprot ID: Q7Z5Y7
  ENST ID: ENST00000373731
  CDS Start-End: 392-1651
taacttttccgtctgcaacctttaataattgagagggtatgcgcaactcagaaaagtgcgcccgctgaggttgggtgcagagtggactggaggaaaggcgacacccatttacggtgcggccccggacggggtccccagacacggccttcccggcgtgccacgcgcggaggggactcttaacgtgaagcgctgggtgactcagccgcgtggccgcgcggtccggggcggggggcgcgcgccgctgcggcacagccggtcccggctgcggcttctggctgcgcggcctgcgcgcgcctcccgggcggattccagccccgagcgggacagcgcggcggggagcgacgagatttctctctgatcaaacggacagttcaggactcagaatctaaggatgaatgttcaccgtggcagtgacagtgacaggttattgcggcaggaggccagctgcttagtggatgatactttagctgtagcccaagaaaaagaagcaaacagcctggcttcatctggtcctcataatcttacttatcctctaggtcccaggaatgaagacctctcacttgactatgcctctcagccagcaaatcttcagttccctcacataatgccccttgctgaagacatcaaaggttcttgcttccaaagtgggaataaacggaaccatgaaccttttattgctccagaaagatttggaaacagtagtgtgggctttggcagtaattcccattcccaagcaccagagaaagtgacgcttcttgtagatggcacacgttttgttgtgaatccacagattttcactgctcatccggataccatgctgggaaggatgtttggaccaggaagagagtacaacttcactcggcccaatgagaagggagagtatgagattgctgaaggcatcagtgcaactgtatttcgcacagtgctggattattacaaaaccggtatcatcaattgtcctgatggcatctctatcccagatcttagagatacttgtgattatctctgcattaattttgacttcaacactatccgatgtcaagatctgagtgctttactccatgaactgtctaatgacggtgctcataagcagtttgatcactacctcgaagagctcatcttgcccatcatggtgggctgtgccaagaaaggagaacgagagtgccacattgttgtgctgacggatgaggattctgtggactgggatgaagaccaccctccaccaatgggggaggaatattcccaaattctttatagctccaagctctacagattcttcaaatatattgagaatagggatgttgcaaaaacagtgttaaaggaacggggcctaaaaaacattcgcattggaattgaaggttaccctacctgtaaagaaaaaattaagagaaggcctggcggccggtctgaagtcatctataattatgtacaacgccccttcatccagatgtcatgggaaaaggaagaagggaagagtcgccatgtggatttccagtgtgttcgaagcaaatccctcacgaatctggtagctgctggagatgatgtcttggaggaccaggagatattaatgcatcacccaccccaagtggatgaacttgaccggctaaatgccccactttctcagatggcttctaacgactttcaggattagggccagctgtgggtctactccttgttggagcccatctcacctgggatgcctgcagccagccctccctcgtgatttgtctcaccttgagtaggagacatgcttctcccctaaccttttcctttctgccataattaacatatgtccttttcagtaagtccatgcctctggcaggggatgaagaagtactcactggtaattagctaccatctttgcagcagccctggtaacttgaaaaatttgggtctggtgctgttcattgagtctttgtgtaactgcaaaagcaggaaaggaagtcaagactcctgttgcctcgtgcttagcaaagcagtccttatcctttatactctgttcttgggttttgtttttgtcttgttttataccaggcaaattgcttagtagcaaagggaccaaactgaaaaggtgacaatctctaacttctaaaagcagacaccaatcggatgctcattagaggttaatgaagatgccattcttggtggcctctgcacccaaattgcatctggaaagaactagggtctcattcagaatgtccaaaaggaaattcttaagagcttaaattcagatttgtgtctcattaatgcagtgaacaattcaaaaccacacagattccttggcaggaaggataatggaataacagtgttgatgagacctttttagcttcaaggtttcggagtctaaacaaatggatgattcatttggaatgaaactcacaatgcaagtagaaggacctctccaaatcaggccagttgggttatcctggcttggaatctggtgtgaaaccataggtcttaacactctggagcagcacattgctgtggatatgtccaggagaccttagatatggcttaaaggctttcaagatgaggacagaaattgcttacaattgctcagtttctcaacagaaagactcataagagtgccagcatggggtacatggagtgaagctgggtgggaagcatcatctgcacagtccctgtcctagtgcaggacttttctctgtatgttttcataccatgggatttttggatatcagtgtattttggttcttgaaatagcctaatagctgctcacacattgggtaggaatattataccaatgtcatccccaaaggaagggtgagctgaatggaaattaagcccagtcattttatttgatctattagctctgttatcagtgcatgatcacccagatcaccctcctcagcccacacagtgctgaaccatcttccctcctgttctccatggctattaatagtatagctaaatttagagtgcagagccagatataagtattttggaattatctcccagtttgtggtagaagctgactggaatacaggttgagtatctcttatccaaaatgctagggaccagaaaggtttcagattttttcagattttggaatacttaacagttgagcaccccaaatctgaaaggcttctgaacgtcatgtcagcactcaaaaaagtggattttggagcacttcaaatttcggatttttggatttgggatgctcatcctgtgtaggagaggctactcgattccatttaatgactgtcctagtcataatcatccaaagataaaagccaggtagatgttgaaagctctttccagggctgaaaaagtgttcttacgttctctgcatgtgactagcatcactgtggaaattaatgctctgttcttcactagaatgtagtaagtggttaaactgagctatcccccacctgatgactattggcatccatttgcaaggccaatggcctggattaagggttaggattatttgtagctagaaggtaattttatttctgtgaaactaattggctcatatttgaggttaggtgtggccttgaccttaccagtacatttatacccactaccagttgactagcccagataattgttaaatggtgcttcttttctgcttctcagtagacttccatgccattacaaaggaaatttgaattacctagtgtttgtatattccatgataactatgtataacttctgttacacagcttatgtattgttaacatttaagtgtaaaccatgccacagctaacacttaaaaatgaaaactaattagttcttgcttagggaaaatgccaggtatgaagtatggcatatacttgacactgtcctgtgtaaccctttactttgctcaggctttcaagattgagtcttttttcccccaaattaggttaacatgcatttgaccccaacctgtggggtttgagtaagctggaaatctgtgacggtaggctttctagtgtcacgaggtggtggtgactgaaggaaaagctgggatcacaggttccttctgatggagaggaaggtttatttctatgcccctcccaccaccctccacctagagctcacccaagcctgctccagtcccaggggcaggccattctgcaaaagcaggacctcacagaaacaagggctgggttgaggtcacccccttcagagttggttcctggccagatgggtaagaggcatttgtaattttaaaaatgtgaaacttgggtttggtgttttcttctaagtgcctaaataagcaagccaggctgttgatattttagccagagaaatcggcaagccaagattaacccgaatctgaagtttagaatcttgagtttgcatctgcatcatatcatgctgttttgatgaggaaacatttgccactgaggagttggagggagggcaagacgacagtgttaagtcagatcatttaatggtttcccctaagccctggaaaaatatttgaaagaatggcagcaaaaaggttaagaaagcaagccagatttactgcacaatatgcagtacccagtactactttaaatcccaagagaacagtgtgatgtctaatatatacaggtctatgaaaatactgtggaataagcccaggaaggttagatgtgtttgcaaataagttgcccaaagggtccccctctaagtaaaacaaatattcagaccacaggctttaatgtaaactgtcaaaaagtgggatgtggaggatttttgttaagtgtcaatcgaagttaaaaagcaagggtttttggccaggcgtggtggctcacgcctgtaatcccagcactttgggaggccgaggccggcaaatcacctaaggtcaggagttcgagaccagcctggccaacatggtgaaaccccgtctctactaaaaatacaaaaaaattagcccggtgtggtggcaagtgcctgtagtcccagctacttgggaggctgaggcaggagaactgcttgaacccgggaggtagaggttgcagtgagccacgatcatgccactgcactccagcctgggcaacagagcaagactccatctcaaaaaagaaaaaaaaaaattaaaggttttggctgggtgcagtggctcatgccggtaatcccagcactttgggaggccaaggtgggaggatcacttgaggtcaggagtttcagactggcctgggcaacgtaaaaaattaaaaaaatagccaggcatggacatggtagtgcatacctgtggtcccagccactcaagaggctgagacaggatgattgcttgagcccaggaggatgaggctgcagtgagccatgatgacgctactgcactccagcctggatgacagggcaagaccctgtctcaatattttaagtcaagggtttgtagtaatgtattcagtgccacttcttgccatcactttgcaattattgaaatgggaatactgagctcagaaagcaaatatgatgctttcatgggagatggagccacatttgtgttctgggtgggatcactagtgcaggagaacattacattttcttctgaaggcaaaatgcttgtaggttttgcctctactttgtatttacttttaaaattgcacttgttcacctaccagtgtttacgaaatcctgtatttgggatgctttttctataataaaatattataatttgtg

SEQ ID NO: 167984 - DNA, 4094 bp, Homo sapiens
  Payload ID: 13040
  Gene Symbol: KCTD20
  Gene Name: potassium channel tetramerization domain containing 20
  Uniprot ID: Q7Z5Y7
  ENST ID: ENST00000449081
  CDS Start-End: 131-892
gctgcggcttctggctgcgcggcctgcgcgcgcctcccgggcggattccagccccgagcgggacagcgcggcggggagcgacgagatttctctctgatcaaacggacagttcaggactcagaatctaaggatgaatgttcaccgtggcagtgacagtgacaggttattgcggcaggaggccagctgcttagtggatgatactttagctgtagcccaagaaaaagaagcaaacagcctggcttcatctggtcctcataatcttacttatcctctaggtcccaggaatgaaggtgctttactccatgaactgtctaatgacggtgctcataagcagtttgatcactacctcgaagagctcatcttgcccatcatggtgggctgtgccaagaaaggagaacgagagtgccacattgttgtgctgacggatgaggattctgtggactgggatgaagaccaccctccaccaatgggggaggaatattcccaaattctttatagctccaagctctacagattcttcaaatatattgagaatagggatgttgcaaaaacagtgttaaaggaacggggcctaaaaaacattcgcattggaattgaaggttaccctacctgtaaagaaaaaattaagagaaggcctggcggccggtctgaagtcatctataattatgtacaacgccccttcatccagatgtcatgggaaaaggaagaagggaagagtcgccatgtggatttccagtgtgttcgaagcaaatccctcacgaatctggtagctgctggagatgatgtcttggaggaccaggagatattaatgcatcacccaccccaagtggatgaacttgaccggctaaatgccccactttctcagatggcttctaacgactttcaggattagggccagctgtgggtctactccttgttggagcccatctcacctgggatgcctgcagccagccctccctcgtgatttgtctcaccttgagtaggagacatgcttctcccctaaccttttcctttctgccataattaacatatgtccttttcagtaagtccatgcctctggcaggggatgaagaagtactcactggtaattagctaccatctttgcagcagccctggtaacttgaaaaatttgggtctggtgctgttcattgagtctttgtgtaactgcaaaagcaggaaaggaagtcaagactcctgttgcctcgtgcttagcaaagcagtccttatcctttatactctgttcttgggttttgtttttgtcttgttttataccaggcaaattgcttagtagcaaagggaccaaactgaaaaggtgacaatctctaacttctaaaagcagacaccaatcggatgctcattagaggttaatgaagatgccattcttggtggcctctgcacccaaattgcatctggaaagaactagggtctcattcagaatgtccaaaaggaaattcttaagagcttaaattcagatttgtgtctcattaatgcagtgaacaattcaaaaccacacagattccttggcaggaaggataatggaataacagtgttgatgagacctttttagcttcaaggtttcggagtctaaacaaatggatgattcatttggaatgaaactcacaatgcaagtagaaggacctctccaaatcaggccagttgggttatcctggcttggaatctggtgtgaaaccataggtcttaacactctggagcagcacattgctgtggatatgtccaggagaccttagatatggcttaaaggctttcaagatgaggacagaaattgcttacaattgctcagtttctcaacagaaagactcataagagtgccagcatggggtacatggagtgaagctgggtgggaagcatcatctgcacagtccctgtcctagtgcaggacttttctctgtatgttttcataccatgggatttttggatatcagtgtattttggttcttgaaatagcctaatagctgctcacacattgggtaggaatattataccaatgtcatccccaaaggaagggtgagctgaatggaaattaagcccagtcattttatttgatctattagctctgttatcagtgcatgatcacccagatcaccctcctcagcccacacagtgctgaaccatcttccctcctgttctccatggctattaatagtatagctaaatttagagtgcagagccagatataagtattttggaattatctcccagtttgtggtagaagctgactggaatacaggttgagtatctcttatccaaaatgctagggaccagaaaggtttcagattttttcagattttggaatacttaacagttgagcaccccaaatctgaaaggcttctgaacgtcatgtcagcactcaaaaaagtggattttggagcacttcaaatttcggatttttggatttgggatgctcatcctgtgtaggagaggctactcgattccatttaatgactgtcctagtcataatcatccaaagataaaagccaggtagatgttgaaagctctttccagggctgaaaaagtgttcttacgttctctgcatgtgactagcatcactgtggaaattaatgctctgttcttcactagaatgtagtaagtggttaaactgagctatcccccacctgatgactattggcatccatttgcaaggccaatggcctggattaagggttaggattatttgtagctagaaggtaattttatttctgtgaaactaattggctcatatttgaggttaggtgtggccttgaccttaccagtacatttatacccactaccagttgactagcccagataattgttaaatggtgcttcttttctgcttctcagtagacttccatgccattacaaaggaaatttgaattacctagtgtttgtatattccatgataactatgtataacttctgttacacagcttatgtattgttaacatttaagtgtaaaccatgccacagctaacacttaaaaatgaaaactaattagttcttgcttagggaaaatgccaggtatgaagtatggcatatacttgacactgtcctgtgtaaccctttactttgctcaggctttcaagattgagtcttttttcccccaaattaggttaacatgcatttgaccccaacctgtggggtttgagtaagctggaaatctgtgacggtaggctttctagtgtcacgaggtggtggtgactgaaggaaaagctgggatcacaggttccttctgatggagaggaaggtttatttctatgcccctcccaccaccctccacctagagctcacccaagcctgctccagtcccaggggcaggccattctgcaaaagcaggacctcacagaaacaagggctgggttgaggtcacccccttcagagttggttcctggccagatgggtaagaggcatttgtaattttaaaaatgtgaaacttgggtttggtgttttcttctaagtgcctaaataagcaagccaggctgttgatattttagccagagaaatcggcaagccaagattaacccgaatctgaagtttagaatcttgagtttgcatctgcatcatatcatgctgttttgatgaggaaacatttgccactgaggagttggagggagggcaagacgacagtgttaagtcagatcatttaatggtttcccctaagccctggaaaaatatttgaaagaatggcagcaaaaaggttaagaaagcaagccagatttactgcacaatatgcagtacccagtactactttaaatcccaagagaacagtgtgatgtctaatatatacaggtctatgaaaatactgtggaataagcccaggaaggttagatgtgtttgcaaataagttgcccaaagggtccccctctaagtaaaacaaatattcagaccacaggctttaatgtaaactgtcaaaaagtgggatgtggaggatttttgttaagtgtcaatcgaagttaaaaagcaagggtttttggccaggcgtggtggctcacgcctgtaatcccagcactttgggaggccgaggccggcaaatcacctaaggtcaggagttcgagaccagcctggccaacatggtgaaaccccgtctctactaaaaa

SEQ ID NO: 167985 - DNA, 597 bp, Homo sapiens
  Payload ID: 13040
  Gene Symbol: KCTD20
  Gene Name: potassium channel tetramerization domain containing 20
  ENST ID: ENST00000460983
  CDS Start-End: 337-597
ctggctgcgcggcctgcgcgcgcctcccgggcggattccagccccgagcgggacagcgcggcggggagcgacgagatgaggtgtagtggcaagatttcagctcactgcagctttgacctccgggcttaagcagtcctcccacgtcagccttgcccaagtagttgggactacagatgaagtctcactctgttgcccaagctgcagtgcaatgtcgctatcttggcttactgcaacctccgcttcccgaagcgattctactgccccagcctcctgagtagctgggactacaggatttctctctgatcaaacggacagttcaggactcagaatctaaggatgaatgttcaccgtggcagtgacagtgacaggttattgcggcaggaggccagctgcttagtggatgatactttagctgtagcccaagaaaaagaagcaaacagcctggcttcatctggtcctcataatcttacttatcctctaggtcccaggaatgaagacctctcacttgactatgcctctcagccagcaaatcttcagttccctcacataatgccccttgctgaagacatcaaaggttcttgcttccaaagtgggaat

SEQ ID NO: 167986 - DNA, 547 bp, Homo sapiens
  Payload ID: 13040
  Gene Symbol: KCTD20
  Gene Name: potassium channel tetramerization domain containing 20
  ENST ID: ENST00000498267
  CDS Start-End: 255-547
agccggtcccggctgcggcttctggctgcgcggcctgcgcgcgcctcccgggcggattccagccccgagcgggacagcgcggcggggagcgacgagcctcgggtggttcatcccgccggagaggaatggcgagaacctggagtgttgactggcaaaacatttgcagacgcggtttttctggcaattaattggctccattaaaaattaggatttctctctgatcaaacggacagttcaggactcagaatctaaggatgaatgttcaccgtggcagtgacagtgacaggttattgcggcaggaggccagctgcttagtggatgatactttagctgtagcccaagaaaaagaagcaaacagcctggcttcatctggtcctcataatcttacttatcctctaggtcccaggaatgaagacctctcacttgactatgcctctcagccagcaaatcttcagttccctcacataatgccccttgctgaagacatcaaaggttcttgcttccaaagtgggaataaacggaaccatgaaccttttattgctccaga

SEQ ID NO: 167987 - DNA, 1494 bp, Homo sapiens
  Payload ID: 13040
  Gene Symbol: KCTD20
  Gene Name: potassium channel tetramerization domain containing 20
  ENST ID: ENST00000481911
  CDS Start-End: 138-416
ggtcccggctgcggcttctggctgcgcggcctgcgcgcgcctcccgggcggattccagccccgagcgggacagcgcggcggggagcgacgagatttctctctgatcaaacggacagttcaggactcagaatctaaggatgaatgttcaccgtggcagtgacagtgacaggttattgcggcaggaggccagctgcttagtggatgatactttagctgtagcccaagaaaaagaagcaaacagcctggcttcatctggtcctcataatcttacttatcctctaggtcccaggaatgaaggatgtttggaccaggaagagagtacaacttcactcggcccaatgagaagggagagtatgagattgctgaaggcatcagtgcaactgtatttcgcacagtgctggtgctttactccatgaactgtctaatgacggtgctcataagcagtttgatcactacctcgaagagctcatcttgcccatcatggtgggctgtgccaagaaaggagaacgagagtgccacattgttgtgctgacggatgaggattctgtggactgggatgaagaccaccctccaccaatgggggaggaatattcccaaattctttatagctccaagctctacagattcttcaaatatattgagaatagggatgttgcaaaaacagtgttaaaggaacggggcctaaaaaacattcgcattggaattgaaggttaccctacctgtaaagaaaaaattaagagaaggcctggcggccggtctgaagtcatctataattatgtacaacgccccttcatccagatgtcatgggaaaaggaagaagggaagagtcgccatgtggatttccagtgtgttcgaagcaaatccctcacgaatctggtagctgctggagatgatgtcttggaggaccaggagatattaatgcatcacccaccccaagtggatgaacttgaccggctaaatgccccactttctcagatggcttctaacgactttcaggattagggccagctgtgggtctactccttgttggagcccatctcacctgggatgcctgcagccagccctccctcgtgatttgtctcaccttgagtaggagacatgcttctcccctaaccttttcctttctgccataattaacatatgtccttttcagtaagtccatgcctctggcaggggatgaagaagtactcactggtaattagctaccatctttgcagcagccctggtaacttgaaaaatttgggtctggtgctgttcattgagtctttgtgtaactgcaaaagcaggaaaggaagtcaagactcctgttgcctcgtgcttagcaaagcagtccttatcctttatactctgttcttgggttttgtttttgtcttgttttataccaggcaaattgcttagtagcaaagggaccaaactgaaaaggtgacaatctctaacttctaaaagcagacaccaatcggatgctcattagaggttaatgaagatgccattctt

SEQ ID NO: 167988 - DNA, 578 bp, Homo sapiens
  Payload ID: 13040
  Gene Symbol: KCTD20
  Gene Name: potassium channel tetramerization domain containing 20
  ENST ID: ENST00000483557
  CDS Start-End: 250-578
gctgcggcacagccggtcccggctgcggcttctggctgcgcggcctgcgcgcgcctcccgggcggattccagccccgagcgggacagcgcggcggggagcgacgagtgcaaggaatatgtagagataattccactatcaaagactgtatatacattttccaagatggggagatgatggtgataaaactattttgctgttccaggatttctctctgatcaaacggacagttcaggactcagaatctaaggatgaatgttcaccgtggcagtgacagtgacaggttattgcggcaggaggccagctgcttagtggatgatactttagctgtagcccaagaaaaagaagcaaacagcctggcttcatctggtcctcataatcttacttatcctctaggtcccaggaatgaagacctctcacttgactatgcctctcagccagcaaatcttcagttccctcacataatgccccttgctgaagacatcaaaggttcttgcttccaaagtgggaataaacggaaccatgaaccttttattgctccagaaagatttggaaacagtagtgtgggctttggcagtaa

SEQ ID NO: 167989 - DNA, 5345 bp, Homo sapiens
  Payload ID: 13040
  Gene Symbol: KCTD20
  Gene Name: potassium channel tetramerization domain containing 20
  Uniprot ID: Q7Z5Y7
  ENST ID: ENST00000536244
  CDS Start-End: 553-1377
taacttttccgtctgcaacctttaataattgagagggtatgcgcaactcagaaaagtgcgcccgctgaggttgggtgcagagtggactggaggaaaggcgacacccatttacggtgcggccccggacggggtccccagacacggccttcccggcgtgccacgcgcggaggggactcttaacgtgaagcgctgggtgactcagccgcgtggccgcgcggtccggggcggggggcgcgcgccgctgcggcacagccggtcccggctgcggcttctggctgcgcggcctgcgcgcgcctcccgggcggattccagccccgagcgggacagcgcggcggggagcgacgagatttctctctgatcaaacggacagttcaggactcagaatctaaggatgaatgttcaccgtggcagtgacagtgacaggttattgcggcaggaggccagctgcttagtggatgatactttagctgtagcccaagaaaaagaagcaaacagcctggcttcatctggtcctcataatcttacttatcctctaggtcccaggaatgaaggatgtttggaccaggaagagagtacaacttcactcggcccaatgagaagggagagtatgagattgctgaaggcatcagtgcaactgtatttcgcacagtgctggattattacaaaaccggtatcatcaattgtcctgatggcatctctatcccagatcttagagatacttgtgattatctctgcattaattttgacttcaacactatccgatgtcaagatctgagtgctttactccatgaactgtctaatgacggtgctcataagcagtttgatcactacctcgaagagctcatcttgcccatcatggtgggctgtgccaagaaaggagaacgagagtgccacattgttgtgctgacggatgaggattctgtggactgggatgaagaccaccctccaccaatgggggaggaatattcccaaattctttatagctccaagctctacagattcttcaaatatattgagaatagggatgttgcaaaaacagtgttaaaggaacggggcctaaaaaacattcgcattggaattgaaggttaccctacctgtaaagaaaaaattaagagaaggcctggcggccggtctgaagtcatctataattatgtacaacgccccttcatccagatgtcatgggaaaaggaagaagggaagagtcgccatgtggatttccagtgtgttcgaagcaaatccctcacgaatctggtagctgctggagatgatgtcttggaggaccaggagatattaatgcatcacccaccccaagtggatgaacttgaccggctaaatgccccactttctcagatggcttctaacgactttcaggattagggccagctgtgggtctactccttgttggagcccatctcacctgggatgcctgcagccagccctccctcgtgatttgtctcaccttgagtaggagacatgcttctcccctaaccttttcctttctgccataattaacatatgtccttttcagtaagtccatgcctctggcaggggatgaagaagtactcactggtaattagctaccatctttgcagcagccctggtaacttgaaaaatttgggtctggtgctgttcattgagtctttgtgtaactgcaaaagcaggaaaggaagtcaagactcctgttgcctcgtgcttagcaaagcagtccttatcctttatactctgttcttgggttttgtttttgtcttgttttataccaggcaaattgcttagtagcaaagggaccaaactgaaaaggtgacaatctctaacttctaaaagcagacaccaatcggatgctcattagaggttaatgaagatgccattcttggtggcctctgcacccaaattgcatctggaaagaactagggtctcattcagaatgtccaaaaggaaattcttaagagcttaaattcagatttgtgtctcattaatgcagtgaacaattcaaaaccacacagattccttggcaggaaggataatggaataacagtgttgatgagacctttttagcttcaaggtttcggagtctaaacaaatggatgattcatttggaatgaaactcacaatgcaagtagaaggacctctccaaatcaggccagttgggttatcctggcttggaatctggtgtgaaaccataggtcttaacactctggagcagcacattgctgtggatatgtccaggagaccttagatatggcttaaaggctttcaagatgaggacagaaattgcttacaattgctcagtttctcaacagaaagactcataagagtgccagcatggggtacatggagtgaagctgggtgggaagcatcatctgcacagtccctgtcctagtgcaggacttttctctgtatgttttcataccatgggatttttggatatcagtgtattttggttcttgaaatagcctaatagctgctcacacattgggtaggaatattataccaatgtcatccccaaaggaagggtgagctgaatggaaattaagcccagtcattttatttgatctattagctctgttatcagtgcatgatcacccagatcaccctcctcagcccacacagtgctgaaccatcttccctcctgttctccatggctattaatagtatagctaaatttagagtgcagagccagatataagtattttggaattatctcccagtttgtggtagaagctgactggaatacaggttgagtatctcttatccaaaatgctagggaccagaaaggtttcagattttttcagattttggaatacttaacagttgagcaccccaaatctgaaaggcttctgaacgtcatgtcagcactcaaaaaagtggattttggagcacttcaaatttcggatttttggatttgggatgctcatcctgtgtaggagaggctactcgattccatttaatgactgtcctagtcataatcatccaaagataaaagccaggtagatgttgaaagctctttccagggctgaaaaagtgttcttacgttctctgcatgtgactagcatcactgtggaaattaatgctctgttcttcactagaatgtagtaagtggttaaactgagctatcccccacctgatgactattggcatccatttgcaaggccaatggcctggattaagggttaggattatttgtagctagaaggtaattttatttctgtgaaactaattggctcatatttgaggttaggtgtggccttgaccttaccagtacatttatacccactaccagttgactagcccagataattgttaaatggtgcttcttttctgcttctcagtagacttccatgccattacaaaggaaatttgaattacctagtgtttgtatattccatgataactatgtataacttctgttacacagcttatgtattgttaacatttaagtgtaaaccatgccacagctaacacttaaaaatgaaaactaattagttcttgcttagggaaaatgccaggtatgaagtatggcatatacttgacactgtcctgtgtaaccctttactttgctcaggctttcaagattgagtcttttttcccccaaattaggttaacatgcatttgaccccaacctgtggggtttgagtaagctggaaatctgtgacggtaggctttctagtgtcacgaggtggtggtgactgaaggaaaagctgggatcacaggttccttctgatggagaggaaggtttatttctatgcccctcccaccaccctccacctagagctcacccaagcctgctccagtcccaggggcaggccattctgcaaaagcaggacctcacagaaacaagggctgggttgaggtcacccccttcagagttggttcctggccagatgggtaagaggcatttgtaattttaaaaatgtgaaacttgggtttggtgttttcttctaagtgcctaaataagcaagccaggctgttgatattttagccagagaaatcggcaagccaagattaacccgaatctgaagtttagaatcttgagtttgcatctgcatcatatcatgctgttttgatgaggaaacatttgccactgaggagttggagggagggcaagacgacagtgttaagtcagatcatttaatggtttcccctaagccctggaaaaatatttgaaagaatggcagcaaaaaggttaagaaagcaagccagatttactgcacaatatgcagtacccagtactactttaaatcccaagagaacagtgtgatgtctaatatatacaggtctatgaaaatactgtggaataagcccaggaaggttagatgtgtttgcaaataagttgcccaaagggtccccctctaagtaaaacaaatattcagaccacaggctttaatgtaaactgtcaaaaagtgggatgtggaggatttttgttaagtgtcaatcgaagttaaaaagcaagggtttttggccaggcgtggtggctcacgcctgtaatcccagcactttgggaggccgaggccggcaaatcacctaaggtcaggagttcgagaccagcctggccaacatggtgaaaccccgtctctactaaaaatacaaaaaaattagcccggtgtggtggcaagtgcctgtagtcccagctacttgggaggctgaggcaggagaactgcttgaacccgggaggtagaggttgcagtgagccacgatcatgccactgcactccagcctgggcaacagagcaagactccatctcaaaaaagaaaaaaaaaaattaaaggttttggctgggtgcagtggctcatgccggtaatcccagcactttgggaggccaaggtgggaggatcacttgaggtcaggagtttcagactggcctgggcaacgtaaaaaattaaaaaaatagccaggcatggacatggtagtgcatacctgtggtcccagccactcaagaggctgagacaggatgattgcttgagcccaggaggatgaggctgcagtgagccatgatgacgctactgcactccagcctggatgacagggcaagaccctgtctcaatattttaagtcaagggtttgtagtaatgtattcagtgccacttcttgccatcactttgcaattattgaaatgggaatactgagctcagaaagcaaatatgatgctttcatgggagatggagccacatttgtgttctgggtgggatcactagtgcaggagaacattacattttcttctgaaggcaaaatgcttgtaggttttgcctctactttgtatttacttttaaaattgcacttgttcacctaccagtgtttacgaaatcctgtatttgggatgctttttctataataaaatattataatttgtg

SEQ ID NO: 167990 - DNA, 3585 bp, Homo sapiens
  Payload ID: 13041
  Gene Symbol: KCTD21
  Gene Name: potassium channel tetramerization domain containing 21
  Uniprot ID: Q4G0X4
  ENST ID: ENST00000340067
  CDS Start-End: 280-1062
aaggccagccggccggacaccggcggggacgaggcggggcgcagagcaactcgctgcaatgcctcctgggagatggagttcgctctcgacgcgccgagctgcgaggagcccagagagaactaccagtcccggaaggcagcgcacagaccccggaccgccacgcccctgggctgggctcctaccctccgcccccctcgcaaagctgcgctggccgctcgcggagggagaggctgcagagcgagggcaggaggactacttccagcaacccagtctcctgccatgtccgaccccatcacgctgaacgtcggggggaagctctatacaacctcactggcgaccctgaccagcttccctgactccatgctaggcgccatgttcagcgggaagatgcccaccaagagggacagccagggcaactgcttcattgaccgtgacggcaaagtgttccgctatatcctcaacttcctgcggacctcccaccttgacctgcctgaggacttccaggagatggggctgctccgcagggaggccgacttctaccaggtgcagcccctgattgaggccctgcaggagaaggaagtggagctctccaaggccgagaagaatgccatgctcaacatcacactgaaccagcgtgtgcagacggtccacttcactgtgcgcgaggcaccccagatctacagcctctcctcttccagcatggaggtcttcaacgccaacatcttcagcacctcctgcctcttcctcaagctccttggctctaagctcttctactgctccaatggcaatctctcctccatcaccagccacttgcaggaccccaaccacctgactctggactgggtggccaatgtggagggcctgccagaggaggagtacaccaagcagaacctcaagaggctctgggtggtgcccgccaacaagcagatcaacagcttccaggtcttcgtggaagaggtactgaaaatcgctctgagcgatggcttctgcatcgattcttctcacccacatgctctggattttatgaacaataagattattcgattaatacggtacaggtaaaaggaccccaacaacactggagatggggagtcccaggaagctcatgtcagccaggtcttggagggcatctcgccagtggtgcgaggcaggggactatactaatctgtattaattgtgtagcaggacttgattccccccatgatgaagtccaccttttggaatccagtgtcctctgaacagaaccaccttttttcttgccattttgagctgcagacaggcggtttattatgacaagtgaagagtcagctgatgtgtactaaaggaggccataggaggattttccagccaggacaaaagagcagcagttttctcctgggctccatctctctgtaccgctagccagtgccgcatttatccatctgtaagaaggccctggtggagaggatgggatgagaacaagaggctacctccagttaaccaggacataaagtccccagcggttcctgtcacacctgctcctccctccccagggtgcatccatgatcgtggatgtttgcccaggggtgaccatgtttggctggcttggaatgctgtgcattctcagagctctgttagtgtcccctcttgggggtcagagatgaggtgtggcagggtctagaggaatgagtgtccaggcagagttcagaaggtaggaatgtccctcttgatagggctgaatcaagggattcctggctttagaaagggtctgctatctttgcaaaaatgtgcaagtatctgtagccagtgtaatgaaatcacttccaaatccagcctgttacctgacttttgtcattgttttcccaaaaatttgaggtatcattgaaacaggtcattttaaacaaatctattacggattctcagggttggaaataattcgatgattgcttagtcctcccccacccctagaacaccccagcacatctgaagatgagcgcctctccctgggtacctgcaagtgatcaccttggcctgcttgcataccttggctgataggaagcgcgccatccccaaggcagctcctgctgtggttggacagtgctgactgttagacagttcttccctatattgagccaaaatctgtcctgccacttgctggatcttggttgcagaccttcccattcacccagttatatatctttgctttcaaaatagtcaccttgagagaccagacatttttctgaaaacatcattactcagaattcagattcccctctgggatctgtcttcagaatcaaagttagctcttttctatcccctgtaagtcagtccccttttgttgtagcttcacctcgtttgtgacccccacttcacccaccttccccaccatctgtggctccatatacctttcgaccattttctgctggaagaggaagattcacggcccctgaggagatccagaggaaagagacggtctccaagggtgctgtgcagcaaggagcccaggagtggtatgaaccgtaacagtgcccttagagtaaatgtgcggcccctaagaccctgccctcaggaaggcggccttcccctgcagtcctgtgtcccacccctgggtctctgtagggtgccatccagggcaagcaacccaagcactgcttcccaccgggtgatgagccatgcaggcctccaaactgcacgtcatgattcatccctaaagtgagtttggccttgagagtccccagggtcctcccccactgggcaggggtcctcaaagccaaggaagcctggtgacacaggcacccatgggaggtgggcccagaaaggggcttcccatagataggccctgtgagtagggagcttgtacactgggccatgggcagcgccagttcccttgagcagtaaaggcccttttccccctacggtgggacccaggagtctctctgacagcttttctgccaggcacagtggctcatgcctgtaatcccaacactctgggaggccgaggcgggaagatcacttgaggtcaggagttcaagaccagcctggccaacatggtgaaacgtcgtctctgctaaaaatacaaaaattagctgggtgtggtgacaggcgcctataaccccagctatttgggaggctgaggcagtagaatcgcttgaacccagatagcagaggttgcagtgagctgagagtgtgccattgcagagagactccatcccaaaaaaagacagctgtcccaggccaagggtacttgggagagcccctcatggagaacctagtttagaccaagtagcagaagctgtggtcataacaaaacaatttgaggaagaaatcttacaaatcaccactgccctttctccttttccataaaactgtccatcttttcggtgctccctaatccaagcagcttgactttagagaagttgcagaagcagtgaagccactaacatgctgtgtgactttatgcaagtcactcacctcactgagccacctccatttcttcatctgtgaaataggcataacagtaatacataaccctacctacctcacagggctgttgtgaggatcaaatgaaataatgtaacgtgagaatacagtataaatgataaagga

SEQ ID NO: 167991 - DNA, 558 bp, Homo sapiens
  Payload ID: 13041
  Gene Symbol: KCTD21
  Gene Name: potassium channel tetramerization domain containing 21
  ENST ID: ENST00000529350
  CDS Start-End: 212-558
gcgctggccgctcgcggagggagaggctgcagagcgagggcaggagatgcagaggagaaggaatgaattccagctgagagacctggccgatgcatgggatttgtcttcaaggtccaggcagaggggatggcagatgccaaattgcagaagtcgaagagggcccagtatggttggtctgtaaagactacttccagcaacccagtctcctgccatgtccgaccccatcacgctgaacgtcggggggaagctctatacaacctcactggcgaccctgaccagcttccctgactccatgctaggcgccatgttcagcgggaagatgcccaccaagagggacagccagggcaactgcttcattgaccgtgacggcaaagtgttccgctatatcctcaacttcctgcggacctcccaccttgacctgcctgaggacttccaggagatggggctgctccgcagggaggccgacttctaccaggtgcagcccctgattgaggccctgcaggagaaggaagtggagctctccaaggccgagaagaatgccatgctcaacatcacact

SEQ ID NO: 167992 - DNA, 726 bp, Homo sapiens
  Payload ID: 13041
  Gene Symbol: KCTD21
  Gene Name: potassium channel tetramerization domain containing 21
  ENST ID: ENST00000526208
  CDS Start-End: 231-726
agagcgagggcaggaggtgggtgcggcacggccggggtcgcggggctcggggactaccggcgaggatgcagaggagaaggaatgaattccagctgagagacctggccgatgcatgggatttgtcttcaaggtccaggcagaggggatggcagatgccaaattgcagaagtcgaagagggcccagtatggttggtctgtaaagactacttccagcaacccagtctcctgccatgtccgaccccatcacgctgaacgtcggggggaagctctatacaacctcactggcgaccctgaccagcttccctgactccatgctaggcgccatgttcagcgggaagatgcccaccaagagggacagccagggcaactgcttcattgaccgtgacggcaaagtgttccgctatatcctcaacttcctgcggacctcccaccttgacctgcctgaggacttccaggagatggggctgctccgcagggaggccgacttctaccaggtgcagcccctgattgaggccctgcaggagaaggaagtggagctctccaaggccgagaagaatgccatgctcaacatcacactgaaccagcgtgtgcagacggtccacttcactgtgcgcgaggcaccccagatctacagcctctcctcttccagcatggaggtcttcaacgccaacatcttcagcacctcctgcctcttcctcaagctccttggctctaagctcttctact

SEQ ID NO: 167993 - DNA, 499 bp, Homo sapiens
  Payload ID: 13041
  Gene Symbol: KCTD21
  Gene Name: potassium channel tetramerization domain containing 21
  ENST ID: ENST00000525447
  CDS Start-End: 79-499
tgacagcaaaggacaggccaccaggagccaagagcatcttcatggcaaggactacttccagcaacccagtctcctgccatgtccgaccccatcacgctgaacgtcggggggaagctctatacaacctcactggcgaccctgaccagcttccctgactccatgctaggcgccatgttcagcgggaagatgcccaccaagagggacagccagggcaactgcttcattgaccgtgacggcaaagtgttccgctatatcctcaacttcctgcggacctcccaccttgacctgcctgaggacttccaggagatggggctgctccgcagggaggccgacttctaccaggtgcagcccctgattgaggccctgcaggagaaggaagtggagctctccaaggccgagaagaatgccatgctcaacatcacactgaaccagcgtgtgcagacggtccacttcactgtgcgcgaggcaccccagatctacagcctctcctcttccagca

SEQ ID NO: 167994 - DNA, 538 bp, Homo sapiens
  Payload ID: 13041
  Gene Symbol: KCTD21
  Gene Name: potassium channel tetramerization domain containing 21
  ENST ID: ENST00000528776
  CDS Start-End: 427-538
aaagctgcgctggccgctcgcggagggagaggctgcagagcgagggcaggagacaaatgaccgggagccatgacgtcatcgggggcgcaggaaagcaggtgctctgctgcttttgcaagcagagaaataagagtttgggcacctacccaggggtcccagggaatgccctgtggctcctgacctcccccgcctgtaatgctctgagcacttcagcagtaatgcatggaagagataagggtctgtgacccatggaactgtccaagtcctctctgacacccgcttcttttcctgccgtgaaggctggagttctgtggcgtaatcacggctcactgcagcctcaacctcccagactcaagcgatcctcccacctcagcctcccaagtagttgggactacaggactacttccagcaacccagtctcctgccatgtccgaccccatcacgctgaacgtcggggggaagctctatacaacctcactggcgaccctgaccagcttccctgactccatgctaggcgccatgttcagcgggaagatgc

SEQ ID NO: 167995 - DNA, 559 bp, Homo sapiens
  Payload ID: 13041
  Gene Symbol: KCTD21
  Gene Name: potassium channel tetramerization domain containing 21
  ENST ID: ENST00000530018
  CDS Start-End: 329-543
aaagctgcgctggccgctcgcggagggagaggctgcagagcgagggcaggagacaaatgaccgggagccatgacgtcatcgggggcgcaggaaagcaggtgctctgctgcttttgcaagcagagaaataagagtttgggcacctacccaggggtcccagggaatgccctgtggctcctgacctcccccgcctgtaatgctctgagcacttcagcagtaatgcatggaagagataagggtctgtgacccatggaactgtccaagtcctctctgacacccgcttcttttcctgccgtgaaggactacttccagcaacccagtctcctgccatgtccgaccccatcacgctgaacgtcggggggaagctctatacaacctcactggcgaccctgaccagcttccctgactccatgctaggcgccatgttcagcgggaagatgcccaccaagagggacagccagggcaactgcttcattgaccgtgacggcaaagtgttccgctatatcctcaacttcctgcggacctcccaccttgacctgcctgaggacttccaggagatg

SEQ ID NO: 167996 - DNA, 3931 bp, Homo sapiens
  Payload ID: 13042
  Gene Symbol: KCTD3
  Gene Name: potassium channel tetramerization domain containing 3
  Uniprot ID: Q9Y597
  ENST ID: ENST00000259154
  CDS Start-End: 295-2742
gtcggtggcagcggagcacggagaagaggcccgggcggcccggcggcctggaggccgcgaaaggtggaggccgggccgcccttgtgcaccgcaggattgacccgggaaggggcagaagctagcgagccccgcccggccgccgggaaggtgggggaagccccgtgcaccccccgccctccggccgccgccgccccgctggccctgcagccgtcgccgctgcctcgggctacagccccgggctcggcggtcccggctggggaaggagggcggcgagcgcgtccggagccgccggagatggcgggagggcactgcggcagcttccccgcggcggcggccggcagcggcgagatcgtccaactgaacgtaggggggaccagatttagtacctcaagacaaactcttatgtggattccagattcttttttttccagtttgctgagtgggagaatttcaacacttcgagatgaaactggtgctatatttattgatagagatccagcagcatttgcacccattttaaattttcttcggacaaaagaactagacttaaggggagtgagtattaatgttctcaggcatgaagcagaattttacgggatcactccattagtaagaaggcttctcttatgtgaagaattggagcgttcctcttgtggcagtgtcctttttcatggttacttgcccccaccaggtattcctagtcgtaaaataaacaacacagtcagatctgctgattctaggaatggtctaaattctacagaaggtgaagcccggggaaatggtacacagcctgttctctctggaacgggagaagaaactgttaggctaggatttcctgtggatccacgaaaggtgctaatagtagctggccatcacaactggattgtagctgcatatgcccattttgctgtgtgttacagaatcaaagaatcttcaggatggcagcaagtgtttacgagcccatatttggattggactatcgaacgagtagctttaaatgcaaaggtggttggagggccacatggagacaaagacaaaatggttgctgttgcctcagagagtagcatcatcttgtggagtgttcaggatgggggaagtggaagtgaaattggagtgttcagcctgggtgttcctgtagatgctctcttctttattggtaaccagttggtggccacgagtcatacagggaaagtgggagtgtggaatgctgtcactcagcactggcaggttcaagatgttgttcctataactagttatgacactgctggatcattccttctgcttggatgtaacaatggatcaatatattacatagatatgcagaagttccccttgcgaatgaaagataatgatcttcttgtaactgaactgtatcatgatccttcaaatgatgctattactgctctgagtgtttacctcacacccaaaacaagtgtcagtggtaactggatcgagatcgcctatggtacgagctctggagcagtacgagtgattgtacaacacccagagacagttgggtcaggtcctcagctttttcagactttcacagttcaccgaagtcccgtaacaaaaatcatgctatcagagaagcatcttgtatcagtctgtgcagataataatcatgtccggacgtggacagtaacacgattcagaggaatgatctctactcagccaggttctactcctttagcgtcattcaagatactatccctggaggagacagaaagtcatggtagctattcctctggaaatgacataggaccttttggagagcgagacgatcaacaggtgtttatccagaaagttgttcccatcaccaacaaactatttgtaagactctcatcgactggaaaaagaatatgtgagatccaggctgttgactgtactacaatatcctcatttacagtgagggaatgtgagggatccagtaggatgggctcaagaccaaggcgctacttgttcacaggccatacaaatggcagtattcaaatgtgggatctgaccactgctatggatatggttaacaaaagtgaagataaggatgtaggtggtccaaccgaagaagagctactcaaattactcgatcaatgtgatttgagcacatctcgctgtgctactcctaacatcagtccagcaacttccgtagttcagcatagccacttacgagaatcaaattctagccttcagcttcagcaccatgataccacccatgaagcagctacttacggttccatgaggccttacagagaaagtcctttattagcaagggcaagaaggactgagagctttcacagttatagggacttccagactattaatttgaacagaaatgtagaaagagctgtccctgaaaatggtaacttgggtccaatacaagctgaagtgaaaggggcaacaggggaatgtaatatatctgagagaaagtctcctggagtagaaataaaaagtttgagagaattggatagtggattggaagtgcataaaatagctgaaggtttttcagaatccaagaaaaggtcatcagaagatgaaaatgaaaataaaatagagtttaggaagaaaggaggatttgaagggggaggattccttggaagaaagaaagttccctatctggcgtcatcaccaagtacttccgatggaggaactgactcacctggtactgcgtccccatctcctacaaagactactccatctcctcggcataaaaaaagtgattcttcaggtcaggagtacagcttgtgaaaactcaccaaaatgaatagttgtttcgttacatttagatgaaagttaaactttactgaatttcagtacattagtttttacactaaaactttacaagataaaattggacttcatttagtatctttttaacagaattacttggaataatgagatacaataatcatatctcttttgacattttggaaatttttttaattttacaagtacatttaacagatcatttataaagcaggagtccattttaacacttaccgactttttttggtttggaaacatattaccacgtcttaataggatggtgcccatataggtgagcatccctttagatcatgggaaccagcagactgcattcctaatcttcattatgcctgagacttgtcttacaatgttacctttaagtgaatcacataattgtctttggaacttggtctcccaacacttattgtgattgcaaagtgtttaccagatatttgatgaggtgctatgtttgtgaaaaacatatcatgtaattcaaaaacactattgatattgaataccagataccactatgtagtaagtcttttaggatgattttaatttagtcgtgcgtcattttctgattctcatcattgggagatcttaaatcttagcaagcattagcaatattaaatgccaaaattccattgaaactttcaagttggagcaattgtctgtgtttgaaaagatgaaataaaaataataatcaagggcaaagctttgagtgcccagaagggaaagctgtaccagttgctaacctgtcttgtttcaggagccaccatgtttttttttcagtgttaacaacaatcatgataattaaattaaaacactagtttgttcacttgtaggactgcagttctgaattttgggttaaaggttttggctgctgtaagaatgtgaatttgaatgtattttgaattgtaagagcaaaagaacgtttttgtacaattttttttcatttaattggaatgatcttcaggtttctacaaatagggtaattgtaaatttaaagcattagcatttattggtgaataatgtatatatccccattccaagaaatataagtgagtgaagttgaaataaaatctttaaaatttactatattgccagtggtttcacaacagttctcttgtatttatttatcaattaaatcaaataaaaatgattatgtcaa

SEQ ID NO: 167997 - DNA, 751 bp, Homo sapiens
  Payload ID: 13042
  Gene Symbol: KCTD3
  Gene Name: potassium channel tetramerization domain containing 3
  ENST ID: ENST00000448333
  CDS Start-End: 1-640
atttagtacctcaagacaaactcttatgtggattccagattcttttttttccagtttgctgagtgggagaatttcaacacttcgagatgaaactggtgctatatttattgatagagatccagcagcatttgcacccattttaaattttcttcggacaaaagaactagacttaaggggagtgagtattaatgttctcaggcatgaagcagaattttacgggatcactccattagtaagaaggcttctcttatgtgaagaattggagcgttcctcttgtggcagtgtcctttttcatggttacttgcccccaccaggtattcctagtcgtaaaataaacaacacagtcagatctgctgattctaggaatggtctaaattctacagaaggtgaagcccggggaaatggtacacagcctgttctctctggaacgggagaagaaactgttaggctaggatttcctgtggatccacgaaaggtgctaatagtagctggccatcacaactggattgtagctgcatatgcccattttgctgtgtgttacagagtgttttggctgggcacggtgggtcacgcctgtaatcccagcactttgggaggccgagatgggtggagttcaagatcagcccgaccaacatggtgaaaccccatctctactgaagatacaaaaattagccaggtgtggtgatgcatgcctgtaatcccagctactcgggaggctgaggcaggagaatcacttgaacccaggaggtgg

SEQ ID NO: 167998 - DNA, 589 bp, Homo sapiens
  Payload ID: 13042
  Gene Symbol: KCTD3
  Gene Name: potassium channel tetramerization domain containing 3
  ENST ID: ENST00000452413
  CDS Start-End: 1-505
tgctctgagtgtttacctcacacccaaaacaagtgtcagtggtaactggatcgagatcgcctatggtacgagctctggagcagtacgagtgattgtacaacacccagagacagttgggtcaggtcctcagctttttcagactttcacagttcaccgaagtcccgtaacaaaaatcatgctatcagagaagcatcttgtatcagtctgtgcagataataatcatgtccggacgtggacagtaacacgattcagaggaatgatctctactcagccaggttctactcctttagcgtcattcaagatactatccctggaggagacagaaagtcatggtagctattcctctggaaatgacataggaccttttggagagcgagacgatcaacaggtgtttatccagaaagttgttcccatcaccaacaaactatttgtaagactctcatcgactggaaaaagtctgtgtggtgtcagtttggtttctagatccagccaagagcccacataactaaaagggcatttggagaatatgtgagatccaggctgttgactgtactacaatatcctcatttacagtgagggaatgtgaggg

SEQ ID NO: 167999 - DNA, 1865 bp, Homo sapiens
  Payload ID: 13043
  Gene Symbol: KCTD4
  Gene Name: potassium channel tetramerization domain containing 4
  Uniprot ID: Q8WVF5
  ENST ID: ENST00000379108
  CDS Start-End: 151-930
gcaaaaccgagctgacagcgcaggcgatgctgccagcgtttccattccatcaccaggctggggctgaataaaggcgtgcttgtgtggtagtgtctctttttaaaaaatctcaaagccaagaagaacaagctgaaatagcatcttcaaaaaatggagcgtaaaataaacagaagagaaaaagaaaaggagtatgaagggaaacacaacagcctggaagatactgatcaaggaaagaactgcaaatccacactgatgaccctcaacgttggtggatatttatacattactcaaaaacaaacactgaccaagtacccagacactttccttgaaggtatagtaaatggaaaaatcctctgcccgtttgatgctgatggtcattatttcatagacagggatggtctcctcttcaggcatgtcctaaacttcctacgaaatggagaacttctattgcccgaagggtttcgagaaaatcaacttcttgcacaagaagcagaattctttcagctcaagggactggcagaggaagtgaaatccaggtgggagaaagaacagctaacacccagagagactactttcttggaaataacagataaccacgatcgttcacaaggattaagaatcttctgtaatgctcctgatttcatatcaaaaataaagtctcgcattgttctggtgtccaaaagcaggctggatggatttccagaggagttttcaatatcgtcaaatatcatccaatttaaatacttcataaagtctgaaaatggcactcgacttgtactaaaggaagacaacacctttgtctgtaccttggaaactcttaagtttgaggctatcatgatggctttaaagtgtggctttagactgctgaccagcctggattgttccaaagggtcaattgttcacagcgatgcacttcattttatcaagtaattacctgtgtcacgaacaaaggcaacaagcatgcagccagcaagcttcggaaaaccacagcatcaaagacatcccaaataacatgcccagctagctctgtactacagagccctgctactaatcaattactgtgagctaacggtatgtaaattctatcgctaaagatgtccttcctctggggtgttcctactgatcagactcttccacctaaaatgaaaacagtaaccttctatatactgtaaataaagactgaaagcttttgctatttatttgtccttaagctgtctttcaattcagattgtcttgggtatttgcacaaaaaagaaagcatgtacattatctatcgttcatttaagtaaatggtaataaaatattttaaggggctattaatatttaaaatccttttctactatggcaaaaatctacagagaaactgaactggcaaaattaactacctggagcaaaacagatgtgcagatctaactaaaacagagctatagtgaaacaaaatgagattgtaagaagacattaaagctattgatttgatttttccatagcaagcaccaaaagcttatattcacagttcctgtgtttcatattagacttatagctgaattggtattttgctgaaaattcctagaaaactgcttgatgacaataaaaagtaaataaaagcactgctaccttctttgattgtattaatgattataataaaaagttacaggtcactttaaaagcaaacagtaccacttgatgattttgcataaaattatgcattgatgtcaaccggcaggctacaggaaccctggctggtcctggaagtgacaaaaaccagcaaattcaattctttgcaggctgagttcccacaaagcatgggtaacttagtctcaatagagtatctgttattagaataataaaggagttcattttcagaa

SEQ ID NO: 168000 - DNA, 2482 bp, Homo sapiens
  Payload ID: 13044
  Gene Symbol: KCTD5
  Gene Name: potassium channel tetramerization domain containing 5
  Uniprot ID: Q9NXV2
  ENST ID: ENST00000301738
  CDS Start-End: 75-779
acagaactcagaggacgctattaaaagccggacgcttccggtggaagggagctgttgcggggcttgctgggatcatggcggagaatcactgcgagctcctgtcgccggcccggggcggcatcggggcggggctggggggcggcctgtgccgccgctgcagcgctgggctcggcgccctggcccagcgccctggcagcgtgtccaagtgggtccgactcaacgtcggcggcacctacttcctcaccactcggcagaccctgtgccgggacccgaaatccttcctgtaccgcttatgccaggccgatcccgacctggactcagacaaggatgaaacaggcgcctatttaatcgacagagaccccacctactttgggcctgtgctgaactacctgagacacggcaagctggtgattaacaaagacctcgcggaggaaggagtgttggaggaagcagaattttacaatatcacctcattaataaaacttgtaaaggacaaaattagagaacgagacagcaaaacatcgcaggtgcctgtgaagcatgtgtaccgtgtgctgcagtgccaggaggaggagctcacgcagatggtgtccaccatgtccgacggctggaagttcgagcagttggtcagcatcggctcctcttacaactatgggaacgaagaccaagccgagttcctctgtgtggtgtccaaggagctgcacaacaccccgtacggtacggccagcgagcccagcgagaaggccaagattttgcaagaacgaggctcaaggatgtgagggacacagtattgacagctgaagaaatgatttacgttttcccgagatgtaatgaactgccatgtccaggaagcttggctgtgagaagaaacctgcttttgatcatttttctagagatctgggtgtgaatccttttttgcctctgaggtgggtggtgagagacgggcccagctgtccaaggccagacgtccccaagttgggggagcacggcggccgggtgggcgctgcctcttgggggggcctcgctctgttttttccaagtgccacgtgggactgaggcagacactcccagtcagcccgctcgatcctgaagatcgtgtgaaggaagcgttcttggtgctacacacagtctggaaaagcagcctgggcttcactggcaggaagcggccgcagccgcgtcagtgtccagcacgtcgtggcctctggtccgaccaccaggccctagtctcggtcagggagtctgctctgcctcccaggcgggatcgctggtttctctcgacctcgcagagctcctgacaaaggcggcttctgcgtcgtcactgcttcccggcgccattccgaggccgggccttcttctgacacgggctccaaccccacctgaccaagcccgggacagtcaaggcttctcaatttgtattttccaggcaagagaactttgtaccccttctctgtgtggatagactccccagcgtttttcctctggaaatgcccacagggcttgccgcgtggagactgatctgttccatccgttagcgcgaggtagcagtgtcgcctcgcccctcccactgcgggctcacggggagctggcgtctgtcagtgccttgtcacgcctggcatagaggttgggctggaggcctgtccactggcttctggagctgaaggtctgcgtcacggtgaaaattcgggatgtttacagagcatcacaaatgcctctctctcgccgctctctcattttctttgtataactatgcagccttccctctctttctgggatgtttgggacttcactcgacctgcacgggctctgcccgacatgccgtgggagctgctgggattcctttagaaaccgctgcccgcatgctttgaaaacagacctttctcagctggctgtggggacctgtcagagtctggggactcggcgtgcagggcgggctccaagcgctttgcttccggaactccggcttcccaaggggtactgtgcagactgaccaccggcctcccgcctgcaggtcagaggctctgacactgtctggtttccaatgcttctggagacttcctgcctaggcctcatcctcctctttgccagtcacctgattaaccaattctccagcattaggacttacctccttctttttgtaaggtctcttgtatgttgttaaatgtttggcttaaacaatttataaaagcctttctagaaggcagacttagccccagcagagcctgggaggaaggcggccgctggggctcctgggcatcctctctggggagctgctggccgcttagcgttgtttgatttttgaccttgacatagtagataggcttgtggtttttttaatttaaagatattaagacttaattcactaaaatttattctaaggggatatttatacttttatacttttttaggtatcgtattttatcagcttacagtttaatgcctaagtttcccctggaaatagcaaataaaattgtgtatttatgaa

SEQ ID NO: 168001 - DNA, 774 bp, Homo sapiens
  Payload ID: 13044
  Gene Symbol: KCTD5
  Gene Name: potassium channel tetramerization domain containing 5
  ENST ID: ENST00000564195
  CDS Start-End: 10-750
gctgggatcatggcggagaatcactgcgagctcctgtcgccggcccggggcggcatcggggcggggctggggggcggcctgtgccgccgctgcagcgctgggctcggcgccctggcccagcgccctggcagcgtgtccaagtgggtccgactcaacgtcggcggcacctacttcctcaccactcggcagaccctgtgccgggacccgaaatccttcctgtaccgcttatgccaggccgatcccgacctggactcagacaaggatgaaacaggcgcctatttaatcgacagagaccccacctactttgggcctgtgctgaactacctgagacacggcaagctggtgattaacaaagacctcgcggaggaaggtgcctgtgaagcatgtgtaccgtgtgctgcagtgccaggaggaggagctcacgcagatggtgtccaccatgtccgacggctggaagttcgagcagttggtcagcatcggctcctcttacaactatgggaacgaagaccaagccgagttcctctgtgtggtgtccaaggagctgcacaacaccccgtacggtacggccagcgagcccagcgagaaggccaagattttgcaagaacgaggctcaaggatgtgagggacacagtattgacagctgaagaaatgatttacgttttcccgagatgtaatgaactgccatgtccaggaagcttggctgtgagaagaaacctgcttttgatcatttttctagagatctgggtgtgaatccttttttgcctctgaggtggg

SEQ ID NO: 168002 - DNA, 2425 bp, Homo sapiens
  Payload ID: 13045
  Gene Symbol: KCTD6
  Gene Name: potassium channel tetramerization domain containing 6
  Uniprot ID: Q8NC69
  ENST ID: ENST00000355076
  CDS Start-End: 984-1697
tgtacaaagagaaatacatcattatttaaaagcatcatcttttttttttatattgtaagataaataccattctgatgtatttctcttggaaagggatgctggtatcctgggaggtttatgatttttgatgtttttactcaggtgattggcttgtatagctgaaatgctgatgaaaaggagttttcccttctccctttttcttttcttttctttttttttttttttttgagatggagtctcgcactgttgcaggggctggtgtgcagtggcacagtctcggctcactgcaacctccgcctctcgggttcaagtgatgctcctgcctcagcctcctgaatagctaggattacaggtgcccaccaccacgcccagctaattttttgtatttttagtagagatggggtttcactatgttgggcagtctggtcttgaactcctgacctggtgatcctcctgcctcagcctcccaaagtgctgggattataggcatgagccactgcgcccagcctgtccctttttcttaaatgacctttttggtgaggaccattataggtttgtaccaggataaggttgtagagttaatcataatattctcttatataaattctaaaaattgatgttctaagaagagaggtagaatttgaatgactgggttacttcctagactcttcctccttctcttaagtacagtatagttctttctctgaaaatcttcagtctcttagttccagatgggttctctatggtaagaatacaggacatgtagaaggccctaggggaatgctttcttccccagatctttgccctgtagtaggtttcagctgagcaaggacgagtagtttttctggtgtttggcctcctctgttgggtggaaaaagactttcttctctattttcctagttatatatgctatcatatgtctgtttttctcctcttgaagtttccctgaaacctgggctcttgaagacgcatcactggagcagatggataatggagactggggctatatgatgactgacccagtcacattaaatgtaggtggacacttgtatacaacgtctctcaccacattgacgcgttacccggattccatgcttggagctatgtttgggggggacttccccacagctcgagaccctcaaggcaattactttattgatcgagatggacctcttttccgatatgtcctcaacttcttaagaacttcagaattgaccttaccgttggattttaaggaatttgatctgcttcggaaagaagcagatttttaccagattgagcccttgattcagtgtctcaatgatcctaagcctttgtatcccatggatacttttgaagaagttgtggagctgtctagtactcggaagctttctaagtactccaacccagtggctgtcatcataacgcaactaaccatcaccactaaggtccattccttactagaaggcatctcaaattattttaccaagtggaataagcacatgatggacaccagagactgccaggtttcctttacttttggaccctgtgattatcaccaggaagtttctcttagggtccacctgatggaatacattacaaaacaaggtttcacgatccgcaacacccgggtgcatcacatgagtgagcgggccaatgaaaacacagtggagcacaactggactttctgtaggctagcccggaagacagacgactgatctccgaccctgccacaggttcctggaaagactctccaggaaatggaagatactgatttttttttttaaatcacagtgtgagatattttttttcttttaaatagttgtatttatttgaaggcagtgaggaccagaaggaagttttgtgctttggcagactcctccatgttttgttcccttccccctgagtatgcatgtgcctgttcagagtctccagataccttttttataaaaagaagtctgaaaatcattatggtatataatctacccttaacagagcttttcttattacagtgctaaaatgatttctgataaaatggtccctaactcaactagaaggctaaaaatacaagaatgaaagaataagcagagtactcatgatgcctttgagaaaaatcaaaacatcatgtagggtgacctagtttccaaaccaataaataagtagtattgtaatattaaaggaaaactgttccaatcatttaaaagtacttattaagtactgctttttacagttatgacaactgtttctttctatgcatataaatcaaggaaccaaatatctgtagccatggaaatgtctgactagaaatatttatattgaattctgaatacaaaatgtccctgtggtagaaaacttactctttatgcctggtgcagtataattcccaagtgtactgtctaccagaaaaaaaaaacaaaactaataaaaaatgaaatatgaaaattaa

SEQ ID NO: 168003 - DNA, 1533 bp, Homo sapiens
  Payload ID: 13045
  Gene Symbol: KCTD6
  Gene Name: potassium channel tetramerization domain containing 6
  Uniprot ID: Q8NC69
  ENST ID: ENST00000404589
  CDS Start-End: 100-813
gctctccggccgcgggcatctcccggcccggccgcagcagccgccgccgccgcgcatttccctgaaacctgggctcttgaagacgcatcactggagcagatggataatggagactggggctatatgatgactgacccagtcacattaaatgtaggtggacacttgtatacaacgtctctcaccacattgacgcgttacccggattccatgcttggagctatgtttgggggggacttccccacagctcgagaccctcaaggcaattactttattgatcgagatggacctcttttccgatatgtcctcaacttcttaagaacttcagaattgaccttaccgttggattttaaggaatttgatctgcttcggaaagaagcagatttttaccagattgagcccttgattcagtgtctcaatgatcctaagcctttgtatcccatggatacttttgaagaagttgtggagctgtctagtactcggaagctttctaagtactccaacccagtggctgtcatcataacgcaactaaccatcaccactaaggtccattccttactagaaggcatctcaaattattttaccaagtggaataagcacatgatggacaccagagactgccaggtttcctttacttttggaccctgtgattatcaccaggaagtttctcttagggtccacctgatggaatacattacaaaacaaggtttcacgatccgcaacacccgggtgcatcacatgagtgagcgggccaatgaaaacacagtggagcacaactggactttctgtaggctagcccggaagacagacgactgatctccgaccctgccacaggttcctggaaagactctccaggaaatggaagatactgatttttttttttaaatcacagtgtgagatattttttttcttttaaatagttgtatttatttgaaggcagtgaggaccagaaggaagttttgtgctttggcagactcctccatgttttgttcccttccccctgagtatgcatgtgcctgttcagagtctccagataccttttttataaaaagaagtctgaaaatcattatggtatataatctacccttaacagagcttttcttattacagtgctaaaatgatttctgataaaatggtccctaactcaactagaaggctaaaaatacaagaatgaaagaataagcagagtactcatgatgcctttgagaaaaatcaaaacatcatgtagggtgacctagtttccaaaccaataaataagtagtattgtaatattaaaggaaaactgttccaatcatttaaaagtacttattaagtactgctttttacagttatgacaactgtttctttctatgcatataaatcaaggaaccaaatatctgtagccatggaaatgtctgactagaaatatttatattgaattctgaatacaaaatgtccctgtggtagaaaacttactctttatgcctggtgcagtataattcccaagtgtactgtctaccagaaaaaaaaaacaaaactaataaaaaatgaaatatg

SEQ ID NO: 168004 - DNA, 1759 bp, Homo sapiens
  Payload ID: 13045
  Gene Symbol: KCTD6
  Gene Name: potassium channel tetramerization domain containing 6
  Uniprot ID: Q8NC69
  ENST ID: ENST00000490264
  CDS Start-End: 351-1064
ccggccgcgggcatctcccggcccggccgcagcagccgccgccgccgcgcaaccacatggttgagaaaggagaaagagaaaatgattacttgtagagaaaaatccatttctgcagtggtatggttaaggataatctaaccataatcacattatccttgtatgcctggctacttatgctggcctgtatgtgaatgttaaccccaaagactcctttagatgtcgctgaactagttactataaaaagtatttcgctttcaaactcccacatttcaagaagagcaaaactcaatacaaggcaattttgaagtttccctgaaacctgggctcttgaagacgcatcactggagcagatggataatggagactggggctatatgatgactgacccagtcacattaaatgtaggtggacacttgtatacaacgtctctcaccacattgacgcgttacccggattccatgcttggagctatgtttgggggggacttccccacagctcgagaccctcaaggcaattactttattgatcgagatggacctcttttccgatatgtcctcaacttcttaagaacttcagaattgaccttaccgttggattttaaggaatttgatctgcttcggaaagaagcagatttttaccagattgagcccttgattcagtgtctcaatgatcctaagcctttgtatcccatggatacttttgaagaagttgtggagctgtctagtactcggaagctttctaagtactccaacccagtggctgtcatcataacgcaactaaccatcaccactaaggtccattccttactagaaggcatctcaaattattttaccaagtggaataagcacatgatggacaccagagactgccaggtttcctttacttttggaccctgtgattatcaccaggaagtttctcttagggtccacctgatggaatacattacaaaacaaggtttcacgatccgcaacacccgggtgcatcacatgagtgagcgggccaatgaaaacacagtggagcacaactggactttctgtaggctagcccggaagacagacgactgatctccgaccctgccacaggttcctggaaagactctccaggaaatggaagatactgatttttttttttaaatcacagtgtgagatattttttttcttttaaatagttgtatttatttgaaggcagtgaggaccagaaggaagttttgtgctttggcagactcctccatgttttgttcccttccccctgagtatgcatgtgcctgttcagagtctccagataccttttttataaaaagaagtctgaaaatcattatggtatataatctacccttaacagagcttttcttattacagtgctaaaatgatttctgataaaatggtccctaactcaactagaaggctaaaaatacaagaatgaaagaataagcagagtactcatgatgcctttgagaaaaatcaaaacatcatgtagggtgacctagtttccaaaccaataaataagtagtattgtaatattaaaggaaaactgttccaatcatttaaaagtacttattaagtactgctttttacagttatgacaactgtttctttctatgcatataaatcaaggaaccaaatatctgtagccatggaaatgtctgactagaaatatttatattgaattctgaatacaaaatgtccctgtggtagaaaacttactctttatgcctggtgcagtataattcccaagtgtactgtctaccagaaaaaaaaaa

SEQ ID NO: 168005 - DNA, 564 bp, Homo sapiens
  Payload ID: 13045
  Gene Symbol: KCTD6
  Gene Name: potassium channel tetramerization domain containing 6
  ENST ID: ENST00000479179
  CDS Start-End: 538-564
ctacaggacctccctgggaacctgttctctttccttgtcctgatgtgttactcttataggccaatttttgcctttgtgttgtgcctaaatggtgtaattaccccgttttgggaaggtggtattatcccgttttatcttgcggaaactgagggttaagaggaatgttatgattttgtgactatttgtgacagctttttaatattaggtcacttttaaacctatagcttctctcttctagaccacatggttgagaaaggagaaagagaaaatgattacttgtagagaaaaatccatttctgcagtggtatggttaaggataatctaaccataatcacattatccttgtatgcctggctacttatgctggcctgtatgtgaatgttaaccccaaagactcctttagatgtcgctgaactagttactataaaaagtatttcgctttcaaactcccacatttcaagaagagcaaaactcaatacaaggcaattttgaagtttccctgaaacctgggctcttgaagacgcatcactggagcagatggataatggagactggggctatatg

SEQ ID NO: 168006 - DNA, 408 bp, Homo sapiens
  Payload ID: 13045
  Gene Symbol: KCTD6
  Gene Name: potassium channel tetramerization domain containing 6
  ENST ID: ENST00000491093
  CDS Start-End: 187-408
gcagcagccgccgccgccgcgcatttccctgaaacctgggctcttgaagacgcatcactggagcagatggataatggagactggggctatatgagatggggtcttgccatgttgcccaggctggtcttgaactcctgagctcaggcaatctgcctgccccggcctcccaaagtgctaggattacagatgactgacccagtcacattaaatgtaggtggacacttgtatacaacgtctctcaccacattgacgcgttacccggattccatgcttggagctatgtttgggggggacttccccacagctcgagaccctcaaggcaattactttattgatcgagatggacctcttttccgatatgtcctcaacttcttaagaacttcagaattgaccttaccgttggatttt

SEQ ID NO: 168007 - DNA, 4873 bp, Homo sapiens
  Payload ID: 13046
  Gene Symbol: KCTD7
  Gene Name: potassium channel tetramerization domain containing 7
  Uniprot ID: Q96MP8
  ENST ID: ENST00000275532
  CDS Start-End: 185-1054
agctgggcgcgagcgggtcggcgttgagggagccaccgccctcccgcctgcgcactgcctctcgcccccctccggccagcccgcagccggccgcgtcatgccaggcgctgctcggcggtagggagtgcccggggccgccgcctccgcccgcccgaagccgcgcccactgcccagagccagagggatggtggtagtcacggggcgggagccagacagccgtcgtcaggacggtgccatgtccagctctgacgccgaagacgactttctggagccggccacgccgacggccacgcaggcggggcacgcgctgcccctgctgccacaggagtttcctgaggttgttccccttaacatcggaggggctcacttcactacacgcctgtccacactgcggtgctacgaagacaccatgttggcagccatgttcagtgggcggcactacatccccacggactccgagggccggtacttcatcgaccgagatggcacacactttggagatgtgctgaatttcctgcgctcaggggacctcccacccagggagcgtgttcgagctgtgtacaaagaggcccagtactatgccatcgggcccctcctggagcagctggagaacatgcagccactgaagggcgagaaggtgcgccaagcgtttctgggactcatgccctattacaaagaccacttggagcggattgtggagatcgcccggctgcgtgcggtccagcggaaggcccgctttgccaagctcaaggtctgtgtcttcaaggaggagatgcccatcaccccctatgagtgtccgctcctcaactccctgcgatttgagcggagtgagagtgacgggcagctttttgagcaccactgtgaagtggatgtgtcttttgggccctgggaggctgtggctgatgtttatgacctgctgcactgcctggtcacggacctctcggcccagggtctcaccgtggaccaccagtgcatcggggtgtgtgacaagcacctcgtgaaccactactactgcaagcgccccatctatgagttcaagatcacatggtggtgagtagccccggtaggcgagagtcccatcagggaggatgtccaccttgcttggtggctctgggagtaagatccctgaaggggctgctgactgccccagaatctgccgaggtgagaacagcatcctgaggcacagctcccaggggacagaggtgtagctccaatctccctgactgcacctcagggttgggctcagggcttgcggcctgcaggcactccagccagcgctcacctggcctttcctcaaggcatggtagtctttccttgaggctgatagctagggcttgaccaggaagtcccgagaagttttgtcaccttcttgaccttgcaagagagtttctgcccattttagagccacgttaccaaatcgatgtaggcctaatcacttcctcaaccctgttcaagcgtccctcccttgtgctcagtatattggtgtgaacacggaacatgatgggggatttacctgaccagccaccccatagcccctggctgaagaagaaagagcatcttctctcccactgcaccccttctcctccaagaatagttgcccacattcccaaaatgtggaaagacttttcttttccttccggaacatgttcttcaccaccttttggagatttaaccatagctgccaaagctatgcacccagttggccttagaaaaccacaatgtttacagccctgtcttagggccgcggcttctcttatcttccaccaccttccttgcttgcagggttatcttctcacagggctggaatgcaaatttcagaggcttcttttgaagattccccaagtcaagcaggcaagatgcctagatcttctgttatctttgacatgtaacatcctttttagaggctcagaacacctccttggctgctatctcatgtgttagaatccagtttgtggtgaacctctttggaaggggaccccctctctttaaaccctgttcctctgtcctggtaacattctccttctaggagagcctctcttctgagaaggtaaaggaagggctgggtgagacacacagctatcctaggagccgtaggaagacaaaacttcccttttgttttactcctcactcctctatttttgttttactcacttctttatattttgttttactcctcactcctgtatattttggtttacttactcctctatttcagaaattgaaaaagatccccaaggatctgttactactgcatttccttcttgctctgtctacagcctaggccaactagtcagggtctggacatgcatctcctaaaggaagaactgtgtagcaccattgatcacaatgtaacatttccatgctgcattaagggtgtctctctctaatcatgattgtacctgtctcttcctgggtaaagggagatttttttttttaatgtgtaaagaattgatgcgagccaggaacatgtctgtagtcccagctacttgggcacacgcctgtagtccaggccactcgagcacacacctgtagtaccagctactctggaggctgaggcaggaggatcacttgagcccaggagattaagactgtagtatactatgatcgtgcctgtggctagccactgtgctccagcctgggcaacaccatcgtaaaaataaataaataaataaataaattggggaggacagcctcactggtatcagacttacaggaccagatagacaagatgggtataaggggagctgaagtctgtgttcatatgaggaagagaagaccaagccctgggactttggctgaattcctccgtggggctggacggcagtgatctcctgttccctatgtgtaaacaaagattccagggcgtggttttgcactcctgttgtactcttttagaggtggaaaagaggtggatactgagatctaagaggaaaggatagtcattcacgttctgagatatgcgctctctctattgttctcgtacacaaagggatagtctcttttctggagctgatgtccctgcttggaggttagccccaaaacatggctcttgtattgttctaagagaaaaggctttcattttggttcttctgattggtgttacctactgcctaatatgtgttcattttttgacagagaggcagactattgaaaaagtctgtgtgaacagagagcagttcattaagcccattgctttcagtaatgtggccttgaccccttctgcttcccccttctcccatggagcatggcagggcttggttatttagagtccatacatgcaagccattgagagacttgtttgctcaaatgcaagtttgctcaaaaacaggtcctgaaggcttgcttaggattacagggatgctgggtaagaacaccgttcctctctctcgctggagaaatccctgtttctctgactccctttgtgatcctcacagtaatgtattctgtgccactgtaggacacaaggctctgggccagtagaacaggcagagaggtgacactgggcagcaagctgagagctctttctaaatggagtgaaggaattcagtggcctagtttcgccattctctaatgagaaaccaaggccaggctgaaaagtgcaattagatgtggtggattgtggtaacggcctccagataaaggggttatccctgtggaagtgacttttccccatttgatcccttttcaactctaaatggccaggcccagaacagaagaagggttgggtctggaaggaaggctccaaaggatgaaagcttctccctgatcataaggaagtgcatctttatagaattgttgtgcataatgtcagtaaatccctctcacttgacaagggactggattcatcttgccttgagacgggccagtagttatcagtgagtcaaagcaaagtgaaagtttcaggagatgggaccaatggtgcaatgctcgccataacaaaattccttaaaaataaaaaagctaatgttatagcaacaaaaaaagactgaagcaaaaccacactgaaatgcatcccactccaggagaggaattcttagcgtaacactctaaataaatggaaggaatcatcaccttccttattttacctctgccttgttcaccaggctgcccagtgcttaccatgcagaaagcagtcagctgtactctggaagtttctgttcttctttcctggggcttaggatattctgggagctgtctgagccttgtgcctaaggcttatcaggtgatataatcttcctgttctgggctgcttgctggaggaataggaagtgacatttataagacacaggcggtgtgagcatccatgtgtggtcttggtctaaaccagctcttgaacaggttaaagcaaacagcaataacaaaacaaaaactactgatgctgagcgttttgatcctagtaatatttcaaatattgtccttctgcatatgttctatccatatttgattccaatatacattattaagctttcttgggtactattttgctggggctcttgcgtgaaggtggtacctgtctcatgatccttaaaagagagaggcttttttcatccaaagctgtagtgttgggaactggggtgggagaggcactttttggaattctgaaagaatcatatctgtgtatatacatactgagtggggaaggatgggggttggcaggggttgagggaggtgggaacaaacagtgagtatgggaacaggcagtcacctcgagtgtgggaggtcacctgggtccgtcgtcttccttctgtatggtgttgggtttatgtacacactataacacttcctgtgtgagttcatgtacctgtctgtgagtgctttggtgtattgagcctcagtacactccaagggcattaaagtcaagaactagaacctg

SEQ ID NO: 168008 - DNA, 504 bp, Homo sapiens
  Payload ID: 13046
  Gene Symbol: KCTD7
  Gene Name: potassium channel tetramerization domain containing 7
  ENST ID: ENST00000449064
  CDS Start-End: 108-504
agcccgcagccggccgcgtcatgccaggcgctgctcggcggtagggagtgcccggggccgccgcctccgcccgcccgaagccgcgcccactgcccagagccagagggatggtggtagtcacggggcgggagccagacagccgtcgtcaggacggtgccatgtccagctctgacgccgaagacgactttctggagccggccacgccgacggccacgcaggcggggcacgcgctgcccctgctgccacaggagagatgtgctgaatttcctgcgctcaggggacctcccacccagggagcgtgttcgagctgtgtacaaagaggcccagtactatgccatcgggcccctcctggagcagctggagaacatgcagccactgaagggcgagaaggtgcgccaagcgtttctgggactcatgccctattacaaagaccacttggagcggattgtggagatcgcccggctgcgtgcggtccagcggaaggcccgctttgccaagctcaag

SEQ ID NO: 168009 - DNA, 1160 bp, Homo sapiens
  Payload ID: 13046
  Gene Symbol: KCTD7
  Gene Name: potassium channel tetramerization domain containing 7
  Uniprot ID: Q96MP8
  ENST ID: ENST00000443322
  CDS Start-End: 123-989
cgcccccctccggccagcccgcagccggccgcgtcatgccaggcgctgctcggcggtagggagtgcccggggccgccgcctccgcccgcccgaagccgcgcccactgcccagagccagagggatggtggtagtcacggggcgggagccagacagccgtcgtcaggacggtgccatgtccagctctgacgccgaagacgactttctggagccggccacgccgacggccacgcaggcggggcacgcgctgcccctgctgccacaggagtttcctgaggttgttccccttaacatcggaggggctcacttcactacacgcctgtccacactgcggtgctacgaagacaccatgttggcagccatgttcagtgggcggcactacatccccacggactccgagggccggtacttcatcgaccgagatggcacacactttggagatgtgctgaatttcctgcgctcaggggacctcccacccagggagcgtgttcgagctgtgtacaaagaggcccagtactatgccatcgggcccctcctggagcagctggagaacatgcagccactgaagggcgagaaggtgcgccaagcgtttctgggactcatgccctattacaaagaccacttggagcggattgtggagatcgcccggctgcgtgcggtccagcggaaggcccgctttgccaagctcaaggtctgtgtcttcaaggaggagatgcccatcaccccctatgagtgtccgctcctcaactccctgcgatttgagcggagtgagagtgacgggcagctttttgagcaccactgtgaagtggatgtgtcttttgggccctgggaggctgtggctgatgtttatgacctgctgcactgcctggtcacggacctctcggcccagggtctcaccgtggaccaccagtgcatcggggtgtgtgacaagcacctcgtgaaccactactactgcaagcgccccatctatgagttcaagatcacatggtgaaattgaaaaagatccccaaggatctgttactactgcatttccttcttgctctgtctacagcctaggccaactagtcagggtctggacatgcatctcctaaaggaagaactgtgtagcaccattgatcacaatgtaacatttccatgctgcattaagggtgtctctctctaa

SEQ ID NO: 168010 - DNA, 4137 bp, Homo sapiens
  Payload ID: 13046
  Gene Symbol: KCTD7
  Gene Name: potassium channel tetramerization domain containing 7
  ENST ID: ENST00000503687
  CDS Start-End: 108-806
agcccgcagccggccgcgtcatgccaggcgctgctcggcggtagggagtgcccggggccgccgcctccgcccgcccgaagccgcgcccactgcccagagccagagggatggtggtagtcacggggcgggagccagacagccgtcgtcaggacggtgccatgtccagctctgacgccgaagacgactttctggagccggccacgccgacggccacgcaggcggggcacgcgctgcccctgctgccacaggagagatgtgctgaatttcctgcgctcaggggacctcccacccagggagcgtgttcgagctgtgtacaaagaggcccagtactatgccatcgggcccctcctggagcagctggagaacatgcagccactgaagggcgagaaggtgcgccaagcgtttctgggactcatgccctattacaaagaccacttggagcggattgtggagatcgcccggctgcgtgcggtccagcggaaggcccgctttgccaagctcaagtggttagcaggaagaagatgagccttaagtctgaacgccgaggaattcatgtggatcaatcggatctcctgtgcaagaaaggatgtggttactacggcaaccctgcctggcagggtttctgctccaagtgctggagggaagagtaccacaaagccaggcagaagcagattcaggaggactgggagctggcggagcgggtcttgctctgttaccctggctggagtgcaatggtgcaatttcaacttactgcaacctctgcttcctgggctcaagtgatcctcctgcttcagcctcccaagtagctaggactacagaaactccagcgggaggaagaagaggcctttgccagcagtcagagcagccaaggggcccaatccctcacattctccaagtttgaagaaaagaaaaccaacgagaagacccgcaaggttaccacagtgaagaaattcttcagtgcatcttccagggtcggatcaaagaaggaaattcaggaagcaaaagctcccagtccttccataaaccggcaaaccagcattgaaacggatagagtgtctaaggagttcatagaatttctcaagaccttccacaagacaggccaagaaatctataaacagaccaagctgtttttggaaggaatgcattacaaaagggatctaagcattgaagaacagtcagagtgtgctcaggatttctaccacaatgtggccgaaaggatgcaaactcgtgggaaagagaggagatttcaccatgttggccaggctggtcttgaactcctgacctcaggcgatccacctgcctcagcctcccaaagtgctgggaatacaggagtagagccaccgcacccagctgtgcctccagaaagagtcgagaagataatggatcagattgaaaagtacatcatgactcgtctctataaatatgtattctgtccagaaactactgatgatgagaagaaagatcttgccattcaaaagagaatcagagccctgcgctgggttacgcctcagatgctgtgtgtccctgttaatgaagacatcccagaagtgtctgatatggtggtgaaggcgatcacagatatcattgaaatggattccaagcgtgtgcctcgagacaagctggcctgcatcaccaagtgcagcaagcacatcttcaatgccatcaagatcaccaagaatgagccggcgtcagcggatgacttcctccccaccctcatctacattgttttgaagggcaaccccccacgccttcagtctaatatccagtatatcacgcgcttctgcaatccaagccgactgatgactggagaggatggctactatttcaccaatctgtgctgtgctgtggctttcattgagaagctagacgcccagtctttgaatctaagtcaggaggattttgatcgctacatgtctggccagacctctcccaggaagcaagaagctgagagttggtctcctgatgcttgcttaggcgtcaagcaaatgtataagaacttggatctcttgtctcagttgaatgaacgacaagaaaggatcatgaatgaagccaagaaactggaaaaagacctcatagattggacagatggaattgcaagagaagttcaagacatcgttgagaaatacccactggaaattaagcctccgaatcaaccgttagcagctattgactctgaaaacgttgaaaatgataaacttcctccaccactgcaacctcaagtttatgcaggatgatcacaatttagtggagagtatttatttgagcctaaattgtaggtagcccttactacactcaactgattgggatctagaatgtaactaaattgcttataaatgtcagcattttttaaaggtacagtatatggggattgtttcgtttttcctagcaggggaaccttagttaataataaaatactacttatttgagttactgatacagattcatttaaggcttgtgtgcaaattttgtctcaatcttttttccctccatgattttcctatgtgcttcctctggcattcactgtggttttggtaaataattgccttttaaaggattaaacaaatgaatgctacaaagtgtatgttcaagaaaattaaatggtaccactcttccacagtttggaataattttataattgtaaagatagaaattatattgataagtaaatatgtaaaattgtaaatatgtaaaaaaaagaatggtgtctgctgtgcatggcattttatatgttaattttttagtttaaaatgaagtatattgaatgtttgcctttagcaccattttatttggtttgtcccactaaaatgactcgagaagtgtttagacaaactccccttaagatgtgcactccatctttaagaacgtgttagccttaactttgaggttctatatagtcagagactatgacaccactaaggttcagaataaagtttaggccacataaaattgctgtttaatgtagtcgatggaagactttaaactatgcttctagcttatttttccctcattcattcagcaaatctctattgagttcttcagtgagaaggagcaggcactgggcctggaatggaaggcgggaatgaatgggcctctgatggtgagaggtgacggggtccctcagctgtgagatgcaaggggcgccttgcagcctccataatatacatttgactttgcaaacgtctagacatgttttctgaacctttttcaggacatttcaacctcgggactattcatattagtggcctgagaggtgtttgttgtggggccaccctgtgcatggtagaatgttcagcagcattcctgccatccatatccattaggtgccagtagcacccccgctagagctgtgaaaaattctctccagacatagtcagatgtctcctggggccatatcacccctccgttaagaaccactgatgtcttttacaaaccaggagttatcctcctggtggttaatatggtgtaaccaaagaatcttgcactcaatgcacagtgtgatgttaactaaaacgagttaaatatttaggaggcttgacagctacctgcattgtagaaccttttcttatctcagtggaaccttctataacctaaatataccattgatgattcttcttccattcagtgacatccacagattatgcagctatacttgtgaaatcgtgcatgaggccccagggcaccgttctagaacaacgtcacttcacacaggcagctgagaaaggttctcttgcttttccagtatcttcctaaggatggagcccaaaattgcagagcagtaactttggaataaaaccagggtgggtataaaacttcttattcttaaatttacatataagatctattaagcttgacacatctgtgtcatcacgcactgaagacaggaagcagttcactgagtcagctggttcccaagctcgcacagaaggtgataagttactatcaaatgccagtgagaatcttcttatagaataacctgggcccaagtgattttagtacaaaacttgcccttctttggtttaattttctatgtgcttttaggtgtgaatccagatatgcggtcttaattcctttggaaatacacagttcgtttagttactgtacactctgtttgttcaataaactgcatatcaacttccc

SEQ ID NO: 168011 - DNA, 2587 bp, Homo sapiens
  Payload ID: 13047
  Gene Symbol: KCTD8
  Gene Name: potassium channel tetramerization domain containing 8
  Uniprot ID: Q6ZWB6
  ENST ID: ENST00000360029
  CDS Start-End: 285-1706
acttccccgccctcgccccaaaggagcagcagctccttcttgcctctccattgccgccgccgcaccggcggagctcctctctcgcgcgtctctcctccgatggagctcgggcgccgccgacgccgccgctgccccgaaccctgagcggggccgccccggtcggaggaacgcgccgcccagtccgagggcgcagagcgccaggagcacgcggagggctggggcgcgggctccgggaacgagaaagtgcagctctctcgggtcactgggccggcggcggggggactatggctctgaaggacacgggcagcggcggcagcaccatcctgcccattagcgagatggtttcctcgtccagctcgcccggcgcgtcggccgccgccgccccggggccctgcgcaccctcgcccttccctgaagtagtggagctgaacgtaggcggccaggtttatgtgaccaagcactcgacgctgctcagcgtcccggacagtactttggccagcatgttctcgccctctagtccccgtggcggcgcccggcgccggggcgagctgcccagggacagccgggcgcgcttcttcatcgaccgggacggcttccttttcaggtacgtgctggattatctgcgggacaagcaactcgcgctgccggagcacttccccgagaaggagcggctgctgcgcgaggccgagtatttccagctcaccgacttggtcaagctgctgtcgcccaaggtcaccaagcagaactctctcaacgacgagggctgccagagcgacctggaggacaacgtctcgcagggtagcagcgacgcgctgctgctgcgcggggcggcggccgccgtgccctcgggcccgggagcgcacggtggtggcggcggcggcggcgcgcaggacaagcgctcgggcttcctcacgctgggctaccggggctcctacaccaccgtgcgcgacaaccaggccgacgccaaattccggcgtgtggcgcgcatcatggtgtgcgggcgcatcgcgctggccaaggaggtcttcggggacacgctcaacgagagccgcgaccccgaccggcagccggagaagtacacgtcccgcttctacctcaagttcacctacttggagcaggcctttgatcgcctgtccgaggccggcttccacatggtggcgtgtaactcctcgggcaccgccgccttcgtcaaccagtaccgcgacgacaagatctggagcagctacaccgagtacattttcttccgaccacctcagaaaatagtatcacctaaacaagaacatgaagataggaaacatgacaaagtcactgataaaggaagtgaaagtgggacttcctgtaatgagctctccacttccagttgtgacagccattcagaggcaagcactccccaggacaacccatccagtgcccagcaggcaacagctcaccaacctaacactttaacattggatcgcccctctaaaaaagcacctgtacaatggatacccccaccagacaaacgcagaaacagtgaactctttcagaccctcatcagcaagtcccgggaaacaaatctgtccaaaaagaaagtctgtgagaagctaagtgtggaagaagaaatgaaaaagtgtattcaggattttaaaaaaatccacattccagattattttccagagcgcaaacgccaatggcaatctgaactgttgcagaagtatgggttatagtaattgtcacattcctgcagtattttgatgacattcaatgtttactacagtgtcaccacctgactgatgtcctaacaatggtcagtgtgattcttgctgctcttccttgttgtgaacagtggatgtgggacagtattttcttttatgttttagttgttgttctttttagaaacatgattaaaaaggaaaaaatattaaatcaataagtgttaaatcaaaatggaatatctgattcaaaccattttacaagaatgaaagtaaaatgtgcatgatcaagcttagtatcttggtttttgaactctggtcaactggatatgtttgtcattttgtaacttaccaaaaacaaaccatcatatcataccaactaaaatgatatatggatgaagcaacatcaagtaaaattttagacgatggctataggacccaaatctaaagctgtctaaatgttaattcaatgaaacaagtattatttttgcatgaatacaatgttacaaataaatcacaagaaatagggaagatctgtttgttgcttggaaagaaaaaaattacaaaaaaaagcaaaaaaaaatgttttagacaaagcctataaatgtaagctgtctaggagattgaattttctttgttctggatctgtgacttttttgtgtatgtgtatggtgtttatgtatattaagatggtgtaaatatgccttatactgttatttatggcatcaacattcatttactaatgctagtcatgattattactgtgaaatgagtcttacatcgggctgtgaaaattggtataatgatgctttgaaagatcctattatcatgttaatcaaaataatagagggaaatggtaaagagctttatgtatttattaaaaaaagaaaaatgta

SEQ ID NO: 168012 - DNA, 464 bp, Homo sapiens
  Payload ID: 13047
  Gene Symbol: KCTD8
  Gene Name: potassium channel tetramerization domain containing 8
  ENST ID: ENST00000515268
  CDS Start-End: 1-464
agtaccgcgacgacaagatctggagcagctacaccgagtacattttcttccgttctctgacgatgtctttgtgctcaatcttacgtttgaatatatggctatttatgattgcttgccagatcaagcatgaatcaagatgcagaaccagggccagatgcttggcagcaggaccacctcagaaaatagtatcacctaaacaagaacatgaagataggaaacatgacaaagtcactgataaaggaagtgaaagtgggacttcctgtaatgagctctccacttccagttgtgacagccattcagaggcaagcactccccaggacaacccatccagtgcccagcaggcaacagctcaccaacctaacactttaacattggatcgcccctctaaaaaagcacctgtacaatggatacccccaccagacaaacgcagaaacagtgaactctttcagaccctcatcagcaag

SEQ ID NO: 168013 - DNA, 3401 bp, Homo sapiens
  Payload ID: 13048
  Gene Symbol: KCTD9
  Gene Name: potassium channel tetramerization domain containing 9
  Uniprot ID: Q7L273
  ENST ID: ENST00000221200
  CDS Start-End: 222-1391
ggcaggctgaggagcctaggggcggggtgggaaggaggaccggccgaaccttgggtgtgggacagagtgcgtgcgtgtggtgtgtccccaagggcaggaaggtggcgaagggaggcgaatccgagtgggtggagggaggggaagggcgggaggagaaaaaggtgggaggaggaccaggtgggagggtggcggctcactcaggacccagcgggggcagcgcgatgaggcgggtgaccctgttcctgaacggcagccccaagaacggaaaggtggttgctgtatatggaactttatctgatttgctttctgtggccagcagtaaactcggcataaaagccaccagtgtgtataatgggaaaggtggactgattgatgatattgctttgatcagggatgatgatgttttgtttgtttgtgaaggagagccatttattgatcctcagacagattctaagcctcctgagggattgttaggattccacacagactggctgacattaaatgttggagggcggtactttacaactacacggagcactttagtgaataaagaacctgacagtatgctggcccacatgtttaaggacaaaggtgtctggggaaataagcaagatcatagaggagctttcttaattgaccgaagtcctgagtacttcgaacccattttgaactacttgcgtcatggacagctcattgtaaatgatggcattaatttattgggtgtgttagaagaagcaagattttttggtattgactcattgattgaacacctagaagtggcaataaagaattctcaaccaccggaggatcattcaccaatatcccgaaaggaatttgtccgatttttgctagcaactccaaccaagtcagaactgcgatgccagggtttgaacttcagtggtgctgatctttctcgtttggaccttcgatacattaacttcaaaatggccaatttaagccgctgtaatcttgcacatgcaaatctttgctgtgcaaatcttgaacgagctgatctctctggatcagtgcttgactgtgcgaatctccagggagtcaagatgctctgttctaatgcagaaggagcatccctgaaactgtgtaattttgaggatccttctggtcttaaagccaatttagaaggtgctaatctgaaaggtgtggatatggaaggaagtcagatgacaggaattaacctgagagtggctaccttaaaaaatgcaaagttgaagaactgtaacctcagaggagcaactctggcaggaactgatttagagaattgtgatctgtctgggtgtgatcttcaagaagccaacctgagagggtccaacgtgaagggagctatatttgaagagatgctgacaccactacacatgtcacaaagtgtcagatgagaattttaggggctggaggaagatgtaaaagatgaaaatgttttccttatcacttttctttctccacccactcagttgtctagaagaaataacactgtaaggaaatttaaaaaaaaaacatttagaggattatgcttgttttgagtggtgcataagggaaaaaactgactttttttccatattctgatttttaacagaaaagcactcatttaatagatgtagggaaactagatattgctgccttttgaatggggtaggggggtttacctggttttatgaccaggcatagtatctattatatttgcttttaaataggcatgatgtggaaataccatcttggtttgagatgcatttgaggattttaatttatggaaagcacaacatatgcaattatatttattgaattcctagatgcagtatggatatttaaattgttaaaactttatgaaaacttggaaaaggttgttcaggtttataaatagctttagtgatgcctcccctctttaaatacctgtcacaccgtatgaatatggtgagatcagactccctaagactcttttcaggttcatttttataatgtttactttttaggacagaacagtagctaaattaaagtaatatccagttcttactgattgagacagagtggaaagaaagacatcattgtacatcactgtcattccaaaggtacagtgtaactctggatggaggaataacttacctatcactacaacacttacaaatgagaatttctcagaatttcattctaggcaagttccactcaacaccagatcaagcaattctatctatttacactattagcctagttttctcatacagtcatcacaagcataggaagatacttcaaaaccaaaaaaaccaaggtgcatcattaatattcatttaattcaaataccaaatagtttacatagggccagcttagaaatagatactaaatccagagctactgcaatcaaagcttatatgagtgaatatggtagagttgcctgctaaaaggcaatgtaatataattgcagctagaaccctacagtggggaatgaggaattttaaacacacatttgattacagccaccaaaaaaatagacgtaaaaataaaggcatttggctggtccaagatgtaattatcaatcagtcagcacctgtgattcttttacttatttttttgtggttttttttttttaaacaaattttagcccaattttcttgagtcattctctctctgcagcagcagaggaagggcctgtacctccctaccaatgacttggtgtccttattttctaccccaagagcagggatattagctgtgtccaaatgggttctgaattctacagactcatcaacatgaggcaaggaatcattgaaaaccacctgtgtctcctttgggagaatgacatatctttagtatttacgtagcttattcttctatatctacatatgcaaagctttccttaacagtaaagggtacatatgcatagtgggaggagatcagacctttacaagtgaaggaaagcaacttcagaaatgaattattttctttgctttattatttttaccaagacagagaagtattgtattgagagataatctattttcataatcaatatgtgcctaaattatatttaaatcatttcactctgtactatattttcaggaattacagaatgtggtattcattcacttaaaggtacctctgtagaaataacctaaaactgcagaaggatctgaaagatctaaacatggtgtgcttagaaactgcagattttagatctaatgtatactgcattaataaatgatataaagtgtttgttgaaaaggagtttcttctcttccttttgaaaatcatcactttctgtattttgcttacatttcttcaatatgtgttgacaaccagccctgtggttctgggtagcaaaggaaatacagtataacttaatttgttatggattagtctttttgaaagtaccattaaagtaaatttatttctttaaa

SEQ ID NO: 168014 - DNA, 2128 bp, Homo sapiens
  Payload ID: 13048
  Gene Symbol: KCTD9
  Gene Name: potassium channel tetramerization domain containing 9
  ENST ID: ENST00000519665
  CDS Start-End: 231-404
agggccccaggcaggctgaggagcctaggggcggggtgggaaggaggaccggccgaaccttgggtgtgggacagagtgcgtgcgtgtggtgtgtccccaagggcaggaaggtggcgaagggaggcgaatccgagtgggtggagggaggggaagggcgggaggagaaaaaggtgggaggaggaccaggtgggagggtggcggctcactcaggacccagcgggggcagcgcgatgaggcgggtgaccctgttcctgaacggcagccccaagaacggaaaggtggttgctgtatatggaactttatctgatttgctttctgtggccagcagtaaactcggcataaaagccaccagtgtgtataatgggaaaggtggactgattgatgatattgctttgatcaggtaaccttcacctttttataagctgtcaacagtgtgcctcaacttcttgatcctcagacagattctaagcctcctgagggattgttaggattccacacagactggctgacattaaatgttggagggcggtactttacaactacacgcgttactcctaccaggttgtagcatgcatctttttgagagagcagctgggatcgagtatactcttgacttaaatatgtttgtttataaagacaaatggagaaatcaatttttttccctgaattcttaggagcactttagtgaataaagaacctgacagtatgctggcccacatgtttaaggacaaaggtgtctggggaaataagcaagatcatagaggagctttcttaattgaccgaagtcctgagtacttcgaacccattttgaactacttgcgtcatggacagctcattgtaaatgatggcattaatttattgggtgtgttagaagaagcaagattttttggtattgactcattgattgaacacctagaagtggcaataaagaattctcaaccaccggaggatcattcaccaatatcccgaaaggaatttgtccgatttttgctagcaactccaaccaagtcagaactgcgatgccagggtttgaacttcagtggtgctgatctttctcgtttggaccttcgatacattaacttcaaaatggccaatttaagccgctgtaatcttgcacatgcaaatctttgctgtgcaaatcttgaacgagctgatctctctggatcagtgcttgactgtgcgaatctccagggagtcaagatgctctgttctaatgcagaaggagcatccctgaaactgtgtaattttgaggatccttctggtcttaaagccaatttagaaggtgctaatctgaaaggtgtggatatggaaggaagtcagatgacaggaattaacctgagagtggctaccttaaaaaatgcaaagttgaagaactgtaacctcagaggagcaactctggcaggaactgatttagagaattgtgatctgtctgggtgtgatcttcaagaagccaacctgagagggtccaacgtgaagggagctatatttgaagagatgctgacaccactacacatgtcacaaagtgtcagatgagaattttaggggctggaggaagatgtaaaagatgaaaatgttttccttatcacttttctttctccacccactcagttgtctagaagaaataacactgtaaggaaatttaaaaaaaaaacatttagaggattatgcttgttttgagtggtgcataagggaaaaaactgactttttttccatattctgatttttaacagaaaagcactcatttaatagatgtagggaaactagatattgctgccttttgaatggggtaggggggtttacctggttttatgaccaggcatagtatctattatatttgcttttaaataggcatgatgtggaaataccatcttggtttgagatgcatttgaggattttaatttatggaaagcacaacatatgcaattatatttattgaattcctagatgcagtatggatatttaaattgttaaaactttatgaaaacttggaaaaggttgttcaggtttataaatagctttagtgatgcctcccctctttaaatacctgtcacaccgtatgaatatggtgagatcagactccctaagactcttttcaggttcatttttataatgtttactttttaggaca

SEQ ID NO: 168015 - DNA, 840 bp, Homo sapiens
  Payload ID: 13048
  Gene Symbol: KCTD9
  Gene Name: potassium channel tetramerization domain containing 9
  ENST ID: ENST00000523140
  CDS Start-End: 142-330
tgtgtccccaagggcaggaaggtggcgaagggaggcgaatccgagtgggtggagggaggggaagggcgggaggagaaaaaggtgggaggaggaccaggtgggagggtggcggctcactcaggacccagcgggggcagcgcgatgaggcgggtgaccctgttcctgaacggcagccccaagaacggaaaggtggttgctgtatatggaactttatctgatttgctttctgtggccagcagtaaactcggcataaaagccaccagtgtgtataatgggaaaggtggactgattgatgatattgctttgatcagatcctcagacagattctaagcctcctgagggattgttaggattccacacagactggctgacattaaatgttggagggcggtactttacaactacacggagcactttagtgaataaagaacctgacagtatgctggcccacatgtttaaggacaaaggtgtctggggaaataagcaagatcatagaggagctttcttaattgaccgaagtcctgagtacttcgaacccattttgaactacttgcgtcatggacagctcattgtaaatgatggcattaatttattgggtgtgttagaagaagcaagattttttggtattgactcattgattgaacacctagaagtggcaataaagaattctcaaccaccggaggatcattcaccaatatcccgaaaggaatttgtccgatttttgctagcaactccaaccaagtcagaactgcgatgccagggtttgaacttcagtggtgctgatctttctcgtttggaccttcgatacattaacttcaaaatggccaatttaagccgctg

SEQ ID NO: 168016 - DNA, 3625 bp, Homo sapiens
  Payload ID: 13049
  Gene Symbol: KCNN1
  Gene Name: potassium channel, calcium activated intermediate/small conductance subfamily N alpha, member 1
  Uniprot ID: Q92952
  ENST ID: ENST00000222249
  CDS Start-End: 320-1951
gaggaacacggtggtctgagctggagccacgctttctgttggagggggcagctgaaggagaacagcaagacatatccggcggccctacggactcggagagctggagggaccccggagatctcaaagggacaggaaaggcagcagcagccaccctctctcccagtcaagtggtcaccagcaggactgaaggggacagcccctttgcagtggctcggcgaggagacccctgcaccctagggtcagtgcaggagcccagccgctgagccatgccgggccccgggcggcctgcagcgagcccaacccctgcacccaggtagtcatgaacagccacagctacaatggcagcgtggggcggccgctgggcagcgggccgggcgccctgggacgagaccctccggaccctgaggccggccaccccccacaacccccgcacagcccgggcctccaggtggtagtggccaagagtgagccagcccggccctcacccggcagcccccgggggcagccccaggaccaggacgatgacgaggatgatgaggaagatgaggccggcaggcagagagcctcggggaaaccctcaaatgtgggccaccgcctgggccaccggcgggcgctcttcgagaagcggaagcgcctcagcgactatgccctcattttcggcatgtttggcatcgtcgtcatggtgacggagaccgagctgtcctggggggtgtacaccaaggagtctctgtactcattcgcactcaaatgcctcatcagcctctccacggccatcctgctgggtctcgttgtcctctaccatgcccgggagatccagctgttcatggtggacaacggggctgatgactggcgcatcgccatgacctgcgagcgcgtgttcctcatctcgctagagctggcagtgtgcgccattcacccggtgcccggccactaccgcttcacgtggacggcgcggctggccttcacgtacgcgccctcggtggccgaggccgacgtggacgtgctgctgtccatccccatgttcctgcgcctctacctgctgggccgggtgatgctactgcacagcaaaatcttcacggacgcctcgagccgcagcatcggggccctcaacaagatcaccttcaacacgcgcttcgtcatgaagacactcatgaccatctgccccggcaccgtgctgctggtcttcagcatctcctcctggatcatcgcagcctggaccgtgcgcgtctgcgagaggtaccacgacaagcaggaagtgaccagcaacttcctgggggccatgtggctgatttccatcaccttcctctccattggctacggcgacatggtgccccacacctactgcgggaagggtgtgtgcctgctcactggcatcatgggagctggctgtaccgcgctcgtggtggctgtggtggctcggaagctggagctcaccaaggctgagaagcacgtgcacaacttcatgatggacactcagctcaccaagcgggtaaaaaacgccgctgctaacgttctcagggagacgtggctcatctacaaacataccaggctggtgaagaagccagaccaagcccgggttcggaaacaccagcgtaagttcctccaagccatccatcaggctcagaagctccggagtgtgaagatcgagcaagggaagctgaacgaccaggctaacacgcttaccgacctagccaagacccagaccgtcatgtacgaccttgtatcggagctgcacgctcagcacgaggagctggaggcccgcctggccaccctggaaagccgcttggatgcgctgggtgcctctctacaggccctgcctggcctcatcgcccaagccatacgcccacccccgcctcccctgcctcccaggcccggccccggcccccaagaccaggcagcccggagctccccctgccggtggacgcccgtggccccctcggactgcgggtgacggccctgcccgccaccagacccctaaatcttggccatcgtgtggccgccacctccgggaagccttgtacagtggcgcctcttggagttcaagaagccaacgctgagtcaggctgagtggactgaggcctgccccgcccagactgcccaggcagagggcagggctggaccatgggtgagggcaggggagcccggagcttcctctggtcacctggtcccccgactctccccaggcccccggtgggcatggagcagcccggggaggggtccgtgctggttctgaataaagcaggacccgcctagtggctgcctgtgtgcatggctggaaggcactggtgatgtcccaggaggtagacctccagccctgggtaccaagatgaatgtgggaatcagaaaaacctgttcccatcaccggcctagcctagaatcctagcctagaagccctctctccctctgggctggagctcagtgagggacaactctctagggacacctgtaccagccccacctggcgctgagatccctcagacagcatggcccagccctggccagaagcatcgctccccttcaaccaaccgcgttgatggacacccactgtgtgccaggccccagcggggcccatgggggaggtgacctgggtgaggaaggtcatttgggtttttgtgagatttgtattgagcacctgctgtctacagagaatgtgatgatgtcaattaccacactgattcctcatcagaacttgaccatggtgggatgggggggaaactgaggcccagagaggtgaatctacctacctgggaccacactgcgaggaaggatggtgcattcaaactggaaatcccctaggccaaagtaaagaaccggactggctgggcacagtggctcacacctgtaatcccagcactttgggagggtaaagcgggcggatcacctgaggtcaggagttcaagaccagcctgggcaacatggtgaaaccctgtctctactaaaaatataaaaattagctgggtgtggtggtgcacgcctgtaatcccagctacttgggaggctgaggcaggataatcgcttgaacccaggaggtggaggttgcagtgagaaaaaacctggacttggtggaagggactccatggaggagccatggggacgtcaggaggaggggttatttggtgacatccaggggtcagagagacccttcaggggtgggctacaggggagggttccagacacaagtagaatcagaaaggtccctggaggccatgggcttgggtgctgggagcaacaggcatttacttggcagatgctgagccctgggtggggcgaggaggcctggctcctggggagacgacgctgtgcatagccgaggagccccaggtcctggcagcctctgataaggccatccatcgcctggctcaacgagataactaggccgtggctggtgcatgaatgaccagcttgggcccacgcacgagaagggtatgaggaggtgctggtcagacccgggttcgagtcctgactctgccactgctgggtgactctgagcagtggctgcccctctggggccttggttgtttcatctgtaaaatggggtgacagtctatttaaccagaactccctaaaaagggccaggcaactggtaggtgctcaataaatgctccttcccgcctgagggatcaca

SEQ ID NO: 168017 - DNA, 499 bp, Homo sapiens
  Payload ID: 13049
  Gene Symbol: KCNN1
  Gene Name: potassium channel, calcium activated intermediate/small conductance subfamily N alpha, member 1
  ENST ID: ENST00000609922
  CDS Start-End: 26-499
gggcccgtggactgggcggcgggggatgcgcctgccgccgccgcccccggccccgccgcccccgggccccgcgcccgctcgctgctgcccgccccgtccgcgaccccggctccggctcccgactgggggtccgcggccgcgcgggaccctctcccctccagccttgtccgcccgctcgggccgagccccgcaggtcagtgcaggagcccagccgctgagccatgccgggccccgggcggcctgcagcgagcccaacccctgcacccaggtagtcatgaacagccacagctacaatggcagcgtggggcggccgctgggcagcgggccgggcgccctgggacgagaccctccggaccctgaggccggccaccccccacaacccccgcacagcccgggcctccaggtggtagtggccaagagtgagccagcccggccctcacccggcagcccccgggggcagccccaggaccaggacgatgacgaggatgatgaggaagat

SEQ ID NO: 168018 - DNA, 1691 bp, Homo sapiens
  Payload ID: 13049
  Gene Symbol: KCNN1
  Gene Name: potassium channel, calcium activated intermediate/small conductance subfamily N alpha, member 1
  ENST ID: ENST00000615435
  CDS Start-End: 21-1652
acccctgcacccaggtagtcatgaacagccacagctacaatggcagcgtggggcggccgctgggcagcgggccgggcgccctgggacgagaccctccggaccctgaggccggccaccccccacaacccccgcacagcccgggcctccaggtggtagtggccaagagtgagccagcccggccctcacccggcagcccccgggggcagccccaggaccaggacgatgacgaggatgatgaggaagatgaggccggcaggcagagagcctcggggaaaccctcaaatgtgggccaccgcctgggccaccggcgggcgctcttcgagaagcggaagcgcctcagcgactatgccctcattttcggcatgtttggcatcgtcgtcatggtgacggagaccgagctgtcctggggggtgtacaccaaggagtctctgtactcattcgcactcaaatgcctcatcagcctctccacggccatcctgctgggtctcgttgtcctctaccatgcccgggagatccagctgttcatggtggacaacggggctgatgactggcgcatcgccatgacctgcgagcgcgtgttcctcatctcgctagagctggcagtgtgcgccattcacccggtgcccggccactaccgcttcacgtggacggcgcggctggccttcacgtacgcgccctcggtggccgaggccgacgtggacgtgctgctgtccatccccatgttcctgcgcctctacctgctgggccgggtgatgctactgcacagcaaaatcttcacggacgcctcgagccgcagcatcggggccctcaacaagatcaccttcaacacgcgcttcgtcatgaagacactcatgaccatctgccccggcaccgtgctgctggtcttcagcatctcctcctggatcatcgcagcctggaccgtgcgcgtctgcgagaggtaccacgacaagcaggaagtgaccagcaacttcctgggggccatgtggctgatttccatcaccttcctctccattggctacggcgacatggtgccccacacctactgcgggaagggtgtgtgcctgctcactggcatcatgggagctggctgtaccgcgctcgtggtggctgtggtggctcggaagctggagctcaccaaggctgagaagcacgtgcacaacttcatgatggacactcagctcaccaagcgggtaaaaaacgccgctgctaacgttctcagggagacgtggctcatctacaaacataccaggctggtgaagaagccagaccaagcccgggttcggaaacaccagcgtaagttcctccaagccatccatcaggtccagaggctccggagtgtgaagatcgagcaagggaagctgaacgaccaggctaacacgcttaccgacctagccaagacccagaccgtcatgtacgaccttgtatcggagctgcacgctcagcacgaggagctggaggcccgcctggccaccctggaaagccgcttggatgcgctgggtgcctctctacaggccctgcctggcctcatcgcccaagccatacgcccacccccgcctcccctgcctcccaggcccggccccggcccccaagaccaggcagcccggagctccccctgccggtggacgcccgtggccccctcggactgcgggtgacggccctgcccgccaccagacccctaaatcttggccatc

SEQ ID NO: 168019 - DNA, 2512 bp, Homo sapiens
  Payload ID: 13050
  Gene Symbol: KCNN2
  Gene Name: potassium channel, calcium activated intermediate/small conductance subfamily N alpha, member 2
  Uniprot ID: Q9H2S1
  ENST ID: ENST00000264773
  CDS Start-End: 458-2197
cggcggcagcagcccatgcctccggtgcaacagctgcgcctcctccggtgccccggcggcgggggcgggagataacctgtccctgctgctccgcacctcctcgcccggcggcgccttccggacccgcacctcctcgccgctgtcgggctcgtcctgctgctgctgctgctgctcgtcgcgccggggcagccagctcaatgtgagcgagctgacgccgtccagccatgccagtgcgctccggcagcagtacgcgcagcagtccgcgcagcagtcggcgtccgcctcccagtaccaccagtgccacagcctgcagcccgccgccagccccacgggcagcctcggcagtctgggctccgggcccccgctctcgcaccaccaccaccacccgcacccggcgcaccaccagcaccaccagccccaggcgcgccgcgagagcaaccccttcaccgaaatagccatgagcagctgcaggtacaacgggggcgtcatgcggccgctcagcaacttgagcgcgtcccgccggaacctgcacgagatggactcagaggcgcagcccctgcagccccccgcgtctgtcggaggaggtggcggcgcgtcctccccgtctgcagccgctgccgccgccgccgctgtttcgtcctcagcccccgagatcgtggtgtctaagcccgagcacaacaactccaacaacctggcgctctatggaaccggcggcggaggcagcactggaggaggcggcggcggtggcgggagcgggcacggcagcagcagtggcaccaagtccagcaaaaagaaaaaccagaacatcggctacaagctgggccaccggcgcgccctgttcgaaaagcgcaagcggctcagcgactacgcgctcatcttcggcatgttcggcatcgtggtcatggtcatcgagaccgagctgtcgtggggcgcctacgacaaggcgtcgctgtattccttagctctgaaatgccttatcagtctctccacgatcatcctgctcggtctgatcatcgtgtaccacgccagggaaatacagttgttcatggtggacaatggagcagatgactggagaatagccatgacttatgagcgtattttcttcatctgcttggaaatactggtgtgtgctattcatcccatacctgggaattatacattcacatggacggcccggcttgccttctcctatgccccatccacaaccaccgctgatgtggatattattttatctataccaatgttcttaagactctatctgattgccagagtcatgcttttacatagcaaacttttcactgatgcctcctctagaagcattggagcacttaataagataaacttcaatacacgttttgttatgaagactttaatgactatatgcccaggaactgtactcttggtttttagtatctcattatggataattgccgcatggactgtccgagcttgtgaaaggtaccatgatcaacaggatgttactagcaacttccttggagcgatgtggttgatatcaataacttttctctccattggttatggtgacatggtacctaacacatactgtggaaaaggagtctgcttacttactggaattatgggtgctggttgcacagccctggtggtagctgtagtggcaaggaagctagaacttaccaaagcagaaaaacacgtgcacaatttcatgatggatactcagctgactaaaagagtaaaaaatgcagctgccaatgtactcagggaaacatggctaatttacaaaaatacaaagctagtgaaaaagatagatcatgcaaaagtaagaaaacatcaacgaaaattcctgcaagctattcatcaattaagaagtgtaaaaatggagcagaggaaactgaatgaccaagcaaacactttggtggacttggcaaagacccagaacatcatgtatgatatgatttctgacttaaacgaaaggagtgaagacttcgagaagaggattgttaccctggaaacaaaactagagactttgattggtagcatccacgccctccctgggctcataagccagaccatcaggcagcagcagagagatttcattgaggctcagatggagagctacgacaagcacgtcacttacaatgctgagcggtcccggtcctcgtccaggaggcggcggtcctcttccacagcaccaccaacttcatcagagagtagctagaagagaataagttaaccacaaaataagactttttgccatcatatggtcaatattttagcttttattgtaaagcccctatggttctaatcagcgttatccgggttctgatgtcagaatcctgggaacctgaacactaagttttaggccaaaatgagtgaaaactctttttttttctttcagatgcacagggaatgcacctattattgctatatagattgttcctcctgtaatttcactaactttttattcatgcacttcaaacaaactttactactacattatatgatatataataaaaaaagttaatttctgcac

SEQ ID NO: 168020 - DNA, 879 bp, Homo sapiens
  Payload ID: 13050
  Gene Symbol: KCNN2
  Gene Name: potassium channel, calcium activated intermediate/small conductance subfamily N alpha, member 2
  ENST ID: ENST00000505491
  CDS Start-End: 396-683
tgctactgctcactctttgggtccacactgcctttatgagctgtaacactcaccgcgaaaggtctgcagcttcactcctgaagccagcgagcccacgagcccacagggaggaatgaacaactccagatgcaccgccttaagagctgtaacactcacggcgaaggtctgcagcttcactcctgagccagcgagaccaggaacccaccagaaggaagaaactccgaacacatccgaacatcagaaggaacaaactccagacggcgccaccttaagagctgtaacactcaccgccagggtccggggcttcgttcttgaagtcagtgagaccaagaacccaccaattccggacgcagtaccatgatcaacaggatgttactagcaacttccttggagcgatgtggttgatatcaataacttttctctccattggttatggtgacatggtacctaacacatactgtggaaaaggagtctgcttacttactggaattatgggtgctggttgcacagccctggtggtagctgtagtggcaaggaagctagaacttaccaaagcagaaaaacacgtgcacaatttcatgatggatactcagctgactaaaagaggaaaggaagatcatggagacaacaattgcaatacacggtggagaactcaacaccccttgattaaaaaaaaaaaatagttgaataaaaaagaagtttcctgaaggagtaaaaaatgcagctgccaatgtactcagggaaacatggctaatttacaaaaatacaaagctagtgaaaaagatagatcatgcaaaagtaagaaaacatcaacgaaaattcctgcaagctattcatcaattaagaagtgtaaaaatggagcagaggaaactgaatgac

SEQ ID NO: 168021 - DNA, 1457 bp, Homo sapiens
  Payload ID: 13050
  Gene Symbol: KCNN2
  Gene Name: potassium channel, calcium activated intermediate/small conductance subfamily N alpha, member 2
  Uniprot ID: Q9H2S1
  ENST ID: ENST00000503706
  CDS Start-End: 444-1139
cttcaacactgtggaagctttgttctttcgctcttttgcaataaatcttgctactgctcactctttgggtccacactgcctttatgagctgtaacactcaccgcgaaaggtctgcagcttcactcctgaagccagcgagcccacgagcccacagggaggaatgaacaactccagatgcaccgccttaagagctgtaacactcacggcgaaggtctgcagcttcactcctgagccagcgagaccaggaacccaccagaaggaagaaactccgaacacatccgaacatcagaaggaacaaactccagacggcgccaccttaagagctgtaacactcaccgccagggtccggggcttcgttcttgaagtcagtgagaccaagaacccaccaattccggacgcagtaccatgatcaacaggatgttactagcaacttccttggagcgatgtggttgatatcaataacttttctctccattggttatggtgacatggtacctaacacatactgtggaaaaggagtctgcttacttactggaattatgggtgctggttgcacagccctggtggtagctgtagtggcaaggaagctagaacttaccaaagcagaaaaacacgtgcacaatttcatgatggatactcagctgactaaaagagtaaaaaatgcagctgccaatgtactcagggaaacatggctaatttacaaaaatacaaagctagtgaaaaagatagatcatgcaaaagtaagaaaacatcaacgaaaattcctgcaagctattcatcaattaagaagtgtaaaaatggagcagaggaaactgaatgaccaagcaaacactttggtggacttggcaaagacccagaacatcatgtatgatatgatttctgacttaaacgaaaggagtgaagacttcgagaagaggattgttaccctggaaacaaaactagagactttgattggtagcatccacgccctccctgggctcataagccagaccatcaggcagcagcagagagatttcattgaggctcagatggagagctacgacaagcacgtcacttacaatgctgagcggtcccggtcctcgtccaggaggcggcggtcctcttccacagcaccaccaacttcatcagagagtagctagaagagaataagttaaccacaaaataagactttttgccatcatatggtcaatattttagcttttattgtaaagcccctatggttctaatcagcgttatccgggttctgatgtcagaatcctgggaacctgaacactaagttttaggccaaaatgagtgaaaactctttttttttctttcagatgcacagggaatgcacctattattgctatatagattgttcctcctgtaatttcactaactttttattcatgcacttcaaacaaactttactactacattatatgatatataataaaaaaagttaatttctgcacata

SEQ ID NO: 168022 - DNA, 3076 bp, Homo sapiens
  Payload ID: 13050
  Gene Symbol: KCNN2
  Gene Name: potassium channel, calcium activated intermediate/small conductance subfamily N alpha, member 2
  Uniprot ID: Q9H2S1
  ENST ID: ENST00000512097
  CDS Start-End: 1019-2758
gtgaggaggaggaagagaagcagaagagcagctggaggccggcggtggctgagcagcccccacacctttgagcgagccgcctgcctctccaccggcaaggaagccctgggacctccggattcgggctgccggagggcctgagcgccagagcccaggacccggcggccgggggcgccatcccctcatgttctggagaaggcgcaaatgtgatgtcatgcccattgttttggtgcgcccaaccaatcggactcgccgcctggattctaccggagccggcatgggcccttcctcgcaccagcagcaggagtccccgctcccgaccataacgcattgcgcagggtgcaccaccgcttggtctccctgcagctttaacagccctgacatggaaaccccattgcagttccagcgcggcttcttcccagagcagccgccgccgccgccgcgctcctcacacctgcattgccagcagcagcaacagagccaggacaagccgtgcccgcccttcgcgcccctcccgcaccctcaccaccacccgcacctcgcgcaccagcagccggccagcggcggcagcagcccatgcctccggtgcaacagctgcgcctcctccggtgccccggcggcgggggcgggagataacctgtccctgctgctccgcacctcctcgcccggcggcgccttccggacccgcacctcctcgccgctgtcgggctcgtcctgctgctgctgctgctgctcgtcgcgccggggcagccagctcaatgtgagcgagctgacgccgtccagccatgccagtgcgctccggcagcagtacgcgcagcagtccgcgcagcagtcggcgtccgcctcccagtaccaccagtgccacagcctgcagcccgccgccagccccacgggcagcctcggcagtctgggctccgggcccccgctctcgcaccaccaccaccacccgcacccggcgcaccaccagcaccaccagccccaggcgcgccgcgagagcaaccccttcaccgaaatagccatgagcagctgcaggtacaacgggggcgtcatgcggccgctcagcaacttgagcgcgtcccgccggaacctgcacgagatggactcagaggcgcagcccctgcagccccccgcgtctgtcggaggaggtggcggcgcgtcctccccgtctgcagccgctgccgccgccgccgctgtttcgtcctcagcccccgagatcgtggtgtctaagcccgagcacaacaactccaacaacctggcgctctatggaaccggcggcggaggcagcactggaggaggcggcggcggtggcgggagcgggcacggcagcagcagtggcaccaagtccagcaaaaagaaaaaccagaacatcggctacaagctgggccaccggcgcgccctgttcgaaaagcgcaagcggctcagcgactacgcgctcatcttcggcatgttcggcatcgtggtcatggtcatcgagaccgagctgtcgtggggcgcctacgacaaggcgtcgctgtattccttagctctgaaatgccttatcagtctctccacgatcatcctgctcggtctgatcatcgtgtaccacgccagggaaatacagttgttcatggtggacaatggagcagatgactggagaatagccatgacttatgagcgtattttcttcatctgcttggaaatactggtgtgtgctattcatcccatacctgggaattatacattcacatggacggcccggcttgccttctcctatgccccatccacaaccaccgctgatgtggatattattttatctataccaatgttcttaagactctatctgattgccagagtcatgcttttacatagcaaacttttcactgatgcctcctctagaagcattggagcacttaataagataaacttcaatacacgttttgttatgaagactttaatgactatatgcccaggaactgtactcttggtttttagtatctcattatggataattgccgcatggactgtccgagcttgtgaaaggtaccatgatcaacaggatgttactagcaacttccttggagcgatgtggttgatatcaataacttttctctccattggttatggtgacatggtacctaacacatactgtggaaaaggagtctgcttacttactggaattatgggtgctggttgcacagccctggtggtagctgtagtggcaaggaagctagaacttaccaaagcagaaaaacacgtgcacaatttcatgatggatactcagctgactaaaagagtaaaaaatgcagctgccaatgtactcagggaaacatggctaatttacaaaaatacaaagctagtgaaaaagatagatcatgcaaaagtaagaaaacatcaacgaaaattcctgcaagctattcatcaattaagaagtgtaaaaatggagcagaggaaactgaatgaccaagcaaacactttggtggacttggcaaagacccagaacatcatgtatgatatgatttctgacttaaacgaaaggagtgaagacttcgagaagaggattgttaccctggaaacaaaactagagactttgattggtagcatccacgccctccctgggctcataagccagaccatcaggcagcagcagagagatttcattgaggctcagatggagagctacgacaagcacgtcacttacaatgctgagcggtcccggtcctcgtccaggaggcggcggtcctcttccacagcaccaccaacttcatcagagagtagctagaagagaataagttaaccacaaaataagactttttgccatcatatggtcaatattttagcttttattgtaaagcccctatggttctaatcagcgttatccgggttctgatgtcagaatcctgggaacctgaacactaagttttaggccaaaatgagtgaaaactctttttttttctttcagatgcacagggaatgcacctattattgctatatagattgttcctcctgtaatttcactaactttttattcatgcacttcaaacaaactttactactacattatatgatatataataaaaaaagttaatttctgcacata

SEQ ID NO: 168023 - DNA, 2091 bp, Homo sapiens
  Payload ID: 13050
  Gene Symbol: KCNN2
  Gene Name: potassium channel, calcium activated intermediate/small conductance subfamily N alpha, member 2
  Uniprot ID: Q9H2S1
  ENST ID: ENST00000610748
  CDS Start-End: 1083-1778
cggcggcagcagcccatgcctccggtgcaacagctgcgcctcctccggtgccccggcggcgggggcgggagataacctgtccctgctgctccgcacctcctcgcccggcggcgccttccggacccgcacctcctcgccgctgtcgggctcgtcctgctgctgctgctgctgctcgtcgcgccggggcagccagctcaatgtgagcgagctgacgccgtccagccatgccagtgcgctccggcagcagtacgcgcagcagtccgcgcagcagtcggcgtccgcctcccagtaccaccagtgccacagcctgcagcccgccgccagccccacgggcagcctcggcagtctgggctccgggcccccgctctcgcaccaccaccaccacccgcacccggcgcaccaccagcaccaccagccccaggcgcgccgcgagagcaaccccttcaccgaaatagccatgagcagctgcaggtacaacgggggcgtcatgcggccgctcagcaacttgagcgcgtcccgccggaacctgcacgagatggactcagaggcgcagcccctgcagccccccgcgtctgtcggaggaggtggcggcgcgtcctccccgtctgcagccgctgccgccgccgccgctgtttcgtcctcagcccccgagatcgtggtgtctaagcccgagcacaacaactccaacaacctggcgctctatggaaccggcggcggaggcagcactggaggaggcggcggcggtggcgggagcgggcacggcagcagcagtggcaccaagtccagcaaaaagaaaaaccagaacatcggctacaagctgggccaccggcgcgccctgttcgaaaagcgcaagcggctcagcgactacgcgctcatcttcggcatgttcggcatcgtggtcatggtcatcgagaccgagctgtcgtggggcgcctacgacaaggcgtcgctgtattccttagctctgaaatgccttatcagtctctccacgatcatcctgctcggtctgatcatcgtgtaccacgccagggaaatacaggtaccatgatcaacaggatgttactagcaacttccttggagcgatgtggttgatatcaataacttttctctccattggttatggtgacatggtacctaacacatactgtggaaaaggagtctgcttacttactggaattatgggtgctggttgcacagccctggtggtagctgtagtggcaaggaagctagaacttaccaaagcagaaaaacacgtgcacaatttcatgatggatactcagctgactaaaagagtaaaaaatgcagctgccaatgtactcagggaaacatggctaatttacaaaaatacaaagctagtgaaaaagatagatcatgcaaaagtaagaaaacatcaacgaaaattcctgcaagctattcatcaattaagaagtgtaaaaatggagcagaggaaactgaatgaccaagcaaacactttggtggacttggcaaagacccagaacatcatgtatgatatgatttctgacttaaacgaaaggagtgaagacttcgagaagaggattgttaccctggaaacaaaactagagactttgattggtagcatccacgccctccctgggctcataagccagaccatcaggcagcagcagagagatttcattgaggctcagatggagagctacgacaagcacgtcacttacaatgctgagcggtcccggtcctcgtccaggaggcggcggtcctcttccacagcaccaccaacttcatcagagagtagctagaagagaataagttaaccacaaaataagactttttgccatcatatggtcaatattttagcttttattgtaaagcccctatggttctaatcagcgttatccgggttctgatgtcagaatcctgggaacctgaacactaagttttaggccaaaatgagtgaaaactctttttttttctttcagatgcacagggaatgcacctattattgctatatagattgttcctcctgtaatttcactaactttttattcatgcacttcaaacaaactttactactacattatatgatatataataaaaaaagttaatttctgc

SEQ ID NO: 168024 - DNA, 2098 bp, Homo sapiens
  Payload ID: 13050
  Gene Symbol: KCNN2
  Gene Name: potassium channel, calcium activated intermediate/small conductance subfamily N alpha, member 2
  ENST ID: ENST00000631899
  CDS Start-End: 39-1787
aggcgcgccgcgagagcaaccccttcaccgaaatagccatgagcagctgcaggtacaacgggggcgtcatgcggccgctcagcaacttgagcgcgtcccgccggaacctgcacgagatggactcagaggcgcagcccctgcagccccccgcgtctgtcggaggaggtggcggcgcgtcctccccgtctgcagccgctgccgccgccgccgctgtttcgtcctcagcccccgagatcgtggtgtctaagcccgagcacaacaactccaacaacctggcgctctatggaaccggcggcggaggcagcactggaggaggcggcggcggtggcgggagcgggcacggcagcagcagtggcaccaagtccagcaaaaagaaaaaccagaacatcggctacaagctgggccaccggcgcgccctgttcgaaaagcgcaagcggctcagcgactacgcgctcatcttcggcatgttcggcatcgtggtcatggtcatcgagaccgagctgtcgtggggcgcctacgacaaggcgtcgctgtattccttagctctgaaatgccttatcagtctctccacgatcatcctgctcggtctgatcatcgtgtaccacgccagggaaatacagttgttcatggtggacaatggagcagatgactggagaatagccatgacttatgagcgtattttcttcatctgcttggaaatactggtgtgtgctattcatcccatacctgggaattatacattcacatggacggcccggcttgccttctcctatgccccatccacaaccaccgctgatgtggatattattttatctataccaatgttcttaagactctatctgattgccagagtcatgcttttacatagcaaacttttcactgatgcctcctctagaagcattggagcacttaataagataaacttcaatacacgttttgttatgaagactttaatgactatatgcccaggaactgtactcttggtttttagtatctcattatggataattgccgcatggactgtccgagcttgtgaaaggtaccatgatcaacaggatgttactagcaacttccttggagcgatgtggttgatatcaataacttttctctccattggttatggtgacatggtacctaacacatactgtggaaaaggagtctgcttacttactggaattatgggtgctggttgcacagccctggtggtagctgtagtggcaaggaagctagaacttaccaaagcagaaaaacacgtgcacaatttcatgatggatactcagctgactaaaagagtaaaaaatgcagctgccaatgtactcagggaaacatggctaatttacaaaaatacaaagctagtgaaaaagatagatcatgcaaaagtaagaaaacatcaacgaaaattcctgcaagctattcatcaagctcggaaattaagaagtgtaaaaatggagcagaggaaactgaatgaccaagcaaacactttggtggacttggcaaagacccagaacatcatgtatgatatgatttctgacttaaacgaaaggagtgaagacttcgagaagaggattgttaccctggaaacaaaactagagactttgattggtagcatccacgccctccctgggctcataagccagaccatcaggcagcagcagagagatttcattgaggctcagatggagagctacgacaagcacgtcacttacaatgctgagcggtcccggtcctcgtccaggaggcggcggtcctcttccacagcaccaccaacttcatcagagagtagctagaagagaataagttaaccacaaaataagactttttgccatcatatggtcaatattttagcttttattgtaaagcccctatggttctaatcagcgttatccgggttctgatgtcagaatcctgggaacctgaacactaagttttaggccaaaatgagtgaaaactctttttttttctttcagatgcacagggaatgcacctattattgctatatagattgttcctcctgtaatttcactaactttttattcatgcacttcaaacaaactttactactacattatatgatatataataaaaaaagttaatttct

SEQ ID NO: 168025 - DNA, 13033 bp, Homo sapiens
  Payload ID: 13051
  Gene Symbol: KCNN3
  Gene Name: potassium channel, calcium activated intermediate/small conductance subfamily N alpha, member 3
  ENST ID: ENST00000271915
  CDS Start-End: 317-2512
ttgagccagcgaggagtgaagctgagcctggcctcacacgctcctagaggaccacctcctgagagagttctttcaccccctcttctttctccaagctcccctcctgctctccctccctgcccaatacaatgcattcttgagtggcagcgtctggactccaggcagccccagagaaccgaagcaagccaaagagaggactggagccaagatactggtgggggagattggatgcctggctttctttgaggacatctttggagcgagggtggctttggggtgggggcttgtgctgcagggaatacagccaggccccaagatggacacttctgggcacttccatgactcgggggtgggggacttggatgaagaccccaagtgcccctgtccatcctctggggatgagcagcagcagcagcagcagcagcaacagcagcagcagccaccaccgccagcgccaccagcagccccccagcagcccctgggaccctcgctgcagcctcagcctccgcagcttcagcagcagcagcagcagcagcagcagcagcagcagcagcagccaccgcatcccctgtctcagctcgcccaactccagagccagcccgtccaccctggcctgctgcactcctctcccaccgctttcagggcccccccttcgtccaactccaccgccatcctccacccttcctccaggcaaggcagccagctcaatctcaatgaccacttgcttggccactctccaagttccacagctacaagtgggcctggcggaggcagccggcaccgacaggccagccccctggtgcaccggcgggacagcaaccccttcacggagatcgccatgagctcctgcaagtatagcggtggggtcatgaagcccctcagccgcctcagcgcctcccggaggaacctcatcgaggccgagactgagggccaacccctccagcttttcagccctagcaaccccccggagatcgtcatctcctcccgggaggacaaccatgcccaccagaccctgctccatcaccctaatgccacccacaaccaccagcatgccggcaccaccgccagcagcaccaccttccccaaagccaacaagcggaaaaaccaaaacattggctataagctgggacacaggagggccctgtttgaaaagagaaagcgactgagtgactatgctctgatttttgggatgtttggaattgttgttatggtgatagagaccgagctctcttggggtttgtactcaaaggactccatgttttcgttggccctgaaatgccttatcagtctgtccaccatcatccttttgggcttgatcatcgcctaccacacacgtgaagtccagctcttcgtgatcgacaatggcgcggatgactggcggatagccatgacctacgagcgcatcctgtacatcagcctggagatgctggtgtgcgccatccaccccattcctggcgagtacaagttcttctggacggcacgcctggccttctcctacacaccctcccgggcggaggccgatgtggacatcatcctgtctatccccatgttcctgcgcctgtacctgatcgcccgagtcatgctgctgcacagcaagctcttcaccgatgcctcgtcccgcagcatcggggccctcaacaagatcaacttcaacacccgctttgtcatgaagacgctcatgaccatctgccctggcactgtgctgctcgtgttcagcatctctctgtggatcattgctgcctggaccgtccgtgtctgtgaaaggtaccatgaccagcaggacgtaactagtaactttctgggtgccatgtggctcatctccatcacattcctttccattggttatggggacatggtgccccacacatactgtgggaaaggtgtctgtctcctcactggcatcatgggtgcaggctgcactgcccttgtggtggccgtggtggcccgaaagctggaactcaccaaagcggagaagcacgttcataacttcatgatggacactcagctcaccaagcggatcaagaatgctgcagccaatgtccttcgggaaacatggttaatctataaacacacaaagctgctaaagaagattgaccatgccaaagtgaggaaacaccagaggaagttcctccaagctatccaccagttgaggagcgtcaagatggaacagaggaagctgagtgaccaagccaacactctggtggacctttccaagatgcagaatgtcatgtatgacttaatcacagaactcaatgaccggagcgaagacctggagaagcagattggcagcctggagtcgaagctggagcatctcaccgccagcttcaactccctgccgctgctcatcgccgacaccctgcgccagcagcagcagcagctcctgtctgccatcatcgaggcccggggtgtcagcgtggcagtgggcaccacccacaccccaatctccgatagccccattggggtcagctccacctccttcccgaccccgtacacaagttcaagcagttgctaaataaatctccccactccagaagcattacccataggtcttaagatgcaaatcaactctctcctggtcgctttgccatcaagaaacattcagaccagggaacggaaagaagagagaccgagctaattaactaactcatgttcattcagcgtgcttggtccgacatgccttgaaaccagaaatctaatctctgtttaggtgcctctacttgggagcgggaagaggagatgacaggaagcgacgcctctggcagggcccttgctgcagagttggtggagaacagaaatccacgctcaatctcaggtcttcacgcggggggtgggggtcagatgcactgaagtagccaacagcgaagccagtccagaagaggggtccgctgggagggagggttgtgtcaggcttgggggatgggctcttcgccatgggggtctttgaacacacctctctcctttccttttgtctacggaagcctctgggtgacaaaagtaaaagagagctgcccacaacttgccaaaacagatatactcgaatcagactgaaaaaaaaaaaaaaagacacagacaaataaaaagccagattttccactcgatattaatacccacataaacctgtgtgtttgcaaacgtgtacatgtacacacatacacatcccacgttcgcttcaggtcctttcttatttgagcttaatccaaataaaaagggacttgacaccttaccctgcatacaataggcaccccttacatgtgttttgagttggtctgaatctgaacatggggtgctttcagttcaggtagttagctagttctggccacattctgagtttcactgaagatgtggatcccttcagacataatgcacattgctttgtcctggatatgcaccttgcttgatttgaaatggatgccaagccaaaattgttggcattcaggagggataagcaggcttctaaaaataacagcatctgcagagttttcttcttccatccaaacaagttgtgtttcgatggtccacatgaccaggtgtatgtctgtaagtgtggagggagaggacaagaaattgtgcatgtgtgtgcagacatgcacaaacaggagcaatccaataacaccttagtgaatagaaatatggttggggatttgctgagctgtatttatccagcaacaggtttccagccccagatgttagtagtgcaaaagggccaagtgcctcaattgtgagcctctgagctaggaggagaagtgatgaagagtggcctatgtggtcccttctacctgaccttaagtcatctcaaaatgaaatattgtgagaatgaagggaacccttagggaaccttgtgggtaaggtaagtggacatggatttgtcagtagcctgttcctactgtgccatgttaatcttggtgcgaaaaactattccaatacatctcaaactccaagagacttcagaaacatcaagatttagtgtaatgagcggcgcagaaaaatgttttcattgctccataatctgaccacacgtaacatttgtgacgtgaaaaccatgactttctcattctgaggtctttggtttctgcctgtgggaaattgaatggcactgtatggactatttcatctgttgatggtaaaacaaaagggtgatttttttgcttgtggttgtcatcttgggtttacctttgtaagaagacatcatcaccattctgaaggcagtggcttggcatggagatttttattctgtagcactgggcctgttcttctaaggacagcacaaggtagacaattgtagagccaaggccactttttcaggaagatctagtctcttgctaaccctcttctttctctcttgctattgctgctgctcttttgatggtttatagtcttaatggcctgccttgataattcctttgaacactttcattagttgttttgcataccagagatgccgcacctgctgttggcttatttttttacttgttctattaactgttgattatctgaatgtttcccctcctccttgtttcatgtcccaagaatggtgctcctgttttcagtgacagttcagctgaacatataagcagatgtgtaaacagatgaagtaaccatgcagtttccttgtggcattagttccatttcacaaagtgaagaccactggtgggctgatctgagtgtgccaatcctgatcatttaaacctacagccttcaactggtgattcctacccaccgttttcattctgctataaccctgtgatatgtgtgcgtgtgggtgtgagtgtgggtgtgtgcacatatagagatttagtcttaatttcaaccaaatgacatgcaagattccactgccactcttcctggccaaaagtgtgcacagactgtgatttattcattgtggtctgtgactttaacccatcattgatgctctcacttaggtaaaccctaaagaccaaactagcaacactagtcaagggagtgactggagttatttctggtagcagtagccactggcatcctagaaacacatggacatttgtagcatgaattgacctattggtagtgcaatagctatacatgatttttattcttggcaaaagaaaatgcttcaaaaaaaaagtgatcaaacctgcacattgatcctgtaatagcaaatggaaggctatttctctgtactagcatttcagctttatgtgggaaagttacccgttctcctgcaagtacaatcaacccttgatgacttaagtattaattattctgggtgtagctcacccaagttttcttcctacatcttttggctaattccaccacacctcagcatcacagtcagatgggaaaaggggcaggtggattctcatgtcatgccttcttgtaccttattttcaagttttgtggtggaggaggtttaattatctgctcaagaatctggtatatatagccaggtgcggtggctcatgcctgtaatcccaggactttgggcaaggcgagaggatcacctgaggtcaggagttcaagaccagcctggccaacatggcaaaaccccatctctactaaaaatacaaaaattagctgggtttggtggtggacacctgtagtcccagctacttgggaggctgcggcaggagaatcacttgaaccccggaagtggaggttgcagtgagccaagatcgtgccattgcactccagcttgggtgaccgagcaagactccgtctcaaaaaaaaaaaaaaaatcggctatatgtaaaaactattaattatgtaacctcactccaatactgtactgatcaagatctgcccactcctagaggactgacccaatggcagatcccctactataatctttctgacaactcagtgacaggtaaaatcactctaatattcctaaaatatctagacacttgaattagaaatacagaaccacccccacccctgccattgcttaagccatattaaagcttcatgtactgtaaagtcagggatgtactgtgatactttaagaccactaatctcagtggaatttcaggacatagcattagttggtaaattacaccagactaggggctcactcctccttagattgaagtccaaataaaagtcttcacctttggatcaaaggccacatatatatgatcatcatcaataaattgtcataaagtgtctatgaactgctcttgccatcttcctaatacgtaacttcatgacatcatgtctctagaagtgcttaatacaatccaaaagaacaaggggggaaggccccaagtcaccactgaccgacctcagcaggggccagtggtagaacaacaatcttgtgaattaggagacatagaaaatgtacgcaaaagtaaattccaagcgctgagcatgtacaagctatttttattattaaaagccaagaaggaagagcattgaagaagtaatgattttaatatagtgggggatttcccccttaaatttttataatttccttgtgaataaacaatcatggaaaagaagaaacctagtcatacaaaatcagaataaataaaaatcttaagactggatccacatctttggccaattcatataagcacctaatacatcaatttctctgtacttaaaatgaagagaataattaatattcttaagtacaatgttttcaatagagaacaaatgaaatcacctttgtcatcaacagcagcccagactgactgtatctagatcacaccttgatgttacgtttgaatgcagtcagtagttaccaaaaagtaattagtgcacattaaatagtggtaaaatcagcagggagaaatatgggattagcacgtagttccagaaccttcctcctcctccagagtgcaactcaacaaacagtacactccaaattaagaatcaatgtttcatcccaggacaaacggtgttgctcccatcacagtaccacaactgagatactgtgaagtcattgcactaccagtaggttactactcttttgaagttactgtttttaaatcctaaaatatgtccccagttttctacattcattcttcttcccctaagagttgctagaagcagatgaaggatccctattgactctgcagggtttgatttcagtaccttagacagctatctggtgacttcccagtaggcacgaacaaccccttctctccccttgcagtcggtgggcttgatgacgccccagacagtatcctttccttctctactgccgccaaaataaacattagggaaatgggatcattaacaccactgagaaaggagtttacagggatcgcaatagtaactgtctgcttgtggtagtagaaagcttgtgccaggctgcatgaatagaaattaatgttaaactcctgttagacgagtaatatgtagatttttattgaaacagaccacagcttattaaaaagtactcagtgcaatggtatatacatatatacagatagaaaaaaatataactgtgatctttttgtcttacgccattactggaaacacccaaacgtgaactggagttccctctgaacaaaaccattgtcaaatcttcaacatatgacctccaaatctaggtgccaagtgccctgtgacagttgtttacacacctgaaaaatgtatcctggaagctgtaatcttgggcctgggctatgtgttgaaacaagcaaaagagacacatcgtgaccaaccaagctggtggaggaaaagcacaaaattcaactccaacctgcagttaggatcccaaagagatgttgacatttatagccaaaaagaaaaagtacatatatatatatatatatatatatatatatatatatatatatatatatctgaatcagatcgaagcagccaacgtccagcttcactcaagaaggacaaggaataaacaacattctctagctgtgtcatgttgtctcagtttttgaatctcaaccaggactgatccaccttcatcagatacgttttttaatggcgcaacaactcaattttggtcccagactctccattctgcactggccacgagaacaacaagagaatgacaggatgttaatggaggaaacattttcatggcaagctcagaaactgaagtgtttatattcagaatcagatgagctttaatatgaatttgcatcttgcctctgtactgcttgctattttttaatgataggagaaagcataacagtttattttaaatatgaaatatattgatatattataaaatatattgtaactttcaattaacattttgtatcaaactagtgtttagcaggtccactgtcagcctgctctcccaatgactgtttctgagtacacatcactgttagtgattgccgggcacccagaaaaagggtcctcctaccacagcctactgaactgccatattctaattctccaaggcctgggtattagagacaaaagaacattattccaagagtagaggaataattctaccctaaattctatcaagccatttcagaagagattttaaaagccatcactcctttagtagctctgcaaagccagtttaataaaagttcaggctctttctatataaattcaaaggcctcattacataaattatataagtctcaaacctagccaaccagttttcctttgacaatgtcagaattggacataagaaagagtcctgttttcctgtaacttaaaatactcaaaatcctaggcattctgagtttctccatgtacgtgaaaccggggtcggctttccaaactacacaaggcccaacaagagtccagtgtgcagatgtgcttttctaaattggcaatacccttgagggagcaaggttcccacatgtttatcaaggacatggagcccagctcctaagggagtgatgggaggagccggcaggacatgaacagccagagccagcaaagagccgggctgccttttctgctagcttcctctagctgggaggaaataaagggttcccgttgagatattgtcctttatagcaaaattaagcaactcatggaatctacacccctctttctctacagagcagctgagacatacatgtagaagttctcagttccctccttcatatggctaaggcactacttctagatgaaaacaggatgtgttcggttacagaataaagattttctagaatcagtgagcctcttctcacctgggaccctcacttgctgttgttgctttggtgcaatattgtacaggtgcaaaccaggttgcatcggggcagattaactgagcctatgtgtctcttcccttcccaagccctgaaaattcacatagatttacagatagtgcaaaacaacaagttttctcctgggaaaaggctggaatccttcaaatttcaatttatatgagcttaaaggtatataagtcatggggctcactgacattaggtattcatgctgtttgaaagagaaatgtctaaatgcccgttttcagtctgtttgtgtagctgagccctaacttgtacacaagttttcttgttatggagctaaattctctcagtgcctgtattactcctcagttatatgttaggccgagctccactaaagccatctgaactccagggcacttgtttttatcaggttacttactcaccggataatggaaattggcttattttcaattttacaattgactgatgaatgtattggtggtaattgatttatttcttcacttttttttgctactaaatgattttttcttttttaaaattattattattattattttgagatggagtctcactctgtcgcccaggctggagtgcagtggcgccatctcagctcactgcaagctctgcctcctgggttcatgcaattctcctgcctcagcctcccgagtagctgggattacaggtgcgtgccaccacgaccagctaatttttttgtatttttagtagagacagggtttcatcatgttaaccaggatggtctcgatctcctgacctcgtgatccacctgcctgggcctcccaaagtgagccactgtgcctggcccagtaagtgcttttttcttttggtttttccttctaacactgctcagaccaagacttacatttataaagagcaaatatattctgacctttcccctcaaagttgtattccatctagaatcaaggaaacaaatgcaaattcatcatttggggaaagcagacctcttgacagtaattcaagtccatggctatatgctaacccttgctactcaaagtgtggtccacagaccagcagcgttagcatcatctgtaagcttgttagaaatgcagaatctcaggccccacatcaaaccttcttcatcagaattggccttttaacaaatccccaggtgacctgtatgcaccagaaatattgataagcactggcctcacctcaccgtagtgataactaacctcgttaataattagagaatgaagctatctcttccttgagtctcatttacagaattatttgaagatgtgaaggtcctgaatgatcataaggattaaaaaaatgcatctttaaattccacttgaggttatataacttggatggtctacatcaaacataataaagtcaataagagatagtctttttccggtcttacctaaatagcactccatatccttgagccacctcaaagcccccatttttaagttttagtctttttttttttagaccagactagcaaagccatcagaatatcaggtggaacctcagggcaggtcctctggaaggctacaggagtctctgcttagcatagtacagaaattgttgtgtttctcgatccttgtgttcttcccttgaggaactcagcatctcaccagtaagaactcccctcccctagaggaaaatagcaagagaagttagtttaaccatctagaaacattgctaatctccttgaaagccaattctcttactcattgcaccaacaagaaacactccaaggtgggcaaggaaagacgtgaattctgatattggcgccataactcgatatgtacccagaaacagttatgttctaaattaatggctttaacctgttcattgtaaaaagtgccttggacttcaatctaaagaggtcagtataaatatgtatgtgtgtgtgtgacgtgtatgtaggcaaatatttacagatttatacatacataggtgcacacacatatacccgcacattcatatataatatatacatacatatataaatgcttcataatatatcatattgctattcacagctccatttcttttgtctggtcctatgtttatttgtttagtgagacctttacatagagaggttctattcggaacattgatgtattttttgtttgttttttactttttattaaaaaggtaaaggatattaaaaaaaaaaaaaaaagtcaagtgcctgaaggttttgaatggagttacggtaaactttctcaggtcaccaaagaggaaacatttttcctttggaaaacatttttctgtttcagtgactttgttttcccttggtggtaatgcataaataagagtggttaaagtgattttgtaagttttatttcaatccatttctgtggttcccataaggcaatagctaaaaatttgttcagtctagtgcccagttttctccacacatcagcatcagaagggcccggtcttcacatgctctgtgtggttttgttcgcgttgttactgtgttccttactaaggaaaggcaaatgaaattgcaggggctggagcttagaccagctccaaatatggcttccttttggtaacacacacagaaggtggactagtgggaagtctctctccctgaagcaggtgggaacctgtgtcttagaaggcagaggagtcccagtgaactctccacagctccatgggccctgcctgtctacagttatacaactgcctgtatgagtcagcctttctctaccttagccaaaggtcttctctttctgtggtgtgacagcttgtaatgaaccaacttgctctggttagaagtccctagagctccaggaagagtcgccaggtttccattgctgtgctcaaagctcaaggacacattatacttctttaaaccaactaaatctctctagctccctgcccccatggtgacactttcataataggcagggccaagtcagagaggtcatgccctgtatacagtgtcaatcagaagagacactgcaaaatgtcagaggtgaccagaaagacaacagatctctccagctgtcctcacagctgcaggcacatttgtggaattgtgagtaggaaggcttggcagccaggggatgggaaatgaatttccccaagttgaaaaccctgtacccttactttccttcccataaatttttctgtagttctaggtaaataataataataataaaaatgcaaattaggtgctttagaaggagtatgtaatatctgggactttttctaagttggtagacctaaaaaatgttttcaaaaatatatctagctgcatttctactgctgtcattccttaaagctcttcctccaaaaactccatatgaatgaatacatttaccaactcagtgattactaaataatagtactttatacttatacacagtaatacctttcatctaaggatctcaaatgccaatatattagtcatcaccctgtaaggtggatgacatattattcccattattccaatgggaaaattgggccatagaaaactgaggagcaaatgactcatctacaggaattaaatggaaaaaacaggctaggatttctcagcacactttaggagtgaatgaaaacttacaggcttcagttctactgctggccaccattggatttgtaagatccaggatgtgtattgaccacatgtgtccagacccaggcttagggcatctggaatgagagtggtgggctggtgtgtgggtctgaggatctggatgggagactgcattttcttctctgtgcaaaatatggaagtgtgaccttgaaggtgggcttagtctatggccttccccactcctgcttgaactgaagctggagagaatgggcatttttaaatgttacggcatatgctaatataatattatggcattaaataaaaacaagaagagaactgactaaaaccaaaaaaccaaaaa

SEQ ID NO: 168026 - DNA, 1658 bp, Homo sapiens
  Payload ID: 13051
  Gene Symbol: KCNN3
  Gene Name: potassium channel, calcium activated intermediate/small conductance subfamily N alpha, member 3
  Uniprot ID: Q9UGI6
  ENST ID: ENST00000358505
  CDS Start-End: 378-1634
gaggactcagaataaacctgctgctgcttcgtaaacatctcctgataaaaatggctacaggtgttacctgggcagagcagctgggcgccgccttggaatcagctgggggagcacctctccttgggacgggatgacagggcttcccaggcggtccccacaagcccgcgccccagctcagccccagttctcccctcccacctcaactcctccttgggataaataaagatgagtgtgtgtgtgagtgcgcgcccggatggagaacagcaggcactggctttagcggggagctggccccactgctccagcctctcagtccagccccaagacggaggagggggtttccctcccagagggagtggagatggaggaaggactccatgttttcgttggccctgaaatgccttatcagtctgtccaccatcatccttttgggcttgatcatcgcctaccacacacgtgaagtccagctcttcgtgatcgacaatggcgcggatgactggcggatagccatgacctacgagcgcatcctgtacatcagcctggagatgctggtgtgcgccatccaccccattcctggcgagtacaagttcttctggacggcacgcctggccttctcctacacaccctcccgggcggaggccgatgtggacatcatcctgtctatccccatgttcctgcgcctgtacctgatcgcccgagtcatgctgctgcacagcaagctcttcaccgatgcctcgtcccgcagcatcggggccctcaacaagatcaacttcaacacccgctttgtcatgaagacgctcatgaccatctgccctggcactgtgctgctcgtgttcagcatctctctgtggatcattgctgcctggaccgtccgtgtctgtgaaaggtaccatgaccagcaggacgtaactagtaactttctgggtgccatgtggctcatctccatcacattcctttccattggttatggggacatggtgccccacacatactgtgggaaaggtgtctgtctcctcactggcatcatgggtgcaggctgcactgcccttgtggtggccgtggtggcccgaaagctggaactcaccaaagcggagaagcacgttcataacttcatgatggacactcagctcaccaagcggatcaagaatgctgcagccaatgtccttcgggaaacatggttaatctataaacacacaaagctgctaaagaagattgaccatgccaaagtgaggaaacaccagaggaagttcctccaagctatccaccagttgaggagcgtcaagatggaacagaggaagctgagtgaccaagccaacactctggtggacctttccaagatgcagaatgtcatgtatgacttaatcacagaactcaatgaccggagcgaagacctggagaagcagattggcagcctggagtcgaagctggagcatctcaccgccagcttcaactccctgccgctgctcatcgccgacaccctgcgccagcagcagcagcagctcctgtctgccatcatcgaggcccggggtgtcagcgtggcagtgggcaccacccacaccccaatctccgatagccccattggggtcagctccacctccttcccgaccccgtacacaagttcaagcagttgctaaataaatctccccactccagaagca

SEQ ID NO: 168027 - DNA, 1962 bp, Homo sapiens
  Payload ID: 13051
  Gene Symbol: KCNN3
  Gene Name: potassium channel, calcium activated intermediate/small conductance subfamily N alpha, member 3
  Uniprot ID: Q9UGI6
  ENST ID: ENST00000361147
  CDS Start-End: 132-1412
caggaaagtcagcttaaaggacactccttgcagggactgagctggcacctactccttagagcttgctgataccaggcctgccacgcgacatctgcaaggacagttgtttggtgttttgcttcaggttatagatggagagacctataaaggactccatgttttcgttggccctgaaatgccttatcagtctgtccaccatcatccttttgggcttgatcatcgcctaccacacacgtgaagtccagctcttcgtgatcgacaatggcgcggatgactggcggatagccatgacctacgagcgcatcctgtacatcagcctggagatgctggtgtgcgccatccaccccattcctggcgagtacaagttcttctggacggcacgcctggccttctcctacacaccctcccgggcggaggccgatgtggacatcatcctgtctatccccatgttcctgcgcctgtacctgatcgcccgagtcatgctgctgcacagcaagctcttcaccgatgcctcgtcccgcagcatcggggccctcaacaagatcaacttcaacacccgctttgtcatgaagacgctcatgaccatctgccctggcactgtgctgctcgtgttcagcatctctctgtggatcattgctgcctggaccgtccgtgtctgtgaaaggtaccatgaccagcaggacgtaactagtaactttctgggtgccatgtggctcatctccatcacattcctttccattggttatggggacatggtgccccacacatactgtgggaaaggtgtctgtctcctcactggcatcatgggtgcaggctgcactgcccttgtggtggccgtggtggcccgaaagctggaactcaccaaagcggagaagcacgttcataacttcatgatggacactcagctcaccaagcggatcaagaatgctgcagccaatgtccttcgggaaacatggttaatctataaacacacaaagctgctaaagaagattgaccatgccaaagtgaggaaacaccagaggaagttcctccaagctatccaccagttgaggagcgtcaagatggaacagaggaagctgagtgaccaagccaacactctggtggacctttccaagatgcagaatgtcatgtatgacttaatcacagaactcaatgaccggagcgaagacctggagaagcagattggcagcctggagtcgaagctggagcatctcaccgccagcttcaactccctgccgctgctcatcgccgacaccctgcgccagcagcagcagcagctcctgtctgccatcatcgaggcccggggtgtcagcgtggcagtgggcaccacccacaccccaatctccgatagccccattggggtcagctccacctccttcccgaccccgtacacaagttcaagcagttgctaaataaatctccccactccagaagcattacccataggtcttaagatgcaaatcaactctctcctggtcgctttgccatcaagaaacattcagaccagggaacggaaagaagagagaccgagctaattaactaactcatgttcattcagcgtgcttggtccgacatgccttgaaaccagaaatctaatctctgtttaggtgcctctacttgggagcgggaagaggagatgacaggaagcgacgcctctggcagggcccttgctgcagagttggtggagaacagaaatccacgctcaatctcaggtcttcacgcggggggtgggggtcagatgcactgaagtagccaacagcgaagccagtccagaagaggggtccgctgggagggagggttgtgtcaggcttgggggatgggctcttcgccatgggggtctttgaacacacctctctcctttccttttgtctacggaagcctctgggtgacaaaagtaaaagagagctgcccacaacttgccaaaacagatatactcgaatcagactgaaaaaaaaaaaaaaa

SEQ ID NO: 168028 - DNA, 13057 bp, Homo sapiens
  Payload ID: 13051
  Gene Symbol: KCNN3
  Gene Name: potassium channel, calcium activated intermediate/small conductance subfamily N alpha, member 3
  ENST ID: ENST00000618040
  CDS Start-End: 315-2555
gagccagcgaggagtgaagctgagcctggcctcacacgctcctagaggaccacctcctgagagagttctttcaccccctcttctttctccaagctcccctcctgctctccctccctgcccaatacaatgcattcttgagtggcagcgtctggactccaggcagccccagagaaccgaagcaagccaaagagaggactggagccaagatactggtgggggagattggatgcctggctttctttgaggacatctttggagcgagggtggctttggggtgggggcttgtgctgcagggaatacagccaggccccaagatggacacttctgggcacttccatgactcgggggtgggggacttggatgaagaccccaagtgcccctgtccatcctctggggatgagcagcagcagcagcagcagcagcaacagcagcagcagccaccaccgccagcgccaccagcagccccccagcagcccctgggaccctcgctgcagcctcagcctccgcagcttcagcagcagcagcagcagcagcagcagcagcagcagcagcagccaccgcatcccctgtctcagctcgcccaactccagagccagcccgtccaccctggcctgctgcactcctctcccaccgctttcagggcccccccttcgtccaactccaccgccatcctccacccttcctccaggcaaggcagccagctcaatctcaatgaccacttgcttggccactctccaagttccacagctacaagtgggcctggcggaggcagccggcaccgacaggccagccccctggtgcaccggcgggacagcaaccccttcacggagatcgccatgagctcctgcaagtatagcggtggggtcatgaagcccctcagccgcctcagcgcctcccggaggaacctcatcgaggccgagactgagggccaacccctccagcttttcagccctagcaaccccccggagatcgtcatctcctcccgggaggacaaccatgcccaccagaccctgctccatcaccctaatgccacccacaaccaccagcatgccggcaccaccgccagcagcaccaccttccccaaagccaacaagcggaaaaaccaaaacattggctataagctgggacacaggagggccctgtttgaaaagagaaagcgactgagtgactatgctctgatttttgggatgtttggaattgttgttatggtgatagagaccgagctctcttggggtttgtactcaaaggactccatgttttcgttggccctgaaatgccttatcagtctgtccaccatcatccttttgggcttgatcatcgcctaccacacacgtgaagtccagctcttcgtgatcgacaatggcgcggatgactggcggatagccatgacctacgagcgcatcctgtacatcagcctggagatgctggtgtgcgccatccaccccattcctggcgagtacaagttcttctggacggcacgcctggccttctcctacacaccctcccgggcggaggccgatgtggacatcatcctgtctatccccatgttcctgcgcctgtacctgatcgcccgagtcatgctgctgcacagcaagctcttcaccgatgcctcgtcccgcagcatcggggccctcaacaagatcaacttcaacacccgctttgtcatgaagacgctcatgaccatctgccctggcactgtgctgctcgtgttcagcatctctctgtggatcattgctgcctggaccgtccgtgtctgtgaaagtcctgaatcaccagcccagccttctggctcatcacttcctgcttggtaccatgaccagcaggacgtaactagtaactttctgggtgccatgtggctcatctccatcacattcctttccattggttatggggacatggtgccccacacatactgtgggaaaggtgtctgtctcctcactggcatcatgggtgcaggctgcactgcccttgtggtggccgtggtggcccgaaagctggaactcaccaaagcggagaagcacgttcataacttcatgatggacactcagctcaccaagcggatcaagaatgctgcagccaatgtccttcgggaaacatggttaatctataaacacacaaagctgctaaagaagattgaccatgccaaagtgaggaaacaccagaggaagttcctccaagctatccaccagttgaggagcgtcaagatggaacagaggaagctgagtgaccaagccaacactctggtggacctttccaagatgcagaatgtcatgtatgacttaatcacagaactcaatgaccggagcgaagacctggagaagcagattggcagcctggagtcgaagctggagcatctcaccgccagcttcaactccctgccgctgctcatcgccgacaccctgcgccagcagcagcagcagctcctgtctgccatcatcgaggcccggggtgtcagcgtggcagtgggcaccacccacaccccaatctccgatagccccattggggtcagctccacctccttcccgaccccgtacacaagttcaagcagttgctaaataaatctccccactccagaagcattacccataggtcttaagatgcaaatcaactctctcctggtcgctttgccatcaagaaacattcagaccagggaacggaaagaagagagaccgagctaattaactaactcatgttcattcagcgtgcttggtccgacatgccttgaaaccagaaatctaatctctgtttaggtgcctctacttgggagcgggaagaggagatgacaggaagcgacgcctctggcagggcccttgctgcagagttggtggagaacagaaatccacgctcaatctcaggtcttcacgcggggggtgggggtcagatgcactgaagtagccaacagcgaagccagtccagaagaggggtccgctgggagggagggttgtgtcaggcttgggggatgggctcttcgccatgggggtctttgaacacacctctctcctttccttttgtctacggaagcctctgggtgacaaaagtaaaagagagctgcccacaacttgccaaaacagatatactcgaatcagactgaaaaaaaaaaaaaaagacacagacaaataaaaagccagattttccactcgatattaatacccacataaacctgtgtgtttgcaaacgtgtacatgtacacacatacacatcccacgttcgcttcaggtcctttcttatttgagcttaatccaaataaaaagggacttgacaccttaccctgcatacaataggcaccccttacatgtgttttgagttggtctgaatctgaacatggggtgctttcagttcaggtagttagctagttctggccacattctgagtttcactgaagatgtggatcccttcagacataatgcacattgctttgtcctggatatgcaccttgcttgatttgaaatggatgccaagccaaaattgttggcattcaggagggataagcaggcttctaaaaataacagcatctgcagagttttcttcttccatccaaacaagttgtgtttcgatggtccacatgaccaggtgtatgtctgtaagtgtggagggagaggacaagaaattgtgcatgtgtgtgcagacatgcacaaacaggagcaatccaataacaccttagtgaatagaaatatggttggggatttgctgagctgtatttatccagcaacaggtttccagccccagatgttagtagtgcaaaagggccaagtgcctcaattgtgagcctctgagctaggaggagaagtgatgaagagtggcctatgtggtcccttctacctgaccttaagtcatctcaaaatgaaatattgtgagaatgaagggaacccttagggaaccttgtgggtaaggtaagtggacatggatttgtcagtagcctgttcctactgtgccatgttaatcttggtgcgaaaaactattccaatacatctcaaactccaagagacttcagaaacatcaagatttagtgtaatgagcggcgcagaaaaatgttttcattgctccataatctgaccacacgtaacatttgtgacgtgaaaaccatgactttctcattctgaggtctttggtttctgcctgtgggaaattgaatggcactgtatggactatttcatctgttgatggtaaaacaaaagggtgatttttttgcttgtggttgtcatcttgggtttacctttgtaagaagacatcatcaccattctgaaggcagtggcttggcatggagatttttattctgtagcactgggcctgttcttctaaggacagcacaaggtagacaattgtagagccaaggccactttttcaggaagatctagtctcttgctaaccctcttctttctctcttgctattgctgctgctcttttgatggtttatagtcttaatggcctgccttgataattcctttgaacactttcattagttgttttgcataccagagatgccgcacctgctgttggcttatttttttacttgttctattaactgttgattatctgaatgtttcccctcctccttgtttcatgtcccaagaatggtgctcctgttttcagtgacagttcagctgaacatataagcagatgtgtaaacagatgaagtaaccatgcagtttccttgtggcattagttccatttcacaaagtgaagaccactggtgggctgatctgagtgtgccaatcctgatcatttaaacctacagccttcaactggtgattcctacccaccgttttcattctgctataaccctgtgatatgtgtgcgtgtgggtgtgagtgtgggtgtgtgcacatatagagatttagtcttaatttcaaccaaatgacatgcaagattccactgccactcttcctggccaaaagtgtgcacagactgtgatttattcattgtggtctgtgactttaacccatcattgatgctctcacttaggtaaaccctaaagaccaaactagcaacactagtcaagggagtgactggagttatttctggtagcagtagccactggcatcctagaaacacatggacatttgtagcatgaattgacctattggtagtgcaatagctatacatgatttttattcttggcaaaagaaaatgcttcaaaaaaaaagtgatcaaacctgcacattgatcctgtaatagcaaatggaaggctatttctctgtactagcatttcagctttatgtgggaaagttacccgttctcctgcaagtacaatcaacccttgatgacttaagtattaattattctgggtgtagctcacccaagttttcttcctacatcttttggctaattccaccacacctcagcatcacagtcagatgggaaaaggggcaggtggattctcatgtcatgccttcttgtaccttattttcaagttttgtggtggaggaggtttaattatctgctcaagaatctggtatatatagccaggtgcggtggctcatgcctgtaatcccaggactttgggcaaggcgagaggatcacctgaggtcaggagttcaagaccagcctggccaacatggcaaaaccccatctctactaaaaatacaaaaattagctgggtttggtggtggacacctgtagtcccagctacttgggaggctgcggcaggagaatcacttgaaccccggaagtggaggttgcagtgagccaagatcgtgccattgcactccagcttgggtgaccgagcaagactccgtctcaaaaaaaaaaaaaaaatcggctatatgtaaaaactattaattatgtaacctcactccaatactgtactgatcaagatctgcccactcctagaggactgacccaatggcagatcccctactataatctttctgacaactcagtgacaggtaaaatcactctaatattcctaaaatatctagacacttgaattagaaatacagaaccacccccacccctgccattgcttaagccatattaaagcttcatgtactgtaaagtcagggatgtactgtgatactttaagaccactaatctcagtggaatttcaggacatagcattagttggtaaattacaccagactaggggctcactcctccttagattgaagtccaaataaaagtcttcacctttggatcaaaggccacatatatatgatcatcatcaataaattgtcataaagtgtctatgaactgctcttgccatcttcctaatacgtaacttcatgacatcatgtctctagaagtgcttaatacaatccaaaagaacaaggggggaaggccccaagtcaccactgaccgacctcagcaggggccagtggtagaacaacaatcttgtgaattaggagacatagaaaatgtacgcaaaagtaaattccaagcgctgagcatgtacaagctatttttattattaaaagccaagaaggaagagcattgaagaagtaatgattttaatatagtgggggatttcccccttaaatttttataatttccttgtgaataaacaatcatggaaaagaagaaacctagtcatacaaaatcagaataaataaaaatcttaagactggatccacatctttggccaattcatataagcacctaatacatcaatttctctgtacttaaaatgaagagaataattaatattcttaagtacaatgttttcaatagagaacaaatgaaatcacctttgtcatcaacagcagcccagactgactgtatctagatcacaccttgatgttacgtttgaatgcagtcagtagttaccaaaaagtaattagtgcacattaaatagtggtaaaatcagcagggagaaatatgggattagcacgtagttccagaaccttcctcctcctccagagtgcaactcaacaaacagtacactccaaattaagaatcaatgtttcatcccaggacaaacggtgttgctcccatcacagtaccacaactgagatactgtgaagtcattgcactaccagtaggttactactcttttgaagttactgtttttaaatcctaaaatatgtccccagttttctacattcattcttcttcccctaagagttgctagaagcagatgaaggatccctattgactctgcagggtttgatttcagtaccttagacagctatctggtgacttcccagtaggcacgaacaaccccttctctccccttgcagtcggtgggcttgatgacgccccagacagtatcctttccttctctactgccgccaaaataaacattagggaaatgggatcattaacaccactgagaaaggagtttacagggatcgcaatagtaactgtctgcttgtggtagtagaaagcttgtgccaggctgcatgaatagaaattaatgttaaactcctgttagacgagtaatatgtagatttttattgaaacagaccacagcttattaaaaagtactcagtgcaatggtatatacatatatacagatagaaaaaaatataactgtgatctttttgtcttacgccattactggaaacacccaaacgtgaactggagttccctctgaacaaaaccattgtcaaatcttcaacatatgacctccaaatctaggtgccaagtgccctgtgacagttgtttacacacctgaaaaatgtatcctggaagctgtaatcttgggcctgggctatgtgttgaaacaagcaaaagagacacatcgtgaccaaccaagctggtggaggaaaagcacaaaattcaactccaacctgcagttaggatcccaaagagatgttgacatttatagccaaaaagaaaaagtacatatatatatatatatatatatatatatatatatatatatatatatatctgaatcagatcgaagcagccaacgtccagcttcactcaagaaggacaaggaataaacaacattctctagctgtgtcatgttgtctcagtttttgaatctcaaccaggactgatccaccttcatcagatacgttttttaatggcgcaacaactcaattttggtcccagactctccattctgcactggccacgagaacaacaagagaatgacaggatgttaatggaggaaacattttcatggcaagctcagaaactgaagtgtttatattcagaatcagatgagctttaatatgaatttgcatcttgcctctgtactgcttgctattttttaatgataggagaaagcataacagtttattttaaatatgaaatatattgatatattataaaatatattgtaactttcaattaacattttgtatcaaactagtgtttagcaggtccactgtcagcctgctctcccaatgactgtttctgagtacacatcactgttagtgattgccgggcacccagaaaaagggtcctcctaccacagcctactgaactgccatattctaattctccaaggcctgggtattagagacaaaagaacattattccaagagtagaggaataattctaccctaaattctatcaagccatttcagaagagattttaaaagccatcactcctttagtagctctgcaaagccagtttaataaaagttcaggctctttctatataaattcaaaggcctcattacataaattatataagtctcaaacctagccaaccagttttcctttgacaatgtcagaattggacataagaaagagtcctgttttcctgtaacttaaaatactcaaaatcctaggcattctgagtttctccatgtacgtgaaaccggggtcggctttccaaactacacaaggcccaacaagagtccagtgtgcagatgtgcttttctaaattggcaatacccttgagggagcaaggttcccacatgtttatcaaggacatggagcccagctcctaagggagtgatgggaggagccggcaggacatgaacagccagagccagcaaagagccgggctgccttttctgctagcttcctctagctgggaggaaataaagggttcccgttgagatattgtcctttatagcaaaattaagcaactcatggaatctacacccctctttctctacagagcagctgagacatacatgtagaagttctcagttccctccttcatatggctaaggcactacttctagatgaaaacaggatgtgttcggttacagaataaagattttctagaatcagtgagcctcttctcacctgggaccctcacttgctgttgttgctttggtgcaatattgtacaggtgcaaaccaggttgcatcggggcagattaactgagcctatgtgtctcttcccttcccaagccctgaaaattcacatagatttacagatagtgcaaaacaacaagttttctcctgggaaaaggctggaatccttcaaatttcaatttatatgagcttaaaggtatataagtcatggggctcactgacattaggtattcatgctgtttgaaagagaaatgtctaaatgcccgttttcagtctgtttgtgtagctgagccctaacttgtacacaagttttcttgttatggagctaaattctctcagtgcctgtattactcctcagttatatgttaggccgagctccactaaagccatctgaactccagggcacttgtttttatcaggttacttactcaccggataatggaaattggcttattttcaattttacaattgactgatgaatgtattggtggtaattgatttatttcttcacttttttttgctactaaatgattttttcttttttaaaattattattattattattttgagatggagtctcactctgtcgcccaggctggagtgcagtggcgccatctcagctcactgcaagctctgcctcctgggttcatgcaattctcctgcctcagcctcccgagtagctgggattacaggtgcgtgccaccacgaccagctaatttttttgtatttttagtagagacagggtttcatcatgttaaccaggatggtctcgatctcctgacctcgtgatccacctgcctgggcctcccaaagtgagccactgtgcctggcccagtaagtgcttttttcttttggtttttccttctaacactgctcagaccaagacttacatttataaagagcaaatatattctgacctttcccctcaaagttgtattccatctagaatcaaggaaacaaatgcaaattcatcatttggggaaagcagacctcttgacagtaattcaagtccatggctatatgctaacccttgctactcaaagtgtggtccacagaccagcagcgttagcatcatctgtaagcttgttagaaatgcagaatctcaggccccacatcaaaccttcttcatcagaattggccttttaacaaatccccaggtgacctgtatgcaccagaaatattgataagcactggcctcacctcaccgtagtgataactaacctcgttaataattagagaatgaagctatctcttccttgagtctcatttacagaattatttgaagatgtgaaggtcctgaatgatcataaggattaaaaaaatgcatctttaaattccacttgaggttatataacttggatggtctacatcaaacataataaagtcaataagagatagtctttttccggtcttacctaaatagcactccatatccttgagccacctcaaagcccccatttttaagttttagtctttttttttttagaccagactagcaaagccatcagaatatcaggtggaacctcagggcaggtcctctggaaggctacaggagtctctgcttagcatagtacagaaattgttgtgtttctcgatccttgtgttcttcccttgaggaactcagcatctcaccagtaagaactcccctcccctagaggaaaatagcaagagaagttagtttaaccatctagaaacattgctaatctccttgaaagccaattctcttactcattgcaccaacaagaaacactccaaggtgggcaaggaaagacgtgaattctgatattggcgccataactcgatatgtacccagaaacagttatgttctaaattaatggctttaacctgttcattgtaaaaagtgccttggacttcaatctaaagaggtcagtataaatatgtatgtgtgtgtgtgacgtgtatgtaggcaaatatttacagatttatacatacataggtgcacacacatatacccgcacattcatatataatatatacatacatatataaatgcttcataatatatcatattgctattcacagctccatttcttttgtctggtcctatgtttatttgtttagtgagacctttacatagagaggttctattcggaacattgatgtattttttgtttgttttttactttttattaaaaaggtaaaggatattaaaaaaaaaaaaaaaagtcaagtgcctgaaggttttgaatggagttacggtaaactttctcaggtcaccaaagaggaaacatttttcctttggaaaacatttttctgtttcagtgactttgttttcccttggtggtaatgcataaataagagtggttaaagtgattttgtaagttttatttcaatccatttctgtggttcccataaggcaatagctaaaaatttgttcagtctagtgcccagttttctccacacatcagcatcagaagggcccggtcttcacatgctctgtgtggttttgttcgcgttgttactgtgttccttactaaggaaaggcaaatgaaattgcaggggctggagcttagaccagctccaaatatggcttccttttggtaacacacacagaaggtggactagtgggaagtctctctccctgaagcaggtgggaacctgtgtcttagaaggcagaggagtcccagtgaactctccacagctccatgggccctgcctgtctacagttatacaactgcctgtatgagtcagcctttctctaccttagccaaaggtcttctctttctgtggtgtgacagcttgtaatgaaccaacttgctctggttagaagtccctagagctccaggaagagtcgccaggtttccattgctgtgctcaaagctcaaggacacattatacttctttaaaccaactaaatctctctagctccctgcccccatggtgacactttcataataggcagggccaagtcagagaggtcatgccctgtatacagtgtcaatcagaagagacactgcaaaatgtcagaggtgaccagaaagacaacagatctctccagctgtcctcacagctgcaggcacatttgtggaattgtgagtaggaaggcttggcagccaggggatgggaaatgaatttccccaagttgaaaaccctgtacccttactttccttcccataaatttttctgtagttctaggtaaataataataataataaaaatgcaaattaggtgctttagaaggagtatgtaatatctgggactttttctaagttggtagacctaaaaaatgttttcaaaaatatatctagctgcatttctactgctgtcattccttaaagctcttcctccaaaaactccatatgaatgaatacatttaccaactcagtgattactaaataatagtactttatacttatacacagtaatacctttcatctaaggatctcaaatgccaatatattagtcatcaccctgtaaggtggatgacatattattcccattattccaatgggaaaattgggccatagaaaactgaggagcaaatgactcatctacaggaattaaatggaaaaaacaggctaggatttctcagcacactttaggagtgaatgaaaacttacaggcttcagttctactgctggccaccattggatttgtaagatccaggatgtgtattgaccacatgtgtccagacccaggcttagggcatctggaatgagagtggtgggctggtgtgtgggtctgaggatctggatgggagactgcattttcttctctgtgcaaaatatggaagtgtgaccttgaaggtgggcttagtctatggccttccccactcctgcttgaactgaagctggagagaatgggcatttttaaatgttacggcatatgctaatataatattatggcattaaataaaaacaagaagagaactgact

SEQ ID NO: 168029 - DNA, 2240 bp, Homo sapiens
  Payload ID: 13052
  Gene Symbol: KCNN4
  Gene Name: potassium channel, calcium activated intermediate/small conductance subfamily N alpha, member 4
  Uniprot ID: O15554
  ENST ID: ENST00000262888
  CDS Start-End: 397-1680
gtccttcggtgtctgggtgtggtgagtagaggtgtgtgtcacaaagtacagaccattgtgtgtgacaaagcccatcgtgtgtctgtgtgtgtctttatccacgtggatggacgtctctttcttgctctgccccaagacacaccctagcccctccttattctcaaaagggggagctggggagcctccccctaccctggggcctcccctgcccctccccgccctgcctggccgtcaccactccccagagggcacagggctctgctgtgcctcagagcaaaagtcccagagccagcagagcaggctgacgacctgcaagccacagtggctgccctgtgcgtgctgcgaggtgggggaccctgggcaggaagctggctgagccccaagaccccgggggccatgggcggggatctggtgcttggcctgggggccttgagacgccgaaagcgcttgctggagcaggagaagtctctggccggctgggcactggtgctggcaggaactggcattggactcatggtgctgcatgcagagatgctgtggttcggggggtgctcgtgggcgctctacctgttcctggttaaatgcacgatcagcatttccaccttcttactcctctgcctcatcgtggcctttcatgccaaagaggtccagctgttcatgaccgacaacgggctgcgggactggcgcgtggcgctgaccgggcggcaggcggcgcagatcgtgctggagctggtggtgtgtgggctgcacccggcgcccgtgcggggcccgccgtgcgtgcaggatttaggggcgccgctgacctccccgcagccctggccgggattcctgggccaaggggaagcgctgctgtccctggccatgctgctgcgtctctacctggtgccccgcgccgtgctcctgcgcagcggcgtcctgctcaacgcttcctaccgcagcatcggcgctctcaatcaagtccgcttccgccactggttcgtggccaagctttacatgaacacgcaccctggccgcctgctgctcggcctcacgcttggcctctggctgaccaccgcctgggtgctgtccgtggccgagaggcaggctgttaatgccactgggcacctttcagacacactttggctgatccccatcacattcctgaccatcggctatggtgacgtggtgccgggcaccatgtggggcaagatcgtctgcctgtgcactggagtcatgggtgtctgctgcacagccctgctggtggccgtggtggcccggaagctggagtttaacaaggcagagaagcacgtgcacaacttcatgatggatatccagtataccaaagagatgaaggagtccgctgcccgagtgctacaagaagcctggatgttctacaaacatactcgcaggaaggagtctcatgctgcccgcaggcatcagcgcaagctgctggccgccatcaacgcgttccgccaggtgcggctgaaacaccggaagctccgggaacaagtgaactccatggtggacatctccaagatgcacatgatcctgtatgacctgcagcagaatctgagcagctcacaccgggccctggagaaacagattgacacgctggcggggaagctggatgccctgactgagctgcttagcactgccctggggccgaggcagcttccagaacccagccagcagtccaagtagctggacccacgaggaggaaccaggctactttccccagtactgaggtggtggacatcgtctctgccactcctgacccagccctgaacaaagcacctcaagtgcaaggaccaaagggggccctggcttggagtgggttggcttgctgatggctgctggaggggacgctggctaaagtgggtaggccttggcccacctgaggccccaggtgggaacatggtcacccccactctgcataccctcatcaaaaacactctcactatgctgctatggacgacctccagctctcagttacaagtgcaggcgactggaggcaggactcctgggtccctgggaaagagggtactaggggcccggatccaggattctgggaggcttcagttaccgctggccgagctgaagaactgggtatgaggctggggcggggctggaggtggcgccccctggtgggacaacaaagaggacaccatttttccagagctgcagagagcacctggtggggaggaagaagtgtaactcaccagcctctgctcttatctttgtaataaatgttaaagccagaa

SEQ ID NO: 168030 - DNA, 1190 bp, Homo sapiens
  Payload ID: 13052
  Gene Symbol: KCNN4
  Gene Name: potassium channel, calcium activated intermediate/small conductance subfamily N alpha, member 4
  ENST ID: ENST00000600909
  CDS Start-End: 1-180
gtggacatctccaagatgcacatgatcctgtatgacctgcagcagaatctgagcagctcacaccgggccctggagaaacagattgacacgctggcggggaagctggatgccctgactgagctgcttagcactgccctggggccgaggcagcttccagaacccagccagcagtccaagtagctggtgagggggctgggacttgggcaggaaggcatcctggaggaagggttcctgtggccagcaccctatgtggctaagggggcgggggatggctgggagacaaggccgccttttctcatcagctctggcactgtctggaggaaaggactcagttcggggctggactggcagtgaaggaagatggtgtaccctctccccttcactgacccttgatggccttctccctctttgcttggtctctctctctctctctgcctgtcctgggcacattgtctggctgtccatccaatgtctctgtctaaatgccctcctgccccctggcctcggggcccggaaacacctgccccctgtctcccacttctgcccaccggtttctgtctgcacctcggtgtgtcccactctcactctccctcttcctggcctgcctctccatcagtctctctgtctctccaggacccacgaggaggaaccaggctactttccccagtactgaggtggtggacatcgtctctgccactcctgacccagccctgaacaaagcacctcaagtgcaaggaccaaagggggccctggcttggagtgggttggcttgctgatggctgctggaggggacgctggctaaagtgggtaggccttggcccacctgaggccccaggtgggaacatggtcacccccactctgcataccctcatcaaaaacactctcactatgctgctatggacgacctccagctctcagttacaagtgcaggcgactggaggcaggactcctgggtccctgggaaagagggtactaggggcccggatccaggattctgggaggcttcagttaccgctggccgagctgaagaactgggtatgaggctggggcggggctggaggtggcgccccctggtgggacaacaaagaggacaccatttttccagagctgcagagagcacctggtggggaggaagaagtgtaactcaccagcctctgctcttatctttgtaataaatgttaaagccagaa

SEQ ID NO: 168031 - DNA, 1003 bp, Homo sapiens
  Payload ID: 13052
  Gene Symbol: KCNN4
  Gene Name: potassium channel, calcium activated intermediate/small conductance subfamily N alpha, member 4
  ENST ID: ENST00000598836
  CDS Start-End: 1-496
tgtctgctgcacagccctgctggtggccgtggtggcccggaagctggagtttaacaaggcagagaagcacgtgcacaacttcatgatggatatccagtataccaaagaggaaggagtctcatgctgcccgcaggcatcagcgcaagctgctggccgccatcaacgcgtgagggccgctttgtatgcacacgtgtccatgtgcacccatgtccaagtcacctctctgcacggctgtgtgtgtgcatgtccatgcctgtccaggttccgccaggtgcggctgaaacaccggaagctccgggaacaagtgaactccatggtggacatctccaagatgcacatgatcctgtatgacctgcagcagaatctgagcagctcacaccgggccctggagaaacagattgacacgctggcggggaagctggatgccctgactgagctgcttagcactgccctggggccgaggcagcttccagaacccagccagcagtccaagtagctggacccacgaggaggaaccaggctactttccccagtactgaggtggtggacatcgtctctgccactcctgacccagccctgaacaaagcacctcaagtgcaaggaccaaagggggccctggcttggagtgggttggcttgctgatggctgctggaggggacgctggctaaagtgggtaggccttggcccacctgaggccccaggtgggaacatggtcacccccactctgcataccctcatcaaaaacactctcactatgctgctatggacgacctccagctctcagttacaagtgcaggcgactggaggcaggactcctgggtccctgggaaagagggtactaggggcccggatccaggattctgggaggcttcagttaccgctggccgagctgaagaactgggtatgaggctggggcggggctggaggtggcgccccctggtgggacaacaaagaggacaccatttttccagagctgcagagagcacctggtggggaggaagaa

SEQ ID NO: 168032 - DNA, 648 bp, Homo sapiens
  Payload ID: 13052
  Gene Symbol: KCNN4
  Gene Name: potassium channel, calcium activated intermediate/small conductance subfamily N alpha, member 4
  ENST ID: ENST00000600408
  CDS Start-End: 1-342
tcagacacactttggctgatccccatcacattcctgaccatcggctatggtgacgtggtgccgggcaccatgtggggcaagatcgtctgcctgtgcactggagtcatgggtgtctgctgcacagccctgctggtggccgtggtggcccggaagctggagtttaacaaggcagagaagcacgtgcacaacttcatgatggatatccagtataccaaagagatgaaggagtccgctgcccgagtgctacaagaagcctggatgttctacaaacatactcgcaggaaggagtctcatgctgcccgcaggcatcagcgcaagctgctggccgccatcaacgcgtgagggccgctttgtatgcacacgtgtccatgtgcacccatgtccaagtcacctctctgcacggctgtgtgtgtgcatgtccatgcctgtccaggtcaggacacccaggttccgccaggtgcggctgaaacaccggaagctccgggaacaagtgaactccatggtggacatctccaagatgcacatgatcctgtatgacctgcagcagaatctgagcagctcacaccgggccctggagaaacagattgacacgctggcggggaagctggatgccctgactgagctgcttagcactgccctggggccgag

SEQ ID NO: 168033 - DNA, 983 bp, Homo sapiens
  Payload ID: 13052
  Gene Symbol: KCNN4
  Gene Name: potassium channel, calcium activated intermediate/small conductance subfamily N alpha, member 4
  ENST ID: ENST00000599720
  CDS Start-End: 116-289
cccagagccagcagagcaggctgacgacctgcaagccacagtggctgccctgtgcgtgctgcgaggtgggggaccctgggcaggaagctggctgagccccaagaccccgggggccatgggcggggatctggtgcttggcctgggggccttgagacgccgaaagcgcttgctggagcaggagaagtctctggccggctgggcactggtgctggcaggaactggcattggactcatggtgctgcatgcagagatgctgtggttcggggggtgctcgacacactttggctgatccccatcacattcctgaccatcggctatggtgacgtggtgccgggcaccatgtggggcaagatcgtctgcctgtgcactggagtcatgggtgtctgctgcacagccctgctggtggccgtggtggcccggaagctggagtttaacaaggcagagaagcacgtgcacaacttcatgatggatatccagtataccaaagagatgaaggagtccgctgcccgagtgctacaagaagcctggatgttctacaaacatactcgcaggaaggagtctcatgctgcccgcaggcatcagcgcaagctgctggccgccatcaacgcgttccgccaggtgcggctgaaacaccggaagctccgggaacaagtgaactccatggtggacatctccaagatgcacatgatcctgtatgacctgcagcagaatctgagcagctcacaccgggccctggagaaacagattgacacgctggcggggaagctggatgccctgactgagctgcttagcactgccctggggccgaggcagcttccagaacccagccagcagtccaagtagctggacccacgaggaggaaccaggctactttccccagtactgaggtggtggacatcgtctctgccactcctgacccagccctgaacaaagcacctcaagtgcaaggaccaaagggggccctggcttggagtgggttggct

SEQ ID NO: 168034 - DNA, 2029 bp, Homo sapiens
  Payload ID: 13052
  Gene Symbol: KCNN4
  Gene Name: potassium channel, calcium activated intermediate/small conductance subfamily N alpha, member 4
  ENST ID: ENST00000615047
  CDS Start-End: 582-1469
gtccttcggtgtctgggtgtggtgagtagaggtgtgtgtcacaaagtacagaccattgtgtgtgacaaagcccatcgtgtgtctgtgtgtgtctttatccacgtggatggacgtctctttcttgctctgccccaagacacaccctagcccctccttattctcaaaagggggagctggggagcctccccctaccctggggcctcccctgcccctccccgccctgcctggccgtcaccactccccagagggcacagggctctgctgtgcctcagagcaaaagtcccagagccagcagagcaggctgacgacctgcaagccacagtggctgccctgtgcgtgctgcgaggtgggggaccctgggcaggaagctggctgagccccaagaccccgggggccatgggcggggatctggtgcttggcctgggggccttgagacgccgaaagcgcttgctggagcaggagaagtctctggccggctgggcactggtgctggcaggaactggcattggactcatggtgctgcatgcagagatgctgtggttcggggggtgctcgtgggcgctctacctgttcctggttaaatgcacgatcagcatttccaccttcttactcctctgcctcatcgtggcctttcatgccaaagaggtccagctgttcatgaccgacaacgggctgcgggactggcgcgtggcgctgaccgggcggcaggcaacgcttcctaccgcagcatcggcgctctcaatcaagtccgcttccgccactggttcgtggccaagctttacatgaacacgcaccctggccgcctgctgctcggcctcacgcttggcctctggctgaccaccgcctgggtgctgtccgtggccgagaggcaggctgttaatgccactgggcacctttcagacacactttggctgatccccatcacattcctgaccatcggctatggtgacgtggtgccgggcaccatgtggggcaagatcgtctgcctgtgcactggagtcatgggtgtctgctgcacagccctgctggtggccgtggtggcccggaagctggagtttaacaaggcagagaagcacgtgcacaacttcatgatggatatccagtataccaaagagatgaaggagtccgctgcccgagtgctacaagaagcctggatgttctacaaacatactcgcaggaaggagtctcatgctgcccgcaggcatcagcgcaagctgctggccgccatcaacgcgttccgccaggtgcggctgaaacaccggaagctccgggaacaagtgaactccatggtggacatctccaagatgcacatgatcctgtatgacctgcagcagaatctgagcagctcacaccgggccctggagaaacagattgacacgctggcggggaagctggatgccctgactgagctgcttagcactgccctggggccgaggcagcttccagaacccagccagcagtccaagtagctggacccacgaggaggaaccaggctactttccccagtactgaggtggtggacatcgtctctgccactcctgacccagccctgaacaaagcacctcaagtgcaaggaccaaagggggccctggcttggagtgggttggcttgctgatggctgctggaggggacgctggctaaagtgggtaggccttggcccacctgaggccccaggtgggaacatggtcacccccactctgcataccctcatcaaaaacactctcactatgctgctatggacgacctccagctctcagttacaagtgcaggcgactggaggcaggactcctgggtccctgggaaagagggtactaggggcccggatccaggattctgggaggcttcagttaccgctggccgagctgaagaactgggtatgaggctggggcggggctggaggtggcgccccctggtgggacaacaaagaggacaccatttttccagagctgcagagagcacctggtggggaggaagaagtgtaactcaccagcctctgctcttatctttgtaataaatgttaaagccagaa

SEQ ID NO: 168035 - DNA, 6875 bp, Homo sapiens
  Payload ID: 13053
  Gene Symbol: KCNMA1
  Gene Name: potassium channel, calcium activated large conductance subfamily M alpha, member 1
  Uniprot ID: Q12791
  ENST ID: ENST00000286627
  CDS Start-End: 954-4490
ccgggccgctgccgaggggccctgcccacccctgcccagcccggagcccaggcgagccagcgcggcgagcctcctcccctcccgcctgggtcgtcctgagtccgcgcccgctccagttgctgcagctgctgctgctggcggctgcggggagcgcggggcgcgcgccgaagaggcttgggcggcgaggacggggacgaggaggagtcggaggcggcaaggaggaagagcgagcggaggccgaggggctcagcggcgtggcgacaggactagggggtcccgagaacatgggctagcaggcggccacgggccggcggccggacgcggtgaacctgccgcggccgggcgcgcactggcgcggcgagccggagccgagcgcagccgggggaggagggctggcgcaggggcgcccgggcggagggggccgattatccattattaacgagttaccacctaataagcggagagcggctcgttagccgcgcgggaggcgctcggggaagggggtcaccggccgagcgcagcgcacacccgtggcgcacggcgggcggcgcggcgccgaggacacccgggaccgcgcgcggagccggggcgggcccgggggcggcgcagaccccgggcgcgggcggcccgcggcgccccctggctctcggcgctcggggccagcgcagcccggggcgagcggggcgcgggccggggagggggagctgcccgcgcactccatccccctcccccccgggcgggcggcggcggctcgctgtatatatctcggcgcaccccgccaggtcgcgcacagcgccccgagcccaggcgcctccccgcccccctcccgcgctccgcggcggcggcggcggcggcagcagtagcagcaatatggctgttgatgggtgtttggggtggcgctggcggcgggaggagctcccccgagcccctgcgccggctgcccgttgctagctatggcaaatggtggcggcggcggcggcggcagcagcggcggcggcggcggcggcggaggcagcagtcttagaatgagtagcaatatccacgcgaaccatctcagcctagacgcgtcctcctcctcctcctcctcctcttcctcttcttcttcttcctcctcctcttcctcctcgtcctcggtccacgagcccaagatggatgcgctcatcatcccggtgaccatggaggtgccgtgcgacagccggggccaacgcatgtggtgggctttcctggcctcctccatggtgactttcttcgggggcctcttcatcatcttgctctggcggacgctcaagtacctgtggaccgtgtgctgccactgcgggggcaagacgaaggaggcccagaagattaacaatggctcaagccaggcggatggcactctcaaaccagtggatgaaaaagaggaggcagtggccgccgaggtcggctggatgacctccgtgaaggactgggcgggggtgatgatatccgcccagacactgactggcagagtcctggttgtcttagtctttgctctcagcatcggtgcacttgtaatatacttcatagattcatcaaacccaatagaatcctgccagaatttctacaaagatttcacattacagatcgacatggctttcaacgtgttcttccttctctacttcggcttgcggtttattgcagccaacgataaattgtggttctggctggaagtgaactctgtagtggatttcttcacggtgccccccgtgtttgtgtctgtgtacttaaacagaagttggcttggtttgagatttttaagagctctgagactgatacagttttcagaaattttgcagtttctgaatattcttaaaacaagtaattccatcaagctggtgaatctgctctccatatttatcagcacgtggctgactgcagccgggttcatccatttggtggagaattcaggggacccatgggaaaatttccaaaacaaccaggctctcacctactgggaatgtgtctatttactcatggtcacaatgtccaccgttggttatggggatgtttatgcaaaaaccacacttgggcgcctcttcatggtcttcttcatcctcgggggactggccatgtttgccagctacgtccctgaaatcatagagttaataggaaaccgcaagaaatacgggggctcctatagtgcggttagtggaagaaagcacattgtggtctgcggacacatcactctggagagtgtttccaacttcctgaaggactttctgcacaaggaccgggatgacgtcaatgtggagatcgtttttcttcacaacatctcccccaacctggagcttgaagctctgttcaaacgacattttactcaggtggaattttatcagggttccgtcctcaatccacatgatcttgcaagagtcaagatagagtcagcagatgcatgcctgatccttgccaacaagtactgcgctgacccggatgcggaggatgcctcgaatatcatgagagtaatctccataaagaactaccatccgaagataagaatcatcactcaaatgctgcagtatcacaacaaggcccatctgctaaacatcccgagctggaattggaaagaaggtgatgacgcaatctgcctcgcagagttgaagttgggcttcatagcccagagctgcctggctcaaggcctctccaccatgcttgccaacctcttctccatgaggtcattcataaagattgaggaagacacatggcagaaatactacttggaaggagtctcaaatgaaatgtacacagaatatctctccagtgccttcgtgggtctgtccttccctactgtttgtgagctgtgttttgtgaagctcaagctcctaatgatagccattgagtacaagtctgccaaccgagagagccgtatattaattaatcctggaaaccatcttaagatccaagaaggtactttaggatttttcatcgcaagtgatgccaaagaagttaaaagggcatttttttactgcaaggcctgtcatgatgacatcacagatcccaaaagaataaaaaaatgtggctgcaaacggcttgaagatgagcagccgtcaacactatcaccaaaaaaaaagcaacggaatggaggcatgcggaactcacccaacacctcgcctaagctgatgaggcatgaccccttgttaattcctggcaatgatcagattgacaacatggactccaatgtgaagaagtacgactctactgggatgtttcactggtgtgcacccaaggagatagagaaagtcatcctgactcgaagtgaagctgccatgaccgtcctgagtggccatgtcgtggtctgcatctttggcgacgtcagctcagccctgatcggcctccggaacctggtgatgccgctccgtgccagcaactttcattaccatgagctcaagcacattgtgtttgtgggctctattgagtacctcaagcgggaatgggagacgcttcataacttccccaaagtgtccatattgcctggtacgccattaagtcgggctgatttaagggctgtcaacatcaacctctgtgacatgtgcgttatcctgtcagccaatcagaataatattgatgatacttcgctgcaggacaaggaatgcatcttggcgtcactcaacatcaaatctatgcagtttgatgacagcatcggagtcttgcaggctaattcccaagggttcacacctccaggaatggatagatcctctccagataacagcccagtgcacgggatgttacgtcaaccatccatcacaactggggtcaacatccccatcatcactgaactagtgaacgatactaatgttcagtttttggaccaagacgatgatgatgaccctgatacagaactgtacctcacgcagccctttgcctgtgggacagcatttgccgtcagtgtcctggactcactcatgagcgcgacgtacttcaatgacaatatcctcaccctgatacggaccctggtgaccggaggagccacgccggagctggaggctctgattgctgaggaaaacgcccttagaggtggctacagcaccccgcagacactggccaatagggaccgctgccgcgtggcccagttagctctgctcgatgggccatttgcggacttaggggatggtggttgttatggtgatctgttctgcaaagctctgaaaacatataatatgctttgttttggaatttaccggctgagagatgctcacctcagcacccccagtcagtgcacaaagaggtatgtcatcaccaacccgccctatgagtttgagctcgtgccgacggacctgatcttctgcttaatgcagtttgaccacaatgccggccagtcccgggccagcctgtcccattcctcccactcgtcgcagtcctccagcaagaagagctcctctgttcactccatcccatccacagcaaaccgacagaaccggcccaagtccagggagtcccgggacaaacagaagtacgtgcaggaagagcggctttgatatgtgtatccaccgccactgtgtgaaactgtatctgccactcatttccccagttggtgtttccaacaaagtaactttccctgttttcccctgtagtccccccctttttttttacacatatttgcatatgtatgatagtgtgcatgtggttgtcatttttatttcaccaccataaaacccttgagcacaacagcaaataagcagacggaccaaaagttatttatgattctgggggaaaaataacccaaaggcatgctccagacataaatagctcactgcaggaacgagttcacagattagaagggagcacttgtgatcaacgtcagttaggcagagcaagtttatttaatgtaaaagaaaagttgattctgatttatcaggattatcagggtgctttgggttttgattttgttgttgttgttgttttcctttctttctttttttatacacacaataagttagcacatgtttatttgaaacaagcaaccaaacagcaatgaaaacatattgattgtttccagtctctgggccgaagtattgcgaagcatttgaaaagctttcacgatttgtgtagatgattatgaaggacctgcttgttgcaagagaacatcagtgatttttttagttactcaccaaggccttttgtcccagagccagttccctctgggagttcttatgaacatttctcaccttaatatggaggagagaatagtattccaatcatggatgtatcaaattctagtcatttagtttaagtgaaaagaggtttgattgcatattaaattgttattctgtctccttatgttgccatatgaatagctattttttttctttcacttttgacatttgggatgaaaagccatatgtatcataaatatcagatgtaagtcattaaaaactgccttcctgggacttttacatcttttaaaaggtgaattacttaccttatgtacagaataaataatgctcaggaaagagcaagtatttttccatgcattctcaggggatctttttactcccctttgtttgattagttagggccccaatgccaggtaggaggaagggctggggcaatggtagagtgagaggaagacaaacccagctgcagatcatgcttttctaggagccgacatgctaaataaattagaatgtaggaggatcagccacagttgactcaacaaagacaaaagccagccaccaccttcaactgttggcacagctgtgcggtgctggctgtcccaatgcagaaagctggtgggaaggaattcctcatcatcactttctttaatgtagccaatttaggcagggtaatgacggcaatagagagctgctccttgtcattatgagacgtgggataagaagagtgcaacagtgagccaaacacattttggtatagttatttttttcttcttttgttttctttcttttttaacacttagtaagcatgagaggagaggtagaaaaatacccttttttcaacatatagttgtcagatgctttgtgcatgcaaatcatgctttaggcagtgcggtatttcttaaaaactggccaattcaccataaccaatttcccttatggatggactaggctggtatatacatatttgaaaagttttacttcaaagaattccatcgaatagaataggggtaaaagggaggaggaaaacatgtcacagctgtaccatctctaaaaaggtgtttttatggtgaatgttttggatttagattttggatcccccgtcccctcaagcatgatagttttggatatttgcttgctgtgtgaattgacaagcacttttactgacaaatggtgaggctcagtcagaacctccaccctcccccacaccaaagacaggggcagcgtagtattcaaaccagtattgtggtggggaataattgtatacatgtaaattatcaagccctatgagtggaagaattttttcaaattatttttgtccctctatatattgatttatattatgtataactatctctttatataaactatatataattatatatatataactatataattatatatatataactatatatataactatatatatgtatcccctagtattggatcatgaagagctcttcatgcattctttgcaaaggaggttataaagttacgccctcagaacatttataactataagaatgtgccagttaaagtgctcaacaggaaatatgacagtttaaaagcattgtaaaactcacatagcttacttctctctctaaagtgcaacaaggatgaatagaatgggccaaggtatgacaattaatggttctgcatgacctagccactgctgggggttttcttctataacgttgtccttgtgaaaacttttgtgaaattaaaaaaaaaggagttacaaat

SEQ ID NO: 168036 - DNA, 6100 bp, Homo sapiens
  Payload ID: 13053
  Gene Symbol: KCNMA1
  Gene Name: potassium channel, calcium activated large conductance subfamily M alpha, member 1
  Uniprot ID: Q12791
  ENST ID: ENST00000286628
  CDS Start-End: 1-3711
atggcaaatggtggcggcggcggcggcggcagcagcggcggcggcggcggcggcggaggcagcagtcttagaatgagtagcaatatccacgcgaaccatctcagcctagacgcgtcctcctcctcctcctcctcctcttcctcttcttcttcttcctcctcctcttcctcctcgtcctcggtccacgagcccaagatggatgcgctcatcatcccggtgaccatggaggtgccgtgcgacagccggggccaacgcatgtggtgggctttcctggcctcctccatggtgactttcttcgggggcctcttcatcatcttgctctggcggacgctcaagtacctgtggaccgtgtgctgccactgcgggggcaagacgaaggaggcccagaagattaacaatggctcaagccaggcggatggcactctcaaaccagtggatgaaaaagaggaggcagtggccgccgaggtcggctggatgacctccgtgaaggactgggcgggggtgatgatatccgcccagacactgactggcagagtcctggttgtcttagtctttgctctcagcatcggtgcacttgtaatatacttcatagattcatcaaacccaatagaatcctgccagaatttctacaaagatttcacattacagatcgacatggctttcaacgtgttcttccttctctacttcggcttgcggtttattgcagccaacgataaattgtggttctggctggaagtgaactctgtagtggatttcttcacggtgccccccgtgtttgtgtctgtgtacttaaacagaagttggcttggtttgagatttttaagagctctgagactgatacagttttcagaaattttgcagtttctgaatattcttaaaacaagtaattccatcaagctggtgaatctgctctccatatttatcagcacgtggctgactgcagccgggttcatccatttggtggagaattcaggggacccatgggaaaatttccaaaacaaccaggctctcacctactgggaatgtgtctatttactcatggtcacaatgtccaccgttggttatggggatgtttatgcaaaaaccacacttgggcgcctcttcatggtcttcttcatcctcgggggactggccatgtttgccagctacgtccctgaaatcatagagttaataggaaaccgcaagaaatacgggggctcctatagtgcggttagtggaagaaagcacattgtggtctgcggacacatcactctggagagtgtttccaacttcctgaaggactttctgcacaaggaccgggatgacgtcaatgtggagatcgtttttcttcacaacatctcccccaacctggagcttgaagctctgttcaaacgacattttactcaggtggaattttatcagggttccgtcctcaatccacatgatcttgcaagagtcaagatagagtcagcagatgcatgcctgatccttgccaacaagtactgcgctgacccggatgcggaggatgcctcgaatatcatgagagtaatctccataaagaactaccatccgaagataagaatcatcactcaaatgctgcagtatcacaacaaggcccatctgctaaacatcccgagctggaattggaaagaaggtgatgacgcaatctgcctcgcagagttgaagttgggcttcatagcccagagctgcctggctcaaggcctctccaccatgcttgccaacctcttctccatgaggtcattcataaagattgaggaagacacatggcagaaatactacttggaaggagtctcaaatgaaatgtacacagaatatctctccagtgccttcgtgggtctgtccttccctactgtttgtgagctgtgttttgtgaagctcaagctcctaatgatagccattgagtacaagtctgccaaccgagagagccgtatattaattaatcctggaaaccatcttaagatccaagaaggtactttaggatttttcatcgcaagtgatgccaaagaagttaaaagggcatttttttactgcaaggcctgtcatgatgacatcacagatcccaaaagaataaaaaaatgtggctgcaaacggcccaagatgtccatctacaagagaatgagacgggcatgttgttttgattgcggacgttctgagcgtgactgctcatgcatgtcaggccgtgtgcgtggtaacgtggacacccttgagagagccttcccactttcttctgtctctgttaatgattgctccaccagtttccgtgcctttgaagatgagcagccgtcaacactatcaccaaaaaaaaagcaacggaatggaggcatgcggaactcacccaacacctcgcctaagctgatgaggcatgaccccttgttaattcctggcaatgatcagattgacaacatggactccaatgtgaagaagtacgactctactgggatgtttcactggtgtgcacccaaggagatagagaaagtcatcctgactcgaagtgaagctgccatgaccgtcctgagtggccatgtcgtggtctgcatctttggcgacgtcagctcagccctgatcggcctccggaacctggtgatgccgctccgtgccagcaactttcattaccatgagctcaagcacattgtgtttgtgggctctattgagtacctcaagcgggaatgggagacgcttcataacttccccaaagtgtccatattgcctggtacgccattaagtcgggctgatttaagggctgtcaacatcaacctctgtgacatgtgcgttatcctgtcagccaatcagaataatattgatgatacttcgctgcaggacaaggaatgcatcttggcgtcactcaacatcaaatctatgcagtttgatgacagcatcggagtcttgcaggctaattcccaagggttcacacctccaggaatggatagatcctctccagataacagcccagtgcacgggatgttacgtcaaccatccatcacaactggggtcaacatccccatcatcactgaactagtgaacgatactaatgttcagtttttggaccaagacgatgatgatgaccctgatacagaactgtacctcacgcagccctttgcctgtgggacagcatttgccgtcagtgtcctggactcactcatgagcgcgacgtacttcaatgacaatatcctcaccctgatacggaccctggtgaccggaggagccacgccggagctggaggctctgattgctgaggaaaacgcccttagaggtggctacagcaccccgcagacactggccaatagggaccgctgccgcgtggcccagttagctctgctcgatgggccatttgcggacttaggggatggtggttgttatggtgatctgttctgcaaagctctgaaaacatataatatgctttgttttggaatttaccggctgagagatgctcacctcagcacccccagtcagtgcacaaagaggtatgtcatcaccaacccgccctatgagtttgagctcgtgccgacggacctgatcttctgcttaatgcagtttgaccacaatgccggccagtcccgggccagcctgtcccattcctcccactcgtcgcagtcctccagcaagaagagctcctctgttcactccatcccatccacagcaaaccgacagaaccggcccaagtccagggagtcccgggacaaacagaagtacgtgcaggaagagcggctttgatatgtgtatccaccgccactgtgtgaaactgtatctgccactcatttccccagttggtgtttccaacaaagtaactttccctgttttcccctgtagtccccccctttttttttacacatatttgcatatgtatgatagtgtgcatgtggttgtcatttttatttcaccaccataaaacccttgagcacaacagcaaataagcagacggaccaaaagttatttatgattctgggggaaaaataacccaaaggcatgctccagacataaatagctcactgcaggaacgagttcacagattagaagggagcacttgtgatcaacgtcagttaggcagagcaagtttatttaatgtaaaagaaaagttgattctgatttatcaggattatcagggtgctttgggttttgattttgttgttgttgttgttttcctttctttctttttttatacacacaataagttagcacatgtttatttgaaacaagcaaccaaacagcaatgaaaacatattgattgtttccagtctctgggccgaagtattgcgaagcatttgaaaagctttcacgatttgtgtagatgattatgaaggacctgcttgttgcaagagaacatcagtgatttttttagttactcaccaaggccttttgtcccagagccagttccctctgggagttcttatgaacatttctcaccttaatatggaggagagaatagtattccaatcatggatgtatcaaattctagtcatttagtttaagtgaaaagaggtttgattgcatattaaattgttattctgtctccttatgttgccatatgaatagctattttttttctttcacttttgacatttgggatgaaaagccatatgtatcataaatatcagatgtaagtcattaaaaactgccttcctgggacttttacatcttttaaaaggtgaattacttaccttatgtacagaataaataatgctcaggaaagagcaagtatttttccatgcattctcaggggatctttttactcccctttgtttgattagttagggccccaatgccaggtaggaggaagggctggggcaatggtagagtgagaggaagacaaacccagctgcagatcatgcttttctaggagccgacatgctaaataaattagaatgtaggaggatcagccacagttgactcaacaaagacaaaagccagccaccaccttcaactgttggcacagctgtgcggtgctggctgtcccaatgcagaaagctggtgggaaggaattcctcatcatcactttctttaatgtagccaatttaggcagggtaatgacggcaatagagagctgctccttgtcattatgagacgtgggataagaagagtgcaacagtgagccaaacacattttggtatagttatttttttcttcttttgttttctttcttttttaacacttagtaagcatgagaggagaggtagaaaaatacccttttttcaacatatagttgtcagatgctttgtgcatgcaaatcatgctttaggcagtgcggtatttcttaaaaactggccaattcaccataaccaatttcccttatggatggactaggctggtatatacatatttgaaaagttttacttcaaagaattccatcgaatagaataggggtaaaagggaggaggaaaacatgtcacagctgtaccatctctaaaaaggtgtttttatggtgaatgttttggatttagattttggatcccccgtcccctcaagcatgatagttttggatatttgcttgctgtgtgaattgacaagcacttttactgacaaatggtgaggctcagtcagaacctccaccctcccccacaccaaagacaggggcagcgtagtattcaaaccagtattgtggtggggaataattgtatacatgtaaattatcaagccctatgagtggaagaattttttcaaattatttttgtccctctatatattgatttatattatgtataactatctctttatataaactatatataattatatatatataactatataattatatatatataactatatatataactatatatatgtatcccctagtattggatcatgaagagctcttcatgcattctttgcaaaggaggttataaagttacgccctcagaacatttataactataagaatgtgccagttaaagtgctcaacaggaaatatgacagtttaaaagcattgtaaaactcacatagcttacttctctctctaaagtgcaacaaggatgaatagaatgggccaaggtatgacaattaatggttctgcatgacctagccactgctgggggttttcttctataacgttgtccttgtgaaaacttttgtgaaattaaaaaaaaaggagttacaaatttta

SEQ ID NO: 168037 - DNA, 5732 bp, Homo sapiens
  Payload ID: 13053
  Gene Symbol: KCNMA1
  Gene Name: potassium channel, calcium activated large conductance subfamily M alpha, member 1
  ENST ID: ENST00000354353
  CDS Start-End: 129-3344
aggaggcccagaagattaacaatggctcaagccaggcggatggcactctcaaaccagtggatgaaaaagaggaggcagtggccgccgaggtcggctggatgacctccgtgaaggactgggcgggggtgatgatatccgcccagacactgactggcagagtcctggttgtcttagtctttgctctcagcatcggtgcacttgtaatatacttcatagattcatcaaacccaatagaatcctgccagaatttctacaaagatttcacattacagatcgacatggctttcaacgtgttcttccttctctacttcggcttgcggtttattgcagccaacgataaattgtggttctggctggaagtgaactctgtagtggatttcttcacggtgccccccgtgtttgtgtctgtgtacttaaacagaagttggcttggtttgagatttttaagagctctgagactgatacagttttcagaaattttgcagtttctgaatattcttaaaacaagtaattccatcaagctggtgaatctgctctccatatttatcagcacgtggctgactgcagccgggttcatccatttggtggagaattcaggggacccatgggaaaatttccaaaacaaccaggctctcacctactgggaatgtgtctatttactcatggtcacaatgtccaccgttggttatggggatgtttatgcaaaaaccacacttgggcgcctcttcatggtcttcttcatcctcgggggactggccatgtttgccagctacgtccctgaaatcatagagttaataggaaaccgcaagaaatacgggggctcctatagtgcggttagtggaagaaagcacattgtggtctgcggacacatcactctggagagtgtttccaacttcctgaaggactttctgcacaaggaccgggatgacgtcaatgtggagatcgtttttcttcacaacatctcccccaacctggagcttgaagctctgttcaaacgacattttactcaggtggaattttatcagggttccgtcctcaatccacatgatcttgcaagagtcaagatagagtcagcagatgcatgcctgatccttgccaacaagtactgcgctgacccggatgcggaggatgcctcgaatatcatgagagtaatctccataaagaactaccatccgaagataagaatcatcactcaaatgctgcagtatcacaacaaggcccatctgctaaacatcccgagctggaattggaaagaaggtgatgacgcaatctgcctcgcagagttgaagttgggcttcatagcccagagctgcctggctcaaggcctctccaccatgcttgccaacctcttctccatgaggtcattcataaagattgaggaagacacatggcagaaatactacttggaaggagtctcaaatgaaatgtacacagaatatctctccagtgccttcgtgggtctgtccttccctactgtttgtgagctgtgttttgtgaagctcaagctcctaatgatagccattgagtacaagtctgccaaccgagagagccgtatattaattaatcctggaaaccatcttaagatccaagaaggtactttaggatttttcatcgcaagtgatgccaaagaagttaaaagggcatttttttactgcaaggcctgtcatgatgacatcacagatcccaaaagaataaaaaaatgtggctgcaaacggcgttgggaagaacattgttctttgtggagactggaaagcaagggaaatgtgagaagattaaactactgcaggggtcagcaaactttctctgtcaaagtcaaggttgcagctagatcacgctattccaaagatccatttgagttcaagaaggagactcccaattctcggcttgtgaccgagccagttgaagatgagcagccgtcaacactatcaccaaaaaaaaagcaacggaatggaggcatgcggaactcacccaacacctcgcctaagctgatgaggcatgaccccttgttaattcctggcaatgatcagattgacaacatggactccaatgtgaagaagtacgactctactgggatgtttcactggtgtgcacccaaggagatagagaaagtcatcctgactcgaagtgaagctgccatgaccgtcctgagtggccatgtcgtggtctgcatctttggcgacgtcagctcagccctgatcggcctccggaacctggtgatgccgctccgtgccagcaactttcattaccatgagctcaagcacattgtgtttgtgggctctattgagtacctcaagcgggaatgggagacgcttcataacttccccaaagtgtccatattgcctggtacgccattaagtcgggctgatttaagggctgtcaacatcaacctctgtgacatgtgcgttatcctgtcagccaatcagaataatattgatgatacttcgctgcaggacaaggaatgcatcttggcgtcactcaacatcaaatctatgcagtttgatgacagcatcggagtcttgcaggctaattcccaagggttcacacctccaggaatggatagatcctctccagataacagcccagtgcacgggatgttacgtcaaccatccatcacaactggggtcaacatccccatcatcactgaactagtgaacgatactaatgttcagtttttggaccaagacgatgatgatgaccctgatacagaactgtacctcacgcagccctttgcctgtgggacagcatttgccgtcagtgtcctggactcactcatgagcgcgacgtacttcaatgacaatatcctcaccctgatacggaccctggtgaccggaggagccacgccggagctggaggctctgattgctgaggaaaacgcccttagaggtggctacagcaccccgcagacactggccaatagggaccgctgccgcgtggcccagttagctctgctcgatgggccatttgcggacttaggggatggtggttgttatggtgatctgttctgcaaagctctgaaaacatataatatgctttgttttggaatttaccggctgagagatgctcacctcagcacccccagtcagtgcacaaagaggtatgtcatcaccaacccgccctatgagtttgagctcgtgccgacggacctgatcttctgcttaatgcagtttgaccacaatgccggccagtcccgggccagcctgtcccattcctcccactcgtcgcagtcctccagcaagaagagctcctctgttcactccatcccatccacagcaaaccgacagaaccggcccaagtccagggagtcccgggacaaacagaagtacgtgcaggaagagcggctttgatatgtgtatccaccgccactgtgtgaaactgtatctgccactcatttccccagttggtgtttccaacaaagtaactttccctgttttcccctgtagtccccccctttttttttacacatatttgcatatgtatgatagtgtgcatgtggttgtcatttttatttcaccaccataaaacccttgagcacaacagcaaataagcagacggaccaaaagttatttatgattctgggggaaaaataacccaaaggcatgctccagacataaatagctcactgcaggaacgagttcacagattagaagggagcacttgtgatcaacgtcagttaggcagagcaagtttatttaatgtaaaagaaaagttgattctgatttatcaggattatcagggtgctttgggttttgattttgttgttgttgttgttttcctttctttctttttttatacacacaataagttagcacatgtttatttgaaacaagcaaccaaacagcaatgaaaacatattgattgtttccagtctctgggccgaagtattgcgaagcatttgaaaagctttcacgatttgtgtagatgattatgaaggacctgcttgttgcaagagaacatcagtgatttttttagttactcaccaaggccttttgtcccagagccagttccctctgggagttcttatgaacatttctcaccttaatatggaggagagaatagtattccaatcatggatgtatcaaattctagtcatttagtttaagtgaaaagaggtttgattgcatattaaattgttattctgtctccttatgttgccatatgaatagctattttttttctttcacttttgacatttgggatgaaaagccatatgtatcataaatatcagatgtaagtcattaaaaactgccttcctgggacttttacatcttttaaaaggtgaattacttaccttatgtacagaataaataatgctcaggaaagagcaagtatttttccatgcattctcaggggatctttttactcccctttgtttgattagttagggccccaatgccaggtaggaggaagggctggggcaatggtagagtgagaggaagacaaacccagctgcagatcatgcttttctaggagccgacatgctaaataaattagaatgtaggaggatcagccacagttgactcaacaaagacaaaagccagccaccaccttcaactgttggcacagctgtgcggtgctggctgtcccaatgcagaaagctggtgggaaggaattcctcatcatcactttctttaatgtagccaatttaggcagggtaatgacggcaatagagagctgctccttgtcattatgagacgtgggataagaagagtgcaacagtgagccaaacacattttggtatagttatttttttcttcttttgttttctttcttttttaacacttagtaagcatgagaggagaggtagaaaaatacccttttttcaacatatagttgtcagatgctttgtgcatgcaaatcatgctttaggcagtgcggtatttcttaaaaactggccaattcaccataaccaatttcccttatggatggactaggctggtatatacatatttgaaaagttttacttcaaagaattccatcgaatagaataggggtaaaagggaggaggaaaacatgtcacagctgtaccatctctaaaaaggtgtttttatggtgaatgttttggatttagattttggatcccccgtcccctcaagcatgatagttttggatatttgcttgctgtgtgaattgacaagcacttttactgacaaatggtgaggctcagtcagaacctccaccctcccccacaccaaagacaggggcagcgtagtattcaaaccagtattgtggtggggaataattgtatacatgtaaattatcaagccctatgagtggaagaattttttcaaattatttttgtccctctatatattgatttatattatgtataactatctctttatataaactatatataattatatatatataactatataattatatatatataactatatatataactatatatatgtatcccctagtattggatcatgaagagctcttcatgcattctttgcaaaggaggttataaagttacgccctcagaacatttataactataagaatgtgccagttaaagtgctcaacaggaaatatgacagtttaaaagcattgtaaaactcacatagcttacttctctctctaaagtgcaacaaggatgaatagaatgggccaaggtatgacaattaatggttctgcatgacctagccactgctgggggttttcttctataacgttgtccttgtgaaaacttttgtgaaattaaaaaaaaaggagttacaaatttt

SEQ ID NO: 168038 - DNA, 3548 bp, Homo sapiens
  Payload ID: 13053
  Gene Symbol: KCNMA1
  Gene Name: potassium channel, calcium activated large conductance subfamily M alpha, member 1
  ENST ID: ENST00000372403
  CDS Start-End: 1-3548
cttcttcctcctcctcttcctcctcgtcctcggtccacgagcccaagatggatgcgctcatcatcccggtgaccatggaggtgccgtgcgacagccggggccaacgcatgtggtgggctttcctggcctcctccatggtgactttcttcgggggcctcttcatcatcttgctctggcggacgctcaagtacctgtggaccgtgtgctgccactgcgggggcaagacgaaggaggcccagaagattaacaatggctcaagccaggcggatggcactctcaaaccagtggatgaaaaagaggaggcagtggccgccgaggtcggctggatgacctccgtgaaggactgggcgggggtgatgatatccgcccagacactgactggcagagtcctggttgtcttagtctttgctctcagcatcggtgcacttgtaatatacttcatagattcatcaaacccaatagaatcctgccagaatttctacaaagatttcacattacagatcgacatggctttcaacgtgttcttccttctctacttcggcttgcggtttattgcagccaacgataaattgtggttctggctggaagtgaactctgtagtggatttcttcacggtgccccccgtgtttgtgtctgtgtacttaaacagaagttggcttggtttgagatttttaagagctctgagactgatacagttttcagaaattttgcagtttctgaatattcttaaaacaagtaattccatcaagctggtgaatctgctctccatatttatcagcacgtggctgactgcagccgggttcatccatttggtggagaattcaggggacccatgggaaaatttccaaaacaaccaggctctcacctactgggaatgtgtctatttactcatggtcacaatgtccaccgttggttatggggatgtttatgcaaaaaccacacttgggcgcctcttcatggtcttcttcatcctcgggggactggccatgtttgccagctacgtccctgaaatcatagagttaataggaaaccgcaagaaatacgggggctcctatagtgcggttagtggaagaaagcacattgtggtctgcggacacatcactctggagagtgtttccaacttcctgaaggactttctgcacaaggaccgggatgacgtcaatgtggagatcgtttttcttcacaacatctcccccaacctggagcttgaagctctgttcaaacgacattttactcaggtggaattttatcagggttccgtcctcaatccacatgatcttgcaagagtcaagatagagtcagcagatgcatgcctgatccttgccaacaagtactgcgctgacccggatgcggaggatgcctcgaatatcatgagagtaatctccataaagaactaccatccgaagataagaatcatcactcaaatgctgcagtatcacaacaaggcccatctgctaaacatcccgagctggaattggaaagaaggtgatgacgcaatctgcctcgcagagttgaagttgggcttcatagcccagagctgcctggctcaaggcctctccaccatgcttgccaacctcttctccatgaggtcattcataaagattgaggaagacacatggcagaaatactacttggaaggagtctcaaatgaaatgtacacagaatatctctccagtgccttcgtgggtctgtccttccctactgtttgtgagctgtgttttgtgaagctcaagctcctaatgatagccattgagtacaagtctgccaaccgagagagccgtatattaattaatcctggaaaccatcttaagatccaagaaggtactttaggatttttcatcgcaagtgatgccaaagaagttaaaagggcatttttttactgcaaggcctgtcatgatgacatcacagatcccaaaagaataaaaaaatgtggctgcaaacggcttgaagatgagcagccgtcaacactatcaccaaaaaaaaagcaacggaatggaggcatgcggaactcacccaacacctcgcctaagctgatgaggcatgaccccttgttaattcctggcaatgatcagattgacaacatggactccaatgtgaagaagtacgactctactgggatgtttcactggtgtgcacccaaggagatagagaaagtcatcctgactcgaagtgaagctgccatgaccgtcctgagtggccatgtcgtggtctgcatctttggcgacgtcagctcagccctgatcggcctccggaacctggtgatgccgctccgtgccagcaactttcattaccatgagctcaagcacattgtgtttgtgggctctattgagtacctcaagcgggaatgggagacgcttcataacttccccaaagtgtccatattgcctggtacgccattaagtcgggctgatttaagggctgtcaacatcaacctctgtgacatgtgcgttatcctgtcagccaatcagaataatattgatgatacttcgctgcaggacaaggaatgcatcttggcgtcactcaacatcaaatctatgcagtttgatgacagcatcggagtcttgcaggctaattcccaagggttcacacctccaggaatggatagatcctctccagataacagcccagtgcacgggatgttacgtcaaccatccatcacaactggggtcaacatccccatcatcactgaactagtgaacgatactaatgttcagtttttggaccaagacgatgatgatgaccctgatacagaactgtacctcacgcagccctttgcctgtgggacagcatttgccgtcagtgtcctggactcactcatgagcgcgacgtacttcaatgacaatatcctcaccctgatacggaccctggtgaccggaggagccacgccggagctggaggctctgattgctgaggaaaacgcccttagaggtggctacagcaccccgcagacactggccaatagggaccgctgccgcgtggcccagttagctctgctcgatgggccatttgcggacttaggggatggtggttgttatggtgatctgttctgcaaagctctgaaaacatataatatgctttgttttggaatttaccggctgagagatgctcacctcagcacccccagtcagtgcacaaagaggtatgtcatcaccaacccgccctatgagtttgagctcgtgccgacggacctgatcttctgcttaatgcagtttgaccacaatgccggccagtcccgggccagcctgtcccattcctcccactcgtcgcagtcctccagcaagaagagctcctctgttcactccatcccatccacagcaaaccgacagaaccggcccaagtccagggagtcccgggacaaacagaatgcaacaaggatgaatagaatgggccaagcagaaaagaaatggtttacagatgaaccggataatgcctatcccagaaacattcaaatcaagcccatgagtacccacatggctaaccagatcaaccaatataaatccacaagcagcttgattccaccaatcagagaagttgaagatgaatgttga

SEQ ID NO: 168039 - DNA, 3646 bp, Homo sapiens
  Payload ID: 13053
  Gene Symbol: KCNMA1
  Gene Name: potassium channel, calcium activated large conductance subfamily M alpha, member 1
  ENST ID: ENST00000372408
  CDS Start-End: 1-3504
cccaagatggatgcgctcatcatcccggtgaccatggaggtgccgtgcgacagccggggccaacgcatgtggtgggctttcctggcctcctccatggtgactttcttcgggggcctcttcatcatcttgctctggcggacgctcaagtacctgtggaccgtgtgctgccactgcgggggcaagacgaaggaggcccagaagattaacaatggctcaagccaggcggatggcactctcaaaccagtggatgaaaaagaggaggcagtggccgccgaggtcggctggatgacctccgtgaaggactgggcgggggtgatgatatccgcccagacactgactggcagagtcctggttgtcttagtctttgctctcagcatcggtgcacttgtaatatacttcatagattcatcaaacccaatagaatcctgccagaatttctacaaagatttcacattacagatcgacatggctttcaacgtgttcttccttctctacttcggcttgcggtttattgcagccaacgataaattgtggttctggctggaagtgaactctgtagtggatttcttcacggtgccccccgtgtttgtgtctgtgtacttaaacagaagttggcttggtttgagatttttaagagctctgagactgatacagttttcagaaattttgcagtttctgaatattcttaaaacaagtaattccatcaagctggtgaatctgctctccatatttatcagcacgtggctgactgcagccgggttcatccatttggtggagaattcaggggacccatgggaaaatttccaaaacaaccaggctctcacctactgggaatgtgtctatttactcatggtcacaatgtccaccgttggttatggggatgtttatgcaaaaaccacacttgggcgcctcttcatggtcttcttcatcctcgggggactggccatgtttgccagctacgtccctgaaatcatagagttaataggaaaccgcaagaaatacgggggctcctatagtgcggttagtggaagaaagcacattgtggtctgcggacacatcactctggagagtgtttccaacttcctgaaggactttctgcacaaggaccgggatgacgtcaatgtggagatcgtttttcttcacaacatctcccccaacctggagcttgaagctctgttcaaacgacattttactcaggtggaattttatcagggttccgtcctcaatccacatgatcttgcaagagtcaagatagagtcagcagatgcatgcctgatccttgccaacaagtactgcgctgacccggatgcggaggatgcctcgaatatcatgagagtaatctccataaagaactaccatccgaagataagaatcatcactcaaatgctgcagtatcacaacaaggcccatctgctaaacatcccgagctggaattggaaagaaggtgatgacgcaatctgcctcgcagagttgaagttgggcttcatagcccagagctgcctggctcaaggcctctccaccatgcttgccaacctcttctccatgaggtcattcataaagattgaggaagacacatggcagaaatactacttggaaggagtctcaaatgaaatgtacacagaatatctctccagtgccttcgtgggtctgtccttccctactgtttgtgagctgtgttttgtgaagctcaagctcctaatgatagccattgagtacaagtctgccaaccgagagagccgtatattaattaatcctggaaaccatcttaagatccaagaaggtactttaggatttttcatcgcaagtgatgccaaagaagttaaaagggcatttttttactgcaaggcctgtcatgatgacatcacagatcccaaaagaataaaaaaatgtggctgcaaacggcttgaagatgagcagccgtcaacactatcaccaaaaaaaaagcaacggaatggaggcatgcggaactcacccaacacctcgcctaagctgatgaggcatgaccccttgttaattcctggcaatgatcagattgacaacatggactccaatgtgaagaagtacgactctactgggatgtttcactggtgtgcacccaaggagatagagaaagtcatcctgactcgaagtgaagctgccatgaccgtcctgagtggccatgtcgtggtctgcatctttggcgacgtcagctcagccctgatcggcctccggaacctggtgatgccgctccgtgccagcaactttcattaccatgagctcaagcacattgtgtttgtgggctctattgagtacctcaagcgggaatgggagacgcttcataacttccccaaagtgtccatattgcctggtacgccattaagtcgggctgatttaagggctgtcaacatcaacctctgtgacatgtgcgttatcctgtcagccaatcagaataatattgatgatacttcgctgcaggacaaggaatgcatcttggcgtcactcaacatcaaatctatgcagtttgatgacagcatcggagtcttgcaggctaattcccaagggttcacacctccaggaatggatagatcctctccagataacagcccagtgcacgggatgttacgtcaaccatccatcacaactggggtcaacatccccatcatcactgaactagtgaacgatactaatgttcagtttttggaccaagacgatgatgatgaccctgatacagaactgtacctcacgcagccctttgcctgtgggacagcatttgccgtcagtgtcctggactcactcatgagcgcgacgtacttcaatgacaatatcctcaccctgatacggaccctggtgaccggaggagccacgccggagctggaggctctgattgctgaggaaaacgcccttagaggtggctacagcaccccgcagacactggccaatagggaccgctgccgcgtggcccagttagctctgctcgatgggccatttgcggacttaggggatggtggttgttatggtgatctgttctgcaaagctctgaaaacatataatatgctttgttttggaatttaccggctgagagatgctcacctcagcacccccagtcagtgcacaaagaggtatgtcatcaccaacccgccctatgagtttgagctcgtgccgacggacctgatcttctgcttaatgcagtttgaccacaatgccggccagtcccgggccagcctgtcccattcctcccactcgtcgcagtcctccagcaagaagagctcctctgttcactccatcccatccacagcaaaccgacagaaccggcccaagtccagggagtcccgggacaaacagaatgcaacaaggatgaatagaatgggccaagaaaagaaatggtttacagatgaaccggataatgcctatcccagaaacattcaaatcaagcccatgagtacccacatggctaaccagatcaaccaatataaatccacaagcagcttgattccaccaatcagagaagttgaagatgaatgttgactcccaggagaccagaactatttttttaaagcctgacaaacttcataaatggtgatgtgacttttcttcttacatgctgaatcactggtggaaacgttaggataagcaagaattgccagaaaataaagtagacagatctttc

SEQ ID NO: 168040 - DNA, 3729 bp, Homo sapiens
  Payload ID: 13053
  Gene Symbol: KCNMA1
  Gene Name: potassium channel, calcium activated large conductance subfamily M alpha, member 1
  ENST ID: ENST00000372421
  CDS Start-End: 1-3457
caatatccacgcgaaccatctcagcctagacgcgtcctcctcctcctcctcctcctcttcctcttcttcttcttcctcctcctcttcctcctcgtcctcggtccacgagcccaagatggatgcgctcatcatcccggtgaccatggaggtgccgtgcgacagccggggccaacgcatgtggtgggctttcctggcctcctccatggtgactttcttcgggggcctcttcatcatcttgctctggcggacgctcaagtacctgtggaccgtgtgctgccactgcgggggcaagacgaaggaggcccagaagattaacaatggctcaagccaggcggatggcactctcaaaccagtggatgaaaaagaggaggcagtggccgccgaggtcggctggatgacctccgtgaaggactgggcgggggtgatgatatccgcccagacactgactggcagagtcctggttgtcttagtctttgctctcagcatcggtgcacttgtaatatacttcatagattcatcaaacccaatagaatcctgccagaatttctacaaagatttcacattacagatcgacatggctttcaacgtgttcttccttctctacttcggcttgcggtttattgcagccaacgataaattgtggttctggctggaagtgaactctgtagtggatttcttcacggtgccccccgtgtttgtgtctgtgtacttaaacagaagttggcttggtttgagatttttaagagctctgagactgatacagttttcagaaattttgcagtttctgaatattcttaaaacaagtaattccatcaagctggtgaatctgctctccatatttatcagcacgtggctgactgcagccgggttcatccatttggtggagaattcaggggacccatgggaaaatttccaaaacaaccaggctctcacctactgggaatgtgtctatttactcatggtcacaatgtccaccgttggttatggggatgtttatgcaaaaaccacacttgggcgcctcttcatggtcttcttcatcctcgggggactggccatgtttgccagctacgtccctgaaatcatagagttaataggaaaccgcaagaaatacgggggctcctatagtgcggttagtggaagaaagcacattgtggtctgcggacacatcactctggagagtgtttccaacttcctgaaggactttctgcacaaggaccgggatgacgtcaatgtggagatcgtttttcttcacaacatctcccccaacctggagcttgaagctctgttcaaacgacattttactcaggtggaattttatcagggttccgtcctcaatccacatgatcttgcaagagtcaagatagagtcagcagatgcatgcctgatccttgccaacaagtactgcgctgacccggatgcggaggatgcctcgaatatcatgagagtaatctccataaagaactaccatccgaagataagaatcatcactcaaatgctgcagtatcacaacaaggcccatctgctaaacatcccgagctggaattggaaagaaggtgatgacgcaatctgcctcgcagagttgaagttgggcttcatagcccagagctgcctggctcaaggcctctccaccatgcttgccaacctcttctccatgaggtcattcataaagattgaggaagacacatggcagaaatactacttggaaggagtctcaaatgaaatgtacacagaatatctctccagtgccttcgtgggtctgtccttccctactgtttgtgagctgtgttttgtgaagctcaagctcctaatgatagccattgagtacaagtctgccaaccgagagagccgtatattaattaatcctggaaaccatcttaagatccaagaaggtactttaggatttttcatcgcaagtgatgccaaagaagttaaaagggcatttttttactgcaaggcctgtcatgatgacatcacagatcccaaaagaataaaaaaatgtggctgcaaacggcttgaagatgagcagccgtcaacactatcaccaaaaaaaaagcaacggaatggaggcatgcggaactcacccaacacctcgcctaagctgatgaggcatgaccccttgttaattcctggcaatgatcagattgacaacatggactccaatgtgaagaagtacgactctactgggatgtttcactggtgtgcacccaaggagatagagaaagtcatcctgactcgaagtgaagctgccatgaccgtcctgagtggccatgtcgtggtctgcatctttggcgacgtcagctcagccctgatcggcctccggaacctggtgatgccgctccgtgccagcaactttcattaccatgagctcaagcacattgtgtttgtgggctctattgagtacctcaagcgggaatgggagacgcttcataacttccccaaagtgtccatattgcctggtacgccattaagtcgggctgatttaagggctgtcaacatcaacctctgtgacatgtgcgttatcctgtcagccaatcagaataatattgatgatacttcgctgcaggacaaggaatgcatcttggcgtcactcaacatcaaatctatgcagtttgatgacagcatcggagtcttgcaggctaattcccaagggttcacacctccaggaatggatagatcctctccagataacagcccagtgcacgggatgttacgtcaaccatccatcacaactggggtcaacatccccatcatcactgaactagtgaacgatactaatgttcagtttttggaccaagacgatgatgatgaccctgatacagaactgtacctcacgcagccctttgcctgtgggacagcatttgccgtcagtgtcctggactcactcatgagcgcgacgtacttcaatgacaatatcctcaccctgatacggaccctggtgaccggaggagccacgccggagctggaggctctgattgctgaggaaaacgcccttagaggtggctacagcaccccgcagacactggccaatagggaccgctgccgcgtggcccagttagctctgctcgatgggccatttgcggacttaggggatggtggttgttatggtgatctgttctgcaaagctctgaaaacatataatatgctttgttttggaatttaccggctgagagatgctcacctcagcacccccagtcagtgcacaaagaggtatgtcatcaccaacccgccctatgagtttgagctcgtgccgacggacctgatcttctgcttaatgcagtttgaccacaatgccggccagtcccgggccagcctgtcccattcctcccactcgtcgcagtcctccagcaagaagagctcctctgttcactccatcccatccacagcaaaccgacagaaccggcccaagtccagggagtcccgggacaaacagaacagaaaagaaatggtttacagatgaaccggataatgcctatcccagaaacattcaaatcaagcccatgagtacccacatggctaaccagatcaaccaatataaatccacaagcagcttgattccaccaatcagagaagttgaagatgaatgttgactcccaggagaccagaactatttttttaaagcctgacaaacttcataaatggtgatgtgacttttcttcttacatgctgaatcactggtggaaacgttaggataagcaagaattgccagaaaataaagtagacagatctttc

SEQ ID NO: 168041 - DNA, 3788 bp, Homo sapiens
  Payload ID: 13053
  Gene Symbol: KCNMA1
  Gene Name: potassium channel, calcium activated large conductance subfamily M alpha, member 1
  ENST ID: ENST00000372437
  CDS Start-End: 1-3516
atggatgcgctcatcatcccggtgaccatggaggtgccgtgcgacagccggggccaacgcatgtggtgggctttcctggcctcctccatggtgactttcttcgggggcctcttcatcatcttgctctggcggacgctcaagtacctgtggaccgtgtgctgccactgcgggggcaagacgaaggaggcccagaagattaacaatggctcaagccaggcggatggcactctcaaaccagtggatgaaaaagaggaggcagtggccgccgaggtcggctggatgacctccgtgaaggactgggcgggggtgatgatatccgcccagacactgactggcagagtcctggttgtcttagtctttgctctcagcatcggtgcacttgtaatatacttcatagattcatcaaacccaatagaatcctgccagaatttctacaaagatttcacattacagatcgacatggctttcaacgtgttcttccttctctacttcggcttgcggtttattgcagccaacgataaattgtggttctggctggaagtgaactctgtagtggatttcttcacggtgccccccgtgtttgtgtctgtgtacttaaacagaagttggcttggtttgagatttttaagagctctgagactgatacagttttcagaaattttgcagtttctgaatattcttaaaacaagtaattccatcaagctggtgaatctgctctccatatttatcagcacgtggctgactgcagccgggttcatccatttggtggagaattcaggggacccatgggaaaatttccaaaacaaccaggctctcacctactgggaatgtgtctatttactcatggtcacaatgtccaccgttggttatggggatgtttatgcaaaaaccacacttgggcgcctcttcatggtcttcttcatcctcgggggactggccatgtttgccagctacgtccctgaaatcatagagttaataggaaaccgcaagaaatacgggggctcctatagtgcggttagtggaagaaagcacattgtggtctgcggacacatcactctggagagtgtttccaacttcctgaaggactttctgcacaaggaccgggatgacgtcaatgtggagatcgtttttcttcacaacatctcccccaacctggagcttgaagctctgttcaaacgacattttactcaggtggaattttatcagggttccgtcctcaatccacatgatcttgcaagagtcaagatagagtcagcagatgcatgcctgatccttgccaacaagtactgcgctgacccggatgcggaggatgcctcgaatatcatgagagtaatctccataaagaactaccatccgaagataagaatcatcactcaaatgctgcagtatcacaacaaggcccatctgctaaacatcccgagctggaattggaaagaaggtgatgacgcaatctgcctcgcagagttgaagttgggcttcatagcccagagctgcctggctcaaggcctctccaccatgcttgccaacctcttctccatgaggtcattcataaagattgaggaagacacatggcagaaatactacttggaaggagtctcaaatgaaatgtacacagaatatctctccagtgccttcgtgggtctgtccttccctactgtttgtgagctgtgttttgtgaagctcaagctcctaatgatagccattgagtacaagtctgccaaccgagagagccgtatattaattaatcctggaaaccatcttaagatccaagaaggtactttaggatttttcatcgcaagtgatgccaaagaagttaaaagggcatttttttactgcaaggcctgtcatgatgacatcacagatcccaaaagaataaaaaaatgtggctgcaaacggcccaagatgtccatctacaagagaatgagacgggcatgttgttttgattgcggacgttctgagcgtgactgctcatgcatgtcaggccgtgtgcgtggtaacgtggacacccttgagagagccttcccactttcttctgtctctgttaatgattgctccaccagtttccgtgcctttgaagatgagcagccgtcaacactatcaccaaaaaaaaagcaacggaatggaggcatgcggaactcacccaacacctcgcctaagctgatgaggcatgaccccttgttaattcctggcaatgatcagattgacaacatggactccaatgtgaagaagtacgactctactgggatgtttcactggtgtgcacccaaggagatagagaaagtcatcctgactcgaagtgaagctgccatgaccgtcctgagtggccatgtcgtggtctgcatctttggcgacgtcagctcagccctgatcggcctccggaacctggtgatgccgctccgtgccagcaactttcattaccatgagctcaagcacattgtgtttgtgggctctattgagtacctcaagcgggaatgggagacgcttcataacttccccaaagtgtccatattgcctggtacgccattaagtcgggctgatttaagggctgtcaacatcaacctctgtgacatgtgcgttatcctgtcagccaatcagaataatattgatgatacttcgctgcaggacaaggaatgcatcttggcgtcactcaacatcaaatctatgcagtttgatgacagcatcggagtcttgcaggctaattcccaagggttcacacctccaggaatggatagatcctctccagataacagcccagtgcacgggatgttacgtcaaccatccatcacaactggggtcaacatccccatcatcactgaactagtgaacgatactaatgttcagtttttggaccaagacgatgatgatgaccctgatacagaactgtacctcacgcagccctttgcctgtgggacagcatttgccgtcagtgtcctggactcactcatgagcgcgacgtacttcaatgacaatatcctcaccctgatacggaccctggtgaccggaggagccacgccggagctggaggctctgattgctgaggaaaacgcccttagaggtggctacagcaccccgcagacactggccaatagggaccgctgccgcgtggcccagttagctctgctcgatgggccatttgcggacttaggggatggtggttgttatggtgatctgttctgcaaagctctgaaaacatataatatgctttgttttggaatttaccggctgagagatgctcacctcagcacccccagtcagtgcacaaagaggtatgtcatcaccaacccgccctatgagtttgagctcgtgccgacggacctgatcttctgcttaatgcagtttgaccacaatgccggccagtcccgggccagcctgtcccattcctcccactcgtcgcagtcctccagcaagaagagctcctctgttcactccatcccatccacagcaaaccgacagaaccggcccaagtccagggagtcccgggacaaacagaacagaaaagaaatggtttacagatgaaccggataatgcctatcccagaaacattcaaatcaagcccatgagtacccacatggctaaccagatcaaccaatataaatccacaagcagcttgattccaccaatcagagaagttgaagatgaatgttgactcccaggagaccagaactatttttttaaagcctgacaaacttcataaatggtgatgtgacttttcttcttacatgctgaatcactggtggaaacgttaggataagcaagaattgccagaaaataaagtagacagatctttc

SEQ ID NO: 168042 - DNA, 4157 bp, Homo sapiens
  Payload ID: 13053
  Gene Symbol: KCNMA1
  Gene Name: potassium channel, calcium activated large conductance subfamily M alpha, member 1
  ENST ID: ENST00000372440
  CDS Start-End: 352-3885
ggcgcagaccccgggcgcgggcggcccgcggcgccccctggctctcggcgctcggggccagcgcagcccggggcgagcggggcgcgggccggggagggggagctgcccgcgcactccatccccctcccccccgggcgggcggcggcggctcgctgtatatatctcggcgcaccccgccaggtcgcgcacagcgccccgagcccaggcgcctccccgcccccctcccgcgctccgcggcggcggcggcggcggcagcagtagcagcaatatggctgttgatgggtgtttggggtggcgctggcggcgggaggagctcccccgagcccctgcgccggctgcccgttgctagctatggcaaatggtggcggcggcggcggcggcagcagcggcggcggcggcggcggcggaggcagcagtcttagaatgagtagcaatatccacgcgaaccatctcagcctagacgcgtcctcctcctcctcctcctcctcttcctcttcttcttcttcctcctcctcttcctcctcgtcctcggtccacgagcccaagatggatgcgctcatcatcccggtgaccatggaggtgccgtgcgacagccggggccaacgcatgtggtgggctttcctggcctcctccatggtgactttcttcgggggcctcttcatcatcttgctctggcggacgctcaagtacctgtggaccgtgtgctgccactgcgggggcaagacgaaggaggcccagaagattaacaatggctcaagccaggcggatggcactctcaaaccagtggatgaaaaagaggaggcagtggccgccgaggtcggctggatgacctccgtgaaggactgggcgggggtgatgatatccgcccagacactgactggcagagtcctggttgtcttagtctttgctctcagcatcggtgcacttgtaatatacttcatagattcatcaaacccaatagaatcctgccagaatttctacaaagatttcacattacagatcgacatggctttcaacgtgttcttccttctctacttcggcttgcggtttattgcagccaacgataaattgtggttctggctggaagtgaactctgtagtggatttcttcacggtgccccccgtgtttgtgtctgtgtacttaaacagaagttggcttggtttgagatttttaagagctctgagactgatacagttttcagaaattttgcagtttctgaatattcttaaaacaagtaattccatcaagctggtgaatctgctctccatatttatcagcacgtggctgactgcagccgggttcatccatttggtggagaattcaggggacccatgggaaaatttccaaaacaaccaggctctcacctactgggaatgtgtctatttactcatggtcacaatgtccaccgttggttatggggatgtttatgcaaaaaccacacttgggcgcctcttcatggtcttcttcatcctcgggggactggccatgtttgccagctacgtccctgaaatcatagagttaataggaaaccgcaagaaatacgggggctcctatagtgcggttagtggaagaaagcacattgtggtctgcggacacatcactctggagagtgtttccaacttcctgaaggactttctgcacaaggaccgggatgacgtcaatgtggagatcgtttttcttcacaacatctcccccaacctggagcttgaagctctgttcaaacgacattttactcaggtggaattttatcagggttccgtcctcaatccacatgatcttgcaagagtcaagatagagtcagcagatgcatgcctgatccttgccaacaagtactgcgctgacccggatgcggaggatgcctcgaatatcatgagagtaatctccataaagaactaccatccgaagataagaatcatcactcaaatgctgcagtatcacaacaaggcccatctgctaaacatcccgagctggaattggaaagaaggtgatgacgcaatctgcctcgcagagttgaagttgggcttcatagcccagagctgcctggctcaaggcctctccaccatgcttgccaacctcttctccatgaggtcattcataaagattgaggaagacacatggcagaaatactacttggaaggagtctcaaatgaaatgtacacagaatatctctccagtgccttcgtgggtctgtccttccctactgtttgtgagctgtgttttgtgaagctcaagctcctaatgatagccattgagtacaagtctgccaaccgagagagccgtatattaattaatcctggaaaccatcttaagatccaagaaggtactttaggatttttcatcgcaagtgatgccaaagaagttaaaagggcatttttttactgcaaggcctgtcatgatgacatcacagatcccaaaagaataaaaaaatgtggctgcaaacggcttgaagatgagcagccgtcaacactatcaccaaaaaaaaagcaacggaatggaggcatgcggaactcacccaacacctcgcctaagctgatgaggcatgaccccttgttaattcctggcaatgatcagattgacaacatggactccaatgtgaagaagtacgactctactgggatgtttcactggtgtgcacccaaggagatagagaaagtcatcctgactcgaagtgaagctgccatgaccgtcctgagtggccatgtcgtggtctgcatctttggcgacgtcagctcagccctgatcggcctccggaacctggtgatgccgctccgtgccagcaactttcattaccatgagctcaagcacattgtgtttgtgggctctattgagtacctcaagcgggaatgggagacgcttcataacttccccaaagtgtccatattgcctggtacgccattaagtcgggctgatttaagggctgtcaacatcaacctctgtgacatgtgcgttatcctgtcagccaatcagaataatattgatgatacttcgctgcaggacaaggaatgcatcttggcgtcactcaacatcaaatctatgcagtttgatgacagcatcggagtcttgcaggctaattcccaagggttcacacctccaggaatggatagatcctctccagataacagcccagtgcacgggatgttacgtcaaccatccatcacaactggggtcaacatccccatcatcactgaactagtgaacgatactaatgttcagtttttggaccaagacgatgatgatgaccctgatacagaactgtacctcacgcagccctttgcctgtgggacagcatttgccgtcagtgtcctggactcactcatgagcgcgacgtacttcaatgacaatatcctcaccctgatacggaccctggtgaccggaggagccacgccggagctggaggctctgattgctgaggaaaacgcccttagaggtggctacagcaccccgcagacactggccaatagggaccgctgccgcgtggcccagttagctctgctcgatgggccatttgcggacttaggggatggtggttgttatggtgatctgttctgcaaagctctgaaaacatataatatgctttgttttggaatttaccggctgagagatgctcacctcagcacccccagtcagtgcacaaagaggtatgtcatcaccaacccgccctatgagtttgagctcgtgccgacggacctgatcttctgcttaatgcagtttgaccacaatgccggccagtcccgggccagcctgtcccattcctcccactcgtcgcagtcctccagcaagaagagctcctctgttcactccatcccatccacagcaaaccgacagaaccggcccaagtccagggagtcccgggacaaacagaaaaaagaaatggtttacagatgaaccggataatgcctatcccagaaacattcaaatcaagcccatgagtacccacatggctaaccagatcaaccaatataaatccacaagcagcttgattccaccaatcagagaagttgaagatgaatgttgactcccaggagaccagaactatttttttaaagcctgacaaacttcataaatggtgatgtgacttttcttcttacatgctgaatcactggtggaaacgttaggataagcaagaattgccagaaaataaagtagacagatctttc

SEQ ID NO: 168043 - DNA, 4617 bp, Homo sapiens
  Payload ID: 13053
  Gene Symbol: KCNMA1
  Gene Name: potassium channel, calcium activated large conductance subfamily M alpha, member 1
  ENST ID: ENST00000372443
  CDS Start-End: 728-4345
gcgagcggaggccgaggggctcagcggcgtggcgacaggactagggggtcccgagaacatgggctagcaggcggccacgggccggcggccggacgcggtgaacctgccgcggccgggcgcgcactggcgcggcgagccggagccgagcgcagccgggggaggagggctggcgcaggggcgcccgggcggagggggccgattatccattattaacgagttaccacctaataagcggagagcggctcgttagccgcgcgggaggcgctcggggaagggggtcaccggccgagcgcagcgcacacccgtggcgcacggcgggcggcgcggcgccgaggacacccgggaccgcgcgcggagccggggcgggcccgggggcggcgcagaccccgggcgcgggcggcccgcggcgccccctggctctcggcgctcggggccagcgcagcccggggcgagcggggcgcgggccggggagggggagctgcccgcgcactccatccccctcccccccgggcgggcggcggcggctcgctgtatatatctcggcgcaccccgccaggtcgcgcacagcgccccgagcccaggcgcctccccgcccccctcccgcgctccgcggcggcggcggcggcggcagcagtagcagcaatatggctgttgatgggtgtttggggtggcgctggcggcgggaggagctcccccgagcccctgcgccggctgcccgttgctagctatggcaaatggtggcggcggcggcggcggcagcagcggcggcggcggcggcggcggaggcagcagtcttagaatgagtagcaatatccacgcgaaccatctcagcctagacgcgtcctcctcctcctcctcctcctcttcctcttcttcttcttcctcctcctcttcctcctcgtcctcggtccacgagcccaagatggatgcgctcatcatcccggtgaccatggaggtgccgtgcgacagccggggccaacgcatgtggtgggctttcctggcctcctccatggtgactttcttcgggggcctcttcatcatcttgctctggcggacgctcaagtacctgtggaccgtgtgctgccactgcgggggcaagacgaaggaggcccagaagattaacaatggctcaagccaggcggatggcactctcaaaccagtggatgaaaaagaggaggcagtggccgccgaggtcggctggatgacctccgtgaaggactgggcgggggtgatgatatccgcccagacactgactggcagagtcctggttgtcttagtctttgctctcagcatcggtgcacttgtaatatacttcatagattcatcaaacccaatagaatcctgccagaatttctacaaagatttcacattacagatcgacatggctttcaacgtgttcttccttctctacttcggcttgcggtttattgcagccaacgataaattgtggttctggctggaagtgaactctgtagtggatttcttcacggtgccccccgtgtttgtgtctgtgtacttaaacagaagttggcttggtttgagatttttaagagctctgagactgatacagttttcagaaattttgcagtttctgaatattcttaaaacaagtaattccatcaagctggtgaatctgctctccatatttatcagcacgtggctgactgcagccgggttcatccatttggtggagaattcaggggacccatgggaaaatttccaaaacaaccaggctctcacctactgggaatgtgtctatttactcatggtcacaatgtccaccgttggttatggggatgtttatgcaaaaaccacacttgggcgcctcttcatggtcttcttcatcctcgggggactggccatgtttgccagctacgtccctgaaatcatagagttaataggaaaccgcaagaaatacgggggctcctatagtgcggttagtggaagaaagcacattgtggtctgcggacacatcactctggagagtgtttccaacttcctgaaggactttctgcacaaggaccgggatgacgtcaatgtggagatcgtttttcttcacaacatctcccccaacctggagcttgaagctctgttcaaacgacattttactcaggtggaattttatcagggttccgtcctcaatccacatgatcttgcaagagtcaagatagagtcagcagatgcatgcctgatccttgccaacaagtactgcgctgacccggatgcggaggatgcctcgaatatcatgagagtaatctccataaagaactaccatccgaagataagaatcatcactcaaatgctgcagtatcacaacaaggcccatctgctaaacatcccgagctggaattggaaagaaggtgatgacgcaatctgcctcgcagagttgaagttgggcttcatagcccagagctgcctggctcaaggcctctccaccatgcttgccaacctcttctccatgaggtcattcataaagattgaggaagacacatggcagaaatactacttggaaggagtctcaaatgaaatgtacacagaatatctctccagtgccttcgtgggtctgtccttccctactgtttgtgagctgtgttttgtgaagctcaagctcctaatgatagccattgagtacaagtctgccaaccgagagagccgtatattaattaatcctggaaaccatcttaagatccaagaaggtactttaggatttttcatcgcaagtgatgccaaagaagttaaaagggcatttttttactgcaaggcctgtcatgatgacatcacagatcccaaaagaataaaaaaatgtggctgcaaacggcttgaagatgagcagccgtcaacactatcaccaaaaaaaaagcaacggaatggaggcatgcggaactcacccaacacctcgcctaagctgatgaggcatgaccccttgttaattcctggcaatgatcagattgacaacatggactccaatgtgaagaagtacgactctactgggatgtttcactggtgtgcacccaaggagatagagaaagtcatcctgactcgaagtgaagctgccatgaccgtcctgagtggccatgtcgtggtctgcatctttggcgacgtcagctcagccctgatcggcctccggaacctggtgatgccgctccgtgccagcaactttcattaccatgagctcaagcacattgtgtttgtgggctctattgagtacctcaagcgggaatgggagacgcttcataacttccccaaagtgtccatattgcctggtacgccattaagtcgggctgatttaagggctgtcaacatcaacctctgtgacatgtgcgttatcctgtcagccaatcagaataatattgatgatacttcgctgcaggacaaggaatgcatcttggcgtcactcaacatcaaatctatgcagtttgatgacagcatcggagtcttgcaggctaattcccaagggttcacacctccaggaatggatagatcctctccagataacagcccagtgcacgggatgttacgtcaaccatccatcacaactggggtcaacatccccatcatcactgaactagctaaaccgggcaagttgcctttggtatcagtcaatcaggaaaaaaacagtgggacgcacattctaatgataactgaactggtgaacgatactaatgttcagtttttggaccaagacgatgatgatgaccctgatacagaactgtacctcacgcagccctttgcctgtgggacagcatttgccgtcagtgtcctggactcactcatgagcgcgacgtacttcaatgacaatatcctcaccctgatacggaccctggtgaccggaggagccacgccggagctggaggctctgattgctgaggaaaacgcccttagaggtggctacagcaccccgcagacactggccaatagggaccgctgccgcgtggcccagttagctctgctcgatgggccatttgcggacttaggggatggtggttgttatggtgatctgttctgcaaagctctgaaaacatataatatgctttgttttggaatttaccggctgagagatgctcacctcagcacccccagtcagtgcacaaagaggtatgtcatcaccaacccgccctatgagtttgagctcgtgccgacggacctgatcttctgcttaatgcagtttgaccacaatgccggccagtcccgggccagcctgtcccattcctcccactcgtcgcagtcctccagcaagaagagctcctctgttcactccatcccatccacagcaaaccgacagaaccggcccaagtccagggagtcccgggacaaacagaacagaaaagaaatggtttacagatgaaccggataatgcctatcccagaaacattcaaatcaagcccatgagtacccacatggctaaccagatcaaccaatataaatccacaagcagcttgattccaccaatcagagaagttgaagatgaatgttgactcccaggagaccagaactatttttttaaagcctgacaaacttcataaatggtgatgtgacttttcttcttacatgctgaatcactggtggaaacgttaggataagcaagaattgccagaaaataaagtagacagatctttc

SEQ ID NO: 168044 - DNA, 5639 bp, Homo sapiens
  Payload ID: 13053
  Gene Symbol: KCNMA1
  Gene Name: potassium channel, calcium activated large conductance subfamily M alpha, member 1
  ENST ID: ENST00000406533
  CDS Start-End: 129-3251
aggaggcccagaagattaacaatggctcaagccaggcggatggcactctcaaaccagtggatgaaaaagaggaggcagtggccgccgaggtcggctggatgacctccgtgaaggactgggcgggggtgatgatatccgcccagacactgactggcagagtcctggttgtcttagtctttgctctcagcatcggtgcacttgtaatatacttcatagattcatcaaacccaatagaatcctgccagaatttctacaaagatttcacattacagatcgacatggctttcaacgtgttcttccttctctacttcggcttgcggtttattgcagccaacgataaattgtggttctggctggaagtgaactctgtagtggatttcttcacggtgccccccgtgtttgtgtctgtgtacttaaacagaagttggcttggtttgagatttttaagagctctgagactgatacagttttcagaaattttgcagtttctgaatattcttaaaacaagtaattccatcaagctggtgaatctgctctccatatttatcagcacgtggctgactgcagccgggttcatccatttggtggagaattcaggggacccatgggaaaatttccaaaacaaccaggctctcacctactgggaatgtgtctatttactcatggtcacaatgtccaccgttggttatggggatgtttatgcaaaaaccacacttgggcgcctcttcatggtcttcttcatcctcgggggactggccatgtttgccagctacgtccctgaaatcatagagttaataggaaaccgcaagaaatacgggggctcctatagtgcggttagtggaagaaagcacattgtggtctgcggacacatcactctggagagtgtttccaacttcctgaaggactttctgcacaaggaccgggatgacgtcaatgtggagatcgtttttcttcacaacatctcccccaacctggagcttgaagctctgttcaaacgacattttactcaggtggaattttatcagggttccgtcctcaatccacatgatcttgcaagagtcaagatagagtcagcagatgcatgcctgatccttgccaacaagtactgcgctgacccggatgcggaggatgcctcgaatatcatgagagtaatctccataaagaactaccatccgaagataagaatcatcactcaaatgctgcagtatcacaacaaggcccatctgctaaacatcccgagctggaattggaaagaaggtgatgacgcaatctgcctcgcagagttgaagttgggcttcatagcccagagctgcctggctcaaggcctctccaccatgcttgccaacctcttctccatgaggtcattcataaagattgaggaagacacatggcagaaatactacttggaaggagtctcaaatgaaatgtacacagaatatctctccagtgccttcgtgggtctgtccttccctactgtttgtgagctgtgttttgtgaagctcaagctcctaatgatagccattgagtacaagtctgccaaccgagagagccgtatattaattaatcctggaaaccatcttaagatccaagaaggtactttaggatttttcatcgcaagtgatgccaaagaagttaaaagggcatttttttactgcaaggcctgtcatgatgacatcacagatcccaaaagaataaaaaaatgtggctgcaaacggctgatatattttgaagatgagcagccgtcaacactatcaccaaaaaaaaagcaacggaatggaggcatgcggaactcacccaacacctcgcctaagctgatgaggcatgaccccttgttaattcctggcaatgatcagattgacaacatggactccaatgtgaagaagtacgactctactgggatgtttcactggtgtgcacccaaggagatagagaaagtcatcctgactcgaagtgaagctgccatgaccgtcctgagtggccatgtcgtggtctgcatctttggcgacgtcagctcagccctgatcggcctccggaacctggtgatgccgctccgtgccagcaactttcattaccatgagctcaagcacattgtgtttgtgggctctattgagtacctcaagcgggaatgggagacgcttcataacttccccaaagtgtccatattgcctggtacgccattaagtcgggctgatttaagggctgtcaacatcaacctctgtgacatgtgcgttatcctgtcagccaatcagaataatattgatgatacttcgctgcaggacaaggaatgcatcttggcgtcactcaacatcaaatctatgcagtttgatgacagcatcggagtcttgcaggctaattcccaagggttcacacctccaggaatggatagatcctctccagataacagcccagtgcacgggatgttacgtcaaccatccatcacaactggggtcaacatccccatcatcactgaactagctaaaccgggcaagttgcctttggtatcagtcaatcaggaaaaaaacagtgggacgcacattctaatgataactgaactggtgaacgatactaatgttcagtttttggaccaagacgatgatgatgaccctgatacagaactgtacctcacgcagccctttgcctgtgggacagcatttgccgtcagtgtcctggactcactcatgagcgcgacgtacttcaatgacaatatcctcaccctgatacggaccctggtgaccggaggagccacgccggagctggaggctctgattgctgaggaaaacgcccttagaggtggctacagcaccccgcagacactggccaatagggaccgctgccgcgtggcccagttagctctgctcgatgggccatttgcggacttaggggatggtggttgttatggtgatctgttctgcaaagctctgaaaacatataatatgctttgttttggaatttaccggctgagagatgctcacctcagcacccccagtcagtgcacaaagaggtatgtcatcaccaacccgccctatgagtttgagctcgtgccgacggacctgatcttctgcttaatgcagtttgaccacaatgccggccagtcccgggccagcctgtcccattcctcccactcgtcgcagtcctccagcaagaagagctcctctgttcactccatcccatccacagcaaaccgacagaaccggcccaagtccagggagtcccgggacaaacagaagtacgtgcaggaagagcggctttgatatgtgtatccaccgccactgtgtgaaactgtatctgccactcatttccccagttggtgtttccaacaaagtaactttccctgttttcccctgtagtccccccctttttttttacacatatttgcatatgtatgatagtgtgcatgtggttgtcatttttatttcaccaccataaaacccttgagcacaacagcaaataagcagacggaccaaaagttatttatgattctgggggaaaaataacccaaaggcatgctccagacataaatagctcactgcaggaacgagttcacagattagaagggagcacttgtgatcaacgtcagttaggcagagcaagtttatttaatgtaaaagaaaagttgattctgatttatcaggattatcagggtgctttgggttttgattttgttgttgttgttgttttcctttctttctttttttatacacacaataagttagcacatgtttatttgaaacaagcaaccaaacagcaatgaaaacatattgattgtttccagtctctgggccgaagtattgcgaagcatttgaaaagctttcacgatttgtgtagatgattatgaaggacctgcttgttgcaagagaacatcagtgatttttttagttactcaccaaggccttttgtcccagagccagttccctctgggagttcttatgaacatttctcaccttaatatggaggagagaatagtattccaatcatggatgtatcaaattctagtcatttagtttaagtgaaaagaggtttgattgcatattaaattgttattctgtctccttatgttgccatatgaatagctattttttttctttcacttttgacatttgggatgaaaagccatatgtatcataaatatcagatgtaagtcattaaaaactgccttcctgggacttttacatcttttaaaaggtgaattacttaccttatgtacagaataaataatgctcaggaaagagcaagtatttttccatgcattctcaggggatctttttactcccctttgtttgattagttagggccccaatgccaggtaggaggaagggctggggcaatggtagagtgagaggaagacaaacccagctgcagatcatgcttttctaggagccgacatgctaaataaattagaatgtaggaggatcagccacagttgactcaacaaagacaaaagccagccaccaccttcaactgttggcacagctgtgcggtgctggctgtcccaatgcagaaagctggtgggaaggaattcctcatcatcactttctttaatgtagccaatttaggcagggtaatgacggcaatagagagctgctccttgtcattatgagacgtgggataagaagagtgcaacagtgagccaaacacattttggtatagttatttttttcttcttttgttttctttcttttttaacacttagtaagcatgagaggagaggtagaaaaatacccttttttcaacatatagttgtcagatgctttgtgcatgcaaatcatgctttaggcagtgcggtatttcttaaaaactggccaattcaccataaccaatttcccttatggatggactaggctggtatatacatatttgaaaagttttacttcaaagaattccatcgaatagaataggggtaaaagggaggaggaaaacatgtcacagctgtaccatctctaaaaaggtgtttttatggtgaatgttttggatttagattttggatcccccgtcccctcaagcatgatagttttggatatttgcttgctgtgtgaattgacaagcacttttactgacaaatggtgaggctcagtcagaacctccaccctcccccacaccaaagacaggggcagcgtagtattcaaaccagtattgtggtggggaataattgtatacatgtaaattatcaagccctatgagtggaagaattttttcaaattatttttgtccctctatatattgatttatattatgtataactatctctttatataaactatatataattatatatatataactatataattatatatatataactatatatataactatatatatgtatcccctagtattggatcatgaagagctcttcatgcattctttgcaaaggaggttataaagttacgccctcagaacatttataactataagaatgtgccagttaaagtgctcaacaggaaatatgacagtttaaaagcattgtaaaactcacatagcttacttctctctctaaagtgcaacaaggatgaatagaatgggccaaggtatgacaattaatggttctgcatgacctagccactgctgggggttttcttctataacgttgtccttgtgaaaacttttgtgaaattaaaaaaaaaggagttacaaatttt

SEQ ID NO: 168045 - DNA, 4125 bp, Homo sapiens
  Payload ID: 13053
  Gene Symbol: KCNMA1
  Gene Name: potassium channel, calcium activated large conductance subfamily M alpha, member 1
  ENST ID: ENST00000404771
  CDS Start-End: 117-3983
ggcggcggcggcggcggcagcagtagcagcaatatggctgttgatgggtgtttggggtggcgctggcggcgggaggagctcccccgagcccctgcgccggctgcccgttgctagctatggcaaatggtggcggcggcggcggcggcagcagcggcggcggcggcggcggcggaggcagcagtcttagaatgagtagcaatatccacgcgaaccatctcagcctagacgcgtcctcctcctcctcctcctcctcttcctcttcttcttcttcctcctcctcttcctcctcgtcctcggtccacgagcccaagatggatgcgctcatcatcccggtgaccatggaggtgccgtgcgacagccggggccaacgcatgtggtgggctttcctggcctcctccatggtgactttcttcgggggcctcttcatcatcttgctctggcggacgctcaagtacctgtggaccgtgtgctgccactgcgggggcaagacgaaggaggcccagaagattaacaatggctcaagccaggcggatggcactctcaaaccagtggatgaaaaagaggaggcagtggccgccgaggtcggctggatgacctccgtgaaggactgggcgggggtgatgatatccgcccagacactgactggcagagtcctggttgtcttagtctttgctctcagcatcggtgcacttgtaatatacttcatagattcatcaaacccaatagaatcctgccagaatttctacaaagatttcacattacagatcgacatggctttcaacgtgttcttccttctctacttcggcttgcggtttattgcagccaacgataaattgtggttctggctggaagtgaactctgtagtggatttcttcacggtgccccccgtgtttgtgtctgtgtacttaaacagaagttggcttggtttgagatttttaagagctctgagactgatacagttttcagaaattttgcagtttctgaatattcttaaaacaagtaattccatcaagctggtgaatctgctctccatatttatcagcacgtggctgactgcagccgggttcatccatttggtggagaattcaggggacccatgggaaaatttccaaaacaaccaggctctcacctactgggaatgtgtctatttactcatggtcacaatgtccaccgttggttatggggatgtttatgcaaaaaccacacttgggcgcctcttcatggtcttcttcatcctcgggggactggccatgtttgccagctacgtccctgaaatcatagagttaataggaaaccgcaagaaatacgggggctcctatagtgcggttagtggaagaaagcacattgtggtctgcggacacatcactctggagagtgtttccaacttcctgaaggactttctgcacaaggaccgggatgacgtcaatgtggagatcgtttttcttcacaacatctcccccaacctggagcttgaagctctgttcaaacgacattttactcaggtggaattttatcagggttccgtcctcaatccacatgatcttgcaagagtcaagatagagtcagcagatgcatgcctgatccttgccaacaagtactgcgctgacccggatgcggaggatgcctcgaatatcatgagagtaatctccataaagaactaccatccgaagataagaatcatcactcaaatgctgcagtatcacaacaaggcccatctgctaaacatcccgagctggaattggaaagaaggtgatgacgcaatctgcctcgcagagttgaagttgggcttcatagcccagagctgcctggctcaaggcctctccaccatgcttgccaacctcttctccatgaggtcattcataaagattgaggaagacacatggcagaaatactacttggaaggagtctcaaatgaaatgtacacagaatatctctccagtgccttcgtgggtctgtccttccctactgtttgtgagctgtgttttgtgaagctcaagctcctaatgatagccattgagtacaagtctgccaaccgagagagccgtatattaattaatcctggaaaccatcttaagatccaagaaggtactttaggatttttcatcgcaagtgatgccaaagaagttaaaagggcatttttttactgcaaggcctgtcatgatgacatcacagatcccaaaagaataaaaaaatgtggctgcaaacggcccaagatgtccatctacaagagaatgagacgggcatgttgttttgattgcggacgttctgagcgtgactgctcatgcatgtcaggccgtgtgcgtggtaacgtggacacccttgagagagccttcccactttcttctgtctctgttaatgattgctccaccagtttccgtgcctttgaagatgagcagccgtcaacactatcaccaaaaaaaaagcaacggaatggaggcatgcggaactcacccaacacctcgcctaagctgatgaggcatgaccccttgttaattcctggcaatgatcagattgacaacatggactccaatgtgaagaagtacgactctactgggatgtttcactggtgtgcacccaaggagatagagaaagtcatcctgactcgaagtgaagctgccatgaccgtcctgagtggccatgtcgtggtctgcatctttggcgacgtcagctcagccctgatcggcctccggaacctggtgatgccgctccgtgccagcaactttcattaccatgagctcaagcacattgtgtttgtgggctctattgagtacctcaagcgggaatgggagacgcttcataacttccccaaagtgtccatattgcctggtacgccattaagtcgggctgatttaagggctgtcaacatcaacctctgtgacatgtgcgttatcctgtcagccaatcagaataatattgatgatacttcgctgcaggacaaggaatgcatcttggcgtcactcaacatcaaatctatgcagtttgatgacagcatcggagtcttgcaggctaattcccaagggttcacacctccaggaatggatagatcctctccagataacagcccagtgcacgggatgttacgtcaaccatccatcacaactggggtcaacatccccatcatcactgaactagtgaacgatactaatgttcagtttttggaccaagacgatgatgatgaccctgatacagaactgtacctcacgcagccctttgcctgtgggacagcatttgccgtcagtgtcctggactcactcatgagcgcgacgtacttcaatgacaatatcctcaccctgatacggaccctggtgaccggaggagccacgccggagctggaggctctgattgctgaggaaaacgcccttagaggtggctacagcaccccgcagacactggccaatagggaccgctgccgcgtggcccagttagctctgctcgatgggccatttgcggacttaggggatggtggttgttatggtgatctgttctgcaaagctctgaaaacatataatatgctttgttttggaatttaccggctgagagatgctcacctcagcacccccagtcagtgcacaaagaggtatgtcatcaccaacccgccctatgagtttgagctcgtgccgacggacctgatcttctgcttaatgcagtttgaccacaatgccggccagtcccgggccagcctgtcccattcctcccactcgtcgcagtcctccagcaagaagagctcctctgttcactccatcccatccacagcaaaccgacagaaccggcccaagtccagggagtcccgggacaaacagaatgcaacaaggatgaatagaatgggccaagaaaagaaatggtttacagatgaaccggataatgcctatcccagaaacattcaaatcaagcccatgagtacccacatggctaaccagatcaaccaatataaatccacaagcagcttgattccaccaatcagagaagttgaagatgaatgttgactcccaggagaccagaactatttttttaaagcctgacaaacttcataaatggtgatgtgacttttcttcttacatgctgaatcactggtggaaacgttaggataagcaagaattgccagaaaataaagtagacagatctttc

SEQ ID NO: 168046 - DNA, 3173 bp, Homo sapiens
  Payload ID: 13053
  Gene Symbol: KCNMA1
  Gene Name: potassium channel, calcium activated large conductance subfamily M alpha, member 1
  ENST ID: ENST00000404857
  CDS Start-End: 129-3173
aggaggcccagaagattaacaatggctcaagccaggcggatggcactctcaaaccagtggatgaaaaagaggaggcagtggccgccgaggtcggctggatgacctccgtgaaggactgggcgggggtgatgatatccgcccagacactgactggcagagtcctggttgtcttagtctttgctctcagcatcggtgcacttgtaatatacttcatagattcatcaaacccaatagaatcctgccagaatttctacaaagatttcacattacagatcgacatggctttcaacgtgttcttccttctctacttcggcttgcggtttattgcagccaacgataaattgtggttctggctggaagtgaactctgtagtggatttcttcacggtgccccccgtgtttgtgtctgtgtacttaaacagaagttggcttggtttgagatttttaagagctctgagactgatacagttttcagaaattttgcagtttctgaatattcttaaaacaagtaattccatcaagctggtgaatctgctctccatatttatcagcacgtggctgactgcagccgggttcatccatttggtggagaattcaggggacccatgggaaaatttccaaaacaaccaggctctcacctactgggaatgtgtctatttactcatggtcacaatgtccaccgttggttatggggatgtttatgcaaaaaccacacttgggcgcctcttcatggtcttcttcatcctcgggggactggccatgtttgccagctacgtccctgaaatcatagagttaataggaaaccgcaagaaatacgggggctcctatagtgcggttagtggaagaaagcacattgtggtctgcggacacatcactctggagagtgtttccaacttcctgaaggactttctgcacaaggaccgggatgacgtcaatgtggagatcgtttttcttcacaacatctcccccaacctggagcttgaagctctgttcaaacgacattttactcaggtggaattttatcagggttccgtcctcaatccacatgatcttgcaagagtcaagatagagtcagcagatgcatgcctgatccttgccaacaagtactgcgctgacccggatgcggaggatgcctcgaatatcatgagagtaatctccataaagaactaccatccgaagataagaatcatcactcaaatgctgcagtatcacaacaaggcccatctgctaaacatcccgagctggaattggaaagaaggtgatgacgcaatctgcctcgcagagttgaagttgggcttcatagcccagagctgcctggctcaaggcctctccaccatgcttgccaacctcttctccatgaggtcattcataaagattgaggaagacacatggcagaaatactacttggaaggagtctcaaatgaaatgtacacagaatatctctccagtgccttcgtgggtctgtccttccctactgtttgtgagctgtgttttgtgaagctcaagctcctaatgatagccattgagtacaagtctgccaaccgagagagccgaagccgaaagcgtatattaattaatcctggaaaccatcttaagatccaagaaggtactttaggatttttcatcgcaagtgatgccaaagaagttaaaagggcatttttttactgcaaggcctgtcatgatgacatcacagatcccaaaagaataaaaaaatgtggctgcaaacggcttgaagatgagcagccgtcaacactatcaccaaaaaaaaagcaacggaatggaggcatgcggaactcacccaacacctcgcctaagctgatgaggcatgaccccttgttaattcctggcaatgatcagattgacaacatggactccaatgtgaagaagtacgactctactgggatgtttcactggtgtgcacccaaggagatagagaaagtcatcctgactcgaagtgaagctgccatgaccgtcctgagtggccatgtcgtggtctgcatctttggcgacgtcagctcagccctgatcggcctccggaacctggtgatgccgctccgtgccagcaactttcattaccatgagctcaagcacattgtgtttgtgggctctattgagtacctcaagcgggaatgggagacgcttcataacttccccaaagtgtccatattgcctggtacgccattaagtcgggctgatttaagggctgtcaacatcaacctctgtgacatgtgcgttatcctgtcagccaatcagaataatattgatgatacttcgctgcaggacaaggaatgcatcttggcgtcactcaacatcaaatctatgcagtttgatgacagcatcggagtcttgcaggctaattcccaagggttcacacctccaggaatggatagatcctctccagataacagcccagtgcacgggatgttacgtcaaccatccatcacaactggggtcaacatccccatcatcactgaactagtgaacgatactaatgttcagtttttggaccaagacgatgatgatgaccctgatacagaactgtacctcacgcagccctttgcctgtgggacagcatttgccgtcagtgtcctggactcactcatgagcgcgacgtacttcaatgacaatatcctcaccctgatacggaccctggtgaccggaggagccacgccggagctggaggctctgattgctgaggaaaacgcccttagaggtggctacagcaccccgcagacactggccaatagggaccgctgccgcgtggcccagttagctctgctcgatgggccatttgcggacttaggggatggtggttgttatggtgatctgttctgcaaagctctgaaaacatataatatgctttgttttggaatttaccggctgagagatgctcacctcagcacccccagtcagtgcacaaagaggtatgtcatcaccaacccgccctatgagtttgagctcgtgccgacggacctgatcttctgcttaatgcagtttgaccacaatgccggccagtcccgggccagcctgtcccattcctcccactcgtcgcagtcctccagcaagaagagctcctctgttcactccatcccatccacagcaaaccgacagaaccggcccaagtccagggagtcccgggacaaacagaacagaaaagaaatggtttacagatga

SEQ ID NO: 168047 - DNA, 994 bp, Homo sapiens
  Payload ID: 13053
  Gene Symbol: KCNMA1
  Gene Name: potassium channel, calcium activated large conductance subfamily M alpha, member 1
  ENST ID: ENST00000450795
  CDS Start-End: 1-793
agtaatctccataaagaactaccatccgaagataagaatcatcactcaaatgctgcagtatcacaacaaggcccatctgctaaacatcccgagctggaattggaaagaaggtgatgacgcaatctgcctcgcagagttgaagttgggcttcatagcccagagctgcctggctcaaggcctctccaccatgcttgccaacctcttctccatgaggtcattcataaagattgaggaagacacatggcagaaatactacttggaaggagtctcaaatgaaatgtacacagaatatctctccagtgccttcgtgggtctgtccttccctactgtttgtgagctgtgttttgtgaagctcaagctcctaatgatagccattgagtacaagtctgccaaccgagagagccgtatattaattaatcctggaaaccatcttaagatccaagaaggtactttaggatttttcatcgcaagtgatgccaaagaagttaaaagggcatttttttactgcaaggcctgtcatgatgacatcacagatcccaaaagaataaaaaaatgtggctgcaaacggctggccggttctcaggatactcatcctgacagcttctaccaccaggcagtgaatgcttcctcttacctccatggtggagggcagatgtggccagttagctcctcatcttccatcctcctccactatctcaggcgacagatgccagggccagcccgccttccacttgagctttcttgtcaaggctctgccttgagcccaaatcctgacctttactgtatgaaataaagtactgatgaacaagcagaggtttgaattagagcaggcttggagcaaatgtcaagtccgtctctgcctctttcctccacctgcaccaggagcctcgattagacccagtgtggagtttgcagcgccttaggctttatgggtctggggagacataacttattaacaaagagttattaaatttttatcaattttacaacacaa

SEQ ID NO: 168048 - DNA, 3902 bp, Homo sapiens
  Payload ID: 13053
  Gene Symbol: KCNMA1
  Gene Name: potassium channel, calcium activated large conductance subfamily M alpha, member 1
  ENST ID: ENST00000457953
  CDS Start-End: 1-3630
agcaatatccacgcgaaccatctcagcctagacgcgtcctcctcctcctcctcctcctcttcctcttcttcttcttcctcctcctcttcctcctcgtcctcggtccacgagcccaagatggatgcgctcatcatcccggtgaccatggaggtgccgtgcgacagccggggccaacgcatgtggtgggctttcctggcctcctccatggtgactttcttcgggggcctcttcatcatcttgctctggcggacgctcaagtacctgtggaccgtgtgctgccactgcgggggcaagacgaaggaggcccagaagattaacaatggctcaagccaggcggatggcactctcaaaccagtggatgaaaaagaggaggcagtggccgccgaggtcggctggatgacctccgtgaaggactgggcgggggtgatgatatccgcccagacactgactggcagagtcctggttgtcttagtctttgctctcagcatcggtgcacttgtaatatacttcatagattcatcaaacccaatagaatcctgccagaatttctacaaagatttcacattacagatcgacatggctttcaacgtgttcttccttctctacttcggcttgcggtttattgcagccaacgataaattgtggttctggctggaagtgaactctgtagtggatttcttcacggtgccccccgtgtttgtgtctgtgtacttaaacagaagttggcttggtttgagatttttaagagctctgagactgatacagttttcagaaattttgcagtttctgaatattcttaaaacaagtaattccatcaagctggtgaatctgctctccatatttatcagcacgtggctgactgcagccgggttcatccatttggtggagaattcaggggacccatgggaaaatttccaaaacaaccaggctctcacctactgggaatgtgtctatttactcatggtcacaatgtccaccgttggttatggggatgtttatgcaaaaaccacacttgggcgcctcttcatggtcttcttcatcctcgggggactggccatgtttgccagctacgtccctgaaatcatagagttaataggaaaccgcaagaaatacgggggctcctatagtgcggttagtggaagaaagcacattgtggtctgcggacacatcactctggagagtgtttccaacttcctgaaggactttctgcacaaggaccgggatgacgtcaatgtggagatcgtttttcttcacaacatctcccccaacctggagcttgaagctctgttcaaacgacattttactcaggtggaattttatcagggttccgtcctcaatccacatgatcttgcaagagtcaagatagagtcagcagatgcatgcctgatccttgccaacaagtactgcgctgacccggatgcggaggatgcctcgaatatcatgagagtaatctccataaagaactaccatccgaagataagaatcatcactcaaatgctgcagtatcacaacaaggcccatctgctaaacatcccgagctggaattggaaagaaggtgatgacgcaatctgcctcgcagagttgaagttgggcttcatagcccagagctgcctggctcaaggcctctccaccatgcttgccaacctcttctccatgaggtcattcataaagattgaggaagacacatggcagaaatactacttggaaggagtctcaaatgaaatgtacacagaatatctctccagtgccttcgtgggtctgtccttccctactgtttgtgagctgtgttttgtgaagctcaagctcctaatgatagccattgagtacaagtctgccaaccgagagagccgtatattaattaatcctggaaaccatcttaagatccaagaaggtactttaggatttttcatcgcaagtgatgccaaagaagttaaaagggcatttttttactgcaaggcctgtcatgatgacatcacagatcccaaaagaataaaaaaatgtggctgcaaacggcccaagatgtccatctacaagagaatgagacgggcatgttgttttgattgcggacgttctgagcgtgactgctcatgcatgtcaggccgtgtgcgtggtaacgtggacacccttgagagagccttcccactttcttctgtctctgttaatgattgctccaccagtttccgtgcctttgaagatgagcagccgtcaacactatcaccaaaaaaaaagcaacggaatggaggcatgcggaactcacccaacacctcgcctaagctgatgaggcatgaccccttgttaattcctggcaatgatcagattgacaacatggactccaatgtgaagaagtacgactctactgggatgtttcactggtgtgcacccaaggagatagagaaagtcatcctgactcgaagtgaagctgccatgaccgtcctgagtggccatgtcgtggtctgcatctttggcgacgtcagctcagccctgatcggcctccggaacctggtgatgccgctccgtgccagcaactttcattaccatgagctcaagcacattgtgtttgtgggctctattgagtacctcaagcgggaatgggagacgcttcataacttccccaaagtgtccatattgcctggtacgccattaagtcgggctgatttaagggctgtcaacatcaacctctgtgacatgtgcgttatcctgtcagccaatcagaataatattgatgatacttcgctgcaggacaaggaatgcatcttggcgtcactcaacatcaaatctatgcagtttgatgacagcatcggagtcttgcaggctaattcccaagggttcacacctccaggaatggatagatcctctccagataacagcccagtgcacgggatgttacgtcaaccatccatcacaactggggtcaacatccccatcatcactgaactagtgaacgatactaatgttcagtttttggaccaagacgatgatgatgaccctgatacagaactgtacctcacgcagccctttgcctgtgggacagcatttgccgtcagtgtcctggactcactcatgagcgcgacgtacttcaatgacaatatcctcaccctgatacggaccctggtgaccggaggagccacgccggagctggaggctctgattgctgaggaaaacgcccttagaggtggctacagcaccccgcagacactggccaatagggaccgctgccgcgtggcccagttagctctgctcgatgggccatttgcggacttaggggatggtggttgttatggtgatctgttctgcaaagctctgaaaacatataatatgctttgttttggaatttaccggctgagagatgctcacctcagcacccccagtcagtgcacaaagaggtatgtcatcaccaacccgccctatgagtttgagctcgtgccgacggacctgatcttctgcttaatgcagtttgaccacaatgccggccagtcccgggccagcctgtcccattcctcccactcgtcgcagtcctccagcaagaagagctcctctgttcactccatcccatccacagcaaaccgacagaaccggcccaagtccagggagtcccgggacaaacagaaaaaagaaatggtttacagatgaaccggataatgcctatcccagaaacattcaaatcaagcccatgagtacccacatggctaaccagatcaaccaatataaatccacaagcagcttgattccaccaatcagagaagttgaagatgaatgttgactcccaggagaccagaactatttttttaaagcctgacaaacttcataaatggtgatgtgacttttcttcttacatgctgaatcactggtggaaacgttaggataagcaagaattgccagaaaataaagtagacagatctttc

SEQ ID NO: 168049 - DNA, 3090 bp, Homo sapiens
  Payload ID: 13053
  Gene Symbol: KCNMA1
  Gene Name: potassium channel, calcium activated large conductance subfamily M alpha, member 1
  ENST ID: ENST00000434208
  CDS Start-End: 1-2659
gaattcaggggacccatgggaaaatttccaaaacaaccaggctctcacctactgggaatgtgtctatttactcatggtcacaatgtccaccgttggttatggggatgtttatgcaaaaaccacacttgggcgcctcttcatggtcttcttcatcctcgggggactggccatgtttgccagctacgtccctgaaatcatagagttaataggaaaccgcaagaaatacgggggctcctatagtgcggttagtggaagaaagcacattgtggtctgcggacacatcactctggagagtgtttccaacttcctgaaggactttctgcacaaggaccgggatgacgtcaatgtggagatcgtttttcttcacaacatctcccccaacctggagcttgaagctctgttcaaacgacattttactcaggtggaattttatcagggttccgtcctcaatccacatgatcttgcaagagtcaagatagagtcagcagatgcatgcctgatccttgccaacaagtactgcgctgacccggatgcggaggatgcctcgaatatcatgagagtaatctccataaagaactaccatccgaagataagaatcatcactcaaatgctgcagtatcacaacaaggcccatctgctaaacatcccgagctggaattggaaagaaggtgatgacgcaatctgcctcgcagagttgaagttgggcttcatagcccagagctgcctggctcaaggcctctccaccatgcttgccaacctcttctccatgaggtcattcataaagattgaggaagacacatggcagaaatactacttggaaggagtctcaaatgaaatgtacacagaatatctctccagtgccttcgtgggtctgtccttccctactgtttgtgagctgtgttttgtgaagctcaagctcctaatgatagccattgagtacaagtctgccaaccgagagagccgtatattaattaatcctggaaaccatcttaagatccaagaaggtactttaggatttttcatcgcaagtgatgccaaagaagttaaaagggcatttttttactgcaaggcctgtcatgatgacatcacagatcccaaaagaataaaaaaatgtggctgcaaacggctcaaggttgcagctagatcacgctattccaaagatccatttgagttcaagaaggagactcccaattctcggcttgtgaccgagccagttgaagatgagcagccgtcaacactatcaccaaaaaaaaagcaacggaatggaggcatgcggaactcacccaacacctcgcctaagctgatgaggcatgaccccttgttaattcctggcaatgatcagattgacaacatggactccaatgtgaagaagtacgactctactgggatgtttcactggtgtgcacccaaggagatagagaaagtcatcctgactcgaagtgaagctgccatgaccgtcctgagtggccatgtcgtggtctgcatctttggcgacgtcagctcagccctgatcggcctccggaacctggtgatgccgctccgtgccagcaactttcattaccatgagctcaagcacattgtgtttgtgggctctattgagtacctcaagcgggaatgggagacgcttcataacttccccaaagtgtccatattgcctggtacgccattaagtcgggctgatttaagggctgtcaacatcaacctctgtgacatgtgcgttatcctgtcagccaatcagaataatattgatgatacttcgctgcaggacaaggaatgcatcttggcgtcactcaacatcaaatctatgcagtttgatgacagcatcggagtcttgcaggctaattcccaagggttcacacctccaggaatggatagatcctctccagataacagcccagtgcacgggatgttacgtcaaccatccatcacaactggggtcaacatccccatcatcactgaactagtgaacgatactaatgttcagtttttggaccaagacgatgatgatgaccctgatacagaactgtacctcacgcagccctttgcctgtgggacagcatttgccgtcagtgtcctggactcactcatgagcgcgacgtacttcaatgacaatatcctcaccctgatacggaccctggtgaccggaggagccacgccggagctggaggctctgattgctgaggaaaacgcccttagaggtggctacagcaccccgcagacactggccaatagggaccgctgccgcgtggcccagttagctctgctcgatgggccatttgcggacttaggggatggtggttgttatggtgatctgttctgcaaagctctgaaaacatataatatgctttgttttggaatttaccggctgagagatgctcacctcagcacccccagtcagtgcacaaagaggtatgtcatcaccaacccgccctatgagtttgagctcgtgccgacggacctgatcttctgcttaatgcagtttgaccacaatgccggccagtcccgggccagcctgtcccattcctcccactcgtcgcagtcctccagcaagaagagctcctctgttcactccatcccatccacagcaaaccgacagaaccggcccaagtccagggagtcccgggacaaacagaagtacgtgcaggaagagcggctttgatatgtcttccttcacttcccccattgccaccccccaatcccagtccccccatcggtctgttcacatctctgtgttcatcttggcaagacctactcaatcaagtgatgatgccagttgataaacttccctggaaaacatttacagctattccatttggcaaacttgcttctctgtcaatatttcatcctcctttaaaccaggagggttattaatggcaaaagcattggtcttctttatgcttgatcagtatgactcaaattaaaagtgttctgctgtgtatatcaactcagtagcccacacccagttatctgggagctgatggttcagtcactgtattacccaaatctttcctgccagctgcctttcagacatttgttaaatcccaaccagagaccgggcagatagagagaagtaaatccgaagtgcgtttt

SEQ ID NO: 168050 - DNA, 826 bp, Homo sapiens
  Payload ID: 13053
  Gene Symbol: KCNMA1
  Gene Name: potassium channel, calcium activated large conductance subfamily M alpha, member 1
  ENST ID: ENST00000428546
  CDS Start-End: 1-542
cgaagataagaatcatcactcaaatgctgcagtatcacaacaaggcccatctgctaaacatcccgagctggaattggaaagaaggtgatgacgcaatctgcctcgcagagttgaagttgggcttcatagcccagagctgcctggctcaaggcctctccaccatgcttgccaacctcttctccatgaggtcattcataaagattgaggaagacacatggcagaaatactacttggaaggagtctcaaatgaaatgtacacagaatatctctccagtgccttcgtgggtctgtccttccctactgtttgtgagctgtgttttgtgaagctcaagctcctaatgatagccattgagtacaagtctgccaaccgagagagccgtatattaattaatcctggaaaccatcttaagatccaagaaggtactttaggatttttcatcgcaagtgatgccaaagaagttaaaagacctcctcaactctgtctccctttggctgcccagaaaaggtgctttcagagtgacaagcttgatatttttatttgactgagaaacgacatacttctgccccctcaaatatatatttgaccagactgtgggaattttggtgttgtatttaacttccccaccaagggcccagggctcattgcccacatgtccccacgagtagcatcaaaggctgttctcaaaaatgaaagacgaatgagcagacacagtgtgtcacatcagcaacttttttcccagtttctttgtaaatggaagtttatgaaaaggagcactaactcaaatcacagaatcctgtgtttgaaataaatggtcttgcaacaaac

SEQ ID NO: 168051 - DNA, 11397 bp, Homo sapiens
  Payload ID: 13053
  Gene Symbol: KCNMA1
  Gene Name: potassium channel, calcium activated large conductance subfamily M alpha, member 1
  ENST ID: ENST00000604624
  CDS Start-End: 1-3129
ggcactctcaaaccagtggatgaaaaagaggaggcagtggccgccgaggtcggctggatgacctccgtgaaggactgggcgggggtgatgatatccgcccagacactgactggcagagtcctggttgtcttagtctttgctctcagcatcggtgcacttgtaatatacttcatagattcatcaaacccaatagaatcctgccagaatttctacaaagatttcacattacagatcgacatggctttcaacgtgttcttccttctctacttcggcttgcggtttattgcagccaacgataaattgtggttctggctggaagtgaactctgtagtggatttcttcacggtgccccccgtgtttgtgtctgtgtacttaaacagaagttggcttggtttgagatttttaagagctctgagactgatacagttttcagaaattttgcagtttctgaatattcttaaaacaagtaattccatcaagctggtgaatctgctctccatatttatcagcacgtggctgactgcagccgggttcatccatttggtggagaattcaggggacccatgggaaaatttccaaaacaaccaggctctcacctactgggaatgtgtctatttactcatggtcacaatgtccaccgttggttatggggatgtttatgcaaaaaccacacttgggcgcctcttcatggtcttcttcatcctcgggggactggccatgtttgccagctacgtccctgaaatcatagagttaataggaaaccgcaagaaatacgggggctcctatagtgcggttagtggaagaaagcacattgtggtctgcggacacatcactctggagagtgtttccaacttcctgaaggactttctgcacaaggaccgggatgacgtcaatgtggagatcgtttttcttcacaacatctcccccaacctggagcttgaagctctgttcaaacgacattttactcaggtggaattttatcagggttccgtcctcaatccacatgatcttgcaagagtcaagatagagtcagcagatgcatgcctgatccttgccaacaagtactgcgctgacccggatgcggaggatgcctcgaatatcatgagagtaatctccataaagaactaccatccgaagataagaatcatcactcaaatgctgcagtatcacaacaaggcccatctgctaaacatcccgagctggaattggaaagaaggtgatgacgcaatctgcctcgcagagttgaagttgggcttcatagcccagagctgcctggctcaaggcctctccaccatgcttgccaacctcttctccatgaggtcattcataaagattgaggaagacacatggcagaaatactacttggaaggagtctcaaatgaaatgtacacagaatatctctccagtgccttcgtgggtctgtccttccctactgtttgtgagctgtgttttgtgaagctcaagctcctaatgatagccattgagtacaagtctgccaaccgagagagccgaagccgaaagcgtatattaattaatcctggaaaccatcttaagatccaagaaggtactttaggatttttcatcgcaagtgatgccaaagaagttaaaagggcatttttttactgcaaggcctgtcatgatgacatcacagatcccaaaagaataaaaaaatgtggctgcaaacggcttgaagatgagcagccgtcaacactatcaccaaaaaaaaagcaacggaatggaggcatgcggaactcacccaacacctcgcctaagctgatgaggcatgaccccttgttaattcctggcaatgatcagattgacaacatggactccaatgtgaagaagtacgactctactgggatgtttcactggtgtgcacccaaggagatagagaaagtcatcctgactcgaagtgaagctgccatgaccgtcctgagtggccatgtcgtggtctgcatctttggcgacgtcagctcagccctgatcggcctccggaacctggtgatgccgctccgtgccagcaactttcattaccatgagctcaagcacattgtgtttgtgggctctattgagtacctcaagcgggaatgggagacgcttcataacttccccaaagtgtccatattgcctggtacgccattaagtcgggctgatttaagggctgtcaacatcaacctctgtgacatgtgcgttatcctgtcagccaatcagaataatattgatgatacttcgctgcaggacaaggaatgcatcttggcgtcactcaacatcaaatctatgcagtttgatgacagcatcggagtcttgcaggctaattcccaagggttcacacctccaggaatggatagatcctctccagataacagcccagtgcacgggatgttacgtcaaccatccatcacaactggggtcaacatccccatcatcactgaactagtgaacgatactaatgttcagtttttggaccaagacgatgatgatgaccctgatacagaactgtacctcacgcagccctttgcctgtgggacagcatttgccgtcagtgtcctggactcactcatgagcgcgacgtacttcaatgacaatatcctcaccctgatacggaccctggtgaccggaggagccacgccggagctggaggctctgattgctgaggaaaacgcccttagaggtggctacagcaccccgcagacactggccaatagggaccgctgccgcgtggcccagttagctctgctcgatgggccatttgcggacttaggggatggtggttgttatggtgatctgttctgcaaagctctgaaaacatataatatgctttgttttggaatttaccggctgagagatgctcacctcagcacccccagtcagtgcacaaagaggtatgtcatcaccaacccgccctatgagtttgagctcgtgccgacggacctgatcttctgcttaatgcagtttgaccacaatgccggccagtcccgggccagcctgtcccattcctcccactcgtcgcagtcctccagcaagaagagctcctctgttcactccatcccatccacagcaaaccgacagaaccggcccaagtccagggagtcccgggacaaacagaaaaaagaaatggtttacagatgaaccggataatgcctatcccagaaacattcaaatcaagcccatgagtacccacatggctaaccagatcaaccaatataaatccacaagcagcttgattccaccaatcagagaagttgaagatgaatgttgactcccaggagaccagaactatttttttaaagcctgacaaacttcataaatggtgatgtgacttttcttcttacatgctgaatcactggtggaaacgttaggataagcaagaattgccagaaaataaagtagacagatctttctctttgtctgccttgaatattgcttccatgtattttggaaaagaaaatgatttcatttataaatgaacatactaaaatagtcatgtatagcctctagcattttaaattatttttatttattagaaagaaaatatattttttcttttcattgtcaaatatcttccctatatctaaacaatgcaaaatctaaatgaataagtggtcagactccttaatgtgtttttctcttctttctctctttttctttgaggagaatgatggtcaccaccacaattaattgtaattaagggaaatgaattattaaaacaattttaaaatggccaatgatgtatacatgtattttagtaaatccagaaaagaagactaaggggacaggtgaatacctgctcctcgcctggatgggtgtgtattttgatctgcattgacaccagctcttaataaatggaaacttatttattttcacagttgaaagtcatatttttgtagttctagttttcattctgtagttctcacccctttgttcatatttttaaagggaagaccttctgctgcttttctacaattggcagatcaggtttgtctggccaactaaggacaccaggagggttgtgggcacacctgggatgtggaagctgaggaccagatgcacacaaggcattgctctgtttgctgttctagtggtggagactcctacgtgctgttatgcttctcattttatatttccaaaccacctgagcgagtaatgtcaacttcgggagggtctggtggactttctccccactccccaagtctcagagcttttagcctggaagtttgtaaaactgattagtagttttactttaccataggatgtgagagggcagtcattcttctcactgagtttttgtttaaaaaccaggaaatttctacaatcatggagacagattttaatttgcatgctctcctttatttagttgctggggccaaacacatgaacttgttacaacaatttaaaaataataataacaaaaggaaagcaacgaatgcacttcatatagactgttagaaaaggcctttgaaaattaccagcagtgaaatcaaataaattagccactttaaactgcggtcaaaagatttttctagccatcagatgcaattacgatgtctcagagctctgctatcgcttgcatgctcggtgtacagtctcccggcaactgttttgttccaatcaacttagcaagtctttcaactttaaaattatcaatctttgatatgatcatcaaggtctctggagaagcatggatgtaatagtgatttctattttcttaaaaaatgtaaactgtggacacttaatggaaccaagctaaccaaagtatctccccgaagtttcatgatatctagtccattaactctttgggccatgacctgtggtacctagttatggtagtgcaaatcagatcagagcaaagcaatgagatcatcatgaagacatatgtccactaagtactccaattaccagcgtaggcaaaatgagcttccacctctgtccactccctgcagagccaatatagtcgtgcttccacctcgtaggcattgtcctgcagtgatttgtcggactgtggttactctgtcgtcacattttgtagaattagttctataaaagtattgtgaatacaatgtatgtccaattggattgtttaaaaactacttataattaatcactagcctactcagcagactaaaatgatgtcaacagtctatattcaggcttataaacatttcttggtttccaacagaagtcaaatgtgtttgtggggagaacgttttgctaggattttgacaactttcctgaaagctaggccttttttacataatgattttgcattggggtcaccttagtatattcacgtcaatccacgctcttctttccttcgtgaaccatagtgggctcttcactcctgctcgtaataaccacctccaaatttgttagagtgatttggtctcctctggcaggctgtggtggccacataaaggatcttccattagagggacacaggacacaaagctccattcccatgaccctctcttccctgtgtctcccctaacaaggcaatctggaagcagaaatgcaaactccagccccaccacacatccaccgatgcatttgtggctagaaattttaatctaaactttttttaaaaaaaatcataatagttaggatagtttcctatagcaaagggctccttgattcataagcacctcccccccaaaaaaaccaaattggtaaaaattcattttcttttaaatagagcaataagttcatactgtgttgccgttgtaataatgaattgttctggactagaaaacaaaatgaggcattttgttaagggggtaggaaaatgactgattgttgggccctttggcaaaagctggtgcctggtaagtagaaacgaaatggaaacagaaataacatttgtgaaatcactggagggctcaagcaaatgccagagcttctccctggcttgttcctacttgttgagctctttggccctgagtcccatccatctccactgcaacagtctgtctttctgcctacatccgcctgagaccaaggagggtctttggtacagtccacattatgaggctctgatttcctatcccagtttagggctccagaaaagccattctcccaaactaatgattcttgggtgctgtgggtcaccaacaggctgtttacaaagcagaaaatatcatcaccatcataacctttctccttgagaaaacttttatttttgtctaagcaattttatattttagaatatcatcttgaaccattataaaacaccttaaataaaagtgattgtgactaaggcacgttggagaacattccaatctttcctcccaagggttctggcaccttatgatgtactttgtaaaaaaattgattgaagattttaaataaacaggaaattagaagtgttagggttagataaaggaaaagtgaaaaagcataagaaatttgggactttttcatgttgaaaggagaaaaagcacaagttccctagttaccatttaatatgagggtgcaagagccacatttacaaacaacaaacttgatctttaaaaatgtttttaaaactctctgagtctcagtgacttcatttgtaaatgagagtgattcatctagatgactctaaggtctctttcaggtcccaggggacgtgatctaagttaggagtgggaacatgggagtggctgcttctccttggctaagcccatgcagactattgtgtccaggactggaataaaggtcctttttgctgcatcacccaggcaacactcccagccttactcaggagtggtgaacattttctgctctggacatagaataggtaggttcattcctggtcttttcactttagattctctttaggttcaagatgcagatttctcaatttggacacacctgcatcacgttggtcaaattttgctgcctgtttctagggttttcttctcagtttcatccctgccttcccttttttgttgttttttttttggttcaaggcccagcttcagttaatcccttcatctctatgccatgtctccaattcctagtatgtaactagaggttcaagagaccccaaattcctgccattttccccatttatgtttccccatgtgaatcttcaggaagtaaccagtcttccttctcacttcatttcctgtcctctgtttatttggttattttctttcattaataaactaaccatctcttagctacttacattcacaaatgtaattttaatctattgtgtttcattgtgaaagagaatctcattgaaggaaggaaggaagaaattgaggaataaaggtaggaagggagagaaacaaagactatccaaccaattgactgagatgtgagccggcttgactcctaggagactaagtagatccattcagcttgaacactgagttccagggcagaatctgtccattttctgttttgttcttacttgctgcttttggaatggtggtaaagccaccagtcaccatgagccttgaaaggaccttcactaatgaggacttgactcaccctctttaaaaagcaaaagaaacagaatttacttacaatcttctggtaaattacctttctgatcctctccttattcccaaaaggcaatttttttaatccagcagagatgatttagcatataaatcccaggtcatttgaggaggtgatgacgctatttggatttatttatgagacagtagtaattataaatgattcctaggcagtttgtactagtttggtcatattggttgtttaagtggagtctcttctgattgtttgtttccaataaagtatcagttgttaataatttcaagatttccataaaaataagaaaacttggaaaacatttttaattttatttcttaagagaccacagagcctaattttcaatttttatggtaagcttgcttaaaacatgtataaaaagaagcctacatgctcaaaggcagaggcacctttagccctacaacagttggaagctccatgatatcacagccccacatggatagattggagaaagaattctgacttagaccacctgtagcagaccttcctcttttggcatatttttttaatcacaaaaaggacctgagactccctatctaaagataagccaaacttggggtatacattaagaatctgggaagaaagaaaaaaaagaaaaagatataataagcagtattttaaaataccatgagttatgggcatgcatatggtacaaagagtagttctttgggttgaaagaaagaagagtttgcattgaactgcgtaggctggcaagaatgcagaggtatacaatgtttgatgggctttggaggcatttcaatagtaaatgggtgacaggactggaaagatgtggaatatgagggttttccagggagatgggacttaatgggccatgatgtatttgtaggaatgtgatttcaatagattgactattttgtctactgtgataagtttgtgtaggggaactgaggaaaactgagatgagacttcatggaaggggctacaaagtacagtctaaaggcctagataaagtttgaaacttgatttagaaagtcatgaaaagccactcagagttttaagcaaagagtgatggggcagcaatggctgtgcatttttcaggttgaaagtagtgagatgtcagttcttcctggaagatatcatgagaatgcacacaaaactgaacattttctcagcagcaaggagtgctaaagggtgcacactccaagtcaacaactcaccgtgtgcagcaccttcctcacacattttgctttgctttctgtcacaggaccatcagacgtagaacgtcctgactctcctgaattactagaatgtcagcaacaaactcacaaagtagattagagggtaggaatagatacataaatttttaaaaacctgccaatcatactgttttctagacagtaatataataagaacatgaggcaggacatccacaaatagtagagaataattaatagtccagaactgccaaataggaattccccttatgaaaacacccttgcagctaatcaggtagcccttgtttagaaaccaattagcactcataaaatatttgtacaaggagtgagtgggggagaaatgagcacaatatgggttctgccatcaatcagcttataatacaactaaagaaagaaaacatgctcaaagcaccattagagaaagggtgagccctaatgacatagtttcacattcaatatggtaggagttgaaacaagggagaaatgctgtggtttgaagtggttcaacaaggtaggatttctagagaaaggggggtttaggagttagataagtagaggatcagcattctaggtatgaaggcaggattatctggcatgtggcagggtgaatgatgttaatcagtaactgctaattgatatttactgagcagctgctgtgtcctcacgatggtaagactattagaggaagacagcccacctgcctaactgggaacacaaggcacacatatattggaaagatcatgttgcacaaaacaggtgttcaataaataatttttgaataaatgtgaacactgaatagcaaataaatgttatagatcgtaatagttgtagaagattggttgggattgtagggactggatgtggggcaatggctgtgggtctagagtatattcattgtgcagtggacacacacctaatctgtcctcaaggacagaaccatgtggaggaataggaaaacaagagaagcaggcaagaagcggaggcagtgagtacagcagctaagaaatgttacattgggttcatccagagcaagaaaagctgagagctgtccgtgagggaaggccacacaggcaagaggagtgggacaggggagtaaaggagtgggctacaacaggccctgcagatgtggaagccagacccacagaggcacttagaaagtgaggatcctggatgaattattttagggagaaagtgtaggtttagatcagctggcagatgtgtttgtgggctacagccaagtttttcaggactaagaaggagcaaaataagtagaacttcttgggacaggagatctagggtactccagaaccagggaaatgagaaacaagaggggaattttaagaaagagagggaagatcatctatgaggttggagatgaaaggtgttggagatggtgaggcacaagtcaaaagactcactcgaagggcaggaactctgcttatttgtccatattcccagagtttgtcatgaggtctggcccacgtgggcagtcactcggccactatgtatcactgtggctgccatggtggatggaggctggacagaacctgtggtgatcggcagtctttctggaggactcaccagggaggggtctcagggtgggcatctcctttcaccttcctgtgcatgtcactgcactgttcttcttccctccctgaacagcacacacactgcatccttagtttcaggggtctgaaaacaaatgctacgaccaccttgctttggtggcttttctgaacaggcattgtgagaagagatgttctggccaggtgaaagtggactttatttttaggtaggtttttcagtttagaaaggtttcctttgcttatcccttgaggacttctgtgctgctgcttctcctccatcttgctagttaacagaacaggggcagaagtgacaccaatgctctcggccatgcctgccttgggaagcactaccgggccccactgtttagaatcttagatggaaatgtacacaaggcattgacacacgcctgcgggagtgacccagtgcttccctcccatgggactcagggtcagcgtgggaaggcagctggcagggacaggagccccgcccgcaaggtggactgagcctcacttccacacaaaaccagagtcccatctgccccagagcgctcgctctcctccccttccttccgctcaatgcagcctgacacgcctttgaccagaactgcaacatttcaaacacaaacccagatctgttgggaaatcctaattaaaaacgttgcattcccaggtggcacaatcacatcctgcctaaaacttctggcccacatcccaccacccagatgttgaaaagaaacctttctctgcttaacaccaaaacctgcacttcaaggtttctttaggggacaaagaaaaaaaaagtacacacatgcagagttcagcctacatgttcattgaggaaaaagagcgtggcttattcatctttcaatcttttgattgttggcattatgattatgattatgattaattactctgacctgacaggaattgaagaagagactatatgctggtgctctgaaatgatctacccaactctgtcatctgtaacaaccagtgataactctcttgtcttgtaaaaagggtttgtacataacttgtacatggtttcattttgtatttttcgcagattaaaaatttatgtatttgtgttctaaaac

SEQ ID NO: 168052 - DNA, 1046 bp, Homo sapiens
  Payload ID: 13053
  Gene Symbol: KCNMA1
  Gene Name: potassium channel, calcium activated large conductance subfamily M alpha, member 1
  Uniprot ID: Q12791
  ENST ID: ENST00000480683
  CDS Start-End: 352-858
ggcgcagaccccgggcgcgggcggcccgcggcgccccctggctctcggcgctcggggccagcgcagcccggggcgagcggggcgcgggccggggagggggagctgcccgcgcactccatccccctcccccccgggcgggcggcggcggctcgctgtatatatctcggcgcaccccgccaggtcgcgcacagcgccccgagcccaggcgcctccccgcccccctcccgcgctccgcggcggcggcggcggcggcagcagtagcagcaatatggctgttgatgggtgtttggggtggcgctggcggcgggaggagctcccccgagcccctgcgccggctgcccgttgctagctatggcaaatggtggcggcggcggcggcggcagcagcggcggcggcggcggcggcggaggcagcagtcttagaatgagtagcaatatccacgcgaaccatctcagcctagacgcgtcctcctcctcctcctcctcctcttcctcttcttcttcttcctcctcctcttcctcctcgtcctcggtccacgagcccaagatggatgcgctcatcatcccggtgaccatggaggtgccgtgcgacagccggggccaacgcatgtggtgggctttcctggcctcctccatggtgactttcttcgggggcctcttcatcatcttgctctggcggacgctcaagtacctgtggaccgtgtgctgccactgcgggggcaagacgaaggccacccactttgggtccccggaaatgccaccagcagcgcggagctggagcgggagtccgcctgaggccgcggttttacgcggagcgtcttccctggcgctcgaggtggctagatgtcgtcggctttagctattcctggtgcagacgcccaccggcactgaggctggcgacaccttcgatgtatggttgctaggctcactgcctggtctgtagtcgtgtccctagagatgtcttcccttccccacagccactggctggagtgggggacccgacactgatagaaaactgcagaataaaaaagaaagaactggaaaaaa

SEQ ID NO: 168053 - DNA, 896 bp, Homo sapiens
  Payload ID: 13053
  Gene Symbol: KCNMA1
  Gene Name: potassium channel, calcium activated large conductance subfamily M alpha, member 1
  ENST ID: ENST00000481070
  CDS Start-End: 148-534
ggcgcctccccgcccccctcccgcgctccgcggcggcggcggcggcggcagcagtagcagcaatatggctgttgatgggtgtttggggtggcgctggcggcgggaggagctcccccgagcccctgcgccggctgcccgttgctagctatggcaaatggtggcggcggcggcggcggcagcagcggcggcggcggcggcggcggaggcagcagtcttagaatgagtagcaatatccacgcgaaccatctcagcctagacgcgtcctcctcctcctcctcctcctcttcctcttcttcttcttcctcctcctcttcctcctcgtcctcggtccacgagcccaagatggatgcgctcatcatcccggtgaccatggaggtgccgtgcgacagccggggccaacgcatgtggtgggctttcctggcctcctccatggtgactttcttcgggggcctcttcatcatcttgctctggcggacgctcaagtacctgtggaccgtgtgctgccactgcgggggcaagacgaaggtgctctagtggaacataccccaagttcttcggcctctgttcctttgcccccaggccacccactttgggtccccggaaatgccaccagcagcgcggagctggagcgggagtccgcctgaggccgcggttttacgcggagcgtcttccctggcgctcgaggtggctagatgtcgtcggctttagctattcctggtgcagacgcccaccggcactgaggctggcgacaccttcgatgtatggttgctaggctcactgcctggtctgtagtcgtgtccctagagatgtcttcccttccccacagccactggctggagtgggggacccgacactgatagaaaactgcagaataaaaaagaaagaactggaaaaaa

SEQ ID NO: 168054 - DNA, 1357 bp, Homo sapiens
  Payload ID: 13053
  Gene Symbol: KCNMA1
  Gene Name: potassium channel, calcium activated large conductance subfamily M alpha, member 1
  ENST ID: ENST00000618048
  CDS Start-End: 178-819
cgccaggtcgcgcacagcgccccgagcccaggcgcctccccgcccccctcccgcgctccgcggcggcggcggcggcggcagcagtagcagcaatatggctgttgatgggtgtttggggtggcgctggcggcgggaggagctcccccgagcccctgcgccggctgcccgttgctagctatggcaaatggtggcggcggcggcggcggcagcagcggcggcggcggcggcggcggaggcagcagtcttagaatgagtagcaatatccacgcgaaccatctcagcctagacgcgtcctcctcctcctcctcctcctcttcctcttcttcttcttcctcctcctcttcctcctcgtcctcggtccacgagcccaagatggatgcgctcatcatcccggtgaccatggaggtgccgtgcgacagccggggccaacgcatgtggtgggctttcctggcctcctccatggtgactttcttcgggggcctcttcatcatcttgctctggcggacgctcaagtacctgtggaccgtgtgctgccactgcgggggcaagacgaagggttgttggcggctgcggctggggccggggtcggggactcacaggctcgggtgccgtggtgcggggtggggacagccaactcagcggggacggaggaagctgggggcagctgggtgcgtgttttgcaccgctcacctgccggggctcggctcctggcggtgggcgagagggagcacatccgcccatactttaggaacctgttggggagatgagttcgtggggtcagaaagaagggaaaaatcctttgggcaagggagagaataattttgcacaagggaatcccgggggaggagcatggcccgagataacagggggacttcgaggggcgagagaagttggggagatccatcccactattgggggtagcccacggggctgccacttttggaatgtgtcgaggtcgcatatctgatgtaacctcccactccgtcccttaggtgctctagtggaacataccccaagttcttcggcctctgttcctttgcccccaggccacccactttgggtccccggaaatgccaccagcagcgcggagctggagcgggagtccgcctgaggccgcggttttacgcggagcgtcttccctggcgctcgaggtggctagatgtcgtcggctttagctattcctggtgcagacgcccaccggcactgaggctggcgacaccttcgatgtatggttgctaggctcactgcctggtctgtagtcgtgtccctagagatgtcttcccttccccacagccactggctggagtgggggacccgacactgatagaaaactgcagaataaaaaagaaagaactgg

SEQ ID NO: 168055 - DNA, 3826 bp, Homo sapiens
  Payload ID: 13053
  Gene Symbol: KCNMA1
  Gene Name: potassium channel, calcium activated large conductance subfamily M alpha, member 1
  Uniprot ID: Q12791
  ENST ID: ENST00000626620
  CDS Start-End: 167-3826
gcacagcgccccgagcccaggcgcctccccgcccccctcccgcgctccgcggcggcggcggcggcggcagcagtagcagcaatatggctgttgatgggtgtttggggtggcgctggcggcgggaggagctcccccgagcccctgcgccggctgcccgttgctagctatggcaaatggtggcggcggcggcggcggcagcagcggcggcggcggcggcggcggaggcagcagtcttagaatgagtagcaatatccacgcgaaccatctcagcctagacgcgtcctcctcctcctcctcctcctcttcctcttcttcttcttcctcctcctcttcctcctcgtcctcggtccacgagcccaagatggatgcgctcatcatcccggtgaccatggaggtgccgtgcgacagccggggccaacgcatgtggtgggctttcctggcctcctccatggtgactttcttcgggggcctcttcatcatcttgctctggcggacgctcaagtacctgtggaccgtgtgctgccactgcgggggcaagacgaaggaggcccagaagattaacaatggctcaagccaggcggatggcactctcaaaccagtggatgaaaaagaggaggcagtggccgccgaggtcggctggatgacctccgtgaaggactgggcgggggtgatgatatccgcccagacactgactggcagagtcctggttgtcttagtctttgctctcagcatcggtgcacttgtaatatacttcatagattcatcaaacccaatagaatcctgccagaatttctacaaagatttcacattacagatcgacatggctttcaacgtgttcttccttctctacttcggcttgcggtttattgcagccaacgataaattgtggttctggctggaagtgaactctgtagtggatttcttcacggtgccccccgtgtttgtgtctgtgtacttaaacagaagttggcttggtttgagatttttaagagctctgagactgatacagttttcagaaattttgcagtttctgaatattcttaaaacaagtaattccatcaagctggtgaatctgctctccatatttatcagcacgtggctgactgcagccgggttcatccatttggtggagaattcaggggacccatgggaaaatttccaaaacaaccaggctctcacctactgggaatgtgtctatttactcatggtcacaatgtccaccgttggttatggggatgtttatgcaaaaaccacacttgggcgcctcttcatggtcttcttcatcctcgggggactggccatgtttgccagctacgtccctgaaatcatagagttaataggaaaccgcaagaaatacgggggctcctatagtgcggttagtggaagaaagcacattgtggtctgcggacacatcactctggagagtgtttccaacttcctgaaggactttctgcacaaggaccgggatgacgtcaatgtggagatcgtttttcttcacaacatctcccccaacctggagcttgaagctctgttcaaacgacattttactcaggtggaattttatcagggttccgtcctcaatccacatgatcttgcaagagtcaagatagagtcagcagatgcatgcctgatccttgccaacaagtactgcgctgacccggatgcggaggatgcctcgaatatcatgagagtaatctccataaagaactaccatccgaagataagaatcatcactcaaatgctgcagtatcacaacaaggcccatctgctaaacatcccgagctggaattggaaagaaggtgatgacgcaatctgcctcgcagagttgaagttgggcttcatagcccagagctgcctggctcaaggcctctccaccatgcttgccaacctcttctccatgaggtcattcataaagattgaggaagacacatggcagaaatactacttggaaggagtctcaaatgaaatgtacacagaatatctctccagtgccttcgtgggtctgtccttccctactgtttgtgagctgtgttttgtgaagctcaagctcctaatgatagccattgagtacaagtctgccaaccgagagagccgtatattaattaatcctggaaaccatcttaagatccaagaaggtactttaggatttttcatcgcaagtgatgccaaagaagttaaaagggcatttttttactgcaaggcctgtcatgatgacatcacagatcccaaaagaataaaaaaatgtggctgcaaacggcttgaagatgagcagccgtcaacactatcaccaaaaaaaaagcaacggaatggaggcatgcggaactcacccaacacctcgcctaagctgatgaggcatgaccccttgttaattcctggcaatgatcagattgacaacatggactccaatgtgaagaagtacgactctactgggatgtttcactggtgtgcacccaaggagatagagaaagtcatcctggtcacaggctggatgccgtatctgggacctagggttttaatgacttgcctggatattggtgtagtatgcatgccaactgatattcaatcaacatctcctgccagcataaaaaagtttaaggagactcgaagtgaagctgccatgaccgtcctgagtggccatgtcgtggtctgcatctttggcgacgtcagctcagccctgatcggcctccggaacctggtgatgccgctccgtgccagcaactttcattaccatgagctcaagcacattgtgtttgtgggctctattgagtacctcaagcgggaatgggagacgcttcataacttccccaaagtgtccatattgcctggtacgccattaagtcgggctgatttaagggctgtcaacatcaacctctgtgacatgtgcgttatcctgtcagccaatcagaataatattgatgatacttcgctgcaggacaaggaatgcatcttggcgtcactcaacatcaaatctatgcagtttgatgacagcatcggagtcttgcaggctaattcccaagggttcacacctccaggaatggatagatcctctccagataacagcccagtgcacgggatgttacgtcaaccatccatcacaactggggtcaacatccccatcatcactgaactagtgaacgatactaatgttcagtttttggaccaagacgatgatgatgaccctgatacagaactgtacctcacgcagccctttgcctgtgggacagcatttgccgtcagtgtcctggactcactcatgagcgcgacgtacttcaatgacaatatcctcaccctgatacggaccctggtgaccggaggagccacgccggagctggaggctctgattgctgaggaaaacgcccttagaggtggctacagcaccccgcagacactggccaatagggaccgctgccgcgtggcccagttagctctgctcgatgggccatttgcggacttaggggatggtggttgttatggtgatctgttctgcaaagctctgaaaacatataatatgctttgttttggaatttaccggctgagagatgctcacctcagcacccccagtcagtgcacaaagaggtatgtcatcaccaacccgccctatgagtttgagctcgtgccgacggacctgatcttctgcttaatgcagtttgaccacaatgccggccagtcccgggccagcctgtcccattcctcccactcgtcgcagtcctccagcaagaagagctcctctgttcactccatcccatccacagcaaaccgacagaaccggcccaagtccagggagtcccgggacaaacagaagtacgtgcaggaagagcggctttga

SEQ ID NO: 168056 - DNA, 718 bp, Homo sapiens
  Payload ID: 13054
  Gene Symbol: KCNJ1
  Gene Name: potassium channel, inwardly rectifying subfamily J, member 1
  ENST ID: ENST00000324003
  CDS Start-End: 301-718
actcttgcatcaaaggtgcagggacttgctcacatcgagaatctggttgctttcttggagaccaagaaaatgagtttttgtttctacatttactccagcaatccatgaggtttcttctctactgtgccttcatccccatcctgggccctgacaaagacagtgtgacaagttctgagccccacaggtggaatcccaaaccaagcagctcttgctggtcaccccaagatctacttatacatgaagttttgaaaatcatctcctgaacctcttctgacagagatcagggtgttgacagaaagtatgttcaaacatcttcggaaatgggtcgtcactcgcttttttgggcattctcggcaaagagcaaggctagtctccaaagatggaaggtgcaacatagaatttggcaatgtggaggcacagtcaaggtttatattctttgtggacatctggacaacggtacttgacctcaagtggagatacaaaatgaccattttcatcacagccttcttggggagttggtttttctttggtctcctgtggtatgcagtagcgtacattcacaaagacctcccggaattccatccttctgccaatcacactccctgtgtggagaatattaatggcttgacctcagcttttctgttttctctggagactcaagtgaccattggatatggattcaggtgtgtgacagaacagtgtgccactgccatttttc

SEQ ID NO: 168057 - DNA, 2614 bp, Homo sapiens
  Payload ID: 13054
  Gene Symbol: KCNJ1
  Gene Name: potassium channel, inwardly rectifying subfamily J, member 1
  Uniprot ID: P48048
  ENST ID: ENST00000324036
  CDS Start-End: 526-1644
gttgcatacagatgagttggcagccggtctgagctggcccacagactcataaaatcaacagggcctcgggtaccctcacctagcatatccaaactcttgcatcaaaggtgcagggacttgctcacatcgagaatctggttgctttcttggagaccaagaaaatgagtttttgtttctacatttactccagcaatccatgaggactttataggaattttgcaccattctgaatggatacatttggatttctcaacatttgttcagcttcctaatgactgttgtgacaattgctctataccagtgaatgccaactgtttatctctgctctgaacaggtttcttctctactgtgccttcatccccatcctgggccctgacaaagacagtgtgacaagttctgagccccacaggtggaatcccaaaccaagcagctcttgctggtcaccccaagatctacttatacatgaagttttgaaaatcatctcctgaacctcttctgacagagatcagggtgttgacagaaagtatgttcaaacatcttcggaaatgggtcgtcactcgcttttttgggcattctcggcaaagagcaaggctagtctccaaagatggaaggtgcaacatagaatttggcaatgtggaggcacagtcaaggtttatattctttgtggacatctggacaacggtacttgacctcaagtggagatacaaaatgaccattttcatcacagccttcttggggagttggtttttctttggtctcctgtggtatgcagtagcgtacattcacaaagacctcccggaattccatccttctgccaatcacactccctgtgtggagaatattaatggcttgacctcagcttttctgttttctctggagactcaagtgaccattggatatggattcaggtgtgtgacagaacagtgtgccactgccatttttctgcttatctttcagtctatacttggagttataatcaattctttcatgtgtggggccatcttagccaagatctccaggcccaaaaaacgtgccaagaccattacgttcagcaagaacgcagtgatcagcaaacggggagggaagctttgcctcctaatccgagtggctaatctcaggaagagccttcttattggcagtcacatttatggaaagcttctgaagaccacagtcactcctgaaggagagaccattattttggaccagatcaatatcaactttgtagttgacgctgggaatgaaaatttattcttcatctccccattgacaatttaccatgtcattgatcacaacagccctttcttccacatggcagcggagacccttctccagcaggactttgaattagtggtgtttttagatggcacagtggagtccaccagtgctacctgccaagtccggacatcctatgtcccagaggaggtgctttggggctaccgttttgctcccatagtatccaagacaaaggaagggaaataccgagtggatttccataactttagcaagacagtggaagtggagacccctcactgtgccatgtgcctttataatgagaaagatgttagagccaggatgaagagaggctatgacaaccccaacttcatcttgtcagaagtcaatgaaacagatgacaccaaaatgtaacagtggcttttcaacgggagtaaagcaaagtctctaaagctcctagtacctagaagcattatgaagcagtcaacaatttaggggtacgaaagtaggatgagagccttcaaagtctaccagcacaaagacccctgagccccgcaattgtgatcccacaagacatgcatctccacaaggctactgtattagaacgtgcaatgcatttatatgaaactggtgtatggaagacataggtgctctcttgaaatcttaaatatgattatttgagctcatataaggtggattggagcagataaaattatcaaaagtttcatgaacaggccaaacaaaatattttttaaagtttccttaaagaagttatgaactttagaaaggatcaggggacaataataatctcattttgattctactgataagaatgactccacttttaatgtggacttttactcatggaaaaattgtctcctaatttggggagatgaaccaaccaatcaatgacaagaaaacgcttacacaaagaacaatttgaggctctaagcttctcatgtggtacgtttagacagaggctaaatctgcacactagaatcttgatgataccttcctgcaagacagaatgctttagttaaaagtggtgatgatatttctttcaatctgtattggatggcttaaagggctataaatctgtttataaagagcatttcctgctcttcgaagacagcaatgaggagttggaaggtgcaaagtcagtagagaagggaatgtatcattaatgcacctgagaagaaacagtttcatgtgttcctccacctagagtttgtactggaatgctatttctaaagaagaagtgggaaagagagaggaatgggatggagccccacagtcagaatgttactatgtctttctttccctgacagcccatcttcctaaaagggaccagcttatggaaggctcgaccttgaggggaaagttt

SEQ ID NO: 168058 - DNA, 1674 bp, Homo sapiens
  Payload ID: 13054
  Gene Symbol: KCNJ1
  Gene Name: potassium channel, inwardly rectifying subfamily J, member 1
  Uniprot ID: P48048
  ENST ID: ENST00000392664
  CDS Start-End: 118-1293
acacaaattagcgtcagtccactgactgtcgcctacaataaattaggctgagtctaaaagaaatcagtctgcatagaaagaccaacaaccagcaccacttccttgctttttccagccatgaatgcttccagtcggaatgtgtttgacacgttgatcagggtgttgacagaaagtatgttcaaacatcttcggaaatgggtcgtcactcgcttttttgggcattctcggcaaagagcaaggctagtctccaaagatggaaggtgcaacatagaatttggcaatgtggaggcacagtcaaggtttatattctttgtggacatctggacaacggtacttgacctcaagtggagatacaaaatgaccattttcatcacagccttcttggggagttggtttttctttggtctcctgtggtatgcagtagcgtacattcacaaagacctcccggaattccatccttctgccaatcacactccctgtgtggagaatattaatggcttgacctcagcttttctgttttctctggagactcaagtgaccattggatatggattcaggtgtgtgacagaacagtgtgccactgccatttttctgcttatctttcagtctatacttggagttataatcaattctttcatgtgtggggccatcttagccaagatctccaggcccaaaaaacgtgccaagaccattacgttcagcaagaacgcagtgatcagcaaacggggagggaagctttgcctcctaatccgagtggctaatctcaggaagagccttcttattggcagtcacatttatggaaagcttctgaagaccacagtcactcctgaaggagagaccattattttggaccagatcaatatcaactttgtagttgacgctgggaatgaaaatttattcttcatctccccattgacaatttaccatgtcattgatcacaacagccctttcttccacatggcagcggagacccttctccagcaggactttgaattagtggtgtttttagatggcacagtggagtccaccagtgctacctgccaagtccggacatcctatgtcccagaggaggtgctttggggctaccgttttgctcccatagtatccaagacaaaggaagggaaataccgagtggatttccataactttagcaagacagtggaagtggagacccctcactgtgccatgtgcctttataatgagaaagatgttagagccaggatgaagagaggctatgacaaccccaacttcatcttgtcagaagtcaatgaaacagatgacaccaaaatgtaacagtggcttttcaacgggagtaaagcaaagtctctaaagctcctagtacctagaagcattatgaagcagtcaacaatttaggggtacgaaagtaggatgagagccttcaaagtctaccagcacaaagacccctgagccccgcaattgtgatcccacaagacatgcatctccacaaggctactgtattagaacgtgcaatgcatttatatgaaactggtgtatggaagacataggtgctctcttgaaatcttaaatatgattatttgagctcatataaggtggattggagcagataaaattatcaaaagtttcatgaacaggccaaacaaaatattttttaaagtttccttaaagaagttatgaactttagaaaggatcagg

SEQ ID NO: 168059 - DNA, 4074 bp, Homo sapiens
  Payload ID: 13054
  Gene Symbol: KCNJ1
  Gene Name: potassium channel, inwardly rectifying subfamily J, member 1
  Uniprot ID: P48048
  ENST ID: ENST00000392665
  CDS Start-End: 146-1264
acctagcatatccaaactcttgcatcaaaggtgcagggacttgctcacatcgagaatctggttgctttcttggagaccaagaaaatgagtttttgtttctacatttactccagcaatccatgagatcagggtgttgacagaaagtatgttcaaacatcttcggaaatgggtcgtcactcgcttttttgggcattctcggcaaagagcaaggctagtctccaaagatggaaggtgcaacatagaatttggcaatgtggaggcacagtcaaggtttatattctttgtggacatctggacaacggtacttgacctcaagtggagatacaaaatgaccattttcatcacagccttcttggggagttggtttttctttggtctcctgtggtatgcagtagcgtacattcacaaagacctcccggaattccatccttctgccaatcacactccctgtgtggagaatattaatggcttgacctcagcttttctgttttctctggagactcaagtgaccattggatatggattcaggtgtgtgacagaacagtgtgccactgccatttttctgcttatctttcagtctatacttggagttataatcaattctttcatgtgtggggccatcttagccaagatctccaggcccaaaaaacgtgccaagaccattacgttcagcaagaacgcagtgatcagcaaacggggagggaagctttgcctcctaatccgagtggctaatctcaggaagagccttcttattggcagtcacatttatggaaagcttctgaagaccacagtcactcctgaaggagagaccattattttggaccagatcaatatcaactttgtagttgacgctgggaatgaaaatttattcttcatctccccattgacaatttaccatgtcattgatcacaacagccctttcttccacatggcagcggagacccttctccagcaggactttgaattagtggtgtttttagatggcacagtggagtccaccagtgctacctgccaagtccggacatcctatgtcccagaggaggtgctttggggctaccgttttgctcccatagtatccaagacaaaggaagggaaataccgagtggatttccataactttagcaagacagtggaagtggagacccctcactgtgccatgtgcctttataatgagaaagatgttagagccaggatgaagagaggctatgacaaccccaacttcatcttgtcagaagtcaatgaaacagatgacaccaaaatgtaacagtggcttttcaacgggagtaaagcaaagtctctaaagctcctagtacctagaagcattatgaagcagtcaacaatttaggggtacgaaagtaggatgagagccttcaaagtctaccagcacaaagacccctgagccccgcaattgtgatcccacaagacatgcatctccacaaggctactgtattagaacgtgcaatgcatttatatgaaactggtgtatggaagacataggtgctctcttgaaatcttaaatatgattatttgagctcatataaggtggattggagcagataaaattatcaaaagtttcatgaacaggccaaacaaaatattttttaaagtttccttaaagaagttatgaactttagaaaggatcaggggacaataataatctcattttgattctactgataagaatgactccacttttaatgtggacttttactcatggaaaaattgtctcctaatttggggagatgaaccaaccaatcaatgacaagaaaacgcttacacaaagaacaatttgaggctctaagcttctcatgtggtacgtttagacagaggctaaatctgcacactagaatcttgatgataccttcctgcaagacagaatgctttagttaaaagtggtgatgatatttctttcaatctgtattggatggcttaaagggctataaatctgtttataaagagcatttcctgctcttcgaagacagcaatgaggagttggaaggtgcaaagtcagtagagaagggaatgtatcattaatgcacctgagaagaaacagtttcatgtgttcctccacctagagtttgtactggaatgctatttctaaagaagaagtgggaaagagagaggaatgggatggagccccacagtcagaatgttactatgtctttctttccctgacagcccatcttcctaaaagggaccagcttatggaaggctcgaccttgaggggaaagttttactgtgaaagtcttcttcagatccccacctgcatcattccgaatgtgtcctggaaaaaaactggtactcaaagctgcttaggaatcaaaatgttttcagtgtgttgattaatatagtaaatttctgaaactgtgcatgcactttgattattattattactatgcattaactgagtcaggttccaggtgaaaatcctcttgcagagaggaccctctcctggaaggggcgggaggagtggagaggaagcagataggacacatttgttgtctggagtcctcaggaggaaatgaccctggccacagacacaccccttccggtacagctccatcacgcctctccagtgtgagtcttggcacataaaacggcagctgcccacagttgttgggagggatggcttatgtttttccatgcctgggctgtatttgtacagatccatgcaccactctggtccttctgactaagaacagtgggaagtctgatggttttagggttgcacaccttgtcagtggccataacagtggccatagctggcccatgtggaactctcactctgtacctgtgagtgctttggcaccacaatttaatgtgctgacaggaaaaagaaatcaggtatcacaagcttgagggagctggaattctctgctggcccactgtcatgatgtagccccttcataaactggagggaaactgtgttgacacttgttcccatcagcatgcactcttcctggtgtattctcctgctggctggcagcatgcatgtagatggctggaagtgagatggtcataagcaatccattccctttgattgtttagggaggtgaacaacatacatctttctgattggtatttacttctgggttatttggtggaggcccatctgcttctaaatatccctttgctaggatcaagacactctgcacctggagtctcttttttaatggaaattcccattgaccctctagcaaccattaacacaggtacatccaattaagcccctaggaaaagaggcctggaacaggtaacttttgataggtctaaggagtggctggaaccccaaagcgcataacactcctgtgcattttaagaaagggggtaacaagggaatgggtgctcaagtagtaaagagaaatgaaaaatagcctgagaaggccaaactgcttgtaggttaacaccactgctaaaggcagcctttttattacaatgcagtgacatttttcccggtggaatctgactacatcagtactgctatttgctacagatgctgggttattctatttgctgatttcaaaagcatgtcaactgttctaatttccttcgtgaaaaactgcatcccatgatgcattattatattcaaaattttccttgagactgattctctttgaattgcccagttcatctctgttgctatggggattttgactaagagcgtttgatcctggttgaatcttcctggacttaggttggctcaagctccaatatttaagagttaagatttgggaggttgtctttaatggaaagcactaaatgtttaaaaattatttattccttaagagagaaaaggtagaagggaaagatccttttgtgttgccatgcctttttaagacatgggctgataggtgactgtccttctctatccatcactaaggggatgtgcaactggaccttccagaagaactccctgggcggattgcagagacggttgaggaagtgtcttccttggggatttttcatgaaacagaatatgggtcctcaacaggatgcttctgtgaatagcacggggatctttccctgtctagaacaaacgttaggacagcttctgatggaaagaatgcaaatgaa

SEQ ID NO: 168060 - DNA, 2621 bp, Homo sapiens
  Payload ID: 13054
  Gene Symbol: KCNJ1
  Gene Name: potassium channel, inwardly rectifying subfamily J, member 1
  Uniprot ID: P48048
  ENST ID: ENST00000392666
  CDS Start-End: 393-1511
gttgcatacagatgagttggcagccggtctgagctggcccacagactcataaaatcaacagggcctcgggtaccctcacctagcatatccaaactcttgcatcaaaggtgcagggacttgctcacatcgagaatctggttgctttcttggagaccaagaaaatgagtttttgtttctacatttactccagcaatccatgaggtttcttctctactgtgccttcatccccatcctgggccctgacaaagacagtgtgacaagttctgagccccacaggtggaatcccaaaccaagcagctcttgctggtcaccccaagatctacttatacatgaagttttgaaaatcatctcctgaacctcttctgacagagatcagggtgttgacagaaagtatgttcaaacatcttcggaaatgggtcgtcactcgcttttttgggcattctcggcaaagagcaaggctagtctccaaagatggaaggtgcaacatagaatttggcaatgtggaggcacagtcaaggtttatattctttgtggacatctggacaacggtacttgacctcaagtggagatacaaaatgaccattttcatcacagccttcttggggagttggtttttctttggtctcctgtggtatgcagtagcgtacattcacaaagacctcccggaattccatccttctgccaatcacactccctgtgtggagaatattaatggcttgacctcagcttttctgttttctctggagactcaagtgaccattggatatggattcaggtgtgtgacagaacagtgtgccactgccatttttctgcttatctttcagtctatacttggagttataatcaattctttcatgtgtggggccatcttagccaagatctccaggcccaaaaaacgtgccaagaccattacgttcagcaagaacgcagtgatcagcaaacggggagggaagctttgcctcctaatccgagtggctaatctcaggaagagccttcttattggcagtcacatttatggaaagcttctgaagaccacagtcactcctgaaggagagaccattattttggaccagatcaatatcaactttgtagttgacgctgggaatgaaaatttattcttcatctccccattgacaatttaccatgtcattgatcacaacagccctttcttccacatggcagcggagacccttctccagcaggactttgaattagtggtgtttttagatggcacagtggagtccaccagtgctacctgccaagtccggacatcctatgtcccagaggaggtgctttggggctaccgttttgctcccatagtatccaagacaaaggaagggaaataccgagtggatttccataactttagcaagacagtggaagtggagacccctcactgtgccatgtgcctttataatgagaaagatgttagagccaggatgaagagaggctatgacaaccccaacttcatcttgtcagaagtcaatgaaacagatgacaccaaaatgtaacagtggcttttcaacgggagtaaagcaaagtctctaaagctcctagtacctagaagcattatgaagcagtcaacaatttaggggtacgaaagtaggatgagagccttcaaagtctaccagcacaaagacccctgagccccgcaattgtgatcccacaagacatgcatctccacaaggctactgtattagaacgtgcaatgcatttatatgaaactggtgtatggaagacataggtgctctcttgaaatcttaaatatgattatttgagctcatataaggtggattggagcagataaaattatcaaaagtttcatgaacaggccaaacaaaatattttttaaagtttccttaaagaagttatgaactttagaaaggatcaggggacaataataatctcattttgattctactgataagaatgactccacttttaatgtggacttttactcatggaaaaattgtctcctaatttggggagatgaaccaaccaatcaatgacaagaaaacgcttacacaaagaacaatttgaggctctaagcttctcatgtggtacgtttagacagaggctaaatctgcacactagaatcttgatgataccttcctgcaagacagaatgctttagttaaaagtggtgatgatatttctttcaatctgtattggatggcttaaagggctataaatctgtttataaagagcatttcctgctcttcgaagacagcaatgaggagttggaaggtgcaaagtcagtagagaagggaatgtatcattaatgcacctgagaagaaacagtttcatgtgttcctccacctagagtttgtactggaatgctatttctaaagaagaagtgggaaagagagaggaatgggatggagccccacagtcagaatgttactatgtctttctttccctgacagcccatcttcctaaaagggaccagcttatggaaggctcgaccttgaggggaaagttttactgtgaaagtcttcttcagatccccacctgcatcattccgaatgtgtcctggaaaaaaactggtactcaaagctgcttaggaatcaaaatgttttcagtgtgttgattaatatagtaaatttctgaaactgtgcatgc

SEQ ID NO: 168061 - DNA, 2539 bp, Homo sapiens
  Payload ID: 13054
  Gene Symbol: KCNJ1
  Gene Name: potassium channel, inwardly rectifying subfamily J, member 1
  Uniprot ID: P48048
  ENST ID: ENST00000440599
  CDS Start-End: 353-1471
gcatacagatgagttggcagccggtctgagctggcccacagactcataaaatcaacagggcctcgggtaccctcacctagcatatccaaactcttgcatcaaaggtgcagggacttgctcacatcgagaatctggttgctttcttggagaccaagaaaatgagtttttgtttctacatttactccagcaatccatgaggactttataggaattttgcaccattctgaatggatacatttggatttctcaacatttgttcagcttcctaatgactgttgtgacaattgctctataccagtgaatgccaactgtttatctctgctctgaacagatcagggtgttgacagaaagtatgttcaaacatcttcggaaatgggtcgtcactcgcttttttgggcattctcggcaaagagcaaggctagtctccaaagatggaaggtgcaacatagaatttggcaatgtggaggcacagtcaaggtttatattctttgtggacatctggacaacggtacttgacctcaagtggagatacaaaatgaccattttcatcacagccttcttggggagttggtttttctttggtctcctgtggtatgcagtagcgtacattcacaaagacctcccggaattccatccttctgccaatcacactccctgtgtggagaatattaatggcttgacctcagcttttctgttttctctggagactcaagtgaccattggatatggattcaggtgtgtgacagaacagtgtgccactgccatttttctgcttatctttcagtctatacttggagttataatcaattctttcatgtgtggggccatcttagccaagatctccaggcccaaaaaacgtgccaagaccattacgttcagcaagaacgcagtgatcagcaaacggggagggaagctttgcctcctaatccgagtggctaatctcaggaagagccttcttattggcagtcacatttatggaaagcttctgaagaccacagtcactcctgaaggagagaccattattttggaccagatcaatatcaactttgtagttgacgctgggaatgaaaatttattcttcatctccccattgacaatttaccatgtcattgatcacaacagccctttcttccacatggcagcggagacccttctccagcaggactttgaattagtggtgtttttagatggcacagtggagtccaccagtgctacctgccaagtccggacatcctatgtcccagaggaggtgctttggggctaccgttttgctcccatagtatccaagacaaaggaagggaaataccgagtggatttccataactttagcaagacagtggaagtggagacccctcactgtgccatgtgcctttataatgagaaagatgttagagccaggatgaagagaggctatgacaaccccaacttcatcttgtcagaagtcaatgaaacagatgacaccaaaatgtaacagtggcttttcaacgggagtaaagcaaagtctctaaagctcctagtacctagaagcattatgaagcagtcaacaatttaggggtacgaaagtaggatgagagccttcaaagtctaccagcacaaagacccctgagccccgcaattgtgatcccacaagacatgcatctccacaaggctactgtattagaacgtgcaatgcatttatatgaaactggtgtatggaagacataggtgctctcttgaaatcttaaatatgattatttgagctcatataaggtggattggagcagataaaattatcaaaagtttcatgaacaggccaaacaaaatattttttaaagtttccttaaagaagttatgaactttagaaaggatcaggggacaataataatctcattttgattctactgataagaatgactccacttttaatgtggacttttactcatggaaaaattgtctcctaatttggggagatgaaccaaccaatcaatgacaagaaaacgcttacacaaagaacaatttgaggctctaagcttctcatgtggtacgtttagacagaggctaaatctgcacactagaatcttgatgataccttcctgcaagacagaatgctttagttaaaagtggtgatgatatttctttcaatctgtattggatggcttaaagggctataaatctgtttataaagagcatttcctgctcttcgaagacagcaatgaggagttggaaggtgcaaagtcagtagagaagggaatgtatcattaatgcacctgagaagaaacagtttcatgtgttcctccacctagagtttgtactggaatgctatttctaaagaagaagtgggaaagagagaggaatgggatggagccccacagtcagaatgttactatgtctttctttccctgacagcccatcttcctaaaagggaccagcttatggaaggctcgaccttgaggggaaagttttactgtgaaagtcttcttcagatccccacctgcatcattccgaatgtgtcctggaaaaaaactggtactcaaagctgcttaggaatcaaaatgttttc

SEQ ID NO: 168062 - DNA, 5293 bp, Homo sapiens
  Payload ID: 13055
  Gene Symbol: KCNJ10
  Gene Name: potassium channel, inwardly rectifying subfamily J, member 10
  Uniprot ID: P78508
  ENST ID: ENST00000368089
  CDS Start-End: 228-1367
ggcgctgcggagggagggggcggcccggcccggcccagctctgcccccggccggcccgaccccggccccggcccccggacaagcccttatctgatcccagctccgggtttaagagtcctggcccggcccgtcgcacagctctgctcctaactcctgcccgccccgtccgtccatctgtcccgctgccccgcggcccatccaaggggccactccacctcggacccaagatgacgtcagttgccaaggtgtattacagtcagaccactcagacagaaagccggcccctaatgggcccagggatacgacggcggagagtcctgacaaaagatggtcgcagcaacgtgagaatggagcacattgccgacaagcgcttcctctacctcaaggacctgtggacaaccttcattgacatgcagtggcgctacaagcttctgctcttctctgcgacctttgcaggcacatggttcctctttggcgtggtgtggtatctggtagctgtggcacatggggacctgctggagctggaccccccggccaaccacaccccctgtgtggtacaggtgcacacactcactggagccttcctcttctcccttgaatcccaaaccaccattggctatggcttccgctacatcagtgaggaatgtccactggccattgtgcttcttattgcccagctggtgctcaccaccatcctggaaatcttcatcacaggtaccttcctggcgaagattgcccggcccaagaagcgggctgagaccattcgtttcagccagcatgcagttgtggcctcccacaatggcaagccctgcctcatgatccgagttgccaatatgcgcaaaagcctcctcattggctgccaggtgacaggaaaactgcttcagacccaccaaaccaaggaaggggagaacatccggctcaaccaggtcaatgtgactttccaagtagacacagcctctgacagccccttccttattctaccccttaccttctatcatgtggtagatgagaccagtcccttgaaagatctccctcttcgcagtggtgagggtgactttgagctggtgctgatcctaagtgggacagtggagtccaccagtgccacctgtcaggtgcgcacttcctacctgccagaggagatcctttggggctacgagttcacacctgccatctcactgtcagccagtggtaaatacatagctgactttagcctttttgaccaagttgtgaaagtggcctctcctagtggcctccgtgacagcactgtacgctacggagaccctgaaaagctcaagttggaggagtcattaagggagcaagctgagaaggagggcagtgcccttagtgtgcgcatcagcaatgtctgatgacctgttcccactcccccattcctctggtctcttttcctctcttccaatgccctggtaaggaatactacccgggtttactggagatcccccgaagcacccatcctccactccctcttctttaacccagtggcctgttggtagcttaggccaactggagtccaggttcgcctcccactgtcccctttccacttccccagcttctgccccaatacacatacctcccttaagccaggatgggggaaagagtgggattaggctgaagtggcttagaaggcctcagccatgcttggatactcacattaggaggaccatgtggttggaaggatagactgccccctacctcccaccaccaccatgaagtttggtgacttgaggctggagctccctctgttacctttccatctagcaagttcccaaaggcaagactctctctgatggtcactttgtggtctgtgctttcagaaatacaggaatctgatatcaacatatcctagggtttctaccaatctctgttgaaagaagccagggtttgccactgtgaagcttgatttctgctggtgacttctgaccataagctagaaccatggtcgccactgttttccctctgtagtttctcaagtgaacactctcaggatacccagttccctcatagcctctgttctcagagaattggagttggcccaagaaacataaacatataaccacccatatctatcctggattctgaactcttcaatttggagtgactaacacaagttgttatctaaacctttaaacctatcttccaggcagcccagagaagatctgtttccctgtgtcctgtgaatggaaggacccaagccaatatgttcctttgaaaagagtccagtacccaggccccatggaaaggtctgaaaataatattccagattacactgtacctggcttctcttcttcctttcctgctcagcctagatccttcttccttaaccccaactctttgggagaagggagggaaaatgcaagggccttcctctcttaacacggatgctcaagtaaaactagattcacagggcacagattccccagaaagttaacacaatcccaccatgagggatgggtaaattctcagatttccaaactgctgtacagagcctctgagaattggtgatgctttgttaaggtttgggcaggagcagaactctgtggctggcagccactattctcagttacacctcccagtgcccttctgaaaagtgccagctatttcattaggcaatgctggaaggaaatgaaattataccttctgatcaaataaccatggcttccctcagccattcctgagacttggtataaaatgaagaaatcagtgtcatctctactctcctctgccatgaggccattttcagacaagttaaaaagtagactttaagagatcaaactcagcctattccttgttccctggtggggtctgtggtaagggtcagggaagggcatataggcaccagagctttatccaaagccccaaatccctagagtgctttctggtctcactttggtaccaaggaagcctcacatagtggtactgcatagtcccactataagtcaagttgcagtttaaggtggtctcagccaattgttacaagctacagaatatatacatgcatctatgtacagagccttgcagagaaacacaaaattttgaggctagacccatgatcaccaccaactataattgcacaaggtcttgttatattgatctctcctcgaactcaactaactatatcttgaaaacaaagacccttcggtgtccatctacagtaaaccccaccattaccttctagttggcataaaaacaagaaccacaaaaacttgaaaaatctgaaacagagaacagaaggccaagagccagcttctgcgttctcaactttattcaacattagacttaccttatttctttcagtgtgtagggacaagatgtactgctgtgtgtgtgtgtgtgtgtgtgtgtgtgtgtgtgtgtgtgtgtgtgtgtgtctataccttcctatccattgccaagttaacctccatctggtttatttggccatgctatgctttcttcccattcccctgctgtctattctaagcccccagactcaagcctctagactcttggatgaaacagtgagaagaaaacattttctgacttacccttttggaatctcctccattattacccaggctttgctttaagttgcactttaaatcacactgtcctattaatgcgatctggcatcttctcccacaagccccctacagggaacaactaccccctaccttaactctaaatggttctttagactatagtctgtctcctctgacctgaaatcctcttttaggcaataggccgagctttagaagcagccaggtctggtgagaaatgggcccccataccaactgtggacttggaatatcagcagagtagtaggcacagttgtaaaaaggggagatttcggtaggcacaggtgtaaaaaggggagatttcagaagacgggcgaaacaactgatgggggaagatacctggggtgagaagatgagaaagaaatgatgctgagggacctagtgaaatcaatgaaactcttgagtcttgcttaggctcgcaaacaagaagtggggaggcttgggaaattaggatatgacatatatgaaaggtttatctaagaagaaagaaacagagataatatatatatagaaagatgtatatagatgtatatatgcccaaatatattgaatgtacagaaaggaaatattcagagactttagcattgggggcagatatcttggcctggttatggggtaggacacccagattttcagacttacaatcagtggtcctggtttcaacatggaagtgagatagctgatgaaggatttcaagtctggaaatgggaaagggaggggtagaagttccttttcagaaataaagaggcattcatgaaggcttttgttgaatcctatgctactgataggaccaggaagagaggaactcggaggacaatagggaggggaagtcttggaaaatctaccacttacactgtgtgtccccatccccagcagcgtcctgccactgtagcgcctttttaaaataaataaaataaaataaagcaccattttgtttccctttcatgaagtacactgtatttccgtcttccacaggggtgggagctgctattgctctagcccctgaaatcaaactcaggagctgaacactttggtgtatgggaggcactaatgggaagcctcaaccctggaatccaaatgccaggactaatagctgttaggctgaagatctcccaaggtcaaggcccagccttttgtgtggctgcaagcagcccaaagagaaagccatggattccagaagagttccaatcctggcatttgggcatggagggtgatgctttggttttgatgcttctgaatgaaaatgaggagtggggttaccagctgctctaggggatggtgaagttccatgagaggcttccgaaatctctgcaatgtgcttcaccccattattcccccaacccctgtcagcctaataaaatcatccagtagtttccctataaggtctgagcagagaaagaaagccagttatactattgctacaagtccaggacactgtgccctctccatggctgctgccctggtcctttattcttgctagctaacctagttcacttgtacagtaacacactacctttgctggaaagttagcatgggtctccaggctcagtaatggccaactctactgatgcagaagtatttagggatgttttttccattcattgcactaaagactaaaccaggtcaaatttatctaggaaaaaaaaggtgtgtaagatttgttttgtttttgtctgttaaaaataagctactaaataaaatggatgactctttggttgtca

SEQ ID NO: 168063 - DNA, 2801 bp, Homo sapiens
  Payload ID: 13056
  Gene Symbol: KCNJ11
  Gene Name: potassium channel, inwardly rectifying subfamily J, member 11
  Uniprot ID: Q14654
  ENST ID: ENST00000339994
  CDS Start-End: 569-1741
ggcagggttgggggctccctaggcgccaggcaggtgggctcaagggtgaggctgttttttttgttttgttttttgtttttgagacggagtctcgctctgtcgcccaggctggagtgcagtggcgtgatcttggctcactgcaacctccgcctctcgggttcaagcgattctcctgcctcagcttcctgagtagctgggattacaggtgcgcaccaccatgcccggctaacttttgtatttttagtagagatggggtttcaccatgttggtcaggctggtctcgaactcctgacctagtgatctgccctcctcagcctcccaacgtactgggattacaggcgtgagccaccgcgcccggcctgaggctggtattaagaagtgaagtgggacccaggtggaggtaaggaagagtctggtggggagttatctcagaagtgaggccagcacaggctgagtgcagccccagggtgagaaggtgcccaccgagaggactctgcagtgaggccctaggccacgtccgaggggtgcctccgatgggggaagcccctccctgggggtcaccggagccatgctgtcccgcaagggcatcatccccgaggaatacgtgctgacacgcctggcagaggaccctgccaagcccaggtaccgtgcccgccagcggagggcccgctttgtgtccaagaaaggcaactgcaacgtggcccacaagaacatccgggagcagggccgcttcctgcaggacgtgttcaccacgctggtggacctcaagtggccacacacattgctcatcttcaccatgtccttcctgtgcagctggctgctcttcgccatggcctggtggctcatcgccttcgcccacggtgacctggcccccagcgagggcactgctgagccctgtgtcaccagcatccactccttctcgtctgccttccttttctccattgaggtccaagtgactattggctttggggggcgcatggtgactgaggagtgcccactggccatcctgatcctcatcgtgcagaacatcgtggggctcatgatcaacgccatcatgcttggctgcatcttcatgaagactgcccaagcccaccgcagggctgagaccctcatcttcagcaagcatgcggtgatcgccctgcgccacggccgcctctgcttcatgctacgtgtgggtgacctccgcaagagcatgatcatcagcgccaccatccacatgcaggtggtacgcaagaccaccagccccgagggcgaggtggtgcccctccaccaggtggacatccccatggagaacggcgtgggtggcaacagcatcttcctggtggccccgctgatcatctaccatgtcattgatgccaacagcccactctacgacctggcacccagcgacctgcaccaccaccaggacctcgagatcatcgtcatcctggaaggcgtggtggaaaccacgggcatcaccacccaggcccgcacctcctacctggccgatgagatcctgtggggccagcgctttgtgcccattgtagctgaggaggacggacgttactctgtggactactccaagtttggcaacaccgtcaaagtgcccacaccactctgcacggcccgccagcttgatgaggaccacagcctactggaagctctgaccctcgcctcagcccgcgggcccctgcgcaagcgcagcgtgcccatggccaaggccaagcccaagttcagcatctctccagattccctgtcctgagccatggtctctcgggccccccacacgcgtgtgtacacacggaccatgtggtatgtagcccggccagggcctggtgtgaggctgggccagcctcagctcagcctccccctgctgctcatccagggtgttacaaggcacttgtcactatgctatttctggcctcagcaggaacctgtactgggttatttttgtccctgctcctcccaacccaattcaggactggctcacccctctcccccgcccaaggctgcagaggctgtgggaggtactgggccctagagctgtgcgtccagccagtcctgggtccccacgattgaccagccacactctgggccggtggctggggaagaacaatccccgagggctgctgctttgcgtctgtggctccaagaagtgcctgtggtcaggccccagctctacttggtccctgaaaaagcacctggctaagggctgggcctggccagcagggagggcagttgatgagagagggtgttcccgctggagggttggtgctgtggagcctacaccggcagggacagcctggggctgacagggctcccctccgagggccagtttcaggtctggaaggggaggaagcaggggaaggtgacctgaggaggctcggctttgtagagccccgctcaggcacagggaggaggagatgccagggctcctgccttttgccacatcggcctcgtgcagtgagggctctgtgggctggggctgctgcccctgcctacctcctgcctgtccccagaggctgaggagagggggtactgtgcccaccacacatgattaggcctcagacccaactctggtcctggctccacaacagtggctgccactcactttgtccagaaggtggcttgggggtggatatctttgggttgctggaaaaggtgtgggaaggttcaggatggtgggagggactgaggtccctgaggtgaagaggcccttggtcctgacgggtttgacccgtgcctggacccttggagcagtgttgtgtgaacttgcctagaactctgccttctccgttgtcaataaagcctccccctcatga

SEQ ID NO: 168064 - DNA, 781 bp, Homo sapiens
  Payload ID: 13056
  Gene Symbol: KCNJ11
  Gene Name: potassium channel, inwardly rectifying subfamily J, member 11
  ENST ID: ENST00000526912
  CDS Start-End: 321-781
tcggagtcagccccgccgggtcgcgcgcaggtccggggagccgcggttgagccgggtggggtggtgactccagagaacgcaggatcccaaggagacagagaggacgagagctggagggggatccggaaagcggcgggggcgctccgggaggggtggagtaggacatagggggcgcacctggaggagagacggggcgggggtggccaggacctgagctggagcctgggagcccgaaggccagacagggcatcatccccgaggaatacgtgctgacacgcctggcagaggaccctgccaagcccagctggctgctcttcgccatggcctggtggctcatcgccttcgcccacggtgacctggcccccagcgagggcactgctgagccctgtgtcaccagcatccactccttctcgtctgccttccttttctccattgaggtccaagtgactattggctttggggggcgcatggtgactgaggagtgcccactggccatcctgatcctcatcgtgcagaacatcgtggggctcatgatcaacgccatcatgcttggctgcatcttcatgaagactgcccaagcccaccgcagggctgagaccctcatcttcagcaagcatgcggtgatcgccctgcgccacggccgcctctgcttcatgctacgtgtgggtgacctccgcaagagcatgatcatcagcgccaccatccacatgcaggtggtacgcaagaccaccagccccgagggcgaggtggtgcccctccaccaggtggacatccccatgga

SEQ ID NO: 168065 - DNA, 2146 bp, Homo sapiens
  Payload ID: 13056
  Gene Symbol: KCNJ11
  Gene Name: potassium channel, inwardly rectifying subfamily J, member 11
  Uniprot ID: Q14654
  ENST ID: ENST00000528731
  CDS Start-End: 175-1086
gtgcgcccccctcccgccgtcctagacccctgcctagcccaggtcggtctccgcggacccacggacggacagacagacgggaggacggccagccgcgagcgcccgggcggcgggagggggcggggaggcgacggccgtggcgtgaggagcaggagcagctggctgctcttcgccatggcctggtggctcatcgccttcgcccacggtgacctggcccccagcgagggcactgctgagccctgtgtcaccagcatccactccttctcgtctgccttccttttctccattgaggtccaagtgactattggctttggggggcgcatggtgactgaggagtgcccactggccatcctgatcctcatcgtgcagaacatcgtggggctcatgatcaacgccatcatgcttggctgcatcttcatgaagactgcccaagcccaccgcagggctgagaccctcatcttcagcaagcatgcggtgatcgccctgcgccacggccgcctctgcttcatgctacgtgtgggtgacctccgcaagagcatgatcatcagcgccaccatccacatgcaggtggtacgcaagaccaccagccccgagggcgaggtggtgcccctccaccaggtggacatccccatggagaacggcgtgggtggcaacagcatcttcctggtggccccgctgatcatctaccatgtcattgatgccaacagcccactctacgacctggcacccagcgacctgcaccaccaccaggacctcgagatcatcgtcatcctggaaggcgtggtggaaaccacgggcatcaccacccaggcccgcacctcctacctggccgatgagatcctgtggggccagcgctttgtgcccattgtagctgaggaggacggacgttactctgtggactactccaagtttggcaacaccgtcaaagtgcccacaccactctgcacggcccgccagcttgatgaggaccacagcctactggaagctctgaccctcgcctcagcccgcgggcccctgcgcaagcgcagcgtgcccatggccaaggccaagcccaagttcagcatctctccagattccctgtcctgagccatggtctctcgggccccccacacgcgtgtgtacacacggaccatgtggtatgtagcccggccagggcctggtgtgaggctgggccagcctcagctcagcctccccctgctgctcatccagggtgttacaaggcacttgtcactatgctatttctggcctcagcaggaacctgtactgggttatttttgtccctgctcctcccaacccaattcaggactggctcacccctctcccccgcccaaggctgcagaggctgtgggaggtactgggccctagagctgtgcgtccagccagtcctgggtccccacgattgaccagccacactctgggccggtggctggggaagaacaatccccgagggctgctgctttgcgtctgtggctccaagaagtgcctgtggtcaggccccagctctacttggtccctgaaaaagcacctggctaagggctgggcctggccagcagggagggcagttgatgagagagggtgttcccgctggagggttggtgctgtggagcctacaccggcagggacagcctggggctgacagggctcccctccgagggccagtttcaggtctggaaggggaggaagcaggggaaggtgacctgaggaggctcggctttgtagagccccgctcaggcacagggaggaggagatgccagggctcctgccttttgccacatcggcctcgtgcagtgagggctctgtgggctggggctgctgcccctgcctacctcctgcctgtccccagaggctgaggagagggggtactgtgcccaccacacatgattaggcctcagacccaactctggtcctggctccacaacagtggctgccactcactttgtccagaaggtggcttgggggtggatatctttgggttgctggaaaaggtgtgggaaggttcaggatggtgggagggactgaggtccctgaggtgaagaggcccttggtcctgacgggtttgacccgtgcctggacccttggagcagtgttgtgtgaacttgcctagaactctgccttctccgttgtcaataaagcctccccctcatga

SEQ ID NO: 168066 - DNA, 466 bp, Homo sapiens
  Payload ID: 13056
  Gene Symbol: KCNJ11
  Gene Name: potassium channel, inwardly rectifying subfamily J, member 11
  ENST ID: ENST00000528992
  CDS Start-End: 1-466
agctggagcctgggagcccgaaggccagacagggcatcatccccgaggaatacgtgctgacacgcctggcagaggaccctgccaagcccaggtaccgtgcccgccagcggagggcccgctttgtgtccaagaaaggcaactgcaacgtggcccacaagaacatccgggagcagggccgcttcctgcaggacgtgttcaccacgctggtggacctcaagtggccacacacattgctcatcttcaccatgtccttcctgtgcagctggctgctcttcgccatggcctggtggctcatcgccttcgcccacggtgacctggcccccagcgagggcactgctgagccctgtgtcaccagcatccactccttctcgtctgccttccttttctccattgaggtccaagtgactattggctttggggggcgcatggtgactgaggagtgcccactggccatcctgatcctcat

SEQ ID NO: 168067 - DNA, 2198 bp, Homo sapiens
  Payload ID: 13057
  Gene Symbol: KCNJ12
  Gene Name: potassium channel, inwardly rectifying subfamily J, member 12
  Uniprot ID: Q14500
  ENST ID: ENST00000331718
  CDS Start-End: 371-1672
agcaggccacagggaggcttgggcacagccagctttccgtcctgttgggaagcctgtttctgctttcagtgcccacgtggtgtcaggaacgccggtcacagtgaacgcctgcaggacccacactgctgcatcgtctctgtgggacagatactgaagccagggcttggcttacccttgtgacagtctcccgaggatgttctagtgactggatcctttccagttggtgcctgggaaatggcagccactactaattcagccttgaagacagtaccgtgcccactcagcaccattacatagaagatagaactcaagaggagccgccctgcctggagctagcctgggggcgagccagggtcccccaacccccgggatgaccgcggccagccgggccaacccctacagcatcgtgtcatcggaggaggacgggctgcacctggtcaccatgtcgggcgccaacggcttcggcaacggcaaggtgcacacgcggcgcaggtgccgcaaccgcttcgtcaagaagaatggccagtgcaacattgagttcgccaacatggacgagaagtcacagcgctacctggctgacatgttcaccacctgtgtggacatccgctggcggtacatgctgctcatcttctcgctggccttccttgcctcctggctgctgttcggcatcatcttctgggtcatcgcggtggcacacggtgacctggagccggctgagggccggggccgcacaccctgtgtgatgcaggtgcacggcttcatggcggccttcctcttctccatcgagacgcagaccaccatcggctacgggctgcgctgtgtgacggaggagtgcccggtggccgtcttcatggtggtggcccagtccatcgtgggctgcatcatcgactccttcatgattggtgccatcatggccaagatggcaaggcccaagaagcgggcacagacgctgctgttcagccacaacgccgtggtggccctgcgtgacggcaagctctgcctcatgtggcgtgtgggtaacctgcgcaagagccacattgtggaggcccatgtgcgcgcgcagctcatcaagccgcgggtcaccgaggagggcgagtacatcccgctggaccagatcgacatcgatgtgggcttcgacaagggcctggaccgcatctttctggtgtcgcccatcaccatcttgcatgagattgacgaggccagcccgctcttcggcatcagccggcaggacctggagacggacgactttgagatcgtggtcatcctggaaggcatggtggaggccacagccatgaccacccaggcccgcagctcctacctggccaatgagatcctgtggggtcaccgctttgagcccgtgctcttcgaggagaagaaccagtacaagattgactactcgcacttccacaagacctatgaggtgccctctacgccccgctgcagtgcgaaggatctggtagagaacaagttcctgctgcccagcgccaactccttctgctacgagaacgagctggccttcctgagccgtgacgaggaggatgaggcggacggagaccaggacggccgaagccgggacggcctcagcccccaggccaggcatgactttgacagactccaggctggcggcggggtcctggagcagcggccctacagacgggagtcagagatctgagccaaccttggccgacatgcagcatccacccccggctggggagaggccccgcggtcgctcaggggccccgggtttgagcagaacgggcccagtgccctgggttgcagactcagtagcgttttagtcgttttatgtttctttgcaacggcctcagaagtttggccggagagggggcagccagagcggcagcccccggcctcagaggctatcacaggctcagggcaaagaagtggcctcctggggggccaggccacgagggccagggcttctgcctgaagatggagctgcagcctgcggggaagcagctcagctcgatggtgggcccagcctctgctgtccaaggctggctagctgcggtgctccttgctggtttttaacttggggagaaacaccgggtttcagctttcttgaccttagcttgggtgagactgtttacaaaaaaaaaaaattaccatgcaattgaaaaaatttttttttaattcacagggggcaaaaagaacaattagaattccatgggtctgccagg

SEQ ID NO: 168068 - DNA, 5425 bp, Homo sapiens
  Payload ID: 13057
  Gene Symbol: KCNJ12
  Gene Name: potassium channel, inwardly rectifying subfamily J, member 12
  Uniprot ID: Q14500
  ENST ID: ENST00000583088
  CDS Start-End: 896-2197
cgcgcgcgtcccagtgcgcaagtggctggcggtgtgtgtgtagggggcggcccgggactaggaggggctcggggccaggccggagccgtggtaggctggtgcagcggctgcgcggcgcggcgcggcgcggggcgggcgtgctctccgcggagagttagaggagttgccgagctgagctccggtggagcgaggcgcggagctgggtgcgcgccgagcctctgcctcccgccgcctcctcgccctccattcctcgctccccgtcttctcccggccacaccgccactgctgccgcctccctgggaacagtagccgggggagggggactggcgcggtcagagcctgcgaggaggtgcggggcgccggggcgtaggggagcgcgccgggccctgcccgagatcagataacagccggcgggggagggggtgggccggccgtgctcacagccggaccgagggaccgacgccagccgccccggcccaagcgagcgcccagcggccgggggcgccgtccaggcgcgcgcccccgacccgtggctggaccagggcgatccgctttgcagagaagacgcgcccctcggcatggagcgcccccgggagctgccctgaggcggtggcggcagcggcggcgatgcagccagcgcggcagctgccggggccaggaacggccgcccggagcttggaggacgccgagcgcgccgcgcccgggccactgaccgaggatgttctagtgactggatcctttccagttggtgcctgggaaatggcagccactactaattcagccttgaagacagtaccgtgcccactcagcaccattacatagaagatagaactcaagaggagccgccctgcctggagctagcctgggggcgagccagggtcccccaacccccgggatgaccgcggccagccgggccaacccctacagcatcgtgtcatcggaggaggacgggctgcacctggtcaccatgtcgggcgccaacggcttcggcaacggcaaggtgcacacgcggcgcaggtgccgcaaccgcttcgtcaagaagaatggccagtgcaacattgagttcgccaacatggacgagaagtcacagcgctacctggctgacatgttcaccacctgtgtggacatccgctggcggtacatgctgctcatcttctcgctggccttccttgcctcctggctgctgttcggcatcatcttctgggtcatcgcggtggcacacggtgacctggagccggctgagggccggggccgcacaccctgtgtgatgcaggtgcacggcttcatggcggccttcctcttctccatcgagacgcagaccaccatcggctacgggctgcgctgtgtgacggaggagtgcccggtggccgtcttcatggtggtggcccagtccatcgtgggctgcatcatcgactccttcatgattggtgccatcatggccaagatggcaaggcccaagaagcgggcacagacgctgctgttcagccacaacgccgtggtggccctgcgtgacggcaagctctgcctcatgtggcgtgtgggtaacctgcgcaagagccacattgtggaggcccatgtgcgcgcgcagctcatcaagccgcgggtcaccgaggagggcgagtacatcccgctggaccagatcgacatcgatgtgggcttcgacaagggcctggaccgcatctttctggtgtcgcccatcaccatcttgcatgagattgacgaggccagcccgctcttcggcatcagccggcaggacctggagacggacgactttgagatcgtggtcatcctggaaggcatggtggaggccacagccatgaccacccaggcccgcagctcctacctggccaatgagatcctgtggggtcaccgctttgagcccgtgctcttcgaggagaagaaccagtacaagattgactactcgcacttccacaagacctatgaggtgccctctacgccccgctgcagtgcgaaggatctggtagagaacaagttcctgctgcccagcgccaactccttctgctacgagaacgagctggccttcctgagccgtgacgaggaggatgaggcggacggagaccaggacggccgaagccgggacggcctcagcccccaggccaggcatgactttgacagactccaggctggcggcggggtcctggagcagcggccctacagacgggagtcagagatctgagccaaccttggccgacatgcagcatccacccccggctggggagaggccccgcggtcgctcaggggccccgggtttgagcagaacgggcccagtgccctgggttgcagactcagtagcgttttagtcgttttatgtttctttgcaacggcctcagaagtttggccggagagggggcagccagagcggcagcccccggcctcagaggctatcacaggctcagggcaaagaagtggcctcctggggggccaggccacgagggccagggcttctgcctgaagatggagctgcagcctgcggggaagcagctcagctcgatggtgggcccagcctctgctgtccaaggctggctagctgcggtgctccttgctggtttttaacttggggagaaacaccgggtttcagctttcttgaccttagcttgggtgagactgtttacaaaaaaaaaaaattaccatgcaattgaaaaaatttttttttaattcacagggggcaaaaagaacaattagaattccatgggtctgccaggatgcagcagctggctgaaggctccagagggttccccgaggtgggactggcctctccccgtgtgtgtgggcaccacagtccctgggcaagcagggtgctctgggaccgcacttcatcgagctcacgagccagctaggctctgtttgtgatagaaaaatcaagaccatgttaatgatcgtaataaaagctttctactgtcgttggggtggtgggtggggctgggaagaaactggtttgagcttttagagtttgcctttgtaccttagagatgtgtctcagggccaggcatgggacctgccatcgagggttcctccccgcaccctcgattttcctgttttgcttctctctccatttctgtccaggcctccgcccaattccacagtgaggggtggttaggagctataggccgggatggctccttgggaagggaagtcgggatcccaggctaggaggaagctggcagccccgtccccactgggcccacagtgtgagtcgtgccttagagactccgggttgtcctgttctttctgggcttgctcatctccccccaaccctgtcccaccccacccctcccatacctccactgctgaagttcctccagcccctctgtctgccttgtgaaggtggcaggggccaggtctgcctgacataggaccacatcctgtccctccctcacctggagcagcacagcagagttcaggcagggcacagccaggccctggtcagcgctgaatggcagaggaaagatcttaggaaaggagaggaatcgccaccccctcctgccaactgggatgactggggagggccacgctcattcaaagctgaatcagaaaccagccgtggaacagaattcctgccgagtcttccagggccgctcctccaccaccctcccccaggttgaggcactatggcaccctcatcaggaagaggtttggggtccccttgttgtcactgctggctctgccaccccatcttgttcatggcagctggttgggtcaggtccatggtagagccaggcccttcccagggctgcggagaaaacctgctctcttctagtcgggcttctccagaagccagtaatcagaaaggatgtgtctcctgctccaactctgcccccgagacagctcagagccagaaggcaccccgagacagctcagagccagaaggcaccccgagacagctcagagccagaaggcaccgaggactctggcccaagtggggaagctgaggcagagagcagagggggtcatgcagtgagtgggtggggtgcaggagacagagaggggctgggggcgtggggtgggggtgtctgcctcttccctccacctcctcccctccttagcagctgaagactcagccctgaggtctggggcaatggaagtcaagacacccgacccctacatcctggggtaggcccgactcagcatcctgtcccagcttcagccccacactcatttctggcatagaagattccgccgaggcagctctttcctctcggggtctgccaggggtgcctcagctggttcctgctcccaggcctagccccgaagccttaggggccttctcagccttagccctgggtactggggtgaagttggcaggggagagcttgacacttcgcctccctgatggccatgctgagggacagtggtgaccctggtcacttggtgctggtgtaggggcctgtgcccttccagggccagtgagacagccttctactcccccgacccagagctgagtccgaggaccccaggcccacctcctggccctcttggaggtctgtgctcttacctcccagcccccaccctgcgggagagcagccccagcgcctcatctccccaaaggcggcagatgcttgattctcctgccctctttcttccttccctcgtatttatttatttatttattgcttgtgctaaagaccaaaatagtctccctctttagtgcacttgaagcgggagggcggatgggatgagccaggagcgaggaagacttggcccctggggagtgtgtgtgtggaggcgtgtgcctgtgtgagcctgcatgcatacatgtgtggtgcacacatgcacactcggctcttcatgtgtatgactgggttagtaatacagatacgtgatctatacgtgtgtgtgtgtgtgtgtgtgtgtgtgtgtgtgtatgcaggcggttatgtgtctgtctacccccaggtgtttccgtgtacaagtttcctgtgagggagggcacccacccatcaggttgggcactggcacaggtgaaccccacagtccccgaccctctgccctgattatgcacgtctgctcctgagtggagcttgtgttccaggatgagacatctggaggtgagcgtgtgcgtccggctcgtgtgtaggaggctgtgtgtgtgcccatgtgaaaccgtgtacttgagtgtgtgtctgtgtgcagcctatgcctgctgctcagagcacggtggccaccccctgagcctctgctggtgctgtgctgcgtggtccccacccagagggtcctggggggcggggaggagccaccgttgggaggcccctgtacggggtgtctgccctgcgtgagggcatagaatgtcaaattattttaaatggtgaaactggagagttttcatgttattttcaatacatagcagtatctaaagacgtaggcgatgagactagaccacattaaatgcattttgatctctttgagg

SEQ ID NO: 168069 - DNA, 2950 bp, Homo sapiens
  Payload ID: 13058
  Gene Symbol: KCNJ13
  Gene Name: potassium channel, inwardly rectifying subfamily J, member 13
  Uniprot ID: O60928
  ENST ID: ENST00000233826
  CDS Start-End: 141-1223
accagtccaagaagagaacctacaaactagacttgtagattaaaattatctgatcaaaaaggcagactctgtaaatttccttaagacctaccttggcataaaggctgacccagcaaaagaactgagaaatacagcctgagatggacagcagtaattgcaaagttattgctcctctcctaagtcaaagataccggaggatggtcaccaaggatggccacagcacacttcaaatggatggcgctcaaagaggtcttgcatatcttcgagatgcttggggaatcctaatggacatgcgctggcgttggatgatgttggtcttttctgcttcttttgttgtccactggcttgtctttgcagtgctctggtatgttctggctgagatgaatggtgatctggaactagatcatgatgccccacctgaaaaccacactatctgtgtcaagtatatcaccagtttcacagctgcattctccttctccctggagacacaactcacaattggttatggtaccatgttccccagtggtgactgtccaagtgcaatcgccttacttgccatacaaatgctcctaggcctcatgctagaggcttttatcacaggtgcttttgtggcgaagattgcccggccaaaaaatcgagctttttcaattcgctttactgacacagcagtagtagctcacatggatggcaaacctaatcttatcttccaagtggccaacacccgacctagccctctaaccagtgtccgggtctcagctgtactctatcaggaaagagaaaatggcaaactctaccagaccagtgtggatttccaccttgatggcatcagttctgacgaatgtccattcttcatctttccactaacgtactatcactccattacaccatcaagtcctctggctactctgctccagcatgaaaatccttctcactttgaattagttgtattcctttcagcaatgcaggagggcactggagaaatatgccaaaggaggacatcctacctaccgtctgaaatcatgttacatcactgttttgcatctctgttgacccgaggttccaaaggtgaatatcaaatcaagatggagaattttgacaagactgtccctgaatttccaactcctctggtttctaaaagcccaaacaggactgacctggatatccacatcaatggacaaagcattgacaattttcagatctctgaaacaggactgacagaataagacttatccattttttaatgtattaaatacacccagccagttatgcagctactttttctttactgtatctcatgttttcttttttcaatgctaattatagctctctacatcacggtaatcatgcctatgcctacataagaatggctgagctaacaatacacattctggaaacataacactctacattacaaagtttgttacctgctgaaatcaatgtaactcaacttgacagacacttatacagaaatgttgctggtgaatttataagaatgtggtatgatactagtaatgaaggcaaaatggacagtgaagtttaacacaactgaactctaagaaaatcaaccattaatctctcattttcatctgcaaattgaagcaacagtttagtttcaaacctagctccctgggtggaatgacgacttcactatacttagtgaatatcctttaagagctgggatttttttcaagacaacaaagatcattcatttggttctttatactatgaaacttgagtaagtattacctccttaatttttaacaactaagaacaaaaattaacgagaaaaacaacaaagtacagatttatacataaacctaaaagcatttgaacatgacacccgaacacatacatatatgttcacttatttgtggcagaaggtgatcagataagctccagcccaaatggaacctgtggggtggtattttgcattgcaaggagacgcaaaattttattttaaaactgtcctccataataatcaaacggtgattcatctaaatgacttctagcaacctaagtaaaaacattcccctcctatgtatgattcatttgatcatataaaacatcatgatggctctaattcataaatacaaaaatatatttaagtctttatagatataaagctttacttagatataacttgagtgagtagggaaaaaaatctacagtagataaagcaaaagataattaggcaacaaagcattttcaaactcaaattcctgtttccaacttcaaatagttttttctataaacacaaaatcagtgtttattcaccagtaggaggttggactagatgaactctattatttctttctaaatctaatagtctataaaaattatgtttcctctgttttttattttatctatgctaaaatgagccctttcccttatgtccagtttaagatgatcatttgcatgattttcatttcaataaaaaaaagagaaactgtccttaaaacaaaacaaaaaccaaaaaagtcaccctatcaggtttcaaacagatttgtggctgttcttttctgaaatttcccttattcaggtttctgtgggaaaaatgaaagattaaccttccccactggtgatgacctaggcaggaatcatctcttgaaataaatactagctgagtaaaggcaagcaggtgtgaagagcagggctcagcagcaagtcacatttttctactatttgaccaaaaggaaaagaaaataaagaagaactctggagtggtctaagactgataatagcagaagaatatcaagaacacagaaacttaattattgtgaacttttgctgtttgaaaatcttagacattcattcttaagtagaaatcagaccaacagattttcccaacccaagactattgtaacacataaagacagcaagaattcttatttctataataaattaacaagattcacctaacctttgaaaataaagtagtattgaagactta

SEQ ID NO: 168070 - DNA, 1177 bp, Homo sapiens
  Payload ID: 13058
  Gene Symbol: KCNJ13
  Gene Name: potassium channel, inwardly rectifying subfamily J, member 13
  Uniprot ID: O60928
  ENST ID: ENST00000410029
  CDS Start-End: 44-1126
agcttactaatttactcttgattttagagaaatacagcctgagatggacagcagtaattgcaaagttattgctcctctcctaagtcaaagataccggaggatggtcaccaaggatggccacagcacacttcaaatggatggcgctcaaagaggtcttgcatatcttcgagatgcttggggaatcctaatggacatgcgctggcgttggatgatgttggtcttttctgcttcttttgttgtccactggcttgtctttgcagtgctctggtatgttctggctgagatgaatggtgatctggaactagatcatgatgccccacctgaaaaccacactatctgtgtcaagtatatcaccagtttcacagctgcattctccttctccctggagacacaactcacaattggttatggtaccatgttccccagtggtgactgtccaagtgcaatcgccttacttgccatacaaatgctcctaggcctcatgctagaggcttttatcacaggtgcttttgtggcgaagattgcccggccaaaaaatcgagctttttcaattcgctttactgacacagcagtagtagctcacatggatggcaaacctaatcttatcttccaagtggccaacacccgacctagccctctaaccagtgtccgggtctcagctgtactctatcaggaaagagaaaatggcaaactctaccagaccagtgtggatttccaccttgatggcatcagttctgacgaatgtccattcttcatctttccactaacgtactatcactccattacaccatcaagtcctctggctactctgctccagcatgaaaatccttctcactttgaattagttgtattcctttcagcaatgcaggagggcactggagaaatatgccaaaggaggacatcctacctaccgtctgaaatcatgttacatcactgttttgcatctctgttgacccgaggttccaaaggtgaatatcaaatcaagatggagaattttgacaagactgtccctgaatttccaactcctctggtttctaaaagcccaaacaggactgacctggatatccacatcaatggacaaagcattgacaattttcagatctctgaaacaggactgacagaataagacttatccattttttaatgtattaaatacacccagccagttatgcagcta

SEQ ID NO: 168071 - DNA, 1099 bp, Homo sapiens
  Payload ID: 13058
  Gene Symbol: KCNJ13
  Gene Name: potassium channel, inwardly rectifying subfamily J, member 13
  Uniprot ID: O60928
  ENST ID: ENST00000409779
  CDS Start-End: 138-422
agtccaagaagagaacctacaaactagacttgtagattaaaattatctgatcaaaaaggcagactctgtaaatttccttaagacctaccttggcataaaggctgacccagcaaaagaactgagaaatacagcctgagatggacagcagtaattgcaaagttattgctcctctcctaagtcaaagataccggaggatggtcaccaaggatggccacagcacacttcaaatggatggcgctcaaagaggtcttgcatatcttcgagatgcttggggaatcctaatggacatgcgctggcgttggatgatgttggtcttttctgcttcttttgttgtccactggcttgtctttgcagtgctctggtgcttttgtggcgaagattgcccggccaaaaaatcgagctttttcaattcgctttactgacacagcagtagtagctcacatggatggcaaacctaatcttatcttccaagtggccaacacccgacctagccctctaaccagtgtccgggtctcagctgtactctatcaggaaagagaaaatggcaaactctaccagaccagtgtggatttccaccttgatggcatcagttctgacgaatgtccattcttcatctttccactaacgtactatcactccattacaccatcaagtcctctggctactctgctccagcatgaaaatccttctcactttgaattagttgtattcctttcagcaatgcaggagggcactggagaaatatgccaaaggaggacatcctacctaccgtctgaaatcatgttacatcactgttttgcatctctgttgacccgaggttccaaaggtgaatatcaaatcaagatggagaattttgacaagactgtccctgaatttccaactcctctggtttctaaaagcccaaacaggactgacctggatatccacatcaatggacaaagcattgacaattttcagatctctgaaacaggactgacagaataagacttatccattttttaatgtattaaatacacccagccagttatgcagctactttttctttactgtatctcatgttttcttttttcaatgctaattatagctctctacatcacgg

SEQ ID NO: 168072 - DNA, 687 bp, Homo sapiens
  Payload ID: 13058
  Gene Symbol: KCNJ13
  Gene Name: potassium channel, inwardly rectifying subfamily J, member 13
  ENST ID: ENST00000438786
  CDS Start-End: 135-687
gagaacctacaaactagacttgtagattaaaattatctgatcaaaaaggcagactctgtaaatttccttaagacctaccttggcataaaggctgacccagcaaaagaactgtgctctggtatgttctggctgagatgaatggtgatctggaactagatcatgatgccccacctgaaaaccacactatctgtgtcaagtatatcaccagtttcacagctgcattctccttctccctggagacacaactcacaattggttatggtaccatgttccccagtggtgactgtccaagtgcaatcgccttacttgccatacaaatgctcctaggcctcatgctagaggcttttatcacaggtgcttttgtggcgaagattgcccggccaaaaaatcgagctttttcaattcgctttactgacacagcagtagtagctcacatggatggcaaacctaatcttatcttccaagtggccaacacccgacctagccctctaaccagtgtccgggtctcagctgtactctatcaggaaagagaaaatggcaaactctaccagaccagtgtggatttccaccttgatggcatcagttctgacgaatgtccattcttcatctttccactaacgtactatcactccattacaccatcaagtcctctggctactctgctccagcatgaaaatccttctcact

SEQ ID NO: 168073 - DNA, 495 bp, Homo sapiens
  Payload ID: 13058
  Gene Symbol: KCNJ13
  Gene Name: potassium channel, inwardly rectifying subfamily J, member 13
  ENST ID: ENST00000444142
  CDS Start-End: 1-412
cgctcaaagaggtcttgcatatcttcgagatgcttggggaatcctaatggacatgcgctggcgttggatgatgttggtcttttctgcttcttttgttgtccactggcttgtctttgcagtgctctggtatgttctggctgagatgaatggtgatctggaactagatcatgatgccccacctgaaaaccacactatctgtgtcaagtatatcaccagtttcacagctgcattctccttctccctggagacacaactcacaattggttatggtaccatgttccccagtggtgactgtccaagtgcaatcgccttacttgccatacaaatgctcctaggcctcatgctagaggcttttatcacaggagggcactggagaaatatgccaaaggaggacatcctacctaccgtctgaaatcatgttacatcactgttttgcatctctgttgacccgaggttccaaaggtgaatatcaaatcaagatggagaattttgaca

SEQ ID NO: 168074 - DNA, 2960 bp, Homo sapiens
  Payload ID: 13059
  Gene Symbol: KCNJ14
  Gene Name: potassium channel, inwardly rectifying subfamily J, member 14
  Uniprot ID: Q9UNX9
  ENST ID: ENST00000342291
  CDS Start-End: 406-1716
gtcaggtggaggatccctttccctcccgccctgcttttgctaggggaggggggtgccctgagcctgagtcgcagccagcctgggagctgggccatgttggccgcagatggccccctggtgaaggttcccgttggctttgggaagtagacaacgggtctgcctcacggggctgaggtgggactggaggatttcgagggcagaactctgggaaggaaagaaaggcttaggacccaaccagcattccccctggcactgcgggggcctggccagctcatggcgttccctgagcctgttccccaactgtgaaagggggtgatgatcttcacctcccggcatcctgagcggccaagcaggttgggggcgcctgccccccactaggccaagtggagggggtccctccgtccaatgggcctggccagggccctacgccgcctcagcggcgccctggattcgggagacagccgggcgggcgatgaagaggaggccgggcccgggttgtgccgcaacgggtgggcgccggcaccggtgcagtcacccgtgggccggcgccgcggtcgcttcgtcaagaaagacgggcactgcaacgtgcgtttcgtaaacctgggtggccagggcgcgcgctacctgagcgacctgttcaccacatgcgtggacgtgcgctggcgctggatgtgcctgctcttctcctgctccttcctcgcctcctggctgctcttcggcctggccttctggctcattgcctcgctgcacggcgacctggccgccccgccaccgcccgcgccctgcttctcacacgtggccagcttcctggccgccttcctcttcgcgctggagacgcagacgtccatcggctacggcgtgcgcagcgtcaccgaggagtgcccggccgctgtggccgccgtggtgctgcagtgcattgccggctgcgtgctcgacgccttcgtcgtgggtgctgtcatggccaagatggccaaacccaagaagcgcaacgagacgctggtcttcagcgagaacgccgtcgtggcgctgcgcgaccaccgcctctgcctcatgtggcgcgtcggcaacctgcgccgcagccacctggtcgaggcccacgtgcgtgcccagctgctgcagccccgtgtgaccccagagggtgagtacatcccgctggaccaccaggatgtggatgtgggctttgatggaggcaccgatcgtatcttcctcgtgtcccccatcaccatcgtccatgagatcgactctgccagtcctctgtatgagctaggacgtgccgagctggccagggctgactttgagctggtggtcattctcgaggggatggttgaggccacagccatgaccacacagtgtcgctcgtcctacctccctggtgaactgctctggggccatcgttttgagccagttctcttccagcgtggctcccagtatgaggtcgactatcgccacttccatcgcacttatgaggtcccagggacaccggtctgcagtgctaaggagctggatgaacgggcagagcaggcttcccacagcctcaagtctagtttccccggctctctgactgcattttgttatgagaatgaacttgctctgagctgctgccaggaggaagatgaggacgatgagactgaggaagggaatggggtggaaacagaagatggggctgctagcccccgagttctcacaccaaccctggcgctgaccctgcctccatgatgcaaactgatgtccccttccccgtgtatgcccccttccccaaggtagcaagatggagggatggggctctctcctgggatgggggcaggtgttcctgaataccgacaggcctgctgggtaaatgactaggtggtaaggttctgccatgcctggtgacccaccatggacatactggaccttaattcctctgcttctgtgctccctcctgagaaccctttatgagcctgattcctcagtctcaccagaattctggatcacccaagaggaaaagactggcagttctagattcctctatatggggagacctggattgttgaccagggtgagaagccaatggtatagactgcctctggggaagcaagttggcagttcttgaacagcatcagatatcaagagtttgtaggtctggattcacctaagattcaagggagtgttgcttctcaactcagccaactgagtagcaaatcatttgttctagaccacctaaggagggaaggttatggaatgccccaagtattcaagatcatcttgattgaccaaagaccaaaaaaaaaaaaaagacctgtggttccagaaagctcattagttgagattctgtgagtctaggttgaccacagaggcaagcactggtgagtctaggacagattttacgtggagagttgaactactccagaaactaaagagtaatgtttctagaatgcacaaaacattgttagtctgtgggtttagaaagactgaagtgacagattaagagttcttgatattagataactccaacttctggctgtagagcacccagccaagagaataagcagtgctttgaaaggatccactgggtgggttgtttttttttaaagtgccattctagaatgtccaaagggaatcaggattctgtggctgtagactgatcacagagtcaaggaagcagtggcaattctagatatctgagattttgctggttccagtttgcccaatggagttgagaatctcaatgattctagatgacttcttgtggttctgtaatgccaaaaggaatgaaggctccagggatacagagttgtccattaccaaagcctggaagttctcatcacctccaggtggactgcttggcagtgctaggaggtggactcaggacttcagaagcaacatttctggcctgacctggaaggtgaaggtgaaggtgagaccctgtagggcacagggctaattagtggacaagggaagggggaggcccagggctggtg

SEQ ID NO: 168075 - DNA, 3990 bp, Homo sapiens
  Payload ID: 13059
  Gene Symbol: KCNJ14
  Gene Name: potassium channel, inwardly rectifying subfamily J, member 14
  Uniprot ID: Q9UNX9
  ENST ID: ENST00000391884
  CDS Start-End: 477-1787
ggcagaggttgcagtgagctgaggttgcggtgagctgagattgtgccgctgcactccagcctggcgacaaagcacgactccgtctcaaaaaaaaaaagaaaagaaaagaaaaaagttaaaaaaaaaattacccaggagtggtggtgtgcacctgtagtaatcccagctactcaggaggttgagacaggagaatcgcttaaacttgggacgcggagattgcagtaagccaggatcatgccactgcactccagcttgggcgacagagcgagactctgtctccaaaaaaaaaaaaaaaaaaaaaatgcgtatcgttccacctatttgacagatgaggccactaagccccaccagaaagcatgcttggccgatgagctcatccattcctgttgcccctgacgtttctgccggtttcttgtcccagcaggttgggggcgcctgccccccactaggccaagtggagggggtccctccgtccaatgggcctggccagggccctacgccgcctcagcggcgccctggattcgggagacagccgggcgggcgatgaagaggaggccgggcccgggttgtgccgcaacgggtgggcgccggcaccggtgcagtcacccgtgggccggcgccgcggtcgcttcgtcaagaaagacgggcactgcaacgtgcgtttcgtaaacctgggtggccagggcgcgcgctacctgagcgacctgttcaccacatgcgtggacgtgcgctggcgctggatgtgcctgctcttctcctgctccttcctcgcctcctggctgctcttcggcctggccttctggctcattgcctcgctgcacggcgacctggccgccccgccaccgcccgcgccctgcttctcacacgtggccagcttcctggccgccttcctcttcgcgctggagacgcagacgtccatcggctacggcgtgcgcagcgtcaccgaggagtgcccggccgctgtggccgccgtggtgctgcagtgcattgccggctgcgtgctcgacgccttcgtcgtgggtgctgtcatggccaagatggccaaacccaagaagcgcaacgagacgctggtcttcagcgagaacgccgtcgtggcgctgcgcgaccaccgcctctgcctcatgtggcgcgtcggcaacctgcgccgcagccacctggtcgaggcccacgtgcgtgcccagctgctgcagccccgtgtgaccccagagggtgagtacatcccgctggaccaccaggatgtggatgtgggctttgatggaggcaccgatcgtatcttcctcgtgtcccccatcaccatcgtccatgagatcgactctgccagtcctctgtatgagctaggacgtgccgagctggccagggctgactttgagctggtggtcattctcgaggggatggttgaggccacagccatgaccacacagtgtcgctcgtcctacctccctggtgaactgctctggggccatcgttttgagccagttctcttccagcgtggctcccagtatgaggtcgactatcgccacttccatcgcacttatgaggtcccagggacaccggtctgcagtgctaaggagctggatgaacgggcagagcaggcttcccacagcctcaagtctagtttccccggctctctgactgcattttgttatgagaatgaacttgctctgagctgctgccaggaggaagatgaggacgatgagactgaggaagggaatggggtggaaacagaagatggggctgctagcccccgagttctcacaccaaccctggcgctgaccctgcctccatgatgcaaactgatgtccccttccccgtgtatgcccccttccccaaggtagcaagatggagggatggggctctctcctgggatgggggcaggtgttcctgaataccgacaggcctgctgggtaaatgactaggtggtaaggttctgccatgcctggtgacccaccatggacatactggaccttaattcctctgcttctgtgctccctcctgagaaccctttatgagcctgattcctcagtctcaccagaattctggatcacccaagaggaaaagactggcagttctagattcctctatatggggagacctggattgttgaccagggtgagaagccaatggtatagactgcctctggggaagcaagttggcagttcttgaacagcatcagatatcaagagtttgtaggtctggattcacctaagattcaagggagtgttgcttctcaactcagccaactgagtagcaaatcatttgttctagaccacctaaggagggaaggttatggaatgccccaagtattcaagatcatcttgattgaccaaagaccaaaaaaaaaaaaaagacctgtggttccagaaagctcattagttgagattctgtgagtctaggttgaccacagaggcaagcactggtgagtctaggacagattttacgtggagagttgaactactccagaaactaaagagtaatgtttctagaatgcacaaaacattgttagtctgtgggtttagaaagactgaagtgacagattaagagttcttgatattagataactccaacttctggctgtagagcacccagccaagagaataagcagtgctttgaaaggatccactgggtgggttgtttttttttaaagtgccattctagaatgtccaaagggaatcaggattctgtggctgtagactgatcacagagtcaaggaagcagtggcaattctagatatctgagattttgctggttccagtttgcccaatggagttgagaatctcaatgattctagatgacttcttgtggttctgtaatgccaaaaggaatgaaggctccagggatacagagttgtccattaccaaagcctggaagttctcatcacctccaggtggactgcttggcagtgctaggaggtggactcaggacttcagaagcaacatttctggcctgacctggaaggtgaaggtgaaggtgagaccctgtagggcacagggctaattagtggacaagggaagggggaggcccagggctggtgagtctagaatgctctggaaccctacacctagtgatgtgtgtctatttctttttctttttcttttttttttttttttgagactgagtctcgctctgccgcccaggctggagtgcaatggcgtgatctcagctcactgcaacctccgcctcccggcttcaagtgtttctcctgcctcagtctcctgagtcgctgggattacaggcatgagccactatgcctggctaatttttgtatttttagtagagacggggtttcgccatgttggcgaggttggtcttgaactcccgacctcagatgatccacctgcctcggtctcccaaagtgctgggattacgggtgtgagccaccatgcccagccgtgtgtctgtttcttaaagatattatacatatgtatattatatatatgtaatataaatacagatatctatctattttttcccttggtccctacaacaggcttagagatggagtgctagctaattggaatgaggtccttttcaaggaccccagaagctttgctctaaatcccaatgctgccccaacttactgtgtcactttggactcctcttcatgtcagtttccccatctgtaaaaacgggatattggaacttgaagttcttcaggggcctttccagcaggatgagtcctcactacaccaagggtgggatgggcattcgagtcctggggatttccctcctctccccagtgctggatcatacggccttccaggagacgctgggatgtaagatactcttggaggctggctctgaactcgggtgtctgaatcacagggcaagggtaggcgtgggctgtggctaacagccagagtcacttccctggcctagcttggggacctggggaggaggaggtagctctggacaccagggttcttcccattgtgggagagtgagtgttttagggggagacctgtcccccagattaaagaactgggagcccta

SEQ ID NO: 168076 - DNA, 8399 bp, Homo sapiens
  Payload ID: 13060
  Gene Symbol: KCNJ15
  Gene Name: potassium channel, inwardly rectifying subfamily J, member 15
  Uniprot ID: Q99712
  ENST ID: ENST00000328656
  CDS Start-End: 304-1431
aggtgtttggagagcccggactggatgcccactagaatcctgtgctgtgaacagtgagagagttttcttcattttgaggaaccctaaacacctatctttcccaaggcaacctgtctggactgagcatttctctgacttgacataacttcccatccagccaggagtctgcactcttcagtctttgcaggcagtagcagaatcccatggtagccaggtgggtgaaggggagcgaggacgttctacctgccttgaagaagacacctgacctgcggagtgagtgaccagtgtttccagagcctggcaatggatgccattcacatcggcatgtccagcacccccctggtgaagcacactgctggggctgggctcaaggccaacagaccccgcgtcatgtccaagagtgggcacagcaacgtgagaattgacaaagtggatggcatatacctactctacctgcaagacctgtggaccacagttatcgacatgaagtggagatacaaactcaccctgttcgctgccacttttgtgatgacctggttcctttttggagtcatctactatgccatcgcgtttattcatggggacttagaacccggtgagcccatttcaaatcataccccctgcatcatgaaagtggactctctcactggggcgtttctcttttccctggaatcccagacaaccattggctatggagtccgttccatcacagaggaatgtcctcatgccatcttcctgttggttgctcagttggtcatcacgaccttgattgagatcttcatcaccggaaccttcctggccaaaatcgccagacccaaaaagcgggctgagaccatcaagttcagccactgtgcagtcatcaccaagcagaatgggaagctgtgcttggtgattcaggtagccaatatgaggaagagcctcttgattcagtgccagctctctggcaagctcctgcagacccacgtcaccaaggagggggagcggattctcctcaaccaagccactgtcaaattccacgtggactcctcctctgagagccccttcctcattctgcccatgacattctaccatgtgctggatgagacgagccccctgagagacctcacaccccaaaacctaaaggagaaggagtttgagcttgtggtcctcctcaatgccactgtggaatccaccagcgctgtctgccagagccgaacatcttatatcccagaggaaatctactggggttttgagtttgtgcctgtggtatctctctccaaaaatggaaaatatgtggctgatttcagtcagtttgaacagattcggaaaagcccagattgcacattttactgtgcagattctgagaaacagcaactcgaggagaagtacaggcaggaggatcagagggaaagagaactgaggacacttttattacaacagagcaatgtctgatcacaggggcgccatccaggtttaaccctgcaagctgtttccacatcagaactcccttcaaacacaaagattgctgtgaaaacgaaaatgtgtagacgcactctcaaaaactgcacggacatacaaaatcaatcttttcctttgatcttgtggctaaaccagcatttctgtgtttgagagatttcctgttaggtgcttcgtctgaaagtgaactctcataattcaaattgtataaaataaagctacatttctaagagcttggtgtagggcaattggaataatgtcctgttagataaacagacatttagcaatcctgacattaaaaggaaatgtatttctatacaagattattagctgtaatacaagatatttatttaaccaatgaccttatggctgagagttgaattgtggttcagtattcattgatctcactgctttaaaacatgctctttttgttcaagcaggaaaaatattatatctaattatgtctatgtggtaatacctaaaaagaggtagagagactctatgttcacaaaatatagtaatttcatttttacctttcttcagtggactgaattgtatggaaggaaattgatcagatctgtaattcacaactgtggaaacctacacaaatggggctgatgccattgtttcctctattttattttatttatttttgaatccactatctctttccattcaaaatatttccattcaaaatgtggttcacagacccgccacatcagcaccatccgagagcttattagtaatgtgtagattctcatgtcccagccagacttacagaattggggtctgtatcttaacaagaaccccagatgatttgtgtacaaatgaaagttcgaaagctgtgctctggacagtgttctcaaagcaactttctgaagccgtgtggaaaactgactctgtgtgggtcccgtatccctgtggcatccagacctggcctctcttcatttcattattattggccaatatttctttcagccatttcatttcttatctattaaaatggcttgcccataaaggaactgcataggattatcccctgacattccaagagcaaaataaagctcttgagagtaattgttgtctcagtcatgcttgctgattacagttagcacaaaagaaaaattcagctgcctgacaatacaggaaatgttctcagatgctgatgtttgtaaggtccggtggggccatgaggaagaagaggagctgaaggtaagaaactcataaacaagatgactctttgatgcatgaacaagatttgaaaatctcaagcctgtaaagaatacccctgctatttaaataaagctcataccaagaggtaacattttgccccgggccaaattcaggggtctagtgccctgcattcctttgaggcaaaaaataaatgggctatgactggttaaatgtccaaaaggtgaattctcatttcattcaaacaaagacagatttgcgcattcactcaagcagaatgtggccatgaatattcagcccctgcatacatacaaagatgtacgcatgattccccccaccaagcacacacacagtcacacacgcacacacacacacatgcacacacgcgcgtgcacacacgcacacatgcacacacacatacgcacacgtaaacacatgcacacatgcacacacgcgcacacatgcacacacgcacacacttgcacaggccctggctcttcaagcataatcatggtagtcatcagtgaaagacatttgaggttaagacagcaagtccttgacaaatatgttcatgtctatttggttctagttctataaaaatatgaacattgggactcagagaaaatggggaaaataaagtggattcaggttatcagtgaaatgatggtatagattacagcaaatctggatatatattgatgttactgcatttgcaaatgtcctcccattaaacagaaaatgtggctaaaatccctggcctggaactgaactagtttaaggcaggtgtaagaatagtgggaggaaagtttgtgaaagtttaaagaatgccctcaatccatgaacgagagggaggatgttgtctttaattatttagaaggtttttttttccttgtctgttgataattttatggaaggttgctttagatctccattccttaaaaaaatattacatgtcagtgtagttagatattatctcttttagttattatacttgctatttttactgtatagtgtggtataatcaacaaaaaataatgccacgggcatgtttacaccttttctgttgcactattaaattcttttcacagtattcatatcaatgctaatttgaatgtgatgccaattaaaaatcttgttcatttatattgtatatggtacaaggacgtagcataagatccaaaaaaaattttgtattgtcatttagcatatcaatttcagccaaatttggaagacttgatcatcttatcttttgctctacacactcaaaacaaatattgcagcagaaatatcaccttaaaaatatcttattttatatttagataatattgaaatcacagtctattaaaattggaaatttaattcaaataaaaatcaaacaaaatagttgtttcaatttatctaaatatctggtcttaagagtgccttaagagtgtctcgtttttaagagtgtcttaaaaaccaatatatgtataagtcaacaaatcatataatattcaataaatagctctgaagttgtatctgatttgaaacttaccattttcctggaaccttaactattattactttgtacgtaatactttcatgttactatgctaacaaaggatttaggtagccaacttaatttattatatctggtcggtcttctgcttgaaacagattcacactcaacacccaactaaggaggagccaaagtagtggagtattcctgacccaaaaaggcttttgaattttgaaacatttctaatgtgttaggttttctcaatgagaccattaaaaaacgttgtgttccatttgagaaaccagagtcaacagcagtaaatcagtgtgccccacaagccacgtcttattcagcaataaaatagtgctcacatggtgcctggcagacagtggctctggacagcaaagcactgagtcacccaaccccactcctttgggatggggttgggagtcatgcattggctccctttttcatcctggggaaattacaacacaacgcagagtgtccagaaatctaaagagctggtttaaggtgaaaaaaatgccatgaatgaatgaaccagatgtttaataaatcaaaacaactattttgttggatttttatttgaattaaatttcccaatttttaatagactgtgatttcaatattatcgaaatgtaaacaaagatatatttttaaggtggcatttctactccagcatgaaaaaaatagtggcatttgcactctagcattattctgtctcccttatttgagtcttcaatatatatgcccagctggagggagaagaagagaaaaatgaaagcactaggcctttgactaggtttggttctatatgctgtcatgatgttcaaaatgtcagacatttgaccacatggcacagtgaatactctcacgctctcaattttggctttcattcttgctagacttttcttctattaaatttctgaaataactagttttttttttttgaacttgaaaatcagctttttattttttttaattttattattattatactttaagttttagggtacatgtgcacaacgtgcaggtttgttacatatgtatacatgtgccatgttggtgtgctgcacccattaactcgtcatttagcattaggtatatctcctaatgctatccctcccccctccccccaccccacaacagtccccggtgtgtgatgttccccttcctgtgtccatgtgttctcattgttcaatttccacctatgagtgagaacatgcggtgtttggttttctgtccttgagatagtttgctgagaatgatggtttccagtttcatccaataactagttttatcatagctttccatgatgtaattttttaagcgaaaggtactaacatttccagtcttgatttccaagttttgtggtgtgcactcgaaatctagtctctgattgttaaactctgggtaggtacaagaggctcttaattttcttcctcccaggaggacttacttacacttaaaggtcaaaagcttaacattcacttctaaatggttaactgcatacactttaccctttgtaaacttcaatttatctttttttttttttttttttttttttttttttgatactgggtctcgctctgtcgcccaggctgctagagtgcagtggcgcgatttcggctcactgcaagtccgcttccaggttcacgccattctctccctcagcctcccgagtagctgggactacaggcgctcgccaccatgcccggctaattttgtttttgtgtttttagtagagacggggtttcaccgtgttaaccaggatggtctcgatctcatgacctcgtgatctgcccgcctacaagccaggtgtggtggtgcgtgcctgtaatcccagctactcaggagactgaggcaggagattcgcttgaacccgggaggtggacgttgcagtgagctaagatcgcgccactgcactccagcctgggcaacaaaagtaaaactccgtctcaaaaaaaaaaaaaaaaagaaaaagaaaaagaaaagaaaagaaaataaacgtggcaaaactagaccttcagacacttcacttcacttaaccctatggccctccttatcttgcacccaatttcttttcaacatcatacatgcttggttgactgtttcttcatatttgctgttcattctataaagtcaaatagattggtgggttaaaaaataatcaattcaaattcaaattaggaatttatggacattcagatatccacatatttgagggcaggaatttttacttttcaattggtatgttggcagtgtgtaaaaatagaagaccaagagaaggcggttgattggagttgatacttaatagctaataaaaattacaagaaaggatggtggaagtcaaaggacagaactgatacacgagtataaaagccaacgatgtcatatatgtaggcaaagtctttgtaatctgaatataatgccagagagctagggctgccaggcactctgtatgtgcagaatatgtcctatatggagtaattttttatttgtgtagacttttttaggataccttaaatgtcttacatgcaacctttttttccccatatattacaaaattgccttggaaattagacaaatcttcaaacttaactgaaactcctgtcctgaatagttatttgccaaatctgacaaatttacaaagagtgttcacataatcccaaactatgcccatttctacaagagaaatacatgcctctttatttggagtttatgatattcatacaactagtagtagagtcagggagtattccagaaacatatttccctggcttgcccaattatcaagggaaaatttcagctgaacacggggaacccagtctttgacactcctgtgtgcagtgtggagcagcgtgcactgtctgagtctccatagtgaggaatggtcttccctggggcatcaccctagaaggatgggctcaaagtcgccctccacgtgggtgcacaggagcccagattctcaagccccagttgcagaattaggctgatggttttacaaaagagtcctcctaaaagtccatcactaagttttgtttggttagcaacccttgccacatgatgtagtacttagctataattttatttttattcaaggccaaatcttatctggtgtccatgccttcccacctacttaaaatttcaaatttcaccctcaaaaatatttcagtaaataaaagttagatctactcaaaattagactccaagggaattactatagttgattatagagtatctatttccttaaaaaaaaaaaaccataagttgttgactctgagctaggaaatgcgtgatctctcagctgacttactttatgcaaatttacttaatattatagaagagtaaagagcttccaagaaggtgattggagggaagttcaaagggaagatttttttcattcactgtagttttagctgtattctttcatctgcaatcaaatctcaggattaaggatgtcgtattacatcaaatcattacaggaagtatgactgtatcagcggctttttacaaaaacaaacctccagatcacaaaaggaagctgtgtttgtgtactgacacgaagtgttacgtagcagccaggagaggaaggatagcagccgacttggatccatttttgaggaattatttctgtaaggtgtcatggaattgtaagttacaaaaataaggcttttgtaaacagaatctccattccagaaggacggactccaaaatgctacttaatgaaattcatgggaatgttatggtgatggaaatcccaaatgacatgtagattttatatgcaaacaatcccactgcttgtaactcctggcagtgtgtacttaccaaaatcttgatcacacttaggtctcttgctatatatagaaccacatctgatccttatacagtgttgcaagatatatgtccttgctttcccatggttcttaagtgagtcttaagcttggatttgctccagcagaatggtggtttgtgtttctcaaggctgagctactatttggtgcatgtcggaaatctcacactaactgtggatactctgtcatcactgaacccaatcatacaatgaccagacagctttaaatacctacttttgtatgctatgaattcatccgtttacttgtcaaatcctttatttccatatgtgtctccatcaccttttttttctctccggataaatggaattactgtaacttgtgaaacaatggcaaacactataaagctaattttacagtcttga

SEQ ID NO: 168077 - DNA, 532 bp, Homo sapiens
  Payload ID: 13060
  Gene Symbol: KCNJ15
  Gene Name: potassium channel, inwardly rectifying subfamily J, member 15
  ENST ID: ENST00000398925
  CDS Start-End: 349-532
aggtgtttggagagcccggactggatgcccactagaatcctgtgctggcaacctgtctggactgagcatttctctgacttgacataacttcccatccagccaggagtctgcactcttcagtctttgcaggacaggtgggagttaaccaagaaagggagaaaatgaagaaccttcaggaaggaattcatgtgccagatgtgggctgagagggcacccagctgctcaggaaggggcagtagcagaatcccatggtagccaggtgggtgaaggggagcgaggacgttctacctgccttgaagaagacacctgacctgcggagtgagtgaccagtgtttccagagcctggcaatggatgccattcacatcggcatgtccagcacccccctggtgaagcacactgctggggctgggctcaaggccaacagaccccgcgtcatgtccaagagtgggcacagcaacgtgagaattgacaaagtggatggcatatacctactctacctgcaagacctgtggaccacagttatcgacatga

SEQ ID NO: 168078 - DNA, 665 bp, Homo sapiens
  Payload ID: 13060
  Gene Symbol: KCNJ15
  Gene Name: potassium channel, inwardly rectifying subfamily J, member 15
  ENST ID: ENST00000398927
  CDS Start-End: 196-665
aaaatattctagactcttcccttccagcgctcactgtttacttcctctgcacttccccttcctgcctccccgtgtgccggcagtagcagaatcccatggtagccaggtgggtgaaggggagcgaggacgttctacctgccttgaagaagacacctgacctgcggagtgagtgaccagtgtttccagagcctggcaatggatgccattcacatcggcatgtccagcacccccctggtgaagcacactgctggggctgggctcaaggccaacagaccccgcgtcatgtccaagagtgggcacagcaacgtgagaattgacaaagtggatggcatatacctactctacctgcaagacctgtggaccacagttatcgacatgaagtggagatacaaactcaccctgttcgctgccacttttgtgatgacctggttcctttttggagtcatctactatgccatcgcgtttattcatggggacttagaacccggtgagcccatttcaaatcataccccctgcatcatgaaagtggactctctcactggggcgtttctcttttccctggaatcccagacaaccattggctatggagtccgttccatcacagaggaatgtcctcatgccatcttcctgttggttgctcagttggtcatcacgaccttgattga

SEQ ID NO: 168079 - DNA, 715 bp, Homo sapiens
  Payload ID: 13060
  Gene Symbol: KCNJ15
  Gene Name: potassium channel, inwardly rectifying subfamily J, member 15
  ENST ID: ENST00000398928
  CDS Start-End: 246-715
aggtgtttggagagcccggactggatgcccactagaatcctgtgctggcaacctgtctggactgagcatttctctgacttgacataacttcccatccagccaggagtctgcactcttcagtctttgcaggcagtagcagaatcccatggtagccaggtgggtgaaggggagcgaggacgttctacctgccttgaagaagacacctgacctgcggagtgagtgaccagtgtttccagagcctggcaatggatgccattcacatcggcatgtccagcacccccctggtgaagcacactgctggggctgggctcaaggccaacagaccccgcgtcatgtccaagagtgggcacagcaacgtgagaattgacaaagtggatggcatatacctactctacctgcaagacctgtggaccacagttatcgacatgaagtggagatacaaactcaccctgttcgctgccacttttgtgatgacctggttcctttttggagtcatctactatgccatcgcgtttattcatggggacttagaacccggtgagcccatttcaaatcataccccctgcatcatgaaagtggactctctcactggggcgtttctcttttccctggaatcccagacaaccattggctatggagtccgttccatcacagaggaatgtcctcatgccatcttcctgttggttgctcagttggtcatcacgaccttgattga

SEQ ID NO: 168080 - DNA, 2914 bp, Homo sapiens
  Payload ID: 13060
  Gene Symbol: KCNJ15
  Gene Name: potassium channel, inwardly rectifying subfamily J, member 15
  Uniprot ID: Q99712
  ENST ID: ENST00000398930
  CDS Start-End: 355-1482
acaggagcacgtagcctgcaggtgtgggttgtacacaggcttccccctgctgagtcagttccccagatctcttcatcacttccccagatctctgggatcttcagctgagattgggccccagcacctggactcaaggacaggtgggagttaaccaagaaagggagaaaatgaagaaccttcaggaaggaattcatgtgccagatgtgggctgagagggcacccagctgctcaggaaggggcagtagcagaatcccatggtagccaggtgggtgaaggggagcgaggacgttctacctgccttgaagaagacacctgacctgcggagtgagtgaccagtgtttccagagcctggcaatggatgccattcacatcggcatgtccagcacccccctggtgaagcacactgctggggctgggctcaaggccaacagaccccgcgtcatgtccaagagtgggcacagcaacgtgagaattgacaaagtggatggcatatacctactctacctgcaagacctgtggaccacagttatcgacatgaagtggagatacaaactcaccctgttcgctgccacttttgtgatgacctggttcctttttggagtcatctactatgccatcgcgtttattcatggggacttagaacccggtgagcccatttcaaatcataccccctgcatcatgaaagtggactctctcactggggcgtttctcttttccctggaatcccagacaaccattggctatggagtccgttccatcacagaggaatgtcctcatgccatcttcctgttggttgctcagttggtcatcacgaccttgattgagatcttcatcaccggaaccttcctggccaaaatcgccagacccaaaaagcgggctgagaccatcaagttcagccactgtgcagtcatcaccaagcagaatgggaagctgtgcttggtgattcaggtagccaatatgaggaagagcctcttgattcagtgccagctctctggcaagctcctgcagacccacgtcaccaaggagggggagcggattctcctcaaccaagccactgtcaaattccacgtggactcctcctctgagagccccttcctcattctgcccatgacattctaccatgtgctggatgagacgagccccctgagagacctcacaccccaaaacctaaaggagaaggagtttgagcttgtggtcctcctcaatgccactgtggaatccaccagcgctgtctgccagagccgaacatcttatatcccagaggaaatctactggggttttgagtttgtgcctgtggtatctctctccaaaaatggaaaatatgtggctgatttcagtcagtttgaacagattcggaaaagcccagattgcacattttactgtgcagattctgagaaacagcaactcgaggagaagtacaggcaggaggatcagagggaaagagaactgaggacacttttattacaacagagcaatgtctgatcacaggggcgccatccaggtttaaccctgcaagctgtttccacatcagaactcccttcaaacacaaagattgctgtgaaaacgaaaatgtgtagacgcactctcaaaaactgcacggacatacaaaatcaatcttttcctttgatcttgtggctaaaccagcatttctgtgtttgagagatttcctgttaggtgcttcgtctgaaagtgaactctcataattcaaattgtataaaataaagctacatttctaagagcttggtgtagggcaattggaataatgtcctgttagataaacagacatttagcaatcctgacattaaaaggaaatgtatttctatacaagattattagctgtaatacaagatatttatttaaccaatgaccttatggctgagagttgaattgtggttcagtattcattgatctcactgctttaaaacatgctctttttgttcaagcaggaaaaatattatatctaattatgtctatgtggtaatacctaaaaagaggtagagagactctatgttcacaaaatatagtaatttcatttttacctttcttcagtggactgaattgtatggaaggaaattgatcagatctgtaattcacaactgtggaaacctacacaaatggggctgatgccattgtttcctctattttattttatttatttttgaatccactatctctttccattcaaaatatttccattcaaaatgtggttcacagacccgccacatcagcaccatccgagagcttattagtaatgtgtagattctcatgtcccagccagacttacagaattggggtctgtatcttaacaagaaccccagatgatttgtgtacaaatgaaagttcgaaagctgtgctctggacagtgttctcaaagcaactttctgaagccgtgtggaaaactgactctgtgtgggtcccgtatccctgtggcatccagacctggcctctcttcatttcattattattggccaatatttctttcagccatttcatttcttatctattaaaatggcttgcccataaaggaactgcataggattatcccctgacattccaagagcaaaataaagctcttgagagtaattgttgtctcagtcatgcttgctgattacagttagcacaaaagaaaaattcagctgcctgacaatacaggaaatgttctcagatgctgatgtttgtaaggtccggtggggccatgaggaagaagaggagctgaaggtaagaaactcataaacaagatgactctttgatgcatgaacaagatttgaaaatctcaagcctgtaaagaatacccctgctatttaaataaagctcataccaagaggtaacattttgccccgggccaaattcaggggtctagtgccctgcattcctttgaggcaaaaaataaatgggctatgactggttaaatgtc

SEQ ID NO: 168081 - DNA, 2747 bp, Homo sapiens
  Payload ID: 13060
  Gene Symbol: KCNJ15
  Gene Name: potassium channel, inwardly rectifying subfamily J, member 15
  Uniprot ID: Q99712
  ENST ID: ENST00000398932
  CDS Start-End: 519-1646
ctgtctttcacccataaaaactgaagccatgtgccagaagccctcgtggctcaagggctctgtccttggacacggatgagggcagctgggcggtgggaccgaggctctgcctgaatgctcagcttctgcaagctggggtggagagtgtgttcctgcctaccggctcagccagcacaggagcacgtagcctgcaggtgtgggttgtacacaggcttccccctgctgagtcagttccccagatctcttcatcacttccccagatctctgggatcttcagctgagattgggccccagcacctggactcaaggacaggtgggagttaaccaagaaagggagaaaatgaagaaccttcaggaaggaattcatgtgccagatgtgggctgagagggcacccagctgctcaggaaggggcagtagcagaatcccatggtagccaggtgggtgaaggggagcgaggacgttctacctgccttgaagaagacacctgacctgcggagtgagtgaccagagcctggcaatggatgccattcacatcggcatgtccagcacccccctggtgaagcacactgctggggctgggctcaaggccaacagaccccgcgtcatgtccaagagtgggcacagcaacgtgagaattgacaaagtggatggcatatacctactctacctgcaagacctgtggaccacagttatcgacatgaagtggagatacaaactcaccctgttcgctgccacttttgtgatgacctggttcctttttggagtcatctactatgccatcgcgtttattcatggggacttagaacccggtgagcccatttcaaatcataccccctgcatcatgaaagtggactctctcactggggcgtttctcttttccctggaatcccagacaaccattggctatggagtccgttccatcacagaggaatgtcctcatgccatcttcctgttggttgctcagttggtcatcacgaccttgattgagatcttcatcaccggaaccttcctggccaaaatcgccagacccaaaaagcgggctgagaccatcaagttcagccactgtgcagtcatcaccaagcagaatgggaagctgtgcttggtgattcaggtagccaatatgaggaagagcctcttgattcagtgccagctctctggcaagctcctgcagacccacgtcaccaaggagggggagcggattctcctcaaccaagccactgtcaaattccacgtggactcctcctctgagagccccttcctcattctgcccatgacattctaccatgtgctggatgagacgagccccctgagagacctcacaccccaaaacctaaaggagaaggagtttgagcttgtggtcctcctcaatgccactgtggaatccaccagcgctgtctgccagagccgaacatcttatatcccagaggaaatctactggggttttgagtttgtgcctgtggtatctctctccaaaaatggaaaatatgtggctgatttcagtcagtttgaacagattcggaaaagcccagattgcacattttactgtgcagattctgagaaacagcaactcgaggagaagtacaggcaggaggatcagagggaaagagaactgaggacacttttattacaacagagcaatgtctgatcacaggggcgccatccaggtttaaccctgcaagctgtttccacatcagaactcccttcaaacacaaagattgctgtgaaaacgaaaatgtgtagacgcactctcaaaaactgcacggacatacaaaatcaatcttttcctttgatcttgtggctaaaccagcatttctgtgtttgagagatttcctgttaggtgcttcgtctgaaagtgaactctcataattcaaattgtataaaataaagctacatttctaagagcttggtgtagggcaattggaataatgtcctgttagataaacagacatttagcaatcctgacattaaaaggaaatgtatttctatacaagattattagctgtaatacaagatatttatttaaccaatgaccttatggctgagagttgaattgtggttcagtattcattgatctcactgctttaaaacatgctctttttgttcaagcaggaaaaatattatatctaattatgtctatgtggtaatacctaaaaagaggtagagagactctatgttcacaaaatatagtaatttcatttttacctttcttcagtggactgaattgtatggaaggaaattgatcagatctgtaattcacaactgtggaaacctacacaaatggggctgatgccattgtttcctctattttattttatttatttttgaatccactatctctttccattcaaaatatttccattcaaaatgtggttcacagacccgccacatcagcaccatccgagagcttattagtaatgtgtagattctcatgtcccagccagacttacagaattggggtctgtatcttaacaagaaccccagatgatttgtgtacaaatgaaagttcgaaagctgtgctctggacagtgttctcaaagcaactttctgaagccgtgtggaaaactgactctgtgtgggtcccgtatccctgtggcatccagacctggcctctcttcatttcattattattggccaatatttctttcagccatttcatttcttatctattaaaatggcttgcccataaaggaactgcataggattatcccctgacattccaagagcaaaataaagctcttgagagtaa

SEQ ID NO: 168082 - DNA, 2815 bp, Homo sapiens
  Payload ID: 13060
  Gene Symbol: KCNJ15
  Gene Name: potassium channel, inwardly rectifying subfamily J, member 15
  Uniprot ID: Q99712
  ENST ID: ENST00000398934
  CDS Start-End: 255-1382
agcacaggagcacgtagcctgcaggtgtgggttgtacacaggcttccccctgctgagtcagttccccagatctcttcatcacttccccagatctctgggatcttcagctgagattgggccccagcacctggactcaaggcagtagcagaatcccatggtagccaggtgggtgaaggggagcgaggacgttctacctgccttgaagaagacacctgacctgcggagtgagtgaccagtgtttccagagcctggcaatggatgccattcacatcggcatgtccagcacccccctggtgaagcacactgctggggctgggctcaaggccaacagaccccgcgtcatgtccaagagtgggcacagcaacgtgagaattgacaaagtggatggcatatacctactctacctgcaagacctgtggaccacagttatcgacatgaagtggagatacaaactcaccctgttcgctgccacttttgtgatgacctggttcctttttggagtcatctactatgccatcgcgtttattcatggggacttagaacccggtgagcccatttcaaatcataccccctgcatcatgaaagtggactctctcactggggcgtttctcttttccctggaatcccagacaaccattggctatggagtccgttccatcacagaggaatgtcctcatgccatcttcctgttggttgctcagttggtcatcacgaccttgattgagatcttcatcaccggaaccttcctggccaaaatcgccagacccaaaaagcgggctgagaccatcaagttcagccactgtgcagtcatcaccaagcagaatgggaagctgtgcttggtgattcaggtagccaatatgaggaagagcctcttgattcagtgccagctctctggcaagctcctgcagacccacgtcaccaaggagggggagcggattctcctcaaccaagccactgtcaaattccacgtggactcctcctctgagagccccttcctcattctgcccatgacattctaccatgtgctggatgagacgagccccctgagagacctcacaccccaaaacctaaaggagaaggagtttgagcttgtggtcctcctcaatgccactgtggaatccaccagcgctgtctgccagagccgaacatcttatatcccagaggaaatctactggggttttgagtttgtgcctgtggtatctctctccaaaaatggaaaatatgtggctgatttcagtcagtttgaacagattcggaaaagcccagattgcacattttactgtgcagattctgagaaacagcaactcgaggagaagtacaggcaggaggatcagagggaaagagaactgaggacacttttattacaacagagcaatgtctgatcacaggggcgccatccaggtttaaccctgcaagctgtttccacatcagaactcccttcaaacacaaagattgctgtgaaaacgaaaatgtgtagacgcactctcaaaaactgcacggacatacaaaatcaatcttttcctttgatcttgtggctaaaccagcatttctgtgtttgagagatttcctgttaggtgcttcgtctgaaagtgaactctcataattcaaattgtataaaataaagctacatttctaagagcttggtgtagggcaattggaataatgtcctgttagataaacagacatttagcaatcctgacattaaaaggaaatgtatttctatacaagattattagctgtaatacaagatatttatttaaccaatgaccttatggctgagagttgaattgtggttcagtattcattgatctcactgctttaaaacatgctctttttgttcaagcaggaaaaatattatatctaattatgtctatgtggtaatacctaaaaagaggtagagagactctatgttcacaaaatatagtaatttcatttttacctttcttcagtggactgaattgtatggaaggaaattgatcagatctgtaattcacaactgtggaaacctacacaaatggggctgatgccattgtttcctctattttattttatttatttttgaatccactatctctttccattcaaaatatttccattcaaaatgtggttcacagacccgccacatcagcaccatccgagagcttattagtaatgtgtagattctcatgtcccagccagacttacagaattggggtctgtatcttaacaagaaccccagatgatttgtgtacaaatgaaagttcgaaagctgtgctctggacagtgttctcaaagcaactttctgaagccgtgtggaaaactgactctgtgtgggtcccgtatccctgtggcatccagacctggcctctcttcatttcattattattggccaatatttctttcagccatttcatttcttatctattaaaatggcttgcccataaaggaactgcataggattatcccctgacattccaagagcaaaataaagctcttgagagtaattgttgtctcagtcatgcttgctgattacagttagcacaaaagaaaaattcagctgcctgacaatacaggaaatgttctcagatgctgatgtttgtaaggtccggtggggccatgaggaagaagaggagctgaaggtaagaaactcataaacaagatgactctttgatgcatgaacaagatttgaaaatctcaagcctgtaaagaatacccctgctatttaaataaagctcataccaagaggtaacattttgccccgggccaaattcaggggtctagtgccctgcattcctttgaggcaaaaaataaatgggctatgactggttaaatgtcc

SEQ ID NO: 168083 - DNA, 2583 bp, Homo sapiens
  Payload ID: 13060
  Gene Symbol: KCNJ15
  Gene Name: potassium channel, inwardly rectifying subfamily J, member 15
  Uniprot ID: Q99712
  ENST ID: ENST00000398938
  CDS Start-End: 355-1482
ctcctctgcccaatgtctcccaatctctttcctttctctcttcagttcctccaggtaattcttactcaaacttgtaccaacttgtttttgactgacagtgaacagtgagagagttttcttcattttgaggaaccctaaacacctatctttcccaaggcaacctgtctggactgagcatttctctgacttgacataacttcccatccagccaggagtctgcactcttcagtctttgcaggcagtagcagaatcccatggtagccaggtgggtgaaggggagcgaggacgttctacctgccttgaagaagacacctgacctgcggagtgagtgaccagtgtttccagagcctggcaatggatgccattcacatcggcatgtccagcacccccctggtgaagcacactgctggggctgggctcaaggccaacagaccccgcgtcatgtccaagagtgggcacagcaacgtgagaattgacaaagtggatggcatatacctactctacctgcaagacctgtggaccacagttatcgacatgaagtggagatacaaactcaccctgttcgctgccacttttgtgatgacctggttcctttttggagtcatctactatgccatcgcgtttattcatggggacttagaacccggtgagcccatttcaaatcataccccctgcatcatgaaagtggactctctcactggggcgtttctcttttccctggaatcccagacaaccattggctatggagtccgttccatcacagaggaatgtcctcatgccatcttcctgttggttgctcagttggtcatcacgaccttgattgagatcttcatcaccggaaccttcctggccaaaatcgccagacccaaaaagcgggctgagaccatcaagttcagccactgtgcagtcatcaccaagcagaatgggaagctgtgcttggtgattcaggtagccaatatgaggaagagcctcttgattcagtgccagctctctggcaagctcctgcagacccacgtcaccaaggagggggagcggattctcctcaaccaagccactgtcaaattccacgtggactcctcctctgagagccccttcctcattctgcccatgacattctaccatgtgctggatgagacgagccccctgagagacctcacaccccaaaacctaaaggagaaggagtttgagcttgtggtcctcctcaatgccactgtggaatccaccagcgctgtctgccagagccgaacatcttatatcccagaggaaatctactggggttttgagtttgtgcctgtggtatctctctccaaaaatggaaaatatgtggctgatttcagtcagtttgaacagattcggaaaagcccagattgcacattttactgtgcagattctgagaaacagcaactcgaggagaagtacaggcaggaggatcagagggaaagagaactgaggacacttttattacaacagagcaatgtctgatcacaggggcgccatccaggtttaaccctgcaagctgtttccacatcagaactcccttcaaacacaaagattgctgtgaaaacgaaaatgtgtagacgcactctcaaaaactgcacggacatacaaaatcaatcttttcctttgatcttgtggctaaaccagcatttctgtgtttgagagatttcctgttaggtgcttcgtctgaaagtgaactctcataattcaaattgtataaaataaagctacatttctaagagcttggtgtagggcaattggaataatgtcctgttagataaacagacatttagcaatcctgacattaaaaggaaatgtatttctatacaagattattagctgtaatacaagatatttatttaaccaatgaccttatggctgagagttgaattgtggttcagtattcattgatctcactgctttaaaacatgctctttttgttcaagcaggaaaaatattatatctaattatgtctatgtggtaatacctaaaaagaggtagagagactctatgttcacaaaatatagtaatttcatttttacctttcttcagtggactgaattgtatggaaggaaattgatcagatctgtaattcacaactgtggaaacctacacaaatggggctgatgccattgtttcctctattttattttatttatttttgaatccactatctctttccattcaaaatatttccattcaaaatgtggttcacagacccgccacatcagcaccatccgagagcttattagtaatgtgtagattctcatgtcccagccagacttacagaattggggtctgtatcttaacaagaaccccagatgatttgtgtacaaatgaaagttcgaaagctgtgctctggacagtgttctcaaagcaactttctgaagccgtgtggaaaactgactctgtgtgggtcccgtatccctgtggcatccagacctggcctctcttcatttcattattattggccaatatttctttcagccatttcatttcttatctattaaaatggcttgcccataaaggaactgcataggattatcccctgacattccaagagcaaaataaagctcttgagagtaa

SEQ ID NO: 168084 - DNA, 727 bp, Homo sapiens
  Payload ID: 13060
  Gene Symbol: KCNJ15
  Gene Name: potassium channel, inwardly rectifying subfamily J, member 15
  ENST ID: ENST00000417042
  CDS Start-End: 670-727
actctctctctctgtctctcactttctctcctttcctccctccctccctccctccctccttccctatccctccctcctctgcccaatgtctcccaatctctttcctttctctcttcagttcctccaggtaattcttactcaaacttgtaccaacttgtttttgactgacagtgaacagtgagagagttttcttcattttgaggaaccctaaacacctatctttcccaaggcaacctgtctggactgagcatttctctgacttgacataacttcccatccagccaggagtctgcactcttcagtctttgcaggacaggtgggagttaaccaagaaagggagaaaatgaagaaccttcaggaaggaattcatgtgccagatgtgggctgagagggcacccagctgctcaggaaggggcagtagcagaatcccatggtagccaggtgggtgaaggggagcgaggacgttctacctgccttgaagaagacacctgacctgcggagtgagtgaccaggaatgtgggggaaatttatgtcagtcatcaggcaggtactagaagatgctaggggcctcacagacagcttgttcccggctgttaacatggagcagagcgttccctggggctgagcatgggagcccagcacttcttatagtgtttccagagcctggcaatggatgccattcacatcggcatgtccagcacccccctggtgaagcacactgctgggg

SEQ ID NO: 168085 - DNA, 521 bp, Homo sapiens
  Payload ID: 13060
  Gene Symbol: KCNJ15
  Gene Name: potassium channel, inwardly rectifying subfamily J, member 15
  ENST ID: ENST00000419868
  CDS Start-End: 105-521
gcagtagcagaatcccatggtagccaggtgggtgaaggggagcgaggacgttctacctgccttgaagaagacacctgacctgcggatgtttccagagcctggcaatggatgccattcacatcggcatgtccagcacccccctggtgaagcacactgctggggctgggctcaaggccaacagaccccgcgtcatgtccaagagtgggcacagcaacgtgagaattgacaaagtggatggcatatacctactctacctgcaagacctgtggaccacagttatcgacatgaagtggagatacaaactcaccctgttcgctgccacttttgtgatgacctggttcctttttggagtcatctactatgccatcgcgtttattcatggggacttagaacccggtgagcccatttcaaatcataccccctgcatcatgaaagtggactctctcactggggcgtttctcttttccctggaatcccagacaaccattggctatggagtccgttccatcacagaggaatgt

SEQ ID NO: 168086 - DNA, 711 bp, Homo sapiens
  Payload ID: 13060
  Gene Symbol: KCNJ15
  Gene Name: potassium channel, inwardly rectifying subfamily J, member 15
  ENST ID: ENST00000443341
  CDS Start-End: 593-711
ggtgtttggagagcccggactggatgcccactagaatcctgtgctgtgaacagtgagagagttttcttcattttgaggaaccctaaacacctatctttcccaaggcaacctgtctggactgagcatttctctgacttgacataacttcccatccagccaggagtctgcactcttcagtctttgcaggagatgttggaaacagagactggatccctgaggagatgctgttagaccaggctgagctcaaggcttgtccctaaggcagctggtgaaggaaaggttcgacttggtggtagaagccctggactggagtccccacctatgggctgagggatcctccacaagtgattcaacttcttagtttctcacctacaaaaggtgggagttaaccaagaaagggagaaaatgaagaaccttcaggaaggaattcatgtgccagatgtgggctgagagggcacccagctgctcaggaaggggcagtagcagaatcccatggtagccaggtgggtgaaggggagcgaggacgttctacctgccttgaagaagacacctgacctgcggagtgagtgaccagtgtttccagagcctggcaatggatgccattcacatcggcatgtccagcacccccctggtgaagcacactgctggggctgggctcaaggccaacagaccccgcgtcatgtccaagagtgggcacagcaacgtgagaat

SEQ ID NO: 168087 - DNA, 1115 bp, Homo sapiens
  Payload ID: 13060
  Gene Symbol: KCNJ15
  Gene Name: potassium channel, inwardly rectifying subfamily J, member 15
  ENST ID: ENST00000438657
  CDS Start-End: 380-1115
gtggctcaagggctctgtccttggacacggatgagggcagctgggcggtgggaccgaggctctgcctgaatgctcagcttctgcaagctggggtggagagtgtgttcctgcctaccggctcagccagcacaggagcacgtagcctgcaggtgtgggttgtacacaggcttccccctgctgagtcagttccccagatctcttcatcacttccccagatctctgggatcttcagctgagattgggccccagcacctggactcaaggcagtagcagaatcccatggtagccaggtgggtgaaggggagcgaggacgttctacctgccttgaagaagacacctgacctgcggagtgagtgaccagtgtttccagagcctggcaatggatgccattcacatcggcatgtccagcacccccctggtgaagcacactgctggggctgggctcaaggccaacagaccccgcgtcatgtccaagagtgggcacagcaacgtgagaattgacaaagtggatggcatatacctactctacctgcaagacctgtggaccacagttatcgacatgaagtggagatacaaactcaccctgttcgctgccacttttgtgatgacctggttcctttttggagtcatctactatgccatcgcgtttattcatggggacttagaacccggtgagcccatttcaaatcataccccctgcatcatgaaagtggactctctcactggggcgtttctcttttccctggaatcccagacaaccattggctatggagtccgttccatcacagaggaatgtcctcatgccatcttcctgttggttgctcagttggtcatcacgaccttgattgagatcttcatcaccggaaccttcctggccaaaatcgccagacccaaaaagcgggctgagaccatcaagttcagccactgtgcagtcatcaccaagcagaatgggaagctgtgcttggtgattcaggtagccaatatgaggaagagcctcttgattcagtgccagctctctggcaagctcctgcagacccacgtcaccaaggagggggagcggattctcctcaaccaagccactgtcaaattccacgtggactcctcctctgagagcc

SEQ ID NO: 168088 - DNA, 595 bp, Homo sapiens
  Payload ID: 13060
  Gene Symbol: KCNJ15
  Gene Name: potassium channel, inwardly rectifying subfamily J, member 15
  ENST ID: ENST00000547341
  CDS Start-End: 451-595
cgtcttcagaggaaggatagctgtacagcgtggtgaaggactcaatgagaagtgaacagtgagagagttttcttcattttgaggaaccctaaacacctatctttcccaaggcaacctgtctggactgagcatttctctgacttgacataacttcccatccagccaggagtctgcactcttcagtctttgcagataacttttaagtggtgaagagtataaatcgtggttttccaagtgtagtctaaggtctaacagcatcggggatatctgggaaattatcagaactacagaccctctggctgcaccccaaacctgctgaatcggaaattctgaggcagtagcagaatcccatggtagccaggtgggtgaaggggagcgaggacgttctacctgccttgaagaagacacctgacctgcggagtgagtgaccagtgtttccagagcctggcaatggatgccattcacatcggcatgtccagcacccccctggtgaagcacactgctggggctgggctcaaggccaacagaccccgcgtcatgtccaagagtgggcacagcaacgtgagaattgacaaagtggatggcatatacctac

SEQ ID NO: 168089 - DNA, 555 bp, Homo sapiens
  Payload ID: 13060
  Gene Symbol: KCNJ15
  Gene Name: potassium channel, inwardly rectifying subfamily J, member 15
  ENST ID: ENST00000549932
  CDS Start-End: 411-555
cgtcttcagaggaaggatagctgtacagcgtggtgaaggactcaatgagaaggtgcattgcccatccttcagagagctctgtgtgaatccataaaaggtgcttaaagcttttcactccatgaagcctcatctgtctcatgaaagcaataaatataacttttaagtggtgaagagtataaatcgtggttttccaagtgtagtctaaggtctaacagcatcggggatatctgggaaattatcagaactacagaccctctggctgcaccccaaacctgctgaatcggaaattctgaggcagtagcagaatcccatggtagccaggtgggtgaaggggagcgaggacgttctacctgccttgaagaagacacctgacctgcggagtgagtgaccagtgtttccagagcctggcaatggatgccattcacatcggcatgtccagcacccccctggtgaagcacactgctggggctgggctcaaggccaacagaccccgcgtcatgtccaagagtgggcacagcaacgtgagaattgacaaagtggatggcatatacctac

SEQ ID NO: 168090 - DNA, 740 bp, Homo sapiens
  Payload ID: 13060
  Gene Symbol: KCNJ15
  Gene Name: potassium channel, inwardly rectifying subfamily J, member 15
  ENST ID: ENST00000549805
  CDS Start-End: 596-740
cgtcttcagaggaaggatagctgtacagcgtggtgaaggactcaatgagaaggtgcattgcccatccttcagagagctctgtgtgaatccataaaaggtgcttaaagcttttcactccatgaagcctcatctgtctcatgaaagcaataaatgtgtttggagagcccggactggatgcccactagaatcctgtgctgtgaacagtgagagagttttcttcattttgaggaaccctaaacacctatctttcccaaggcaacctgtctggactgagcatttctctgacttgacataacttcccatccagccaggagtctgcactcttcagtctttgcagataacttttaagtggtgaagagtataaatcgtggttttccaagtgtagtctaaggtctaacagcatcggggatatctgggaaattatcagaactacagaccctctggctgcaccccaaacctgctgaatcggaaattctgaggcagtagcagaatcccatggtagccaggtgggtgaaggggagcgaggacgttctacctgccttgaagaagacacctgacctgcggagtgagtgaccagtgtttccagagcctggcaatggatgccattcacatcggcatgtccagcacccccctggtgaagcacactgctggggctgggctcaaggccaacagaccccgcgtcatgtccaagagtgggcacagcaacgtgagaattgacaaagtggatggcatatacctac

SEQ ID NO: 168091 - DNA, 304 bp, Homo sapiens
  Payload ID: 13060
  Gene Symbol: KCNJ15
  Gene Name: potassium channel, inwardly rectifying subfamily J, member 15
  ENST ID: ENST00000548700
  CDS Start-End: 160-304
cgtcttcagaggaaggatagctgtacagcgtggtgaaggactcaatgagaaggcagtagcagaatcccatggtagccaggtgggtgaaggggagcgaggacgttctacctgccttgaagaagacacctgacctgcggagtgagtgaccagagcctggcaatggatgccattcacatcggcatgtccagcacccccctggtgaagcacactgctggggctgggctcaaggccaacagaccccgcgtcatgtccaagagtgggcacagcaacgtgagaattgacaaagtggatggcatatacctac

SEQ ID NO: 168092 - DNA, 626 bp, Homo sapiens
  Payload ID: 13060
  Gene Symbol: KCNJ15
  Gene Name: potassium channel, inwardly rectifying subfamily J, member 15
  ENST ID: ENST00000549158
  CDS Start-End: 551-626
cgtcttcagaggaaggatagctgtacagcgtggtgaaggactcaatgagaaggtgcattgcccatccttcagagagctctgtgtgaatccataaaaggtgcttaaagcttttcactccatgaagcctcatctgtctcatgaaagcaataaattgaacagtgagagagttttcttcattttgaggaaccctaaacacctatctttcccaaggcaacctgtctggactgagcatttctctgacttgacataacttcccatccagccaggagtctgcactcttcagtctttgcagataacttttaagtggtgaagagtataaatcgtggttttccaagtgtagtctaaggtctaacagcatcggggatatctgggaaattatcagaactacagaccctctggctgcaccccaaacctgctgaatcggaaattctgaggcagtagcagaatcccatggtagccaggtgggtgaaggggagcgaggacgttctacctgccttgaagaagacacctgacctgcggagtgagtgaccagtgtttccagagcctggcaatggatgccattcacatcggcatgtccagcacccccctggtgaagcacactgctggggctgggctcaaggccaaca

SEQ ID NO: 168093 - DNA, 413 bp, Homo sapiens
  Payload ID: 13060
  Gene Symbol: KCNJ15
  Gene Name: potassium channel, inwardly rectifying subfamily J, member 15
  ENST ID: ENST00000551422
  CDS Start-End: 269-413
cgtcttcagaggaaggatagctgtacagcgtggtgaaggactcaatgagaaggtgcattgcccatccttcagagagctctgtgtgaatccataaaaggtgcttaaagcttttcactccatgaagcctcatctgtctcatgaaagcaataaatgcagtagcagaatcccatggtagccaggtgggtgaaggggagcgaggacgttctacctgccttgaagaagacacctgacctgcggagtgagtgaccagtgtttccagagcctggcaatggatgccattcacatcggcatgtccagcacccccctggtgaagcacactgctggggctgggctcaaggccaacagaccccgcgtcatgtccaagagtgggcacagcaacgtgagaattgacaaagtggatggcatatacctac

SEQ ID NO: 168094 - DNA, 313 bp, Homo sapiens
  Payload ID: 13060
  Gene Symbol: KCNJ15
  Gene Name: potassium channel, inwardly rectifying subfamily J, member 15
  ENST ID: ENST00000547595
  CDS Start-End: 169-313
cgtcttcagaggaaggatagctgtacagcgtggtgaaggactcaatgagaaggcagtagcagaatcccatggtagccaggtgggtgaaggggagcgaggacgttctacctgccttgaagaagacacctgacctgcggagtgagtgaccagtgtttccagagcctggcaatggatgccattcacatcggcatgtccagcacccccctggtgaagcacactgctggggctgggctcaaggccaacagaccccgcgtcatgtccaagagtgggcacagcaacgtgagaattgacaaagtggatggcatatacctac

SEQ ID NO: 168095 - DNA, 3049 bp, Homo sapiens
  Payload ID: 13060
  Gene Symbol: KCNJ15
  Gene Name: potassium channel, inwardly rectifying subfamily J, member 15
  Uniprot ID: Q99712
  ENST ID: ENST00000613499
  CDS Start-End: 489-1616
attaactggcattctttaaaaaggcatcagttttcttttgcacaggtgtttggagagcccggactggatgcccactagaatcctgtgctgtgaacagtgagagagttttcttcattttgaggaaccctaaacacctatctttcccaaggcaacctgtctggactgagcatttctctgacttgacataacttcccatccagccaggagtctgcactcttcagtctttgcagataacttttaagtggtgaagagtataaatcgtggttttccaagtgtagtctaaggtctaacagcatcggggatatctgggaaattatcagaactacagaccctctggctgcaccccaaacctgctgaatcggaaattctgaggcagtagcagaatcccatggtagccaggtgggtgaaggggagcgaggacgttctacctgccttgaagaagacacctgacctgcggagtgagtgaccagtgtttccagagcctggcaatggatgccattcacatcggcatgtccagcacccccctggtgaagcacactgctggggctgggctcaaggccaacagaccccgcgtcatgtccaagagtgggcacagcaacgtgagaattgacaaagtggatggcatatacctactctacctgcaagacctgtggaccacagttatcgacatgaagtggagatacaaactcaccctgttcgctgccacttttgtgatgacctggttcctttttggagtcatctactatgccatcgcgtttattcatggggacttagaacccggtgagcccatttcaaatcataccccctgcatcatgaaagtggactctctcactggggcgtttctcttttccctggaatcccagacaaccattggctatggagtccgttccatcacagaggaatgtcctcatgccatcttcctgttggttgctcagttggtcatcacgaccttgattgagatcttcatcaccggaaccttcctggccaaaatcgccagacccaaaaagcgggctgagaccatcaagttcagccactgtgcagtcatcaccaagcagaatgggaagctgtgcttggtgattcaggtagccaatatgaggaagagcctcttgattcagtgccagctctctggcaagctcctgcagacccacgtcaccaaggagggggagcggattctcctcaaccaagccactgtcaaattccacgtggactcctcctctgagagccccttcctcattctgcccatgacattctaccatgtgctggatgagacgagccccctgagagacctcacaccccaaaacctaaaggagaaggagtttgagcttgtggtcctcctcaatgccactgtggaatccaccagcgctgtctgccagagccgaacatcttatatcccagaggaaatctactggggttttgagtttgtgcctgtggtatctctctccaaaaatggaaaatatgtggctgatttcagtcagtttgaacagattcggaaaagcccagattgcacattttactgtgcagattctgagaaacagcaactcgaggagaagtacaggcaggaggatcagagggaaagagaactgaggacacttttattacaacagagcaatgtctgatcacaggggcgccatccaggtttaaccctgcaagctgtttccacatcagaactcccttcaaacacaaagattgctgtgaaaacgaaaatgtgtagacgcactctcaaaaactgcacggacatacaaaatcaatcttttcctttgatcttgtggctaaaccagcatttctgtgtttgagagatttcctgttaggtgcttcgtctgaaagtgaactctcataattcaaattgtataaaataaagctacatttctaagagcttggtgtagggcaattggaataatgtcctgttagataaacagacatttagcaatcctgacattaaaaggaaatgtatttctatacaagattattagctgtaatacaagatatttatttaaccaatgaccttatggctgagagttgaattgtggttcagtattcattgatctcactgctttaaaacatgctctttttgttcaagcaggaaaaatattatatctaattatgtctatgtggtaatacctaaaaagaggtagagagactctatgttcacaaaatatagtaatttcatttttacctttcttcagtggactgaattgtatggaaggaaattgatcagatctgtaattcacaactgtggaaacctacacaaatggggctgatgccattgtttcctctattttattttatttatttttgaatccactatctctttccattcaaaatatttccattcaaaatgtggttcacagacccgccacatcagcaccatccgagagcttattagtaatgtgtagattctcatgtcccagccagacttacagaattggggtctgtatcttaacaagaaccccagatgatttgtgtacaaatgaaagttcgaaagctgtgctctggacagtgttctcaaagcaactttctgaagccgtgtggaaaactgactctgtgtgggtcccgtatccctgtggcatccagacctggcctctcttcatttcattattattggccaatatttctttcagccatttcatttcttatctattaaaatggcttgcccataaaggaactgcataggattatcccctgacattccaagagcaaaataaagctcttgagagtaattgttgtctcagtcatgcttgctgattacagttagcacaaaagaaaaattcagctgcctgacaatacaggaaatgttctcagatgctgatgtttgtaaggtccggtggggccatgaggaagaagaggagctgaaggtaagaaactcataaacaagatgactctttgatgcatgaacaagatttgaaaatctcaagcctgtaaagaatacccctgctatttaaataaagctcataccaagaggtaacattttgccccgggccaaattcaggggtctagtgccctgcattcctttgaggcaaaaaataaatgggctatgactggttaaatgtcc

SEQ ID NO: 168096 - DNA, 3046 bp, Homo sapiens
  Payload ID: 13060
  Gene Symbol: KCNJ15
  Gene Name: potassium channel, inwardly rectifying subfamily J, member 15
  Uniprot ID: Q99712
  ENST ID: ENST00000612702
  CDS Start-End: 486-1613
attaactggcattctttaaaaaggcatcagttttcttttgcacaggtgtttggagagcccggactggatgcccactagaatcctgtgctgtgaacagtgagagagttttcttcattttgaggaaccctaaacacctatctttcccaaggcaacctgtctggactgagcatttctctgacttgacataacttcccatccagccaggagtctgcactcttcagtctttgcaggcagtagcagaatcccatggtagccaggtgggtgaaggggagcgaggacgttctacctgccttgaagaagacacctgacctgcggagtgagtgaccaggaatgtgggggaaatttatgtcagtcatcaggcaggtactagaagatgctaggggcctcacagacagcttgttcccggctgttaacatggagcagagcgttccctggggctgagcatgggagcccagcacttcttatagtgtttccagagcctggcaatggatgccattcacatcggcatgtccagcacccccctggtgaagcacactgctggggctgggctcaaggccaacagaccccgcgtcatgtccaagagtgggcacagcaacgtgagaattgacaaagtggatggcatatacctactctacctgcaagacctgtggaccacagttatcgacatgaagtggagatacaaactcaccctgttcgctgccacttttgtgatgacctggttcctttttggagtcatctactatgccatcgcgtttattcatggggacttagaacccggtgagcccatttcaaatcataccccctgcatcatgaaagtggactctctcactggggcgtttctcttttccctggaatcccagacaaccattggctatggagtccgttccatcacagaggaatgtcctcatgccatcttcctgttggttgctcagttggtcatcacgaccttgattgagatcttcatcaccggaaccttcctggccaaaatcgccagacccaaaaagcgggctgagaccatcaagttcagccactgtgcagtcatcaccaagcagaatgggaagctgtgcttggtgattcaggtagccaatatgaggaagagcctcttgattcagtgccagctctctggcaagctcctgcagacccacgtcaccaaggagggggagcggattctcctcaaccaagccactgtcaaattccacgtggactcctcctctgagagccccttcctcattctgcccatgacattctaccatgtgctggatgagacgagccccctgagagacctcacaccccaaaacctaaaggagaaggagtttgagcttgtggtcctcctcaatgccactgtggaatccaccagcgctgtctgccagagccgaacatcttatatcccagaggaaatctactggggttttgagtttgtgcctgtggtatctctctccaaaaatggaaaatatgtggctgatttcagtcagtttgaacagattcggaaaagcccagattgcacattttactgtgcagattctgagaaacagcaactcgaggagaagtacaggcaggaggatcagagggaaagagaactgaggacacttttattacaacagagcaatgtctgatcacaggggcgccatccaggtttaaccctgcaagctgtttccacatcagaactcccttcaaacacaaagattgctgtgaaaacgaaaatgtgtagacgcactctcaaaaactgcacggacatacaaaatcaatcttttcctttgatcttgtggctaaaccagcatttctgtgtttgagagatttcctgttaggtgcttcgtctgaaagtgaactctcataattcaaattgtataaaataaagctacatttctaagagcttggtgtagggcaattggaataatgtcctgttagataaacagacatttagcaatcctgacattaaaaggaaatgtatttctatacaagattattagctgtaatacaagatatttatttaaccaatgaccttatggctgagagttgaattgtggttcagtattcattgatctcactgctttaaaacatgctctttttgttcaagcaggaaaaatattatatctaattatgtctatgtggtaatacctaaaaagaggtagagagactctatgttcacaaaatatagtaatttcatttttacctttcttcagtggactgaattgtatggaaggaaattgatcagatctgtaattcacaactgtggaaacctacacaaatggggctgatgccattgtttcctctattttattttatttatttttgaatccactatctctttccattcaaaatatttccattcaaaatgtggttcacagacccgccacatcagcaccatccgagagcttattagtaatgtgtagattctcatgtcccagccagacttacagaattggggtctgtatcttaacaagaaccccagatgatttgtgtacaaatgaaagttcgaaagctgtgctctggacagtgttctcaaagcaactttctgaagccgtgtggaaaactgactctgtgtgggtcccgtatccctgtggcatccagacctggcctctcttcatttcattattattggccaatatttctttcagccatttcatttcttatctattaaaatggcttgcccataaaggaactgcataggattatcccctgacattccaagagcaaaataaagctcttgagagtaattgttgtctcagtcatgcttgctgattacagttagcacaaaagaaaaattcagctgcctgacaatacaggaaatgttctcagatgctgatgtttgtaaggtccggtggggccatgaggaagaagaggagctgaaggtaagaaactcataaacaagatgactctttgatgcatgaacaagatttgaaaatctcaagcctgtaaagaatacccctgctatttaaataaagctcataccaagaggtaacattttgccccgggccaaattcaggggtctagtgccctgcattcctttgaggcaaaaaataaatgggctatgactggttaaatgtcc

SEQ ID NO: 168097 - DNA, 4062 bp, Homo sapiens
  Payload ID: 13061
  Gene Symbol: KCNJ16
  Gene Name: potassium channel, inwardly rectifying subfamily J, member 16
  Uniprot ID: Q9NPI9
  ENST ID: ENST00000283936
  CDS Start-End: 547-1803
agattcccagggaggaactgtaggaacaaaccggtgtcaatggttaacccaggttcttggtgtctggagcttttctttcctttattattaactaaagagcattctctaccattgcccagctgaaagcacctagctcatagattctctgtggggagagtgaataaagaatgggggattgaggcacagagtgttaaaatagtgagacacaggattctaactggcagactggcactttatctcaattcttaactgctgtgttgcctctcactttaaagacatccacattccaccctgggccttgcccgtctggtgagcccaatctctgctggtcagtcacgcagttgaggtcagggaaggagtaactcaagatgattttgatgttgcagttttaaatttcactttgacttgagctgggaaatcctttggcctattataccatggatgctaaaaatggttctaactgaaaacccaaaccaagaaatagcaacaagtctagaattcttactactacaaaactcacctggatccctaagggcacagcaaagaatgagctattacggcagcagctatcatattatcaatgcggacgcaaaatacccaggctacccgccagagcacattatagctgagaagagaagagcaagaagacgattacttcacaaagatggcagctgtaatgtctacttcaagcacatttttggagaatggggaagctatgtggttgacatcttcaccactcttgtggacaccaagtggcgccatatgtttgtgatattttctttatcttatattctctcgtggttgatatttggctctgtcttttggctcatagcctttcatcatggcgatctattaaatgatccagacatcacaccttgtgttgacaacgtccattctttcacaggggcctttttgttctccctagagacccaaaccaccataggatatggttatcgctgtgttactgaagaatgttctgtggccgtgctcatggtgatcctccagtccatcttaagttgcatcataaatacctttatcattggagctgccttggccaaaatggcaactgctcgaaagagagcccaaaccattcgtttcagctactttgcacttataggtatgagagatgggaagctttgcctcatgtggcgcattggtgattttcggccaaaccacgtggtagaaggaacagttagagcccaacttctccgctatacagaagacagtgaagggaggatgacgatggcatttaaagacctcaaattagtcaacgaccaaatcatcctggtcaccccggtaactattgtccatgaaattgaccatgagagccctctgtatgcccttgaccgcaaagcagtagccaaagataactttgagattttggtgacatttatctatactggtgattccactggaacatctcaccaatctagaagctcctatgttccccgagaaattctctggggccataggtttaatgatgtcttggaagttaagaggaagtattacaaagtgaactgcttacagtttgaaggaagtgtggaagtatatgcccccttttgcagtgccaagcaattggactggaaagaccagcagctccacatagaaaaagcaccaccagttcgagaatcctgcacgtcggacaccaaggcgagacgaaggtcatttagtgcagttgccattgtcagcagctgtgaaaaccctgaggagaccaccacttccgccacacatgaatatagggaaacaccttatcagaaagctctcctgactttaaacagaatctctgtagaatcccaaatgtagtcctaaattgcaattatgagggctaccactgaatcattttatctttcagccaatcaagtcgttgtaaacgtggcttttttgaaagtgttatggctatgttttatgatgatgctgggtaagtagagtaagttaaacttggtaaaagataatctaaaaattccatagttctcagttattaaaatttttcttgttcgccaattttgtattaagaatgctattaagcctaattgattaaaatttatcttttttattatcttacatgcttgtatcttcagttggaggtgtagtattcaaaaacggggaatgaaggcaggaaggaggctggaataaataaaaataaaaatagacaagtaagacagcataaataatacatttttaaacatgtcaacattgataatacaatgaagatttaccataaaaagtatcatatctaaccaagatatgcaaaagatgcattcagtaagctgtaacgttgagaaatgtaactgtgaaatcagctcaccagttcaagtcactaggtttgccacttggaccgtcttggtttcagcgagcatagcgagtggctgtaagaaattgtccatgccaccaattccactgctacttgcccaggtagtgatcagtgagagttagaagcaattttttctctaaccgatgaggcagaagaaaagttaacagtatttaaagcagcatttctctcttaacgttcctgggagactccaacaaatggagaccagaaacaaggcaaccacgaccttgctaggttctctgaggaggggactttctatgttcacgtcccaccttcttcgaggacatgaccaagggacaggatcatacagatgaggtgaggggatggttagcagcgataaacattctcagacccttggagagaaaccgttgctagcttgctggtcccgaaagattgcaactttggctgctacagaaaggatagaacctttttggggggagggtggggagggagatatttatttgtgcccagaagcagttatgtatgcttcttgtcttggttactgtacaagatacaaatgactcgagttgtggattgcaagaaactcttttattaaacttggaacaaccatttaaatgaaggattttgtgagatagaattcaattaaagcgatttgaatgcacagtaagtggataatctgagtacaatgaaatttcttaagttttagaacatgagataaagttgtatactctactttcatgttaaaatgttaatcatgattactttaagcccacatccactgagtaaagagtcactttaaactttataaatcaaagagatattaggaacattcagaattatttgtgttttgtttttgttttacattgttgctgcactggcaataagtatgtggcactgtttttatttgtttatgttatttaaatacacacccagacacacacacacacagtttttgctttttctggaaaatctttctttctcttctctctccatgaaaattaaaacacacaagtgaatgaagtaattacatagtccaagattagaaatacaagtaaaatatataggtataggtagatagagtgcctttctgtttcttttcttttcttttttctttttttgttcttccttcctttcttccctcctccccctcatccttccctttctccttcttttcccttttttttttttttttgacctgggagtaataaagttactttttaaatgcacgtatgcaatcttttattcctcttgttttatggataagagatttgttcaggtcaaaagttgcaaaactgttctgaagcttaatattagagacccaagtaagattgtttttagtcttgcttgaggaatgcacactccatttaaaaaattgtgcgctctgtagatttggattttacagcagcaattacttggctaaattagagtactgcaatcttgtaagtagaaaacagccaccatgacaataaacaaaaacacttaaaaatatttttagcttgttttacctacatctagtttcatttcatcttgctttgctttgttgactctgctaccgctgatgtttgccttgtcaatatcagaataggggcatcagtgtcccgtgaaatacattttgttgtgctatgagcctctgtaatcaaatgcttgtactcagaagagagtgtaaaatcagcatttctatgtaacatatatctctaattatctgtgtaattttataacatactttgacaaccccagtgagttacttaataataaagatcttaaaataatgc

SEQ ID NO: 168098 - DNA, 4009 bp, Homo sapiens
  Payload ID: 13061
  Gene Symbol: KCNJ16
  Gene Name: potassium channel, inwardly rectifying subfamily J, member 16
  Uniprot ID: Q9NPI9
  ENST ID: ENST00000392670
  CDS Start-End: 494-1750
gagaactcagtggcctttgtctgtggtgaatgtatccggaaaggcaaagaagagagagattctcctgtggggtttctcatctccatggcggtaggtgctgacagcttcagaagggtactaacagggccaagagaaaagggccctgagatgctcagctacggtgctcttacaagatgaaaaggacatggggttcagatctgcacttcatcatctttcactaagacatccacattccaccctgggccttgcccgtctggtgagcccaatctctgctggtcagtcacgcagttgaggtcagggaaggagtaactcaagatgattttgatgttgcagttttaaatttcactttgacttgagctgggaaatcctttggcctattataccatggatgctaaaaatggttctaactgaaaacccaaaccaagaaatagcaacaagtctagaattcttactactacaaaactcacctggatccctaagggcacagcaaagaatgagctattacggcagcagctatcatattatcaatgcggacgcaaaatacccaggctacccgccagagcacattatagctgagaagagaagagcaagaagacgattacttcacaaagatggcagctgtaatgtctacttcaagcacatttttggagaatggggaagctatgtggttgacatcttcaccactcttgtggacaccaagtggcgccatatgtttgtgatattttctttatcttatattctctcgtggttgatatttggctctgtcttttggctcatagcctttcatcatggcgatctattaaatgatccagacatcacaccttgtgttgacaacgtccattctttcacaggggcctttttgttctccctagagacccaaaccaccataggatatggttatcgctgtgttactgaagaatgttctgtggccgtgctcatggtgatcctccagtccatcttaagttgcatcataaatacctttatcattggagctgccttggccaaaatggcaactgctcgaaagagagcccaaaccattcgtttcagctactttgcacttataggtatgagagatgggaagctttgcctcatgtggcgcattggtgattttcggccaaaccacgtggtagaaggaacagttagagcccaacttctccgctatacagaagacagtgaagggaggatgacgatggcatttaaagacctcaaattagtcaacgaccaaatcatcctggtcaccccggtaactattgtccatgaaattgaccatgagagccctctgtatgcccttgaccgcaaagcagtagccaaagataactttgagattttggtgacatttatctatactggtgattccactggaacatctcaccaatctagaagctcctatgttccccgagaaattctctggggccataggtttaatgatgtcttggaagttaagaggaagtattacaaagtgaactgcttacagtttgaaggaagtgtggaagtatatgcccccttttgcagtgccaagcaattggactggaaagaccagcagctccacatagaaaaagcaccaccagttcgagaatcctgcacgtcggacaccaaggcgagacgaaggtcatttagtgcagttgccattgtcagcagctgtgaaaaccctgaggagaccaccacttccgccacacatgaatatagggaaacaccttatcagaaagctctcctgactttaaacagaatctctgtagaatcccaaatgtagtcctaaattgcaattatgagggctaccactgaatcattttatctttcagccaatcaagtcgttgtaaacgtggcttttttgaaagtgttatggctatgttttatgatgatgctgggtaagtagagtaagttaaacttggtaaaagataatctaaaaattccatagttctcagttattaaaatttttcttgttcgccaattttgtattaagaatgctattaagcctaattgattaaaatttatcttttttattatcttacatgcttgtatcttcagttggaggtgtagtattcaaaaacggggaatgaaggcaggaaggaggctggaataaataaaaataaaaatagacaagtaagacagcataaataatacatttttaaacatgtcaacattgataatacaatgaagatttaccataaaaagtatcatatctaaccaagatatgcaaaagatgcattcagtaagctgtaacgttgagaaatgtaactgtgaaatcagctcaccagttcaagtcactaggtttgccacttggaccgtcttggtttcagcgagcatagcgagtggctgtaagaaattgtccatgccaccaattccactgctacttgcccaggtagtgatcagtgagagttagaagcaattttttctctaaccgatgaggcagaagaaaagttaacagtatttaaagcagcatttctctcttaacgttcctgggagactccaacaaatggagaccagaaacaaggcaaccacgaccttgctaggttctctgaggaggggactttctatgttcacgtcccaccttcttcgaggacatgaccaagggacaggatcatacagatgaggtgaggggatggttagcagcgataaacattctcagacccttggagagaaaccgttgctagcttgctggtcccgaaagattgcaactttggctgctacagaaaggatagaacctttttggggggagggtggggagggagatatttatttgtgcccagaagcagttatgtatgcttcttgtcttggttactgtacaagatacaaatgactcgagttgtggattgcaagaaactcttttattaaacttggaacaaccatttaaatgaaggattttgtgagatagaattcaattaaagcgatttgaatgcacagtaagtggataatctgagtacaatgaaatttcttaagttttagaacatgagataaagttgtatactctactttcatgttaaaatgttaatcatgattactttaagcccacatccactgagtaaagagtcactttaaactttataaatcaaagagatattaggaacattcagaattatttgtgttttgtttttgttttacattgttgctgcactggcaataagtatgtggcactgtttttatttgtttatgttatttaaatacacacccagacacacacacacacagtttttgctttttctggaaaatctttctttctcttctctctccatgaaaattaaaacacacaagtgaatgaagtaattacatagtccaagattagaaatacaagtaaaatatataggtataggtagatagagtgcctttctgtttcttttcttttcttttttctttttttgttcttccttcctttcttccctcctccccctcatccttccctttctccttcttttcccttttttttttttttttgacctgggagtaataaagttactttttaaatgcacgtatgcaatcttttattcctcttgttttatggataagagatttgttcaggtcaaaagttgcaaaactgttctgaagcttaatattagagacccaagtaagattgtttttagtcttgcttgaggaatgcacactccatttaaaaaattgtgcgctctgtagatttggattttacagcagcaattacttggctaaattagagtactgcaatcttgtaagtagaaaacagccaccatgacaataaacaaaaacacttaaaaatatttttagcttgttttacctacatctagtttcatttcatcttgctttgctttgttgactctgctaccgctgatgtttgccttgtcaatatcagaataggggcatcagtgtcccgtgaaatacattttgttgtgctatgagcctctgtaatcaaatgcttgtactcagaagagagtgtaaaatcagcatttctatgtaacatatatctctaattatctgtgtaattttataacatactttgacaaccccagtgagttacttaataataaagatcttaaaataatgc

SEQ ID NO: 168099 - DNA, 3981 bp, Homo sapiens
  Payload ID: 13061
  Gene Symbol: KCNJ16
  Gene Name: potassium channel, inwardly rectifying subfamily J, member 16
  Uniprot ID: Q9NPI9
  ENST ID: ENST00000392671
  CDS Start-End: 466-1722
agattcccagggaggaactgtaggaacaaaccggtgtcaatggttaacccaggttcttggtgtctggagcttttctttcctttattattaactaaagagcattctctaccattgcccagctgaaagcacctagctcatagattctctgtggggagagtgaataaagaatgggggattgaggcacagagtgttaaaatagtgagacacaggattctaactggcagactggcactttatctcaattcttaactgctgtgttgcctctcactttaaaggagtaactcaagatgattttgatgttgcagttttaaatttcactttgacttgagctgggaaatcctttggcctattataccatggatgctaaaaatggttctaactgaaaacccaaaccaagaaatagcaacaagtctagaattcttactactacaaaactcacctggatccctaagggcacagcaaagaatgagctattacggcagcagctatcatattatcaatgcggacgcaaaatacccaggctacccgccagagcacattatagctgagaagagaagagcaagaagacgattacttcacaaagatggcagctgtaatgtctacttcaagcacatttttggagaatggggaagctatgtggttgacatcttcaccactcttgtggacaccaagtggcgccatatgtttgtgatattttctttatcttatattctctcgtggttgatatttggctctgtcttttggctcatagcctttcatcatggcgatctattaaatgatccagacatcacaccttgtgttgacaacgtccattctttcacaggggcctttttgttctccctagagacccaaaccaccataggatatggttatcgctgtgttactgaagaatgttctgtggccgtgctcatggtgatcctccagtccatcttaagttgcatcataaatacctttatcattggagctgccttggccaaaatggcaactgctcgaaagagagcccaaaccattcgtttcagctactttgcacttataggtatgagagatgggaagctttgcctcatgtggcgcattggtgattttcggccaaaccacgtggtagaaggaacagttagagcccaacttctccgctatacagaagacagtgaagggaggatgacgatggcatttaaagacctcaaattagtcaacgaccaaatcatcctggtcaccccggtaactattgtccatgaaattgaccatgagagccctctgtatgcccttgaccgcaaagcagtagccaaagataactttgagattttggtgacatttatctatactggtgattccactggaacatctcaccaatctagaagctcctatgttccccgagaaattctctggggccataggtttaatgatgtcttggaagttaagaggaagtattacaaagtgaactgcttacagtttgaaggaagtgtggaagtatatgcccccttttgcagtgccaagcaattggactggaaagaccagcagctccacatagaaaaagcaccaccagttcgagaatcctgcacgtcggacaccaaggcgagacgaaggtcatttagtgcagttgccattgtcagcagctgtgaaaaccctgaggagaccaccacttccgccacacatgaatatagggaaacaccttatcagaaagctctcctgactttaaacagaatctctgtagaatcccaaatgtagtcctaaattgcaattatgagggctaccactgaatcattttatctttcagccaatcaagtcgttgtaaacgtggcttttttgaaagtgttatggctatgttttatgatgatgctgggtaagtagagtaagttaaacttggtaaaagataatctaaaaattccatagttctcagttattaaaatttttcttgttcgccaattttgtattaagaatgctattaagcctaattgattaaaatttatcttttttattatcttacatgcttgtatcttcagttggaggtgtagtattcaaaaacggggaatgaaggcaggaaggaggctggaataaataaaaataaaaatagacaagtaagacagcataaataatacatttttaaacatgtcaacattgataatacaatgaagatttaccataaaaagtatcatatctaaccaagatatgcaaaagatgcattcagtaagctgtaacgttgagaaatgtaactgtgaaatcagctcaccagttcaagtcactaggtttgccacttggaccgtcttggtttcagcgagcatagcgagtggctgtaagaaattgtccatgccaccaattccactgctacttgcccaggtagtgatcagtgagagttagaagcaattttttctctaaccgatgaggcagaagaaaagttaacagtatttaaagcagcatttctctcttaacgttcctgggagactccaacaaatggagaccagaaacaaggcaaccacgaccttgctaggttctctgaggaggggactttctatgttcacgtcccaccttcttcgaggacatgaccaagggacaggatcatacagatgaggtgaggggatggttagcagcgataaacattctcagacccttggagagaaaccgttgctagcttgctggtcccgaaagattgcaactttggctgctacagaaaggatagaacctttttggggggagggtggggagggagatatttatttgtgcccagaagcagttatgtatgcttcttgtcttggttactgtacaagatacaaatgactcgagttgtggattgcaagaaactcttttattaaacttggaacaaccatttaaatgaaggattttgtgagatagaattcaattaaagcgatttgaatgcacagtaagtggataatctgagtacaatgaaatttcttaagttttagaacatgagataaagttgtatactctactttcatgttaaaatgttaatcatgattactttaagcccacatccactgagtaaagagtcactttaaactttataaatcaaagagatattaggaacattcagaattatttgtgttttgtttttgttttacattgttgctgcactggcaataagtatgtggcactgtttttatttgtttatgttatttaaatacacacccagacacacacacacacagtttttgctttttctggaaaatctttctttctcttctctctccatgaaaattaaaacacacaagtgaatgaagtaattacatagtccaagattagaaatacaagtaaaatatataggtataggtagatagagtgcctttctgtttcttttcttttcttttttctttttttgttcttccttcctttcttccctcctccccctcatccttccctttctccttcttttcccttttttttttttttttgacctgggagtaataaagttactttttaaatgcacgtatgcaatcttttattcctcttgttttatggataagagatttgttcaggtcaaaagttgcaaaactgttctgaagcttaatattagagacccaagtaagattgtttttagtcttgcttgaggaatgcacactccatttaaaaaattgtgcgctctgtagatttggattttacagcagcaattacttggctaaattagagtactgcaatcttgtaagtagaaaacagccaccatgacaataaacaaaaacacttaaaaatatttttagcttgttttacctacatctagtttcatttcatcttgctttgctttgttgactctgctaccgctgatgtttgccttgtcaatatcagaataggggcatcagtgtcccgtgaaatacattttgttgtgctatgagcctctgtaatcaaatgcttgtactcagaagagagtgtaaaatcagcatttctatgtaacatatatctctaattatctgtgtaattttataacatactttgacaaccccagtgagttacttaataataaagatcttaaaataatgc

SEQ ID NO: 168100 - DNA, 582 bp, Homo sapiens
  Payload ID: 13061
  Gene Symbol: KCNJ16
  Gene Name: potassium channel, inwardly rectifying subfamily J, member 16
  ENST ID: ENST00000587892
  CDS Start-End: 476-582
gatgctcagctacggtgctcttacaagatgaaaaggacatggggttcagatctgcacttcatcatctttcactaagacatccacattccaccctgggccttgcccgtctggtgagcccaatctctgctggtcagtcacgcagttgaggtcagggaaggagtaactcaagatgattttgatgttgcagttttaaatttcactttgacttgagctgggaaatcctttggcctattataccatggatgctaaaaatgactaaaggtggagttagggggaaatgagtttaatgtgaagtagtactcctgtcagttctgtttgtcctgggaagtatacaaggaagaaaagcctccgtggaagagagagcaagcaccaggtgctgaaggttctaactgaaaacccaaaccaagaaatagcaacaagtctagaattcttactactacaaaactcacctggatccctaagggcacagcaaagaatgagctattacggcagcagctatcatattatcaatgcggacgcaaaatacccaggctacccgccagagcacattatagctgagaagagaagagcaagaagacgatt

SEQ ID NO: 168101 - DNA, 4014 bp, Homo sapiens
  Payload ID: 13061
  Gene Symbol: KCNJ16
  Gene Name: potassium channel, inwardly rectifying subfamily J, member 16
  ENST ID: ENST00000585558
  CDS Start-End: 389-1750
gagaactcagtggcctttgtctgtggtgaatgtatccggaaaggcaaagaagagagagattctcctgtggggtttctcatctccatggcggtaggtgctgacagcttcagaagggtactaacagggccaagagaaaagggccctgagatgctcagctacggtgctcttacaagatgaaaaggacatggggttcagatctgcacttcatcatctttcactaagacatccacattccaccctgggccttgcccgtctggtgagcccaatctctgctggtcagtcacgcagttgaggtcagggaaggagtaactcaagatgattttgatgttgcagttttaaatttcactttgacttgagctgggaaatcctttggcctattataccatggatgctaaaaatggttctaactgaaaacccaaaccaagaaatagcaacaagtctagaattcttactactacaaaactcacctggatccctaagggcacagcaaagaatgagctattacggcagcagctatcatattatcaatgcggacgcaaaatacccaggctacccgccagagcacattatagctgagaagagaagagcaagaagacgattacttcacaaagatggcagctgtaatgtctacttcaagcacatttttggagaatggggaagctatgtggttgacatcttcaccactcttgtggacaccaagtggcgccatatgtttgtgatattttctttatcttatattctctcgtggttgatatttggctctgtcttttggctcatagcctttcatcatggcgatctattaaatgatccagacatcacaccttgtgttgacaacgtccattctttcacaggggcctttttgttctccctagagacccaaaccaccataggatatggttatcgctgtgttactgaagaatgttctgtggccgtgctcatggtgatcctccagtccatcttaagttgcatcataaatacctttatcattggagctgccttggccaaaatggcaactgctcgaaagagagcccaaaccattcgtttcagctactttgcacttataggtatgagagatgggaagctttgcctcatgtggcgcattggtgattttcggccaaaccacgtggtagaaggaacagttagagcccaacttctccgctatacagaagacagtgaagggaggatgacgatggcatttaaagacctcaaattagtcaacgaccaaatcatcctggtcaccccggtaactattgtccatgaaattgaccatgagagccctctgtatgcccttgaccgcaaagcagtagccaaagataactttgagattttggtgacatttatctatactggtgattccactggaacatctcaccaatctagaagctcctatgttccccgagaaattctctggggccataggtttaatgatgtcttggaagttaagaggaagtattacaaagtgaactgcttacagtttgaaggaagtgtggaagtatatgcccccttttgcagtgccaagcaattggactggaaagaccagcagctccacatagaaaaagcaccaccagttcgagaatcctgcacgtcggacaccaaggcgagacgaaggtcatttagtgcagttgccattgtcagcagctgtgaaaaccctgaggagaccaccacttccgccacacatgaatatagggaaacaccttatcagaaagctctcctgactttaaacagaatctctgtagaatcccaaatgtagtcctaaattgcaattatgagggctaccactgaatcattttatctttcagccaatcaagtcgttgtaaacgtggcttttttgaaagtgttatggctatgttttatgatgatgctgggtaagtagagtaagttaaacttggtaaaagataatctaaaaattccatagttctcagttattaaaatttttcttgttcgccaattttgtattaagaatgctattaagcctaattgattaaaatttatcttttttattatcttacatgcttgtatcttcagttggaggtgtagtattcaaaaacggggaatgaaggcaggaaggaggctggaataaataaaaataaaaatagacaagtaagacagcataaataatacatttttaaacatgtcaacattgataatacaatgaagatttaccataaaaagtatcatatctaaccaagatatgcaaaagatgcattcagtaagctgtaacgttgagaaatgtaactgtgaaatcagctcaccagttcaagtcactaggtttgccacttggaccgtcttggtttcagcgagcatagcgagtggctgtaagaaattgtccatgccaccaattccactgctacttgcccaggtagtgatcagtgagagttagaagcaattttttctctaaccgatgaggcagaagaaaagttaacagtatttaaagcagcatttctctcttaacgttcctgggagactccaacaaatggagaccagaaacaaggcaaccacgaccttgctaggttctctgaggaggggactttctatgttcacgtcccaccttcttcgaggacatgaccaagggacaggatcatacagatgaggtgaggggatggttagcagcgataaacattctcagacccttggagagaaaccgttgctagcttgctggtcccgaaagattgcaactttggctgctacagaaaggatagaacctttttggggggagggtggggagggagatatttatttgtgcccagaagcagttatgtatgcttcttgtcttggttactgtacaagatacaaatgactcgagttgtggattgcaagaaactcttttattaaacttggaacaaccatttaaatgaaggattttgtgagatagaattcaattaaagcgatttgaatgcacagtaagtggataatctgagtacaatgaaatttcttaagttttagaacatgagataaagttgtatactctactttcatgttaaaatgttaatcatgattactttaagcccacatccactgagtaaagagtcactttaaactttataaatcaaagagatattaggaacattcagaattatttgtgttttgtttttgttttacattgttgctgcactggcaataagtatgtggcactgtttttatttgtttatgttatttaaatacacacccagacacacacacacacagtttttgctttttctggaaaatctttctttctcttctctctccatgaaaattaaaacacacaagtgaatgaagtaattacatagtccaagattagaaatacaagtaaaatatataggtataggtagatagagtgcctttctgtttcttttcttttcttttttctttttttgttcttccttcctttcttccctcctccccctcatccttccctttctccttcttttcccttttttttttttttttgacctgggagtaataaagttactttttaaatgcacgtatgcaatcttttattcctcttgttttatggataagagatttgttcaggtcaaaagttgcaaaactgttctgaagcttaatattagagacccaagtaagattgtttttagtcttgcttgaggaatgcacactccatttaaaaaattgtgcgctctgtagatttggattttacagcagcaattacttggctaaattagagtactgcaatcttgtaagtagaaaacagccaccatgacaataaacaaaaacacttaaaaatatttttagcttgttttacctacatctagtttcatttcatcttgctttgctttgttgactctgctaccgctgatgtttgccttgtcaatatcagaataggggcatcagtgtcccgtgaaatacattttgttgtgctatgagcctctgtaatcaaatgcttgtactcagaagagagtgtaaaatcagcatttctatgtaacatatatctctaattatctgtgtaattttataacatactttgacaaccccagtgagttacttaataataaagatcttaaaataatgcaaaaa

SEQ ID NO: 168102 - DNA, 569 bp, Homo sapiens
  Payload ID: 13061
  Gene Symbol: KCNJ16
  Gene Name: potassium channel, inwardly rectifying subfamily J, member 16
  ENST ID: ENST00000591891
  CDS Start-End: 464-569
ttatccagacaggggaattgcaatggagagagagtaattcaagcagagtcagctgtgtgggagatcggagttttattattactcaaatcagtctcccagatcagagtttttaaggatagtttgtcgggtatgggcttggaaagtgaggagtgctaattggttgggttgaaggtaaaatcatagggggtcgaaacatccacattccaccctgggccttgcccgtctggtgagcccaatctctgctggtcagtcacgcagttgaggtcagggaaggagtaactcaagatgattttgatgttgcagttttaaatttcactttgacttgagctgggaaatcctttggcctattataccatggatgctaaaaatggttctaactgaaaacccaaaccaagaaatagcaacaagtctagaattcttactactacaaaactcacctggatccctaagggcacagcaaagaatgagctattacggcagcagctatcatattatcaatgcggacgcaaaatacccaggctacccgccagagcacattatagctgagaagagaagagcaagaagacgat

SEQ ID NO: 168103 - DNA, 3684 bp, Homo sapiens
  Payload ID: 13061
  Gene Symbol: KCNJ16
  Gene Name: potassium channel, inwardly rectifying subfamily J, member 16
  Uniprot ID: Q9NPI9
  ENST ID: ENST00000589377
  CDS Start-End: 164-1420
gagcattctctaccattgcccagctgaaagcacctagctcatagattctctgtggggagagtgaataaaggttctaactgaaaacccaaaccaagaaatagcaacaagtctagaattcttactactacaaaactcacctggatccctaagggcacagcaaagaatgagctattacggcagcagctatcatattatcaatgcggacgcaaaatacccaggctacccgccagagcacattatagctgagaagagaagagcaagaagacgattacttcacaaagatggcagctgtaatgtctacttcaagcacatttttggagaatggggaagctatgtggttgacatcttcaccactcttgtggacaccaagtggcgccatatgtttgtgatattttctttatcttatattctctcgtggttgatatttggctctgtcttttggctcatagcctttcatcatggcgatctattaaatgatccagacatcacaccttgtgttgacaacgtccattctttcacaggggcctttttgttctccctagagacccaaaccaccataggatatggttatcgctgtgttactgaagaatgttctgtggccgtgctcatggtgatcctccagtccatcttaagttgcatcataaatacctttatcattggagctgccttggccaaaatggcaactgctcgaaagagagcccaaaccattcgtttcagctactttgcacttataggtatgagagatgggaagctttgcctcatgtggcgcattggtgattttcggccaaaccacgtggtagaaggaacagttagagcccaacttctccgctatacagaagacagtgaagggaggatgacgatggcatttaaagacctcaaattagtcaacgaccaaatcatcctggtcaccccggtaactattgtccatgaaattgaccatgagagccctctgtatgcccttgaccgcaaagcagtagccaaagataactttgagattttggtgacatttatctatactggtgattccactggaacatctcaccaatctagaagctcctatgttccccgagaaattctctggggccataggtttaatgatgtcttggaagttaagaggaagtattacaaagtgaactgcttacagtttgaaggaagtgtggaagtatatgcccccttttgcagtgccaagcaattggactggaaagaccagcagctccacatagaaaaagcaccaccagttcgagaatcctgcacgtcggacaccaaggcgagacgaaggtcatttagtgcagttgccattgtcagcagctgtgaaaaccctgaggagaccaccacttccgccacacatgaatatagggaaacaccttatcagaaagctctcctgactttaaacagaatctctgtagaatcccaaatgtagtcctaaattgcaattatgagggctaccactgaatcattttatctttcagccaatcaagtcgttgtaaacgtggcttttttgaaagtgttatggctatgttttatgatgatgctgggtaagtagagtaagttaaacttggtaaaagataatctaaaaattccatagttctcagttattaaaatttttcttgttcgccaattttgtattaagaatgctattaagcctaattgattaaaatttatcttttttattatcttacatgcttgtatcttcagttggaggtgtagtattcaaaaacggggaatgaaggcaggaaggaggctggaataaataaaaataaaaatagacaagtaagacagcataaataatacatttttaaacatgtcaacattgataatacaatgaagatttaccataaaaagtatcatatctaaccaagatatgcaaaagatgcattcagtaagctgtaacgttgagaaatgtaactgtgaaatcagctcaccagttcaagtcactaggtttgccacttggaccgtcttggtttcagcgagcatagcgagtggctgtaagaaattgtccatgccaccaattccactgctacttgcccaggtagtgatcagtgagagttagaagcaattttttctctaaccgatgaggcagaagaaaagttaacagtatttaaagcagcatttctctcttaacgttcctgggagactccaacaaatggagaccagaaacaaggcaaccacgaccttgctaggttctctgaggaggggactttctatgttcacgtcccaccttcttcgaggacatgaccaagggacaggatcatacagatgaggtgaggggatggttagcagcgataaacattctcagacccttggagagaaaccgttgctagcttgctggtcccgaaagattgcaactttggctgctacagaaaggatagaacctttttggggggagggtggggagggagatatttatttgtgcccagaagcagttatgtatgcttcttgtcttggttactgtacaagatacaaatgactcgagttgtggattgcaagaaactcttttattaaacttggaacaaccatttaaatgaaggattttgtgagatagaattcaattaaagcgatttgaatgcacagtaagtggataatctgagtacaatgaaatttcttaagttttagaacatgagataaagttgtatactctactttcatgttaaaatgttaatcatgattactttaagcccacatccactgagtaaagagtcactttaaactttataaatcaaagagatattaggaacattcagaattatttgtgttttgtttttgttttacattgttgctgcactggcaataagtatgtggcactgtttttatttgtttatgttatttaaatacacacccagacacacacacacacagtttttgctttttctggaaaatctttctttctcttctctctccatgaaaattaaaacacacaagtgaatgaagtaattacatagtccaagattagaaatacaagtaaaatatataggtataggtagatagagtgcctttctgtttcttttcttttcttttttctttttttgttcttccttcctttcttccctcctccccctcatccttccctttctccttcttttcccttttttttttttttttgacctgggagtaataaagttactttttaaatgcacgtatgcaatcttttattcctcttgttttatggataagagatttgttcaggtcaaaagttgcaaaactgttctgaagcttaatattagagacccaagtaagattgtttttagtcttgcttgaggaatgcacactccatttaaaaaattgtgcgctctgtagatttggattttacagcagcaattacttggctaaattagagtactgcaatcttgtaagtagaaaacagccaccatgacaataaacaaaaacacttaaaaatatttttagcttgttttacctacatctagtttcatttcatcttgctttgctttgttgactctgctaccgctgatgtttgccttgtcaatatcagaataggggcatcagtgtcccgtgaaatacattttgttgtgctatgagcctctgtaatcaaatgcttgtactcagaagagagtgtaaaatcagcatttctatgtaacatatatctctaattatctgtgtaattttataacatactttgacaaccccagtgagttacttaataataaagatcttaaaataatgcaaaaa

SEQ ID NO: 168104 - DNA, 589 bp, Homo sapiens
  Payload ID: 13061
  Gene Symbol: KCNJ16
  Gene Name: potassium channel, inwardly rectifying subfamily J, member 16
  ENST ID: ENST00000587698
  CDS Start-End: 397-589
gagatgctcagctacggtgctcttacaagatgaaaaggacatggggttcagatctgcacttcatcatctttcactaaggagtaactcaagatgattttgatgttgcagttttaaatttcactttgacttgagctgggaaatcctttggcctattataccatggatgctaaaaatgactaaaggtggagttagggggaaatgagtttaatgtgaagtagtactcctgtcagttctgtttgtcctgggaagtatacaaggaagaaaagcctccgtggaagagagagcaagcaccaggtgctgaaggttctaactgaaaacccaaaccaagaaatagcaacaagtctagaattcttactactacaaaactcacctggatccctaagggcacagcaaagaatgagctattacggcagcagctatcatattatcaatgcggacgcaaaatacccaggctacccgccagagcacattatagctgagaagagaagagcaagaagacgattacttcacaaagatggcagctgtaatgtctacttcaagcacatttttggagaatggggaagctatgtggttgacatcttcaccactc

SEQ ID NO: 168105 - DNA, 1897 bp, Homo sapiens
  Payload ID: 13061
  Gene Symbol: KCNJ16
  Gene Name: potassium channel, inwardly rectifying subfamily J, member 16
  ENST ID: ENST00000586462
  CDS Start-End: 264-1637
acaatcttttgtactattgatgtgacaatatgtacattaagtggggtgaagaattaagtcattctcttcataatcaggtgataacaaccttctcctttattgagaatcaagcatctcagagcgagcgtgaatggatattagagtttctgcctcagtgttctcaacagcttctactggtaaagcaagttacagctagtaacttggtcagggtttttggatataaactttattgtttagagtgtagaccaacctacatttaaaatatgatacttcagaagtgcagaaaggttctaactgaaaacccaaaccaagaaatagcaacaagtctagaattcttactactacaaaactcacctggatccctaagggcacagcaaagaatgagctattacggcagcagctatcatattatcaatgcggacgcaaaatacccaggctacccgccagagcacattatagctgagaagagaagagcaagaagacgattacttcacaaagatggcagctgtaatgtctacttcaagcacatttttggagaatggggaagctatgtggttgacatcttcaccactcttgtggacaccaagtggcgccatatgtttgtgatattttctttatcttatattctctcgtggttgatatttggctctgtcttttggctcatagcctttcatcatggcgatctattaaatgatccagacatcacaccttgtgttgacaacgtccattctttcacaggggcctttttgttctccctagagacccaaaccaccataggatatggttatcgctgtgttactgaagaatgttctgtggccgtgctcatggtgatcctccagtccatcttaagttgcatcataaatacctttatcattggagctgccttggccaaaatggcaactgctcgaaagagagcccaaaccattcgtttcagctactttgcacttataggtatgagagatgggaagctttgcctcatgtggcgcattggtgattttcggccaaaccacgtggtagaaggaacagttagagcccaacttctccgctatacagaagacagtgaagggaggatgacgatggcatttaaagacctcaaattagtcaacgaccaaatcatcctggtcaccccggtaactattgtccatgaaattgaccatgagagccctctgtatgcccttgaccgcaaagcagtagccaaagataactttgagattttggtgacatttatctatactggtgattccactggaacatctcaccaatctagaagctcctatgttccccgagaaattctctggggccataggtttaatgatgtcttggaagttaagaggaagtattacaaagtgaactgcttacagtttgaaggaagtgtggaagtatatgcccccttttgcagtgccaagcaattggactggaaagaccagcagctccacatagaaaaagcaccaccagttcgagaatcctgcacgtcggacaccaaggcgagacgaaggtcatttagtgcagttgccattgtcagcagctgtgaaaaccctgaggagaccaccacttccgccacacatgaatatagggaaacaccttatcagaaagctctcctgactttaaacagaatctctgtagaatcccaaatgtagtcctaaattgcaattatgagggctaccactgaatcattttatctttcagccaatcaagtcgttgtaaacgtggcttttttgaaagtgttatggctatgttttatgatgatgctgggtaagtagagtaagttaaacttggtaaaagataatctaaaaattccatagttctcagttattaaaatttttcttgttcgccaattttgtattaagaatgctattaagcctaattgattaaaatttatcttttttattatcttaca

SEQ ID NO: 168106 - DNA, 4190 bp, Homo sapiens
  Payload ID: 13061
  Gene Symbol: KCNJ16
  Gene Name: potassium channel, inwardly rectifying subfamily J, member 16
  Uniprot ID: Q9NPI9
  ENST ID: ENST00000615244
  CDS Start-End: 675-1931
agattcccagggaggaactgtaggaacaaaccggtgtcaatggttaacccaggttcttggtgtctggagcttttctttcctttattattaactaaagagcattctctaccattgcccagctgaaagcacctagctcatagattctctgtggggagagtgaataaagaatgggggattgaggcacagagtgttaaaatagtgagacacaggattctaactggcagactggcactttatctcaattcttaactgctgtgttgcctctcactttaaagacatccacattccaccctgggccttgcccgtctggtgagcccaatctctgctggtcagtcacgcagttgaggtcagggaaggagtaactcaagatgattttgatgttgcagttttaaatttcactttgacttgagctgggaaatcctttggcctattataccatggatgctaaaaatgactaaaggtggagttagggggaaatgagtttaatgtgaagtagtactcctgtcagttctgtttgtcctgggaagtatacaaggaagaaaagcctccgtggaagagagagcaagcaccaggtgctgaaggttctaactgaaaacccaaaccaagaaatagcaacaagtctagaattcttactactacaaaactcacctggatccctaagggcacagcaaagaatgagctattacggcagcagctatcatattatcaatgcggacgcaaaatacccaggctacccgccagagcacattatagctgagaagagaagagcaagaagacgattacttcacaaagatggcagctgtaatgtctacttcaagcacatttttggagaatggggaagctatgtggttgacatcttcaccactcttgtggacaccaagtggcgccatatgtttgtgatattttctttatcttatattctctcgtggttgatatttggctctgtcttttggctcatagcctttcatcatggcgatctattaaatgatccagacatcacaccttgtgttgacaacgtccattctttcacaggggcctttttgttctccctagagacccaaaccaccataggatatggttatcgctgtgttactgaagaatgttctgtggccgtgctcatggtgatcctccagtccatcttaagttgcatcataaatacctttatcattggagctgccttggccaaaatggcaactgctcgaaagagagcccaaaccattcgtttcagctactttgcacttataggtatgagagatgggaagctttgcctcatgtggcgcattggtgattttcggccaaaccacgtggtagaaggaacagttagagcccaacttctccgctatacagaagacagtgaagggaggatgacgatggcatttaaagacctcaaattagtcaacgaccaaatcatcctggtcaccccggtaactattgtccatgaaattgaccatgagagccctctgtatgcccttgaccgcaaagcagtagccaaagataactttgagattttggtgacatttatctatactggtgattccactggaacatctcaccaatctagaagctcctatgttccccgagaaattctctggggccataggtttaatgatgtcttggaagttaagaggaagtattacaaagtgaactgcttacagtttgaaggaagtgtggaagtatatgcccccttttgcagtgccaagcaattggactggaaagaccagcagctccacatagaaaaagcaccaccagttcgagaatcctgcacgtcggacaccaaggcgagacgaaggtcatttagtgcagttgccattgtcagcagctgtgaaaaccctgaggagaccaccacttccgccacacatgaatatagggaaacaccttatcagaaagctctcctgactttaaacagaatctctgtagaatcccaaatgtagtcctaaattgcaattatgagggctaccactgaatcattttatctttcagccaatcaagtcgttgtaaacgtggcttttttgaaagtgttatggctatgttttatgatgatgctgggtaagtagagtaagttaaacttggtaaaagataatctaaaaattccatagttctcagttattaaaatttttcttgttcgccaattttgtattaagaatgctattaagcctaattgattaaaatttatcttttttattatcttacatgcttgtatcttcagttggaggtgtagtattcaaaaacggggaatgaaggcaggaaggaggctggaataaataaaaataaaaatagacaagtaagacagcataaataatacatttttaaacatgtcaacattgataatacaatgaagatttaccataaaaagtatcatatctaaccaagatatgcaaaagatgcattcagtaagctgtaacgttgagaaatgtaactgtgaaatcagctcaccagttcaagtcactaggtttgccacttggaccgtcttggtttcagcgagcatagcgagtggctgtaagaaattgtccatgccaccaattccactgctacttgcccaggtagtgatcagtgagagttagaagcaattttttctctaaccgatgaggcagaagaaaagttaacagtatttaaagcagcatttctctcttaacgttcctgggagactccaacaaatggagaccagaaacaaggcaaccacgaccttgctaggttctctgaggaggggactttctatgttcacgtcccaccttcttcgaggacatgaccaagggacaggatcatacagatgaggtgaggggatggttagcagcgataaacattctcagacccttggagagaaaccgttgctagcttgctggtcccgaaagattgcaactttggctgctacagaaaggatagaacctttttggggggagggtggggagggagatatttatttgtgcccagaagcagttatgtatgcttcttgtcttggttactgtacaagatacaaatgactcgagttgtggattgcaagaaactcttttattaaacttggaacaaccatttaaatgaaggattttgtgagatagaattcaattaaagcgatttgaatgcacagtaagtggataatctgagtacaatgaaatttcttaagttttagaacatgagataaagttgtatactctactttcatgttaaaatgttaatcatgattactttaagcccacatccactgagtaaagagtcactttaaactttataaatcaaagagatattaggaacattcagaattatttgtgttttgtttttgttttacattgttgctgcactggcaataagtatgtggcactgtttttatttgtttatgttatttaaatacacacccagacacacacacacacagtttttgctttttctggaaaatctttctttctcttctctctccatgaaaattaaaacacacaagtgaatgaagtaattacatagtccaagattagaaatacaagtaaaatatataggtataggtagatagagtgcctttctgtttcttttcttttcttttttctttttttgttcttccttcctttcttccctcctccccctcatccttccctttctccttcttttcccttttttttttttttttgacctgggagtaataaagttactttttaaatgcacgtatgcaatcttttattcctcttgttttatggataagagatttgttcaggtcaaaagttgcaaaactgttctgaagcttaatattagagacccaagtaagattgtttttagtcttgcttgaggaatgcacactccatttaaaaaattgtgcgctctgtagatttggattttacagcagcaattacttggctaaattagagtactgcaatcttgtaagtagaaaacagccaccatgacaataaacaaaaacacttaaaaatatttttagcttgttttacctacatctagtttcatttcatcttgctttgctttgttgactctgctaccgctgatgtttgccttgtcaatatcagaataggggcatcagtgtcccgtgaaatacattttgttgtgctatgagcctctgtaatcaaatgcttgtactcagaagagagtgtaaaatcagcatttctatgtaacatatatctctaattatctgtgtaattttataacatactttgacaaccccagtgagttacttaataataaagatcttaaaataatgc

SEQ ID NO: 168107 - DNA, 2196 bp, Homo sapiens
  Payload ID: 13062
  Gene Symbol: KCNJ18
  Gene Name: potassium channel, inwardly rectifying subfamily J, member 18
  Uniprot ID: B7U540
  ENST ID: ENST00000567955
  CDS Start-End: 371-1672
agcaggccacagggaggcttgggcacagtcagctttccgtcctgttgggaagcctgtttctgctttcagtgcctacgtggtgtcaggaacgccggtcacagtgaacgcctgcaggacccacactgctgcatcgtctctgtgggacagatactgaagccagggcttggcttaccctcgtgacagtctcccgaggatgttctagtgactggatcctttccagctggtgcctgggaaatggcagccactactaattcagccttgaagacagtaccgtgcctactcagcaccattacgtagaagacagaactcaagaggagccgccctgcctggagctagcctgggggtgagccagggtcccccaacccccgggatgaccgcggccagccgggccaacccctacagcatcgtgtcattggaggaggacgggctgcacctggtcaccatgtcgggcgccaacggcttcggcaacggcaaggtgcacacgcggcgcaggtgccgcaaccgcttcgtcaagaagaatggccagtgcaacattgcgttcgccaacatggacgagaagtcacagcgctacctggctgacatgttcaccacctgtgtggacatccgctggcgctacatgctgctcatcttctcgctggccttccttgcctcctggctgctgttcggcgtcatcttctgggtcatcgcggtggcacacggtgacctggagccggctgagggccacggccgcacaccctgtgtgatgcaggtgcacggcttcatggcggccttcctcttctccatcgagacgcagaccaccatcggctacgggctgcgctgtgtgacggaggagtgcctggtggccgtcttcatggtggtggcccagtccatcgtgggctgcatcatcgactccttcatgattggtgccatcatggccaagatggcaaggcccaagaagcgggcacagacgctgctgttcagccacaacgccgtggtggccctgcgtgacggcaagctctgcctcatgtggcgtgtgggcaacctgcgcaagagccacattgtggaggcccatgtgcgcgcgcagctcatcaagccgcgggtcaccgaggagggcgagtacatcccgctggaccagatcgacatcgatgtgggcttcgacaagggcctggaccgcatctttctggtgtcgcccatcaccatcttgcatgaaattgacgaggccagcccgctcttcggcatcagccggcaggacctggagacggacgactttgagatcgtggtcatcctggaaggcatggtggaggccacagccatgaccacccaggcccgcagctcctacctggccaatgagatcctgtggggtcaccgctttgagcccgtgctcttcgaggagaagaaccagtacaagattgactactcgcacttccacaagacctatgaggtgccctctacgccccgctgcagtgcgaaggatctggtagagaacaagttcctgctgcccagtgccaactccttctgctatgagaacgagctggccttcctgagccgtgacgaggaggatgaggcggacggagaccaggacggccgaagccgggatggcctcagcccccaggccaggcatgactttgacagactccaggctggcggcggggtcctggagcagcggccctacagacgggggtcagagatctgagccaaccttggccgacatgcagcatccacccctggccggggagaggccccgcggtcgctcaggggccctgggtttgagcagaacgggcccagtgccctgggttgcagactcagtagcgttttagtcgttttatgtttctttgcaaaggcctcagaaggttggccggagagggggcagccagagcggcagcccccggcctcagaggctatcacaggctcagggcaaagaagtggcctcctggggggccaggccacgggggccagggcttctgcctgaagatggagctgcagcctgcggggaagcagcccagctcgatggtgggcccagcctctgctgtccaaggctggctagctgcggtgctccttgctggtttttaacttggggagaaacaccgggtttcagctttctcgaccttagcttgggtgagactgtttacaaaaaaaaaaaaaaccatgcaattggagaaaaaaattttaattcatagggggcaaaaagaacaattagaattccatgggtctgccagg

SEQ ID NO: 168108 - DNA, 5392 bp, Homo sapiens
  Payload ID: 13063
  Gene Symbol: KCNJ2
  Gene Name: potassium channel, inwardly rectifying subfamily J, member 2
  Uniprot ID: P63252
  ENST ID: ENST00000243457
  CDS Start-End: 384-1667
gcgcactggagccctggccagcgcgcagccttcccggcgccggcgggctgggtcttgggaattctggtttgctttggctcactcgctttttacaaaccactggatcttacatgcctctgtaccccccacttccactccatgtccccatgctcctgcgccagcaacaggacatgttctctggatgtcagctgagtcattaaagtaactctgcatgtcagtagacagaccttggtagaaccacaaggctcccagagacacccatctctcctcatttttttggtgtgtgtgtcttcaccgaacattcaaaactgtttctccaaagcgttttgcaaaaactcagactgttttccaaagcagaagcactggagtccccagcagaagcgatgggcagtgtgcgaaccaaccgctacagcatcgtctcttcagaagaagacggtatgaagttggccaccatggcagttgcaaatggctttgggaacgggaagagtaaagtccacacccgacaacagtgcaggagccgctttgtgaagaaagatggccactgtaatgttcagttcatcaatgtgggtgagaaggggcaacggtacctcgcagacatcttcaccacgtgtgtggacattcgctggcggtggatgctggttatcttctgcctggctttcgtcctgtcatggctgttttttggctgtgtgttttggttgatagctctgctccatggggacctggatgcatccaaagagggcaaagcttgtgtgtccgaggtcaacagcttcacggctgccttcctcttctccattgagacccagacaaccataggctatggtttcagatgtgtcacggatgaatgcccaattgctgttttcatggtggtgttccagtcaatcgtgggctgcatcatcgatgctttcatcattggcgcagtcatggccaagatggcaaagccaaagaagagaaacgagactcttgtcttcagtcacaatgccgtgattgccatgagagacggcaagctgtgtttgatgtggcgagtgggcaatcttcggaaaagccacttggtggaagctcatgttcgagcacagctcctcaaatccagaattacttctgaaggggagtatatccctctggatcaaatagacatcaatgttgggtttgacagtggaatcgatcgtatatttctggtgtccccaatcactatagtccatgaaatagatgaagacagtcctttatatgatttgagtaaacaggacattgacaacgcagactttgaaatcgtggtcatactggaaggcatggtggaagccactgccatgacgacacagtgccgtagctcttatctagcaaatgaaatcctgtggggccaccgctatgagcctgtgctctttgaagagaagcactactacaaagtggactattccaggttccacaaaacttacgaagtccccaacactcccctttgtagtgccagagacttagcagaaaagaaatatatcctctcaaatgcaaattcattttgctatgaaaatgaagttgccctcacaagcaaagaggaagacgacagtgaaaatggagttccagaaagcactagtacggacacgccccctgacatagaccttcacaaccaggcaagtgtacctctagagcccaggcccttacggcgagagtcggagatatgactgactgattccttctctggaatagttactttacaacacggtctgttggtcagaggcccaaaacagttatacagatgacggtactggtcaagatgggtcaagcaagcggccacaagggactgaggcaagcacaatggtttcaaagaaagactgtaagctccatgattagcataaagcactaaccatgtctccatgtgacccgatggcacatagatgttgtagaataagttatgggtttttatgttttgttttgtgtttttccaaaacttgaacttgcaggcaagccttggttgggtatttgatttatccagaatgcttctctttagggaacaaggatgtttttaatggcataacaaaggcaagactctgccttaatttttgaaaagctgctaactacatgaacacaaatgtgtatttttgttgcagtgtagttttccttttgtgtaattttaaagtcagtgttgaattttattgaaagctcatgatgcgcttcaaagtggcaagtatttggctattaactgccaaaacaagagcctgattttttgaggccagtaattcgtttgctagaattgattttttttctctctctctttgttacataagggcattatgtaacactagccgaatggtagcctctgggttgttgtttttttcttttcctccatgatgttaatgggttatctcaaattttaagttaaactacctaaaataaataccaaagataatgcatatttttgcacagtggagcttacacttaaaagaaaacaaagccccatgggctgccttgaaatcaagagacaataactttgaacctcagcaagaccttgaaccgccggttcattttgcaccttattcagaaaatagagcatcatactcaccgagtctagtcagtgtagtgcttttaaaaattttgtcctttcatgtaacttttttattttaagaggaagaagaagaaaggggcacacacacacaataccgacgtctatcctttcctgctaggcagtgctggccaggctcatgtgtagtgtgcgagatggtgatgtactcttatatttttctgggcttttccttttgcacattccaaaattcatttcataagacaagatcttcataggacctccttggcatcctggcattctcaaaactgagccatccagcatgaaagataaatgggtttaaacccttgctgctgaatttattgcctggactgtcaggacatcaccagcccaccttcaccttagggaagatgccacacctggcctccacacttgctcttctgatcagtctgtctggattgagtcctacagtgtcagatagggcggcaaatgccaaagcagggaaacagggaggtgtggacaagccagtttgatgcagcacttcagatcaagtgcttaggaaggagaggaaacttgccttttttatggcagaggatagtaatgaaaatgtctcagtattttagggtcaatgagagccataaaaatataacataatcacaagtaaaggagataatggtctaaaacagctatttcccttttctgtgtgcatacttatgactgaatgtgagctaagcattttctcctgtggagccctagagcaggttactaaggaaggacacattgttttccagaagcctcccctgcctggctgactgccttgctagaaacataattttttttttctcactgaagctcaataatggaactctttttttttttttttttaatttaaagttccctatttgtgaattctgggattactgacttttctttttaattggagtctcaaaatcaactctcttatggtattatatctctgtatgccattaaaaaacagcttgttctagaatcatgtattttgtaaactgatgtttgtgatggtctctggttcttgaacagccatatctgaatgccgtgcctgcaaaactatgacaatttttgctgttttcagccttcagatttgatggcttgggaaactgaggtgttattttcaatgaaacaaagaaagagatgttaagcaagtggttgttttagatccaaatgtaaaggcaggtttgggaaggtgtttaaagagttggaggaattggggattgagttgtaaagaaaacttacagaagaggcaacaatttggttcttgacagtgagaggatattgagggcttcagctgctgctattatgatgttttgcaaaggaaaataatcaaaccaaagagtattcagtgatatgtaaattaaatgaagatacagtggagaatgggggtgaccacaaaagaggctccccctaaacacacagtgctgccacttaaaaagacttgagaaatttgaaagggggtgggtatggggggggcaagaaagagggagggaaatctttcaacttatttctgaaaaagagaaaaaaatataaaatttctggtgcacaggtttgttttttcaagaaaattttgcagaagctatgtttttaaagtgtacattttataaagtttatcagatattttcatatttaaagccaaatgtaaatagaggtctgtaaagaaaaataattgccatagaaagtataatttcagtgcagtaatttctgagagctagtacctatatgctaccggttagcatggttttagcaaatatataccagccttataaggttcgtattgctatgttcttctgttatttatttcagcatggactgttcatttgaaacctttttctagttattagcgttttaacagttacaagctttaaatggcaattttttttttttttttttttttttttttttttttgtcaagagccaagacacaggtaatgcacgacattgattgctgcattttaccttcaaaatatttgtccttattgactgggtctccttaattaatgtacacatgtcattagaatgcagacggaggggactcaccatgaatatctggggttgattcccagatgtgtgttgcttctctattgcaagcagattccctgttggatttacttcggatttattcccttttaaagaatttttgcccatatctggaagggcactatatttttgggaggagccatagattcctggttatcctatttttaaacaaaatgtagacaaagtgaactctattttgattattgagaaaggagtagttttctatccctctaagagtatacttgaatcagacattttaaggatgtcactatggcactgttgtcatttccaaattcctagaaaagtttgttttactttgtttttattctgttaatgcattctttcttctctttacttcctttcttaccagtacactcctatctcaactctgtttatttgatgagttctgtcccgtaaatcatatttcccttacaattaataaatgtcacttcatattttataataaaccactcagtaaaagcaaaagcttgtcctgagaagtagagtgagttctttttcactctgtgtctaataatgttaaggtgggaaaaaaaaaagtgtggcatagctacctgcccatccccaaccctcagcaaagtagaatctcttttctggtaattttgggtttccgctctgggctctggcaagttgaacaatcctagccattgacaatcgtgatagttattattttcccatttgctgtctttttgtatctaaagtcttcctattgtactgcacaaaccatggattgtacatatttttatatattatgtcttattttattatttctaaataaaaaaattaaaaattgaaaacaaa

SEQ ID NO: 168109 - DNA, 1685 bp, Homo sapiens
  Payload ID: 13063
  Gene Symbol: KCNJ2
  Gene Name: potassium channel, inwardly rectifying subfamily J, member 2
  Uniprot ID: P63252
  ENST ID: ENST00000535240
  CDS Start-End: 402-1685
tgggaggcgctgaagcgagggcagatctgagtgtctgtaggagttgctattccaaaaaaaatcattactctctaattgttctgattttagatcagcaaagcgtgccgggcggtggtggagagactgagggcggacaaggcgagagggaacgagccgtccacccttcggagaagcctaggcgccttgacatgttctctggatgtcagctgagtcattaaagtaactctgcatgtcagtagacagaccttggtagaaccacaaggctcccagagacacccatctctcctcatttttttggtgtgtgtgtcttcaccgaacattcaaaactgtttctccaaagcgttttgcaaaaactcagactgttttccaaagcagaagcactggagtccccagcagaagcgatgggcagtgtgcgaaccaaccgctacagcatcgtctcttcagaagaagacggtatgaagttggccaccatggcagttgcaaatggctttgggaacgggaagagtaaagtccacacccgacaacagtgcaggagccgctttgtgaagaaagatggccactgtaatgttcagttcatcaatgtgggtgagaaggggcaacggtacctcgcagacatcttcaccacgtgtgtggacattcgctggcggtggatgctggttatcttctgcctggctttcgtcctgtcatggctgttttttggctgtgtgttttggttgatagctctgctccatggggacctggatgcatccaaagagggcaaagcttgtgtgtccgaggtcaacagcttcacggctgccttcctcttctccattgagacccagacaaccataggctatggtttcagatgtgtcacggatgaatgcccaattgctgttttcatggtggtgttccagtcaatcgtgggctgcatcatcgatgctttcatcattggcgcagtcatggccaagatggcaaagccaaagaagagaaacgagactcttgtcttcagtcacaatgccgtgattgccatgagagacggcaagctgtgtttgatgtggcgagtgggcaatcttcggaaaagccacttggtggaagctcatgttcgagcacagctcctcaaatccagaattacttctgaaggggagtatatccctctggatcaaatagacatcaatgttgggtttgacagtggaatcgatcgtatatttctggtgtccccaatcactatagtccatgaaatagatgaagacagtcctttatatgatttgagtaaacaggacattgacaacgcagactttgaaatcgtggtcatactggaaggcatggtggaagccactgccatgacgacacagtgccgtagctcttatctagcaaatgaaatcctgtggggccaccgctatgagcctgtgctctttgaagagaagcactactacaaagtggactattccaggttccacaaaacttacgaagtccccaacactcccctttgtagtgccagagacttagcagaaaagaaatatatcctctcaaatgcaaattcattttgctatgaaaatgaagttgccctcacaagcaaagaggaagacgacagtgaaaatggagttccagaaagcactagtacggacacgccccctgacatagaccttcacaaccaggcaagtgtacctctagagcccaggcccttacggcgagagtcggagatatga

SEQ ID NO: 168110 - DNA, 5021 bp, Homo sapiens
  Payload ID: 13064
  Gene Symbol: KCNJ3
  Gene Name: potassium channel, inwardly rectifying subfamily J, member 3
  Uniprot ID: P48549
  ENST ID: ENST00000295101
  CDS Start-End: 478-1983
caggcaggtaaaggcagcttcttaggcagccagcgagttggcaggtgggttgggactcgcttgtcaactcattaattttaagcagtcagtttgggggtactgcaggataatcaggagggccgtggggagtcaagaggtgacccgggatgccggtggtggggaaagaaaagaggagcctctggaagcttggaggcaaaattgcgcttgggttcctgttccttgcatccctcctggcttgagtgcgggagaacactttttaaagactcaccttggaaagaaggcctccgtcccaggggagaaggagaggcgtctgcagggggcagagaccgcagctacctgccgggtgcgccccccacccaggagcgctcgcttcgccccctttcctcccccgcccccacctccttattggtgctagtttgcagcgcccagctcctgcgccttcgcttcgcgtttgaatctggctcgccccttcgtattatgtctgcactccgaaggaaatttggggacgattatcaggtagtgaccacatcgtccagcggctcgggcttgcagccccaggggccaggccaggaccctcagcagcagcttgtgcccaagaagaagcggcagcggttcgtggacaagaacggccggtgcaatgtacagcacggcaacctgggcagcgagacaagccgctacctctcggacctcttcaccacgctggtggacctcaagtggcgctggaacctcttcatcttcattctcacctacaccgtggcctggcttttcatggcgtccatgtggtgggtgatcgcctacactcggggcgacctgaacaaagcccacgtcggtaactacacgccttgcgtggccaatgtctataacttcccttctgccttcctcttcttcatcgagacggaggccaccatcggctatggctaccgatacatcacagacaagtgccccgagggcatcatcctcttcctcttccagtccatcctgggctccatcgtggacgccttcctcatcggctgcatgttcatcaagatgtcccagcccaagaagcgcgccgagaccctcatgttcagcgagcacgcggtgatctccatgagggacggaaaactcacgcttatgttccgggtgggcaacctgcgcaacagccacatggtctccgcgcagattcgctgcaagctgctcaaatctcggcagacacctgagggtgagttccttccccttgaccaacttgaactggatgtaggttttagtacaggggcagatcaactttttcttgtgtcccccctcacaatttgccacgtgatcgatgccaaaagccccttttatgacctatcccagcgaagcatgcaaactgaacagttcgagattgtcgtcatcctagaaggcattgtggaaacaactgggatgacttgtcaagctcgaacatcatatactgaagatgaagttctttggggtcatcgtttttttcctgtaatttccttagaagagggattctttaaagttgattactcccagttccatgcaacatttgaagtccccaccccaccttacagtgtgaaagagcaggaggaaatgcttctcatgtcgtcccctttaatagcaccagccataactaacagcaaagaaagacataattctgtggaatgcttagatggactagatgatattactacaaaactaccatctaagctgcagaaaattactggaagagaagactttcccaaaaaactcttgaggatgagttctacaacttcagaaaaagcctacagcttgggagacttgcccatgaaacttcaacgaataagttcagttccgggcaactcagaagaaaaactggtatctaaaaccaccaagatgttatctgatcccatgagccagtctgtggctgatttgccaccaaagcttcaaaagatggctggaggagcagctaggatggaagggaaccttccagccaaattaagaaaaatgaactctgatcgcttcacataacaaagcactcccttaggcattatttaatgtttgatttagtaatagtccaatatttggcgatgaggtaattctccctaaggaatctgaaagtatattttcctcccagttctacaagcatatttgagaacccttcctttcccaagtattgcgaatgtgcagaaagcaacagttacggagggaggacatcataaggaagttattaacgggcatgtattatcacatcaagcatgcaataatgtgcaaattttgcatttagttttatggcatgatttatatatggcatatttatattgtatattctggaaaaaaaatatatatatatatttaaaggggagatactctccctgacatttctaacatatgtattaagccaaacatgagtgaatagctttcagggcgataaaactaaatatatgtctgtgtgtgtgtgtgtatgtatacacacatatacatatatatatacacatacatacacatacatacatacatacatatatatctgataaaattgtgatgttttgttcaaagttgtagttcttgtgcatgtttactttattagagtaggaaggctactggcattaattattaataccaaatattttagccttaaatttttgtcattttaaaatctgatttaatgttttctgctgtttaaggtcttgggaggctttcaattgtattttatatgagagaatcacacaagtttgtgctatctatggccctgcaaaaatataaccattacatgtttaaattgtaaattttagagcataccagtactcagtatagcattgaacatttcttatgatttttaaaagttgctagtactggggagaaataattgttgattaatttgagaattattcctttcctagactaattaaaatctggaaatctgttttgtatatgatctaatacaaagatgagctctgaacaaacactgaatcatgttaatagacagtagccaagttatattgaatatatcagaatctgtgtgaagttacacaattaattgtccctgtttcaaactgagtaaattggaaacattttctttctttttctggaaattttgtccattttaaaaaccaatcattttaagaagacatgacaatgcaatgaaacagatgataaatatttatgcttaaaatatgtatgtctaattgagtctcttttttattctgttttcttgtttatggcatttgttgtaacaggatagactttttcctcacctaggaaacctatcccatgcctgtcacttatagttcaggaggaagtttttgcacagaccagagagaaattaaaattagatgataaattgaagatatcttacacacagttttttggtgaacactgattttattggtgtcttagatccctagtctacccaaataattttaacagtactgttttttctaatcctgaagtctgatatttatgactcattagcaggaatcaaaactagtgatcagtagaacactttcaaaataaaaatttggaatgcagacttttatgaaaatttaaaagtgctccttaacagaatatcatgggttttcctataaaacttctttaagtattgtaattccagtctgccccaactttaaaaaaaattcttattaatatgtcagtcattaattgctagtttgggctctcattatttcctgttttttaacaattttgtgataattttattattggcaaattaatacatcaacacttaaatcattgactataataataccttctggctacctctgtatcaaccaaattctgtaggtgcaaacatataccagggaattcttactggcaaaatgatcaatctggagtgtgcatccactgtgaatggagcaaattgccctatacccattgataacctagctttcttagtttgtagatgtaggaaacaaaatagtgacagagagagaagggggtccacagggcatggtatatttatcagcagtggaaaaaaagtgcatagatcatttagtccaagaacttaaaactaaatagagccataatttactttggagagtcattttaatttgtctttggtaccaaggagaagacggaaccaaaaacaaactctccaagtatattcacacattcaacaaaatttttgcatgccttctatgtcgtaggcatttttagttcctggggatttggacatggctaagtcagagaaggccattgctcaccatgaacactgtataccagaaggagagtggggaggagacaaaaaacaaataagaccacttcagacaatcaaagtatcagttaagagaatgaaaacaggcctgactcagtggctcacgcctgtaatcccagtactttgggaggcggaggttgggggatcacctgaggtcaggagatcgagaccagcctggacaacatggtgaaaacccgtctctactaaaaatacaaaaattaactgggcatggtggcaggcacctgtaatcccagctactggggaagctgaggcaggagaatcgtttgaacctgggaggcggaggttgcagtgagccaagattctgccactgcactccagcctgggtgacagtgcgagactccatctcaacatcaaaaaaaaaaaaaaaaaaaaaaaaaaaaaaaaaaaaaaaaagaataaaaacagggtaacataatgcaaagtaactgtgtggaataaaaattgattattttagaaaatgtgactggcttaggacggggataatatgtgaacagaaatctatctcatgagaaagtgctactgttgtcaaaattaccttatctgagtgaatggtattttttttatcttttccacacatgcgtgggaaaggtatgatttctgcatgtaattgcagtttaacccttatttctaggttgatcataggtcccagtttacccaggaaaattccagtttatacctgttgtacctgtgtaattattggtagcactccctttcactcttacaatgtcttggtttggatgatatatggtgaagtttttgttgaaactaaattatgaagtctgatatatttggataaaaataaagaattgcttttctt

SEQ ID NO: 168111 - DNA, 4523 bp, Homo sapiens
  Payload ID: 13064
  Gene Symbol: KCNJ3
  Gene Name: potassium channel, inwardly rectifying subfamily J, member 3
  Uniprot ID: P48549
  ENST ID: ENST00000544049
  CDS Start-End: 196-903
ctccgtcccaggggagaaggagaggcgtctgcagggggcagagaccgcagctacctgccgggtgcgccccccacccaggagcgctcgcttcgccccctttcctcccccgcccccacctccttattggtgctagtttgcagcgcccagctcctgcgccttcgcttcgcgtttgaatctggctcgccccttcgtattatgtctgcactccgaaggaaatttggggacgattatcaggtagtgaccacatcgtccagcggctcgggcttgcagccccaggggccaggccaggaccctcagcagcagcttgtgcccaagaagaagcggcagcggttcgtggacaagaacggccggtgcaatgtacagcacggcaacctgggcagcgagacaagccgctacctctcggacctcttcaccacgctggtggacctcaagtggcgctggaacctcttcatcttcattctcacctacaccgtggcctggcttttcatggcgtccatgtggtgggtgatcgcctacactcggggcgacctgaacaaagcccacgtcggtaactacacgccttgcgtggccaatgtctataacttcccttctgccttcctcttcttcatcgagacggaggccaccatcggctatggctaccgatacatcacagacaagtgccccgagggcatcatcctcttcctcttccagtccatcctgggctccatcgtggacgccttcctcatcggctgcatgttcatcaagatgtcccagcccaagaagcgcgccgagaccctcatgttcagcgagcacgcggtgatctccatgagggacggaaaactcacgcttatgttccgggtgggcaacctgcgcaacagccacatggtctccgcgcagattcgctgcaagctgctcaaaggatgacttgtcaagctcgaacatcatatactgaagatgaagttctttggggtcatcgtttttttcctgtaatttccttagaagagggattctttaaagttgattactcccagttccatgcaacatttgaagtccccaccccaccttacagtgtgaaagagcaggaggaaatgcttctcatgtcgtcccctttaatagcaccagccataactaacagcaaagaaagacataattctgtggaatgcttagatggactagatgatattactacaaaactaccatctaagctgcagaaaattactggaagagaagactttcccaaaaaactcttgaggatgagttctacaacttcagaaaaagcctacagcttgggagacttgcccatgaaacttcaacgaataagttcagttccgggcaactcagaagaaaaactggtatctaaaaccaccaagatgttatctgatcccatgagccagtctgtggctgatttgccaccaaagcttcaaaagatggctggaggagcagctaggatggaagggaaccttccagccaaattaagaaaaatgaactctgatcgcttcacataacaaagcactcccttaggcattatttaatgtttgatttagtaatagtccaatatttggcgatgaggtaattctccctaaggaatctgaaagtatattttcctcccagttctacaagcatatttgagaacccttcctttcccaagtattgcgaatgtgcagaaagcaacagttacggagggaggacatcataaggaagttattaacgggcatgtattatcacatcaagcatgcaataatgtgcaaattttgcatttagttttatggcatgatttatatatggcatatttatattgtatattctggaaaaaaaatatatatatatatttaaaggggagatactctccctgacatttctaacatatgtattaagccaaacatgagtgaatagctttcagggcgataaaactaaatatatgtctgtgtgtgtgtgtgtatgtatacacacatatacatatatatatacacatacatacacatacatacatacatacatatatatctgataaaattgtgatgttttgttcaaagttgtagttcttgtgcatgtttactttattagagtaggaaggctactggcattaattattaataccaaatattttagccttaaatttttgtcattttaaaatctgatttaatgttttctgctgtttaaggtcttgggaggctttcaattgtattttatatgagagaatcacacaagtttgtgctatctatggccctgcaaaaatataaccattacatgtttaaattgtaaattttagagcataccagtactcagtatagcattgaacatttcttatgatttttaaaagttgctagtactggggagaaataattgttgattaatttgagaattattcctttcctagactaattaaaatctggaaatctgttttgtatatgatctaatacaaagatgagctctgaacaaacactgaatcatgttaatagacagtagccaagttatattgaatatatcagaatctgtgtgaagttacacaattaattgtccctgtttcaaactgagtaaattggaaacattttctttctttttctggaaattttgtccattttaaaaaccaatcattttaagaagacatgacaatgcaatgaaacagatgataaatatttatgcttaaaatatgtatgtctaattgagtctcttttttattctgttttcttgtttatggcatttgttgtaacaggatagactttttcctcacctaggaaacctatcccatgcctgtcacttatagttcaggaggaagtttttgcacagaccagagagaaattaaaattagatgataaattgaagatatcttacacacagttttttggtgaacactgattttattggtgtcttagatccctagtctacccaaataattttaacagtactgttttttctaatcctgaagtctgatatttatgactcattagcaggaatcaaaactagtgatcagtagaacactttcaaaataaaaatttggaatgcagacttttatgaaaatttaaaagtgctccttaacagaatatcatgggttttcctataaaacttctttaagtattgtaattccagtctgccccaactttaaaaaaaattcttattaatatgtcagtcattaattgctagtttgggctctcattatttcctgttttttaacaattttgtgataattttattattggcaaattaatacatcaacacttaaatcattgactataataataccttctggctacctctgtatcaaccaaattctgtaggtgcaaacatataccagggaattcttactggcaaaatgatcaatctggagtgtgcatccactgtgaatggagcaaattgccctatacccattgataacctagctttcttagtttgtagatgtaggaaacaaaatagtgacagagagagaagggggtccacagggcatggtatatttatcagcagtggaaaaaaagtgcatagatcatttagtccaagaacttaaaactaaatagagccataatttactttggagagtcattttaatttgtctttggtaccaaggagaagacggaaccaaaaacaaactctccaagtatattcacacattcaacaaaatttttgcatgccttctatgtcgtaggcatttttagttcctggggatttggacatggctaagtcagagaaggccattgctcaccatgaacactgtataccagaaggagagtggggaggagacaaaaaacaaataagaccacttcagacaatcaaagtatcagttaagagaatgaaaacaggcctgactcagtggctcacgcctgtaatcccagtactttgggaggcggaggttgggggatcacctgaggtcaggagatcgagaccagcctggacaacatggtgaaaacccgtctctactaaaaatacaaaaattaactgggcatggtggcaggcacctgtaatcccagctactggggaagctgaggcaggagaatcgtttgaacctgggaggcggaggttgcagtgagccaagattctgccactgcactccagcctgggtgacagtgcgagactccatctcaacatcaaaaaaaaaaaaaaaaaaaaaaaaaaaaaaaaaaaaaaaaagaataaaaacagggtaacataatgcaaagtaactgtgtggaataaaaattgattattttagaaaatgtgactggcttaggacggggataatatgtgaacagaaatctatctcatgagaaagtgctactgttgtcaaaattaccttatctgagtgaatggtattttttttatcttttccacacatgcgtgggaaaggtatgatttctgcatgtaattgcagtttaacccttatttctaggttgatcataggtcccagtttacccaggaaaattccagtttatacctgttgtacctgtgtaattattggtagcactccctttcactcttacaatgtcttggtttggatgatatatggtgaagtttttgttgaaactaaattatgaagtctgatatatttggataaaaataaagaattgcttttcttc

SEQ ID NO: 168112 - DNA, 2065 bp, Homo sapiens
  Payload ID: 13065
  Gene Symbol: KCNJ4
  Gene Name: potassium channel, inwardly rectifying subfamily J, member 4
  Uniprot ID: P48050
  ENST ID: ENST00000303592
  CDS Start-End: 260-1597
gggagcggcgcgggacggccgggacgcgcggagaccccaagacccacgcgcagaccgagcggcagccggggaggggagcgcgggccggccggccgagttcgcgggcagggggcgccgggactcccctttccgcgcccgggacgccgcccgccggatcgcgccttgggatgtagcgcccgctcgccgcctcccggactctcgtcggaccctccgcccagcggccctgcgtcttcccaggtgaccacgccggcttcaggacatgcacggacacagccgcaacggccaggcccacgtgccccggcggaagcgccgcaaccgcttcgtcaagaagaacggccaatgcaacgtgtacttcgccaacctgagcaacaagtcgcagcgctacatggcggacatcttcaccacctgcgtggacacgcgctggcgctacatgctcatgatcttctccgcggccttccttgtctcctggctctttttcggcctcctcttctggtgtatcgccttcttccacggtgacctggaggccagcccaggggtgcctgcggcggggggcccggcggcgggtggtggcggagcagccccggtggcccccaagccctgcatcatgcacgtgaacggcttcctgggtgccttcctgttctcggtggagacgcagacgaccatcggctatgggttccggtgcgtgacagaggagtgcccgctggcagtcatcgctgtggtggtccagtccatcgtgggctgcgtcatcgactccttcatgattggcaccatcatggccaagatggcgcggcccaagaagcgggcgcagacgttgctgttcagccaccacgcggtcatttcggtgcgcgacggcaagctctgcctcatgtggcgcgtgggcaacctgcgcaagagccacattgtggaggcccacgtgcgggcccagctcatcaagccctacatgacccaggagggcgagtacctgcccctggaccagcgggacctcaacgtgggctatgacatcggcctggaccgcatcttcctggtgtcgcccatcatcattgtccacgagatcgacgaggacagcccgctttatggcatgggcaaggaggagctggagtcggaggactttgagatcgtggtcatcctggagggcatggtggaggccacggccatgaccacccaggcccgcagctcctacctggccagcgagatcctgtggggccaccgctttgagcctgtggtcttcgaggagaagagccactacaaggtggactactcacgttttcacaagacctacgaggtggccggcacgccctgctgctcggcccgggagctgcaggagagtaagatcaccgtgctgcccgccccaccgccccctcccagtgccttctgctacgagaacgagctggcccttatgagccaggaggaagaggagatggaggaggaggcagctgcggcggccgcggtggccgcaggcctgggcctggaggcgggttccaaggaggaggcgggcatcatccggatgctggagttcggcagccacctggacctggagcgcatgcaggcttccctcccgctggacaacatctcctaccgcagggagtctgccatctgacctccaggcccggccctcaccactgcccacaagagcctctgccgggggtgggatgccaggacaccccctcccacactcaggacagagccaaccctggctccgtggaccttctggaggaaggtgggggtttcaaagactgggggaccccttcctcctgactccagcacccaggcctgggaagagctcggccccgatcagcctgagttccgccagcgcctacttctggtggctctaggtccccggatccaccacccttcccccactgactcttcaaggacgtgccctctttgctctcagaaccttggggaaggtggctggactgctgggcgggggacatctcggggtttcagggtgggcagggggttagtttggggaggggggggtgcgtttcttttgcatgactgtggcctgttgctcatgactttcttttgtaaatatctataaatggagacagatggagacaccaaa

SEQ ID NO: 168113 - DNA, 1734 bp, Homo sapiens
  Payload ID: 13066
  Gene Symbol: KCNJ5
  Gene Name: potassium channel, inwardly rectifying subfamily J, member 5
  Uniprot ID: P48544
  ENST ID: ENST00000338350
  CDS Start-End: 353-1612
gagagagattgttccagctgctctcgctagagaaagggagtgacccaaggggccgcgagtgaagggacaggatggcttaggtacctctgcccacaggaccccacaacagggagaggttccagctacagctcctccgtggggtcatggcaggggctggggagtcccctcaaaagccctgagcccccctgcaccgccgctaagggacaccccagaagttagcatcagtgggactcggaagctccgatctcaacaaggccagaagctcatagaactttctgaagggagcaggtcatcagccttagcatgagccccggagcatcagtgtctgctggccgttgtgtgcatcccagctatggctggcgattctaggaatgccatgaaccaggacatggagattggagtcactccctgggaccccaagaagattccaaaacaggcccgcgattatgtccccattgccacagaccgtacgcgcctgctggccgagggcaagaagccacgccagcgctacatggagaagagtggcaagtgcaacgtgcaccacggcaacgtccaggagacctaccggtacctgagtgacctcttcaccaccctggtggacctcaagtggcgcttcaacttgctcgtcttcaccatggtttacactgtcacctggctgttcttcggcttcatttggtggctcattgcttatatccggggtgacctggaccatgttggcgaccaagagtggattccttgtgttgaaaacctcagtggcttcgtgtccgctttcctgttctccattgagaccgaaacaaccattgggtatggcttccgagtcatcacagagaagtgtccagaggggattatactcctcttggtccaggccatcctgggctccatcgtcaatgccttcatggtggggtgcatgtttgtcaagatcagccagcccaagaagagagcggagaccctcatgttttccaacaacgcagtcatctccatgcgggacgagaagctgtgcctcatgttccgggtgggcgacctccgcaactcccacatcgtggaggcctccatccgggccaagctcatcaagtcccggcagaccaaagagggggagttcatccccctgaaccagacagacatcaacgtgggctttgacacgggcgacgaccgcctcttccttgtgtctcctctgatcatctcccatgagatcaaccagaagagccctttctgggagatgtctcaggctcagctgcatcaggaagagtttgaagttgtggtcattctagaagggatggtggaagccacaggcatgacctgccaagcccggagctcctacatggatacagaggtgctctggggccaccgattcacaccagtcctcaccttggaaaagggcttctatgaggtggactacaacaccttccatgatacctatgagaccaacacacccagctgctgtgccaaggagctggcagaaatgaagagggaaggccggctcctccagtacctccccagccccccactgctggggggctgtgctgaggcagggctggatgcagaggctgagcagaatgaagaagatgagcccaaggggctgggtgggtccagggaggccaggggctcggtgtgaggggtgcagcctccctaagacctcctgtcactggcttcagtgaacacagacactgcagagcctgggagcaggggaggggaatagttgagtgtgctgtttgggggctcaggagccatcaaggc

SEQ ID NO: 168114 - DNA, 5940 bp, Homo sapiens
  Payload ID: 13066
  Gene Symbol: KCNJ5
  Gene Name: potassium channel, inwardly rectifying subfamily J, member 5
  Uniprot ID: P48544
  ENST ID: ENST00000529694
  CDS Start-End: 377-1636
atttgtaccagggacggagggagagaggagagggaggaggggacacacacacacacacacacacacacacacacacacacacacacagagagagagagagagagagagagagagagagagattgttccagctgctctcgctagagaaagggagtgacccaaggggccgcgagtgaagggacaggatggcttaggtacctctgcccacaggaccccacaacagggagaggttccagctacagctcctccgtggggtcatggcaggggctggggagtcccctcaaaagccctgagcccccctgcaccgccgctaagggacaccccagaagttagcatcagtgggactcggaagctccgatctcaacaacatcccagctatggctggcgattctaggaatgccatgaaccaggacatggagattggagtcactccctgggaccccaagaagattccaaaacaggcccgcgattatgtccccattgccacagaccgtacgcgcctgctggccgagggcaagaagccacgccagcgctacatggagaagagtggcaagtgcaacgtgcaccacggcaacgtccaggagacctaccggtacctgagtgacctcttcaccaccctggtggacctcaagtggcgcttcaacttgctcgtcttcaccatggtttacactgtcacctggctgttcttcggcttcatttggtggctcattgcttatatccggggtgacctggaccatgttggcgaccaagagtggattccttgtgttgaaaacctcagtggcttcgtgtccgctttcctgttctccattgagaccgaaacaaccattgggtatggcttccgagtcatcacagagaagtgtccagaggggattatactcctcttggtccaggccatcctgggctccatcgtcaatgccttcatggtggggtgcatgtttgtcaagatcagccagcccaagaagagagcggagaccctcatgttttccaacaacgcagtcatctccatgcgggacgagaagctgtgcctcatgttccgggtgggcgacctccgcaactcccacatcgtggaggcctccatccgggccaagctcatcaagtcccggcagaccaaagagggggagttcatccccctgaaccagacagacatcaacgtgggctttgacacgggcgacgaccgcctcttccttgtgtctcctctgatcatctcccatgagatcaaccagaagagccctttctgggagatgtctcaggctcagctgcatcaggaagagtttgaagttgtggtcattctagaagggatggtggaagccacaggcatgacctgccaagcccggagctcctacatggatacagaggtgctctggggccaccgattcacaccagtcctcaccttggaaaagggcttctatgaggtggactacaacaccttccatgatacctatgagaccaacacacccagctgctgtgccaaggagctggcagaaatgaagagggaaggccggctcctccagtacctccccagccccccactgctggggggctgtgctgaggcagggctggatgcagaggctgagcagaatgaagaagatgagcccaaggggctgggtgggtccagggaggccaggggctcggtgtgaggggtgcagcctccctaagacctcctgtcactggcttcagtgaacacagacactgcagagcctgggagcaggggaggggaatagttgagtgtgctgtttgggggctcaggagccatcaaggctgtggggaggaaccataaacccagccctcacagctcccagcacagggcctccctgagccagtggcatcctgcctgggccccccatggcagtgctgcctcttgtaggtgctggctaagggccaggccaggatgagtttccccatggtgaatgttaccggatggcatctgttctctccatgccctgggtcacttccttttttgggtctcacagacccctccaggggctgacacctagagagaaccatcaccttgtccctcattccttccaccctgaggcttgctgtggactcagagaggagacttacctgatgagagctcaaacctctagtctgggatgagctcacagagccctcatgagttaagatccatccatatcacataggcaattccttttaaatcagataccaacgacccattactgagaggtacagagcgtacagcccttggtgttctctgctgttatctgccaaatgtgtgtgtttttcctctgctgtgttctgtgtgtccagtgtagcctattggagaatcggtctcattagagtgactcttagaaggtggcctgggactagacagcccctctgagcacatgcatagtggcatcagcagcttcctggcctactcccaatcacactgtgccctgcacctcccaccaagggggaaccccagcagctggggcttttcgagtgctttttggcccaagaatctcagagtgcttctaatcatcacagtagtttttgtgttttgttttgttttgttttgttttgttttgttttgttttgtttttttcacaatctcagccagcctgcggtgtgacctggggagaaagttgagtgtcaggggacatgatgagccagttggccctgaaacaggaatggggcaaagagaaaggagagccaggagcatttaaaaatcagcatctgggccaggcaagatggctcacgcctgtgatcccagcattttgggaggccgaggcgggtggatcatgaggtcaggagatcgagaccatcctggctaacacggtgaaaccccgtctctactgaaaatacaaaaaattagccaggcatggtggcaggtgcctgtagtcccagctactcgggaagctgaggcagaagaatggcatgaacctgggaggtggaggttgcagtgagccaagatcatgccactgcactccagcctgggcgacagagcgagactccatctcaaaaaaaaaaaaaacatcagcatctgccccagttgtggccaagacactctgacctcagggctcagcaccttcaccatcaagttcagcctgagccaagctcccagcccactgctgaaaagcccctgggcctccctccacaggcagagttacaaccgggagggctgggcagggagggcagggagattgcctggggaaggcaaagggaatggctgcccctcccaggctggaaacaagagggcaagcggggtcagcaggagaattcgggggcagggtgagtgttaagaaaaaaagagtagagaagagcctgaaaatcagcaacttccagggcttttctgatctggaggcccaagagcaagggtggaggggggcagattgtcaggtcccgaaatgtgtgttgacacacacgggcttcgggttagctggcctgacatggagatagagtgccaatgttcccaggccacagaattatggaggcctcacccacagtattcacagctctcaactggcctttgagaatggaagccttttcctgccctggatatggcgcttcttcctgggagaggagcagagccacagagaggtaggaagttgaggcagagcaaagggaaggcttcagagcttaggcccggttcatctcagaagtgttttctaggcctggggctgaaaggaagaggggtggggcagcctgggacgggaactgcctctgtgggctccccactcccagggaggggctccataagctttgctcctgggctggatcttgagaggtgggcagggtcttcccaccagtggcagggtgtgcagttgtggtcccaagccttggagggaatggggaatgggctggcacccggctcagggaaagcagaagcagacagtgccccagcaggggagctgcatgcccccaggagtctcagaaaggcagcccatcactaaggctggatgcctttcagcagagctacagctggagccctccggctgaggccagcactcgcctgggactccctggaccccagggttactaacagcaaaaccattccacacccccttgccagatctaagcctgtcttaggaccgtcagtgcccccaggttagagctcatgggggtcaactaagcgagggagggaaggcgaaggcaaagctggccttgcacctggacagcggcctggctcctccccacacctgccttcatttatgactctgaaacatcccccacctgaccaagggagccactctccagttctctcactccaccagggccctccgtgagccaggaccaggtcacatctctcagccaagtctagaagctctggctagaggagaggaagcgtgcagagggtcctctgccaaagctccctgcctggcccgagcccgggcatgctgggattagtgcaacaccgccccagtgtgcctcctctgccttctatcatgccagtttaaaagcaagaagactcccccttcacatcctgaggaaatccccttcctggtgaccaactgatgcaatgaaagtttgaaaagttcttcattttctagaagttcttgaataaacatggacttactaaatgcagagtctgatgatggacagagtttcaaggggtcactttcaaaacatttaattaatttatttatgtagagacagggtctcgctctgtcgcccaggctggagtgcagtggtacaacctcagctcactgcaacctctgccacctcccaggttcaagcgattctcatgcttcagcctcctgagtagctgggattacaggcatgagccaccacgcccagccattttcaaaacactgctcctgcatacaaaccactcagaggccactgcccttggttctgtgatggctctgagcccatgccatcacatctgatggaccccagagagctgagccgtggtttaagatggggtcatgcgctggtcattcccacagtcttgagtatctccaaaatcccaaagtgatatttcactttcggaccctgaaagtttggagagctggtttcttgccttaatttaagctctctgagaatgtcccctgtagggagaagcctccaggaactcagaatagaactcgttcccactcattttccttgctccaccaatctgacgcctgacagatgtcaccactgcctgaaggatcctgtccccaggccagggcagaatgggcattgcctttgactctccccttcagactcccctcccaccggcctcctgtgtagtcagagaacccactgcccatcgcctcctgctgctgctttgaggttgaggtcctggcttgagcagttaccttgctggagaagaggagcccctgccatctggggagcactgtccctgctcgtgatctgtaacagtggggcgctttttcacaccccttatctcacggcttgcttccagcccccatcaatcctgtgcctcatgtgaggtgagccccagagaaacttaaattgcttgtactgaagttgccaaaaaccaaaagttgcccgttgtcatttttaagactgtgccctgaacacacctctgcccatgcgccatggagcatgtgttaggtgcctgccgtgggtcaggcacttgattctcaaaacactgccgagaagctcttaccaacgtgacagttgaggctgagagaggttcatgagcttgctcaaggccacgggtagtaataagaggcatggccttggtgccaagtgcctcccaaacaaacagccggggccgtggtcctgcctaaactctcacatccacggcaccacgctgggcccaggcaacagagataaggagagccctggctcttgggatggggtcgcgccgattcacatgctgtgccacggagccccggcttccatccatgatgtgcccctgtggcgggataattgggaaacaacctttttctgattcccagagaactaatgagctgcaaaaagagattagacagggaagaattgctttcggggagaagccacttactcggctcgccttggtttttgctaa

SEQ ID NO: 168115 - DNA, 1350 bp, Homo sapiens
  Payload ID: 13066
  Gene Symbol: KCNJ5
  Gene Name: potassium channel, inwardly rectifying subfamily J, member 5
  Uniprot ID: P48544
  ENST ID: ENST00000533599
  CDS Start-End: 91-1350
ggggtgggggtggccttccatcttgtgttctagtgaatcagaacagcccacttcactgatggtgtctttttaactcaaagcatcccagctatggctggcgattctaggaatgccatgaaccaggacatggagattggagtcactccctgggaccccaagaagattccaaaacaggcccgcgattatgtccccattgccacagaccgtacgcgcctgctggccgagggcaagaagccacgccagcgctacatggagaagagtggcaagtgcaacgtgcaccacggcaacgtccaggagacctaccggtacctgagtgacctcttcaccaccctggtggacctcaagtggcgcttcaacttgctcgtcttcaccatggtttacactgtcacctggctgttcttcggcttcatttggtggctcattgcttatatccggggtgacctggaccatgttggcgaccaagagtggattccttgtgttgaaaacctcagtggcttcgtgtccgctttcctgttctccattgagaccgaaacaaccattgggtatggcttccgagtcatcacagagaagtgtccagaggggattatactcctcttggtccaggccatcctgggctccatcgtcaatgccttcatggtggggtgcatgtttgtcaagatcagccagcccaagaagagagcggagaccctcatgttttccaacaacgcagtcatctccatgcgggacgagaagctgtgcctcatgttccgggtgggcgacctccgcaactcccacatcgtggaggcctccatccgggccaagctcatcaagtcccggcagaccaaagagggggagttcatccccctgaaccagacagacatcaacgtgggctttgacacgggcgacgaccgcctcttccttgtgtctcctctgatcatctcccatgagatcaaccagaagagccctttctgggagatgtctcaggctcagctgcatcaggaagagtttgaagttgtggtcattctagaagggatggtggaagccacaggcatgacctgccaagcccggagctcctacatggatacagaggtgctctggggccaccgattcacaccagtcctcaccttggaaaagggcttctatgaggtggactacaacaccttccatgatacctatgagaccaacacacccagctgctgtgccaaggagctggcagaaatgaagagggaaggccggctcctccagtacctccccagccccccactgctggggggctgtgctgaggcagggctggatgcagaggctgagcagaatgaagaagatgagcccaaggggctgggtgggtccagggaggccaggggctcggtgtga

SEQ ID NO: 168116 - DNA, 19645 bp, Homo sapiens
  Payload ID: 13067
  Gene Symbol: KCNJ6
  Gene Name: potassium channel, inwardly rectifying subfamily J, member 6
  Uniprot ID: P48051
  ENST ID: ENST00000609713
  CDS Start-End: 591-1862
ggagccgcgtcgcttcgtgcgctgccagcggggctcagccagtcggctggaattgagtagcattcattgaatctgcggatttcatgacgtctctctgcgtggtccaccacttttctcctaaccggggattttttttttcttctgccactcttatctttccccacttcattccacccagtctccctcccccgtccctgcccaaacgcgcgcccctccgcccctcccttggccccagcgcccagccctgctctccgcgctcggccagagggagccagtccggagacggccgcacctggctggagaggctgggcgggcggaggggtggagacccgcggacgccgggaagccggacctggagccggagcagccgcgagcagaatggagtctcctaacagcctctcggtgctgatgtgaaatttgaccatctgattccagtttttttcttttccttttcttttttgcatttccttccctcgccatccgtcgtgtagtgaattgttcagtcttgctccgtttcaagagaggagatcatgattgagtgaagccaccccgtccgcagccaggaaaagcacaaagaagaaactgcaacaatggccaagctgacagaatccatgactaacgtcctggagggcgactccatggatcaggacgtcgaaagcccagtggccattcaccagccaaagttgcctaagcaggccagggatgacctgccaagacacatcagccgagatcggaccaaaaggaaaatccagaggtacgtgaggaaagacggaaagtgcaatgttcatcacggcaacgtgagggagacctatcgctacctgaccgatatcttcaccacattagtggacctgaagtggagattcaacctattgatttttgtcatggtttacacagtgacctggctcttttttggaatgatctggtggttgatcgcatacatacggggagacatggaccacatagaggacccctcctggactccttgtgttaccaacctcaacgggttcgtctctgcttttttattctcaatagagacagaaaccaccattggttatggctaccgggtcatcacagataaatgcccagagggaattattcttctcttaatccaatctgtgttggggtccattgtcaatgcattcatggtgggatgcatgtttgtaaaaatctctcaacccaagaagagggcagagaccctggtcttttccacccatgcagtgatctccatgcgggatgggaaactgtgcctgatgttccgggtaggggaccttaggaattcccacattgtggaggcttccatcagagccaagttgatcaaatccaaacagacctcggagggggagttcatcccgttgaaccagacggatatcaacgtagggtattacacgggggatgaccgtctgtttctggtgtcaccgctgatcattagccatgaaattaaccaacagagtcctttctgggagatctccaaagcccagctgcccaaagaggaactggaaattgtggtcatcctagaaggaatggtggaagccacagggatgacatgccaagctcgaagctcctacatcaccagtgagatcctgtggggttaccggttcacacctgtcctgaccctggaggacgggttctacgaagttgactacaacagcttccatgagacctatgagaccagcaccccatcccttagtgccaaagagctggccgagttagccagcagggcagagctgcccctgagttggtctgtatccagcaaactcaaccaacatgcagaactggagactgaagaggaagaaaagaacctcgaagagcaaacagaaagaaatggtgatgtggcaaacctggagaatgaatccaaagtttagtgccctagctgggcaaacccttctcttctccccccaacacaatctttccttgtctctcattctctttctttttctgtctctcttgctttgttctttatttgtttatatttaatttttacatgaccagaaaacaaatcttcaaggtgtaaaatatctacctgccctctctcagttattcagattgacaaggtagacatggatttgatgaaagtgcaaagtgccctcatttgtggcccaagcctggtctcctcccaaaatactacacatccaactcctggagatttcagttacttacctgcatgtgttgtacaataccagatcactcaaaaaggtgtgtcaaagattttacctgggatatgacaagcaaggtttctggtgcctatttattcattcagtgagacacagagtggagccctcagttttatggatcccaattcatttcatctactacagggtgaggtgcttgcccccatgtgggtgtggcagttacagggcccaggtgagctgaagacaaaccactgtacatatatatgccttatgtaattattttctttttgtaattagtaataaaacccagcatgtacaaaagtaccatagaacagaactgctaaatactgtacatagatgtatcattaatgtaggtttagatatataactttagaaataagaagcaaaaaaaaaaagaaagaaagaaagattcctaacatgcagtaggcatttctgttttgatgtctgtgttttccaggttattttgatccagttgacggctggcccttcagtgcatggcctttgtttgtgtctcagactggcagacgttagggtacctcactgttcccacacggatcctttcattgaatccaacaagccataggtctgggggaaattgagaggtctggtagatggcaaaacccaccaccaatatgctgatatactgtgaaatgttacaaaacagatgtctttttttaaaagataacaagggcctcactaactggcctggaggagggggaataccaggaaggaaatattctctagcctgtcaccaaaggtatgtttttacttttcacatgagctcttgccctttgtagtacaataatttaggaaacttttctgcaaaaccattgattctccagctgtagtttctctacactcttacaatgagacatggtaagttagcagaagatggtttgggtctaaagccgtgaaattcacaaaggcatgtagtgagtggcatgcattataatcatcgacctctcactttgactctatctggctttctgagaatgacatctcgcctgtccctggggcttatccatcagcatttcttgcattgtgatcttttattattttgaaatgaccagagttcagtattcaaagattagatcaacaatcttgatgattgtctaagaaatgtctctagagtatgccacaggctagaaatcaaatccagtgtctgtcaatcaaaagaaaacaaataaaaaaattccagccttaattcactttaatctgcaaaaaggaaagaagggaggaagggagggaggaaggaaggaaggaaggaagggtatttgtactggaaatctgaattttaaaatgaaaaaaataaggaaacaaatcttagatcaaacctccggggcaggtggagattttgcactgttacagatctttcacattcactttgcatttataagctgtttgttctttaacacagttgcccatcataaatattcattgaatggatccaagtttattttcagctcctacagctgtgctcagtttgaggctctgcaccatggaggtcaaagagatcaaactagctgtccctctttgtttcccttgccttccctgacctgatcgcacaggcctttggtgtagtctggggaccttgtctactaaaaaagaagtcccaggataaggaaagtggctcctaaatataacctcggggcctctcttctcccatctcagagaccttggatcaggacaactgcctcttggcactgactttaaggaaaacaaaactgttggctatagccctttcctgtttgccagcatttccttttttgcattgaatctctgttgaatcatttctttatttcgcacactctaagaaggaggtggtggtccgggaggaggaagctcgatacactccccttgaggctgcggggaggagccatggcttgacctctctgcagcctaatgaagggcactcttggcttggggagctcccctgcaaccttgccagggtcgcagggcaggccatggcaggcacaaaacaagatggaataggggcggcaaaatgtcttctaatttagctcttgaagactcactgggcctttttaattccattgctaaggtttaaaggacagcgcacacccccgtgtctggttggaagagcaagcagctcagggcctcatccctgcttgcctgccctttagcacaactgaacgaagagccttgacaacacgttggccacgtgcacctgtcagttctgtgtctgtgacgggcacccagatgtgaggtctctccctgtttctcactgtctttgttgtcaatgtagttggagacagaacttgaaccaaatctcgtttttgtaatgtgagcctctgaatctttacatggggatgctcctgaagaaccttttactagaatgtccctatcaaacatgtctatttttctacagttgttaacacagtttaacagtgtattttgtgtcaactgttaaaatttggaactgaaagttcattgagactgattttctaagcagcgagtagtgagtgaatggtgttttccattaagacagctcaacaaaattgaccccacaatttccactcattctattccgcaatatccagtcctcattccctcagtcactccattagcaaaccaagtgcaatgagaattttttaaaagtctcttttaatacaacagtatccataactaatgaagatcactctcaactagatcctttggtctgtttggttaatgtatttgagtcatttttccataaagcatggtgggatccgtgagccagataagaatttggaatttaagggttatggtttgccacagttgaccccaatttgacagaacaaagtgctcctggatggaagggcaggttcagctgcaagcatgaccccccaccacaaggctgctgagttcctcggattctcacctccacccaccccaacgtgctctccaactggaagagcacccattcatttataaatcaactttatggaaccaataaaatcatttctgttttagctgtcccctgggtaagctatactcttttacattaacatagcaaatgtcaacttttctgttccttcaaacatggccttccagcctggttgttccagcatatatcccctctatgtccatgaggcagaactctctcttcccccactccgttcttccatctatccccatcctttgctgtttccctggttctccagttccaattctattgttttagttcagtaccttatgttccctaacagaaatccagctgcaaatgtcaacctatttcttaagcacaattttctcttgcaggtctaaccaagctagggctctgaaatgtctatttttcactgcactccaatttaaaaattattcatgacttcatttaatagtctaaattttgaattctccagagcaacattcttatgctttccatccctacattttcttacatttcagttttcttacttttttcccctttgcttttttatttagatttaagccagtgtctttgggatatttagaaactgcttacaaaggtgggaactggtggacagagaaagggggcataagaatgctattagaaaactacctgaactcaccagaagaatgggaaatcatttgatttgctgagagaatacaattaaaatactcatagtaaatcatttccaaaacagtttgctaatagtctggctactcttcagtctttctttccttgacttgggtgatactctgtatgatttaaaaatgtcaggaaggtagttgaaagttcagtgtcctctatatattgtaaacattatcttcaaggatgatttcctttcaatggatggctttaacattgaaaaacataggtaacatatacataatagatgattcattgatattactttacaatacactaaaataacattatcttgtttctgaactttatggccaaccggtatctaagaaaatgttagcctttaatttaaaattgagtaaagcacgcctcttcctaatatttctgcctttaatgtcttgagtgctttagatgcagagtgtcatctagaagtcaaaattctgtcagaaggctgctaagagattttgataaatcacagaatatataataataacccaacaatattttacccaacatggtgtggtgtttgagagcattaagagcacttgtacaaattatcttatttcattctaattcaccatgagaggttgagtattataatttacattttatagagggaaaactagggtttgggcaaattggccaagtttaaaggccagtgaatcatagctccttgtctcaaatccaggtcacagggccctaagctgtgggctatttttactacaaaaaatttcagcaaaccaaatctgctaaaaaaaaaaaaatctggcctgctgcctgttattgtaccacttgtgagctaagagcaatttttacattttttaataattgggggaaaaaaaagaaaagaagaatattttgagacatgtgaaaatcatcctaaattcaaatttcaatgtccacaaacaaagttttattggaacacagccacagccatttgtctgtgtattgcctatggctgcttccacatgcactcacagagctgagtaattacaacagagaccgtgtggccagcaaagattgaaatatttactatctggccctgtataaaaaaagtttgctgacccctgtactgtactgttaagtactattggtactattaagtactagtaatagtactattaataatagtatgtaagagtactaagtactatgaaatattgtactgtactcttaagagagtcctaggcaatatagaagaatgactttttttctagcataaattattgaagtcactcataagtctgttcaaaataacataactcttttttttcggttgtcaaagagacaactgcttcacaagacttagagagcccagtcattcagttagggtctcaaaggaagaatccttccttttcatgccattcctccagagtggcaaatagagtcaacagccagccaggatctagcggtcaactcagaaagtggatacagtaaaattactccttaatgaactacagagaaatgggcattcccagcccagccgctgaaatattgcttcagtggcaccctcaggcgttggatgatgtacatagctcaggctgccagtctctgctcagcaaagcagcccagacctgcagtggttgccacacatcaaacccgcctcgctcctccacatggcttctctcttaggctctcttggaggagagttaaataggtggcccagatgtctccctctgttttcttgctagttttctctagcctacagtttacaactgatcaaggtgatgaacgtgaacctggaactagctcatgtttaattgcgctagtttttgctctctctagccactaagctagaagtttaatgtgtaattaaagaactaaatgcttcttatggaaaaccaaaaggtcctttgaaaagagctcagggagacacggaagtatagtaaagggttgttggatttcttgcgctttctgagtctgaagcaaagacaaagattggtaattacagacataatggatggaaaaagtccagaccttggggtttttagatgagtcaatattaaatggcattctttgtgtcactaagctgaactcccttgtcttctaaggaagcatttctaatgccagaggtagtcagccaagctaggttccttatctttttagttctatggaaaaacatatcaagttctcttatgagtgctttcctggaaatcagatgagaaagaaaaaaaagtaacaatgtaacaaatcattgtgatgttgttatattgtcgacagataaaggatggatttgatcctgcgtctgaaactaagtaggtaatggtatctacaatatagatcatgcaaaaagcttgtgacccttcaactgcatggaagagtgggaggaaacaactaagtgggaggaaacaaatctcaaagttcaacaccataaaacttaaataaatgtaaaaggagtcaaacttttacttggcctcattgccttggtaaaagaaagcttcatgtatccacctaattcaataagagagtcctaggaaaaggaaggcaaaatactttaaaggcacacaaaaatatttcactggggtggtcaacatgattaagtgatggagattagatttatcactgatgaaaacagtatttatagagttatttttagacactataccccctagatgcaaatcccaacatgcactgtggttggccggagaattgtggccacatagtaaacagatcttgatttcagagaatgaaatgttcctaccgactttgtgtaattgcccatttcaagattaaggctcagtgcccattgttttaacaccgatcatcaatactgtgatatcaactaagccaatctttataagaatatgaagggctgtttttctcaggcaatgtaaatatctgctaccaacaagcactagtgaaataaacatgtaatcatcatcgtttctaaaactctgatagaaatcacaaaacattcaagcaaaagggcaaggtcttccaggagcctaggagcagacttttggctacaaagagcctagtccaggctgaatgccttatggagtatgtcagtcttgggtcttatcactaaacacaactagtagaactcgatcaactggagtgcagagatcagagtttcggtcagccgtgcattacccaaacctctgggtcttcagccagtcttcttagaagaggggaaggagcactgtcctcagatccggccatcacgggcatcgccctgacatcatctctcagcattgctgactgtgggcatgggtatgagaaataccctcccgtagctcagacttgggcagaacaaaatcctcagccatgcccacccactgaggtctctctaggggagcttctccctgcagggtctggctcttgcccatctggacaatgaccccctagaagtatcttccgggggaccctgtatctttcaagcttaacttgccccacacccttgaccccacagagcacctccctgggtcaggaatgatgactaaattaagacctttagcatctgctaagcacaggggtgccctcccatgtgaaagtccaagtaaaataaatggagtcagggtaaggaaatccccaaaagttctgattttctcatggtgatgatctcagtgcttttctttttcatgacatatctaattctcttttctctaggaagtctcacgttttggtatcacgatgccgtgggcacagactcagtcatcgggccaatggcagaactctctccagatagtctgacctggtccctctttttgagtaaggctgggagtttggtttgtttgagccaccccacaaccaatagaatcccaccctggctaagaaatctcacaaggccgggtgctgtggctcacacctgtaatctcagcactttgggaggccaaggtggcagatcacctgaggccaggagtttgagaccagcctggccaatatggtaataccccgcctctactaaaaatatgaaaaagttagctgggcatggtagttcctgcctgtacacccagctactctggaggctgaggcacaagaatagcttaaacttgggagggggaggttgcagtaagctgagatcatgccactgcactccagcctgggccacggagcgagactcagtctcaaaaaaagaaagaaaagaaggaaggaaggaaggaaggaaggaaggaaggaaggaaggaaggaaggaaaaaagataaagaaagaaggaaggaaggaaggaaagaaagaaggaaggaaggaagaaggaaagaaagaaagaaaagaaagaaagaaaaagaaagaaaagaaaagaaaagaaaagaaaagaaagaaagaaagaaagaaagaaagaaagaaagaaagaaagagaaaagaaagagaaagaaagaaagagaaaagaaatcgcacatccccacctctatcagggtcaccaaatgaaggcatcaatttcaagtcccgttattatctgcaaggaactctgcattgcagcacttacagacacaacttatgctgtctcctggtgcccacacagctttcgggtgatggcagattgtcagccaaccattccccccagctgctctctcttaatttgctccctcatctcaccacgaaaacttcacttttcctggcacccccgttggaaggttaatatcatttttgagcatccacaatccagcaacctattattggggttagtcctattccttaccacttaatagccaccaccaattttaaccgagcgtatatgttcagagtctaaccatatatatatatatatatatatatatgtacattttgttcctgcttcataattgcccagagagtctatgagtgatggttgggcgtatacatggtctcagcccggtaactgacgagagcagcataaagttaggtcttgtgctgaaaggacagctggactggtccagtgggatcttcttgtcctttgcagcatgccattaggggaccagcttgccaaagaagctcctgaacatctttattcagcccagtgcttcctcgtcttaaccaagagccacacagagacaacagtgaactcacaagttcataggattccaaaatgattgactccccaagtgtctgcctgtgttggcaaagtgctctttcctttcccactgtctgcacagactgtactctggggaaactcccagcacttgtgggtgcctggttaccgaggatgtgcttggctgccatggtaactcccagcctctcagtgtggaccactctcccgcaggctcgaggagacctggcagaggccccatggggcggaggctccctagggctgctccacctgcagacagccttgggagaacccaaggtaatgtggagtaggacccagcacacaggagctccctccgcacgccaggtctggggtattcccatcctttcttcctaagatgggatgcacttaggtggccaaattgcttcttaaaaggctcttcttcaagccatcatcctcatatcacactcatgcccacactccagtcacatttgcctttaaaaaattttcaaaattatttttgtattatcccatgtaacagatgtccaaagagttgccattttcttaacactaaataaattctgcctagaagattaagattggtccagaacagggagtgttttaataagcacaaatataaacaaaagcaattttaaaatttacttatggattctttcagaaaacctgatttcaaatcagaaatactcatttttgcccccagagcaaagttccagaatactatttcttcttgaacttgccattttccatctggctttgaacttgagaatagactcccctatattggcataaaaggtaaagtggaatttaccactgaaactttcagagctcaatttagtctggccccatggaccaggcaagaataaactctgctcaccagtaacaattctgcagccaccgtactgaacacaaaccctggagaaattctggacatggtactgcttaagaatgctgggtactcgggaggctgaggcaggagaatggcgtgaacccgggaagcggagcttgcagtgagccgagattgcgccactgcagtccgcagtccgacctgggcgacagagcgagactccgtctcaaaaaaaaaaaaaaaaaaaaaaaaaagaatgctgggaatgtcagtcgagggtctgatttcagaaagaggacattaatattcaaatccctgaaccatgcccacactgtgggagtcaggcctaacaagatcccagggtccatagtttacctggtcagcttgctgtgtctcatggggcattagagggtagatgagaactttccgcaatctcgacaactgcactgtaagaatttcttctgtgtattttctaattctgtgacaacaggcatcaacaaaacatgtggcctgttatcacatggttcctccctgtgtgcaccttcatagagattttttccttttctaaaagaatgaggattcctctgaatgttacactatgcaacaataatgtccccagtccttcataagtaacacagtaacaatataagcaccctctccctacataacacacacacatacacacaaatacacacacagacacatgcatacacacacacatacacacagacacatgcatacacacacatacagagacatgcgcatacacacacacgcatacatgcacatgcatacacacaccaagacatgcatacacacacgcatacacagagacacatgcatacacacacgtgcatacacacacagacatatgcatacacacacgcatacagacatgcatacacacacatgcatacagagacacatgcatacacacacgcatacacacacacgcatacacagagacatgcatacacacatgcatacagagacacatgcatacacgcacacagacacatgcatacacacacacgcagacacagacacatgcatacacacagagatacacgcatactcacacagacacagacacatgcatacgcacacacagatatacacacacacacacacacacacactcttatcctttccaatcagttatgagtgacaccacaaaagtaaatttccagaaatcaaagccttaagattggcgttcctcccctgcatgcactgtggcattattttaaaaatgtaccatacacttccctgaacctgcaggcaacagcctttcttccagtgtttggtaggaaccctggattcagaagaccaggttttgcccccagatgagcaatgtcgtcctgggtatatcatttcactggtcggaaatagcttcctccaccccttttttaaaaacttgataaattttattttttagagcagcattaacttcacagcaaaatagagcagaaattaccaagagctctcatttacccccggcccccgcatgcatggccgcccccacgagtgatatgccaaaccacaatggtacatctgtggaaatggatgagtctacactgagacattactatcaccccagagtccattgtttacaatggtgttgtacattctatggatttgggcaaatgtataaaggcatggatccaccattatagaatcatacaggatagtcccacggccctaaaaatcctctgtgctctcccaattcatcttgtgtcctcccaacccctggcaaccactgatctatttactgtctccatagttttgccttttccagaatggcatataattggactcatgcagtacgcagccttataaaattggcttatttcacttagtaacatgcatttaagtttccctcatatctttttatggcttgagagctcacttttttagcaccaaacactcatccattttctggatgtaccactgtttatttatccattcacctactgaaggacaccttggttgcttccaagtttggtcagttatgaataaagccactataaatatctgtatgcaggtttttgtgtggacataagttttcaattcatttgggtaaatatgatatgttaaagctatatttagtcttgcaagacacagccaaactgccttccaaagtggctgtactgttttgcattccactagcgatgaatgagggttcccgttgctccatatcttcaccagcatttagtgttgtcaatgatctgcatttgggccattctaaaagatgtacggtggtgtttcattgctgttttaatttgcaattccctaatgacatgatttgggacatatttttatatgcttgttttccatctgtacatcttctttggtgaggtgtctgttcaggtcttttgggcatttttttaaatcgggttgttttcttattgttgatttgttaaagttctttgtaaattttagataataattctttatcagatgtgtcttctgtaaatattttctcccagtccgtggcttgtcttctcattatcttgaccttgtctttttcagagcagacgcttttaattttactgaagttcagcttatcatttacttctttcatgatcatgtctttggtgttctatctaaaaatctattgccatatccaaggtcatctaagttttctcttatatgttaccttctaggagttgtatagttttgcattttacattagatctgtgaccgattttgagttaatttttgtgaaaagtgtttgttaggtctgtatttagactcttttttttttttttttttttgcctgtggatgtgcaaatgtgcagctatttcaacaccgtttgttgaaaagaccctctttgccgcactgttttgcctgtgctcctttgccaaggatcagttaactatatttgtgtgggtctgtttctcagctctccattctgttccactgatctatttgtctattccttcaccaacaccacatcgtcttgagtactgtagctttctttctccatataaactgcagactcagttttttggtaccaacaaaataacttgctgagatttttattgggattgtatttaatctacagaggaagctgggaagtgacatcttgacaatattgagtccctccatgaaatggaatatctctgtatttacttagttcttctttgatatcattcaccagttttgtagttttcctcatgtagatcttatacatattgttagatttataccttaagtacttcatttcaagggatactaatttaaataatcatgtgcttttaatttcaaatttcacttattcattgccggtatataggaaaacaattgactttgtatattaactttgaatcctaaaatcttgctataatcccttattagttccaggaaggttctggggcttgtttttgttttgttttttggtcagttatttcagattttctacatagatgatcatgtcatctgtaaacaaagacaaagttttatttcttctttcttcccaatctatatatttttatttcctttccttgtcttattgcatcagccaggacttccagtatcatgttgaaaagcagtagtgatggggacaccttttttttcctgatcttagtgagacagcttcaggtttctcaccatcacgccatttagtatgatgttagctgtaaggttttttttttagatattgtttatcaggttgaggggcttctcctctattcctgctttactgagtgtttttatcatgaaagactgtttggatttttctgcatctgttgatatgatcatgcaatttttcttcttttgcctgttgatattcattacattagttgatctttgaatgttgaaccagccttatatacctaggacaaattccacctggtcatggtgtttaattattttcatatattgttggacttgatttgctaatattttgttgaggatttctgcatctatgcttatgacaggtattggtctgtagttttcttgtaatgtctttgtctggttttggtattaaggtgatgctggattcatagaatgagttagcaagtgttctctctgcttctagcttttgaaagagattgtagataatcagtatcatttcttccttaagtctttggtagaattcaccagtgaacccatctgggccaagtgctttctggttggggaggttactaaccattgattcaaattatttaacagagatatacctattcagattgtctatttgctcttgtgtgagttttgacaaattctatttttcaaggaattggttcatttcatctacattatcaaatttgtgggtataaagtcattcataaaattccttcattatcttttattatccttttaacctccatgggattgctagtaacgtccccgctctcatttctgatagtagtaatttgtgttctttctctttttttcttagttagcatgccttgagacttatggagcttattgatcttttcaaagaatcaactttgtttctatttattttattgatttcctattttcaatttcgtgaatttttaatctaattttaattatttcttctcattggcttactttgggtttaatttgctctttttttctacttttttaaaatggaaacttaaatgattgatttcagatcttcttttgtgctatctgcattcaatgttataaatttccctttaagcattgtttttattgcatcccacaaattataataagctatgtttttattttcatttatttcaaaatattttttcacttatcttgagatttcttctttgacccatgatatttacacgtgtgttgtttaatctccaagtattttggcattttccagctacctttctgttactgatttctagcttaattccattgttatctaagagcaaacattgtaggacttgtattccttttttttttttttttttttttaagacagagtctcactctgttgcccaggctggagtagagtggcatgatcttggctcactgcaacctctgcctccggggttcaagcgattctcctgcctcagcctcccaagtagttgggactacaggtgcccaccaccaaacctggctaatttttgtatttttaatagagatggggtttcagcatgttggccaggctggtcttgaactcctgatcccaagtgatctgagaatttctattcttttaaatgtgttaaggtatgttttatgacccagaatgcagtctaacttgatgaacattccatgcaagcttaagcaaaaagactaatctgctgtagtttcctcatctttttcaacaaacatttgaaccccatagtctctgctttaataattctagtatccattccaacctacaccaccatcagttctagactgtacctctacactaaatgaccccagatggttcagctttaagtctcagctgttttcatcatttaactgattcccttgctggcagcagggaaattaactaccagccacacacttgtctccaacagcacccaccgaccacgtcctgctcccctgtcattaccaccactaaacccggtagcagagagatgagctgtgaggtaggtgccttctagataaatgaggtgctactggacatgcactgtggtcttctctgcagtagaaaaatgtccaaggaaggtcagcatcattgatagaaaataaatgtgaggctgcatctcgccagctcatccatgagcaattccttcagctccagcaggctactgacaatttgcttttaacccaaatccagctctaccctccctaaagcatgcacctagggccccagtcagaaaaacaaaacaaaaactaaaccagacaggataattaaggaggcaaaaagcttaaaccataatattttaattaagctgatttattttaaccgtagcactactgctttattttagttatataccagtaatggaaaatagtggccacttttcattattaatcataagataattcattgtatttgtctttcctaataaaatggcattatattaaggcccaaaatgtttactatggcccagtaaaatatagggttgttctgtgagctatttcttaggatagaaaattattccagaaagctattagttcaaaagtctctagcagtgccaaggtttcaatagtctctttaattttgaatctatgcgattgaagataagactgcatctagtttgggggttgcatgtttgtggacattcatgtttctatgtacctggaacttcttattctcaccatcacacagaattttcaagaactagttaagcaaagaaagcaaagcccagcaggtgtcagaattgggtccccaagctgagggtcattagggtgcatgtcagtgtgccaactccaatatccacacctagagaacgcacatcttcccaaaagaaatgaagcacagatgatacttgatcctcaactttgtctccagaaattttttcaggaacttgagttctttatcaaatgctcacatcctacagagaaataaagtgttccattttcaaggttcatgaagctcgtcaatgctgggagcaggcacacacttgtatttttatactcagggatcccaacaggcaactaaaactagacaaggacaaaactccactcaaaatattctgaaagttagctgatgccccatattttattactccaaatgtgtattcacttgcctgagtgctggccatgagcactcagtgaacacttgcagtacagtgagtgatgtccttgacaagttactatgaagactctgagaaaaagtaacatcccccactgtcctcaacaagcctgtaatcccatggctgccagcccttaccatgcaacaacactgcgctaagtgcatcgaaccacacaaaaccctgtgagaaaatactgcttcccacttcacacgtgaagtaactgagtctagttttagaaatacctaaacgaagagggacaggcacaacaaatttgctggaatgtaaagaaagtagatcagtttctgcgtaagcagtaagaaatggcctcatgaggaagaaagggacatttgccctgacatttctcaaagactgcttaggttttggagacagagatccaagggcaggcaagcacaatggttcatgcctgtaattccagcactttgagaggccaaggtgggaggattgcttgagcccaggaattcaagattagcctgtgcaacacagcaagaccccatctctattttaaaaagagagagagagatccaaaagcaaaggcatttcagtttgcaaggccagcatgggagagggtcttaaaacagaaacacacaaggtaagattgggggatggtacctagaccagcctaggatcataggatttgataaaatatgcatttggaaaactggtgctaatttatagagacttagaatttcaggctaaggacaaggactaagaaacgaatagcatgaacagtattattgataaacccatcattgcatcttaaaggctctgaagtctttagtattgaattaaaaaataattttcactggacaaaaccaaaaggtctttacacaactgtcaagcactttgaaatgattcagcaaaaagcagaataaatcactagtggaatttcaatagcatgtagttgtaaaccatcatgtgtccagcaaaatcacaaaacaagagtttattttagaagggacttagggatattaagaaatataacatacaaaataactaaagttttctccaagcaaaaccaatgatcctttagggatgaacagaaagaaaacaagaaatgcttctttcaaaagttgctaccaaggcttctaagatttctttggaataaagtcactaagatttgcttctgaggtcaatcttgccaacttttccaccatgctttttaggaaggaacaccaggtagggctcaagtactggtttggctcctgtcccattttttggtccttttgtaactccctttactcaactccaagtatgtctgtgcacggacaatgagacgaaagcatgctcaatgcgaaagcacaaattatgtattgagaaatcactacaatgccaaatttttttaaaataaaaaaaaaatatatatatatatatatatctttaagaactcgctgtgttagggaaactgtttacatattgaggtgttcctctttttttgactggaacaataaaagaaaaatttgata

SEQ ID NO: 168117 - DNA, 2389 bp, Homo sapiens
  Payload ID: 13068
  Gene Symbol: KCNJ8
  Gene Name: potassium channel, inwardly rectifying subfamily J, member 8
  Uniprot ID: Q15842
  ENST ID: ENST00000240662
  CDS Start-End: 347-1621
cctcctccttccactgaagtggccaagggagttgagctgagcagggggaggggaagatctacacccatcccccttcctctagccctccctgcgtttagattcagttgcaccttttattattttaactcttctccttaggacacgcagcccccaatttgtccctccggcctgggcggcccctggtcccgcgcgccagcatgggagagcgagggacctgcccgcggcccgccggcgtgtgcaaggaggtccagccgccgcgcccgctacccggagtctgaggacgggtgtccagggacggagaggcaggtgagagggaggtggctaagctggctatggtgacaggacgatgttggccagaaagagtatcatcccggaggagtatgtgctggcgcgcatcgccgcagagaacctgcgcaagccgcgcatccgagaccgcctccccaaagcccgcttcatcgccaagagcggggcctgcaacctggcgcataagaacatccgtgagcaaggacgctttctacaggacatcttcaccaccttggtggacctgaaatggcgccacacgctggtcatctttaccatgtccttcctctgcagctggctgctcttcgctatcatgtggtggctggtggcctttgcccatggggacatctatgcttacatggagaaaagtggaatggagaaaagtggtttggagtccactgtgtgtgtgactaatgtcaggtctttcacttctgcttttctcttctccattgaagttcaagttaccattgggtttggagggaggatgatgacagaggaatgccctttggccatcacggttttgattctccagaatattgtgggtttgatcatcaatgcagtcatgttaggctgcattttcatgaaaacagctcaggctcacagaagggcagaaactttgattttcagccgccatgctgtgattgccgtccgaaatggcaagctgtgcttcatgttccgagtgggtgacctgaggaaaagcatgatcattagtgcctctgtgcgcatccaggtggtcaagaaaacaactacacctgaaggggaggtggttcctattcaccaactggacattcctgttgataacccaatcgagagcaataacatttttctggtggcccctttgatcatctgccacgtgattgacaagcgcagtcccctgtatgacatctcagcaactgacctggccaaccaagacttggaggtcatagttattctggaaggagtggttgaaactactggcatcaccacacaagcacgaacctcctacattgctgaggagatccaatggggccaccgctttgtgtccattgtgactgaggaagaaggagtgtattctgtggattactccaaatttggcaacactgttaaagtagctgctccacggtgcagtgcccgagagctggatgagaaaccttccatccttattcagaccctccaaaagagtgaactgtctcatcaaaattctctgaggaagcgcaactccatgagaagaaacaattccatgaggaggaacaattctatccgaaggaacaattcttccctcatggtaccaaaggtgcaatttatgactccagaaggaaatcaaaacacatcggaatcatgacagcaagataaccccaagacagtcttttatcaagttttgacggtttatgctgggcactgccagactgaaccagagctggaacacaataatgtgtccttctacattttattacactaaatgatattcatattcaagcaacagcactttctgtagtaataaaaagtaacacaccaagtggaggattcatggcttatgcttgtttcatacatgtagaattcgcagtgatatacttaagttatgtgcaggggtgggtatgctcgtttctctcaatttgaaacacaagaattacactaatagtaacaggccttgagcacaaaatttggtcaagaaatgagtctgtttgaaatgcttagttggtgaaacccagatcgctgtgttactaatgatcactctggaaatgcaaatagaataggaggggaaaaaacaaaatcatgttaatgcgttttgtacatcagccttctcctgtctccatgataactgcatttggtaggaagcctgaggcaaaaactgcttaagtggatctgtttgtaagtggattcagttcattcgctttgtctgtcggtgactcctgaaggtttcctggtccatctcattgcggcctgttgggcagagctggacaaggtgtctttgaaggaaagctaagtcttgtctcatttaggactgggttccccacagtgacagtcacttccttcagcatctcacttcttcttctagaatccccacagggaaatactgtattgaatattttattaaaacattttctttgta

SEQ ID NO: 168118 - DNA, 507 bp, Homo sapiens
  Payload ID: 13068
  Gene Symbol: KCNJ8
  Gene Name: potassium channel, inwardly rectifying subfamily J, member 8
  ENST ID: ENST00000537950
  CDS Start-End: 166-507
aagaagctgcaacatttcagaaagcaaccaattactgaggaccgaatgacctggccttatcagcgctgaagtgttaacggccgtccctgtttggggaggacgggtgtccagggacggagaggcaggtgagagggaggtggctaagctggctatggtgacaggacgatgttggccagaaagagtatcatcccggaggagtatgtgctggcgcgcatcgccgcagagaacctgcgcaagccgcgcatccgagaccgcctccccaaagcccgcttcatcgccaagagcggggcctgcaacctggcgcataagaacatccgtgagcaaggacgctttctacaggacatcttcaccaccttggtggacctgaaatggcgccacacgctggtcatctttaccatgtccttcctctgcagctggctgctcttcgctatcatgtggtggctggtggcctttgcccatggggacatctatgcttacatggagaaaagtggaatggagaaaagtggt

SEQ ID NO: 168119 - DNA, 4170 bp, Homo sapiens
  Payload ID: 13069
  Gene Symbol: KCNJ9
  Gene Name: potassium channel, inwardly rectifying subfamily J, member 9
  Uniprot ID: Q92806
  ENST ID: ENST00000368088
  CDS Start-End: 243-1424
acatttaggagaaacagcggtgtctgcggctcccacccttcggggggcccgtggggggggcggtgtcaggggcatggacgccaccccccaggggtctctgctgccggctactctcctctccacgtgctcccctccaggacccccgacgccgcctaggcgcccagcgacgcgcggcaggtggcagcagctcgggcccccgccgcactccaggcgcccgcagcgctcgccctgacgcggccgccatggcgcaggagaacgcggccttctcgcccgggcaggaggagccgccgcggcgccgcggccgccagcgctacgtggagaaggatggccggtgcaacgtgcagcagggcaacgtgcgcgagacataccgctacctgacggacctgttcaccacgctggtggacctgcagtggcgcctcagcctgttgttcttcgtcctggcctacgcgctcacctggctcttcttcggcgccatctggtggctgatcgcctacggccgcggcgacctggagcacctggaggacaccgcgtggacgccgtgcgtcaacaacctcaacggcttcgtggccgccttcctcttctccatcgagaccgagaccaccatcggctacgggcaccgcgtcatcaccgaccagtgccccgagggcatcgtgctgctgctgctgcaggccatcctgggctccatggtgaacgccttcatggtgggctgcatgttcgtcaagatctcgcagcccaacaagcgcgcagccacgctcgtcttctcctcgcacgccgtggtgtcgctgcgcgacgggcgcctctgcctcatgttccgcgtgggcgacttgcgctcctcacacatagtggaggcctccatccgcgccaagctcatccgctcgcgccagacgctggagggcgagttcatcccgctgcaccagaccgacctcagcgtgggcttcgacacgggagacgaccgcctcttcctcgtctcgccgctggttatcagccacgagatcgacgccgccagccccttctgggaggcgtcgcgccgtgccctcgagagggacgacttcgagatcgtcgttatcctcgagggcatggtggaagccacgggaatgacatgccaagctcggagctcctacctggtagacgaggtgctgtggggccaccgcttcacgtcagtgctgactctggaggacggcttctacgaagtggactatgccagctttcacgagacttttgaggtgcccacaccttcgtgcagtgctcgagagctggcagaggctgccgcccgccttgatgcccatctctactggtccatccccagccggctggatgagaaggtggaggaggagggggcgggggagggggcgggtggggaagctggggctgacaaggagcagaatggctgcctgccacccccagagagtgagtccaaggtgtgaccagcttcctccagacccctgtggcagaccgggggccagacacagatacatggggaactgcatatcggaggtggtggaggaggaggaggaggaggaaggcaaagcccctggaaatgtgctaaagttggaaagtccccgtcccccagaacctcaagtctagaaaccagtatggaagggaggggtcctgatttcagggaaatggagggtggggccgggtgaaaatgccagtctgtgtttgaccttcacatttgttcatgagtggatggatggacagaatgatggacttttgggggttggatgggaagatggtagcagataaagacagctgacagatacatagatggaccagtagacaactggtccactcagggctgccactaacctgtagaacacccctgtgcaaattttaaaaaggaacccttttcctccagacagatacagccccaaaccagggtgcatggcttggggagcagagtataggatggattgcagtccccagtcacctcttctgccagcctccccacatatggcacaactgtctaatgacacggtaggccaagctgaagtgaaggagaaaggagccggaccaagatgggcacatgaggagggtgccctcctagctccaccctcaccaggatgaaggcgtgcaaggggctcagcaaggtgtgaatgaccttagtccgcaagttcagggaagcaggcagagcggggaggtgcctgagctggggcctggagaggggcctgggaaaggaaaaccagggatagctattttcttacagtggagtgagatcttacaggtatcaggcacaggcaggaagagagagagagaggttctggggaggaagggccaggagagagatctagaaagtgggttcactagagctgggaaacagggagcccctaggaaagcagtgtgtccttggggcacagtcattcacatcactgattgggtgccatgtggagtggacattcaaaaacctggttcctgtcctcaaaataaggggcacctgggaaaacagaggaatctacctgtggtgactgaacgagggataattcaaactgacaacctgtgcagtcccgtggagggtaggggagtgtgggtgatcagaaggctggggccagtgtaaggcatagggaatatgtaagtcaggagttagaaatctccagtgtgcgttggaatcacctggagggcttggtaaaacacagatttttgggctccactccaagggtttctgacccaagaggtggggaccaaaaccatgcattcctaagaagtccccaggtcatgctgctgttgctggactgaggaccacactttgagaacctgtgctctaagtgaatacttggaagtcgtttcaggacatggggcatagaaactgaggagtagctgagaggaagatgaagagaagctgagaagaagctgaggatcctcacaggagcagacagagaaatgtgaagggtggggttttatgtgtgggaaagggacccgaagcccaggctgaagagtttaactttgggcccagaaactcaaccatcaatggaaacagggcagtgacaagtggagggggtgtctggaagctgagcaggcccgacagagagatgaagccatcagaaggacttgagggggctcctggggaggtcggggggaggtggagcaggaagagttttaggggcaaaggacagaaccccttgtaggactggaggcaagattgaatgtgggagaaaatcggagagaagcgataggagttagaacatctggatgtgtctgcagcctgctgtcagcccaattgggccagggggtcccaaagacgcatattctcaccccacctccacctgcttcctgatcacatcccagtcaccagcggcagcttcctggatagtgagggagaacaactgcaagttgagagaggcagaggggtggaagggacctgaagctggcctggagaaaagcataggcccaggagagcctgccctgggacagcgcctgtctcccacacagcagcactggcccagcaaggacctcctcccttggccctggccacatcccactcctgccctttcataagccccctggggaaagcactccagtcttctctgttccaggctgggcagatagggtcctatggggcacagccagggtcctatgggcatagccagggccctatgggtcctctggaagcaagaaagggggccatggaagcagcccagacagctggggttcactcagagaggacccaagtcccagtcccttcctttcagtcaaaacacggatatctttgcctcaggtcacagggccactggggccctgtcatcaaagatgagattcctgaagcctggcattgactggtcccctaagaacagatgttgggatggagaatggggattcatttgggtttcagtaaaacaggggggtctggacaagagcgggtgggctacttggtatccacacacacgcactcacacaggagccaacccattgcagctgaacaagcagagaaactcagtctggaaaggcccctcctgcctgctgaagtcactgagaccctgccacacctctcctcgccactgtcaccactcagggcaccactgtacagtgcaacaagtcaggagacctaggtcctactcctgacacttgctaattagctctatgactctgggcaaatcgcatatctgggcctcagtttcctcatctgtaaaaatgacagcaaactcgtaatgctcaataaatgtttaaataacaactgaa

SEQ ID NO: 168120 - DNA, 5245 bp, Homo sapiens
  Payload ID: 13070
  Gene Symbol: KCNT1
  Gene Name: potassium channel, sodium activated subfamily T, member 1
  ENST ID: ENST00000263604
  CDS Start-End: 117-3788
ggccgttccactgcgcggcggcgtggggagggcgcggcgcgagctgagatggttccgcccggcgccgcccccgctgcccgccgcccgccgcccgccgcgccgagcgctcccgcaggatggcgcgggccaagctgccgcgctcgccgtccgagggcaaggcgggcccggggggcgccccagccggcgccgcagcccccgaggagcctcacgggctcagcccgctgctgccggcccgcggcgggggctccgtgggcagcgacgtgggccagagggtccaggtggagttctacgtcaacgagaacaccttcaaggagcggctcaagctgttcttcatcaaaaaccaaagatcgagcctgaggatccggctgttcaacttctccctgaagctgctcacctgcctgctctacattgtgcgcgtcctgctcgatgacccggccctgggcatcggatgctggggctgcccaaagcagaactactccttcaatgactcgtcctccgagatcaactgggctcctattctgtgggtggagagaaagatgacactgtgggcgatccaggtcatcgtggccataataagcttcctggagacgatgcttctcatctacctcagctacaaaggcaacatctgggagcagatcttccgcgtgtccttcgtcctggagatgatcaacactctgcccttcatcatcacgatcttctggccgccgctgcggaacctgttcatccccgtctttctgaactgctggctggccaagcacgcgctggaaaacatgattaatgacttccaccgtgccatcctgcggacacagtcagccatgttcaaccaggtcctcatcctcttctgcaccctgctgtgcctcgttttcacggggacctgcggcatccagcacctggagcgggcgggcgagaacctgtccctcctgacctccttctacttctgcatcgtcaccttctccaccgtgggctacggtgacgtcacgcccaagatctggccatcgcagctgctggtggtcatcatgatctgcgtggccctcgtggtgctcccactgcagttcgaggagctcgtctacctctggatggagcggcagaagtcagggggcaactacagccgccaccgtgcgcagacggagaagcacgtggtcctgtgtgtcagctccctcaagatcgaccttctcatggacttcctgaacgagttctacgcccacccccggctccaggactattacgtggtcatcctgtgccccacggagatggatgtccaggtgcgcagagtcctgcagatccctctgtggtcccagcgggtcatctacctccagggctctgcactcaaagaccaggacctcatgcgagccaagatggacaatggggaggcctgcttcatcctcagcagcaggaacgaggtggaccgcacggctgcagaccaccagaccatcctgcgcgcctgggccgtgaaggacttcgcccccaactgccccctctacgtccagatcctcaaacctgaaaacaagtttcacgtcaagtttgctgaccacgtggtgtgtgaggaggagtgcaagtacgccatgctggcgctgaactgcatctgcccggcgacctccaccctcatcaccctgctggtgcacacgtcccgcggccaggagggacaggagtctccggagcagtggcagcgcatgtatgggcgctgctccggcaacgaggtgtaccacatccgcatgggtgacagcaagttcttccgcgagtacgagggcaagagcttcacctacgcggccttccacgcccacaagaagtatggcgtgtgcctcatcgggctgaagcgggaggacaacaagagcatcctgctgaacccggggccccggcacatcctggccgcctctgacacctgcttctacatcaacatcaccaaggaggagaactcggccttcatcttcaagcaggaggagaagcggaagaagagggccttctcggggcaggggctgcacgagggtccggcccgcctgcccgtgcacagcatcatcgcctccatggggacagtggccatggacctgcagggcacagagcaccggcctacgcagagcggcggtgggggcgggggcagcaagctggcactgcccacggagaacggctcgggcagccggcggcccagcatcgcgcccgtcctggaactggccgacagctcagccctgctgccctgcgacctgctgagcgaccagtcggaggatgaggtgacgccgtcggacgacgaggggctctccgtggtagagtatgtgaagggctaccctcccaactcgccctacatcggcagctccccaaccctgtgccacctcctgcctgtgaaagcccccttctgctgcctgcggctggacaagggctgcaagcacaacagctatgaagacgccaaggcctacgggttcaagaacaagctgatcatcgtctcggcagagacggccggcaatgggctgtacaacttcatcgtgccactgcgggcctactacagatcccgcaaggagctgaaccccatcgtgctgctgctggacaacaagcccgaccaccacttcctggaagccatctgctgcttccccatggtctactacatggagggctctgtggacaacctggacagcctgctgcagtgtggcatcatctatgcggacaacctggtggtggtggacaaggagagcaccatgagcgccgaggaggactacatggcggacgccaagaccatcgtcaacgtgcagaccatgttccggctcttccccagcctcagcatcaccacggagctcacccacccttccaacatgcgcttcatgcagttccgcgccaaggacagctactctctggctctttccaaactagaaaagagggagcgagagaatggctccaacctggccttcatgttccgcctgccgttcgccgccggccgcgtcttcagcatcagcatgttggacacactgctctaccagtccttcgtgaaggactacatgatcaccatcacccggctgctgctgggcctggacaccacgccgggctcggggtacctctgtgccatgaaaatcaccgagggcgacctgtggatccgcacgtacggccgcctcttccagaagctctgctcctccagcgccgagatccccattggcatctaccggacagagagccacgtcttctccacctcggagccccacgacctcagagcccagtcccagatctcggtgaacgtggaggactgtgaggacacacgggaagtgaaggggccctggggctcccgcgctggcaccggaggcagctcccagggccgccacacgggcggcggtgaccccgcagagcacccactgctacggcgcaagagcctgcagtgggcccggaggctgagccgcaaggcgcccaagcaggcaggccgggcggcggccgcggagtggatcagccagcagcgcctcagcctgtaccggcgctctgagcgccaggagctctccgagctggtgaagaaccgcatgaagcacctggggctgcccaccaccggctacgaggacgtagcaaatttaacagccagtgatgtcatgaatcgggtaaacctgggatatttgcaagacgagatgaacgaccaccagaacaccctctcctacgtcctcatcaaccctccgcccgacacgaggctggagcccagtgacattgtctatctcatccgctccgaccccctggctcacgtggccagcagctcccagagccggaagagcagctgcagccacaagctgtcgtcctgcaaccccgagactcgcgacgagacacagctctgagccagccctgcacggagctcaggccaccaagcccggggtcctcaggaaggacgtggaggagcgtgtgaggacacggtggcactagcgtgaccctggggatggcacactctactcaccatggctcctgggactccaccctggaaaggagcccctcatgcggggggagggccagctcacccctgggcacctgcaggctagtgaggagagttttttaacctatttttacacgtcgatgcagtccacttctctttacacagatgtaccgcaactcgtgaccagggctggctgggagggcaacgcagggactggacgccctacagggccgagcccaggctgtgctggagggtggggctggggtgcatggggaggggagcagaacccagaacccaggagccccgcgtgggccacacccaactcagagccggcctgagcgttcacggccaggcagcctcgcttccttgcagccaagggctgggggccagggctgctgttctgcactctggggtgggtgagggggaccctgggctgtttgctgtcccaagccccttctggaagttagaagcagcaaagggcccggggaagccgggcatgtgagaggggtgcgtccccaggtcccccagagggccctgtcgccgaggacctttctgaaggaagcagaagacgccatttcctctacttcacactgaactgtcccagccactgcatctagggggcattgggcggaagatggtgcatttccatggaccattttacacttaccttttaaagcaaagcctcattttctaaacccctgacttgtgaagcacaattcagcctccgggctgggccacgtggagagagaggatcttctcagcaaggcgagatcccgggcggcggctgacatcaggagcgccaccctgcgtcctttgctgctggttccttactggtttgtacggtcagcgctggaaacttctattaaatggatgcattctggaggcatgaagttacaagtcaagtcgccctgctcgtgtttccaaggctctcacccctcccagccaccccactttaagggttacaaacacctgctggggtccccaccccaaccccataggcaagcccccattccccagccaggccaggacagtccttccaaaactcgggaaccaaattgtatttggctactggtgactggatcctggtagccaggaaacctgcctggtggtgggggtcccagagtccaggagggctgtctggtgagctgcccatcagcctcacccctgcagccaggcatgtccctggggtgggcacagagaccccaggctctgcccgcagtggcacagaactcatctgaggccagtggctgctggggatcccctacactgggggtcagggctgccccaggtggggatgtgtgtgcacctcaccacgttcacttcagggtaccccaagaggctgaaggggaaggaccaaaaggccga

SEQ ID NO: 168121 - DNA, 4717 bp, Homo sapiens
  Payload ID: 13070
  Gene Symbol: KCNT1
  Gene Name: potassium channel, sodium activated subfamily T, member 1
  Uniprot ID: Q5JUK3
  ENST ID: ENST00000371757
  CDS Start-End: 68-3775
cgcgagggaagaaggtggcggctcccactcgcttctccctcgggtcgggtccgagctgccaggccgcatgccactccctgacggggcgcggaccccggggggcgtctgccgggaggcgcgcggcgggggctacaccaaccggaccttcgagtttgacgacggccaatgcgcccccaggcggccctgcgcgggggacggcgcgctcctggacaccgccggcttcaagatgagcgacctggactccgaggtgctgcccttgccgccgcgctaccgcttccgggacctgctgctgggcgacccgtccttccagaacgacgacagggtccaggtggagttctacgtcaacgagaacaccttcaaggagcggctcaagctgttcttcatcaaaaaccaaagatcgagcctgaggatccggctgttcaacttctccctgaagctgctcacctgcctgctctacattgtgcgcgtcctgctcgatgacccggccctgggcatcggatgctggggctgcccaaagcagaactactccttcaatgactcgtcctccgagatcaactgggctcctattctgtgggtggagagaaagatgacactgtgggcgatccaggtcatcgtggccataataagcttcctggagacgatgcttctcatctacctcagctacaaaggcaacatctgggagcagatcttccgcgtgtccttcgtcctggagatgatcaacactctgcccttcatcatcacgatcttctggccgccgctgcggaacctgttcatccccgtctttctgaactgctggctggccaagcacgcgctggaaaacatgattaatgacttccaccgtgccatcctgcggacacagtcagccatgttcaaccaggtcctcatcctcttctgcaccctgctgtgcctcgttttcacggggacctgcggcatccagcacctggagcgggcgggcgagaacctgtccctcctgacctccttctacttctgcatcgtcaccttctccaccgtgggctacggtgacgtcacgcccaagatctggccatcgcagctgctggtggtcatcatgatctgcgtggccctcgtggtgctcccactgcagttcgaggagctcgtctacctctggatggagcggcagaagtcagggggcaactacagccgccaccgtgcgcagacggagaagcacgtggtcctgtgtgtcagctccctcaagatcgaccttctcatggacttcctgaacgagttctacgcccacccccggctccaggactattacgtggtcatcctgtgccccacggagatggatgtccaggtgcgcagagtcctgcagatccctctgtggtcccagcgggtcatctacctccagggctctgcactcaaagaccaggacctcatgcgagccaagatggacaatggggaggcctgcttcatcctcagcagcaggaacgaggtggaccgcacggctgcagaccaccagaccatcctgcgcgcctgggccgtgaaggacttcgcccccaactgccccctctacgtccagatcctcaaacctgaaaacaagtttcacgtcaagtttgctgaccacgtggtgtgtgaggaggagtgcaagtacgccatgctggcgctgaactgcatctgcccggcgacctccaccctcatcaccctgctggtgcacacgtcccgcggccaggagggacaggagtctccggagcagtggcagcgcatgtatgggcgctgctccggcaacgaggtgtaccacatccgcatgggtgacagcaagttcttccgcgagtacgagggcaagagcttcacctacgcggccttccacgcccacaagaagtatggcgtgtgcctcatcgggctgaagcgggaggacaacaagagcatcctgctgaacccggggccccggcacatcctggccgcctctgacacctgcttctacatcaacatcaccaaggaggagaactcggccttcatcttcaagcaggaggagaagcggaagaagagggccttctcggggcaggggctgcacgagggtccggcccgcctgcccgtgcacagcatcatcgcctccatggggacagtggccatggacctgcagggcacagagcaccggcctacgcagagcggcggtgggggcgggggcagcaagctggcactgcccacggagaacggctcgggcagccggcggcccagcatcgcgcccgtcctggaactggccgacagctcagccctgctgccctgcgacctgctgagcgaccagtcggaggatgaggtgacgccgtcggacgacgaggggctctccgtggtagagtatgtgaagggctaccctcccaactcgccctacatcggcagctccccaaccctgtgccacctcctgcctgtgaaagcccccttctgctgcctgcggctggacaagggctgcaagcacaacagctatgaagacgccaaggcctacgggttcaagaacaagctgatcatcgtctcggcagagacggccggcaatgggctgtacaacttcatcgtgccactgcgggcctactacagatcccgcaaggagctgaaccccatcgtgctgctgctggacaacaagcccgaccaccacttcctggaagccatctgctgcttccccatggtctactacatggagggctctgtggacaacctggacagcctgctgcagtgtggcatcatctatgcggacaacctggtggtggtggacaaggagagcaccatgagcgccgaggaggactacatggcggacgccaagaccatcgtcaacgtgcagaccatgttccggctcttccccagcctcagcatcaccacggagctcacccacccttccaacatgcgcttcatgcagttccgcgccaaggacagctactctctggctctttccaaactagaaaagagggagcgagagaatggctccaacctggccttcatgttccgcctgccgttcgccgccggccgcgtcttcagcatcagcatgttggacacactgctctaccagtccttcgtgaaggactacatgatcaccatcacccggctgctgctgggcctggacaccacgccgggctcggggtacctctgtgccatgaaaatcaccgagggcgacctgtggatccgcacgtacggccgcctcttccagaagctctgctcctccagcgccgagatccccattggcatctaccggacagagagccacgtcttctccacctcggagccccacgacctcagagcccagtcccagatctcggtgaacgtggaggactgtgaggacacacgggaagtgaaggggccctggggctcccgcgctggcaccggaggcagctcccagggccgccacacgggcggcggtgaccccgcagagcacccactgctacggcgcaagagcctgcagtgggcccggaggctgagccgcaaggcgcccaagcaggcaggccgggcggcggccgcggagtggatcagccagcagcgcctcagcctgtaccggcgctctgagcgccaggagctctccgagctggtgaagaaccgcatgaagcacctggggctgcccaccaccggctacgacgagatgaacgaccaccagaacaccctctcctacgtcctcatcaaccctccgcccgacacgaggctggagcccagtgacattgtctatctcatccgctccgaccccctggctcacgtggccagcagctcccagagccggaagagcagctgcagccacaagctgtcgtcctgcaaccccgagactcgcgacgagacacagctctgagccagccctgcacggagctcaggccaccaagcccggggtcctcaggaaggacgtggaggagcgtgtgaggacacggtggcactagcgtgaccctggggatggcacactctactcaccatggctcctgggactccaccctggaaaggagcccctcatgcggggggagggccagctcacccctgggcacctgcaggctagtgaggagagttttttaacctatttttacacgtcgatgcagtccacttctctttacacagatgtaccgcaactcgtgaccagggctggctgggagggcaacgcagggactggacgccctacagggccgagcccaggctgtgctggagggtggggctggggtgcatggggaggggagcagaacccagaacccaggagccccgcgtgggccacacccaactcagagccggcctgagcgttcacggccaggcagcctcgcttccttgcagccaagggctgggggccagggctgctgttctgcactctggggtgggtgagggggaccctgggctgtttgctgtcccaagccccttctggaagttagaagcagcaaagggcccggggaagccgggcatgtgagaggggtgcgtccccaggtcccccagagggccctgtcgccgaggacctttctgaaggaagcagaagacgccatttcctctacttcacactgaactgtcccagccactgcatctagggggcattgggcggaagatggtgcatttccatggaccattttacacttaccttttaaagcaaagcctcattttctaaacccctgacttgtgaagcacaattcagcctccgggctgggccacgtggagagagaggatcttctcagcaaggcgagatcccgggcggcggctgacatcaggagcgccaccctgcgtcctttgctgctggttccttactggtttgtacggtcagcgc

SEQ ID NO: 168122 - DNA, 3760 bp, Homo sapiens
  Payload ID: 13070
  Gene Symbol: KCNT1
  Gene Name: potassium channel, sodium activated subfamily T, member 1
  ENST ID: ENST00000486577
  CDS Start-End: 107-3760
gcgcgcgtccgcgagggcgcccgacgcgggctgaggggcgctggcgtgtgcccgcaggcggccctgcgcgggggacggcgcgctcctggacaccgccggcttcaagatgagcgacctggactccgaggtgctgcccttgccgccgcgctaccgcttccgggacctgctgctgggcgacccgtccttccagaacgacgacaggcttcctgtagaagatttcagcctggactcctccctgtctcaggtccaggtggagttctacgtcaacgagaacaccttcaaggagcggctcaagctgttcttcatcaaaaaccaaagatcgagcctgaggatccggctgttcaacttctccctgaagctgctcacctgcctgctctacattgtgcgcgtcctgctcgatgacccggccctgggcatcggatgctggggctgcccaaagcagaactactccttcaatgactcgtcctccgagatcaactgggctcctattctgtgggtggagagaaagatgacactgtgggcgatccaggtcatcgtggccataataagcttcctggagacgatgcttctcatctacctcagctacaaaggcaacatctgggagcagatcttccgcgtgtccttcgtcctggagatgatcaacactctgcccttcatcatcacgatcttctggccgccgctgcggaacctgttcatccccgtctttctgaactgctggctggccaagcacgcgctggaaaacatgattaatgacttccaccgtgccatcctgcggacacagtcagccatgttcaaccaggtcctcatcctcttctgcaccctgctgtgcctcgttttcacggggacctgcggcatccagcacctggagcgggcgggcgagaacctgtccctcctgacctccttctacttctgcatcgtcaccttctccaccgtgggctacggtgacgtcacgcccaagatctggccatcgcagctgctggtggtcatcatgatctgcgtggccctcgtggtgctcccactgcagttcgaggagctcgtctacctctggatggagcggcagaagtcagggggcaactacagccgccaccgtgcgcagacggagaagcacgtggtcctgtgtgtcagctccctcaagatcgaccttctcatggacttcctgaacgagttctacgcccacccccggctccaggactattacgtggtcatcctgtgccccacggagatggatgtccaggtgcgcagagtcctgcagatccctctgtggtcccagcgggtcatctacctccagggctctgcactcaaagaccaggacctcatgcgagccaagatggacaatggggaggcctgcttcatcctcagcagcaggaacgaggtggaccgcacggctgcagaccaccagaccatcctgcgcgcctgggccgtgaaggacttcgcccccaactgccccctctacgtccagatcctcaaacctgaaaacaagtttcacgtcaagtttgctgaccacgtggtgtgtgaggaggagtgcaagtacgccatgctggcgctgaactgcatctgcccggcgacctccaccctcatcaccctgctggtgcacacgtcccgcggccaggagggacaggagtctccggagcagtggcagcgcatgtatgggcgctgctccggcaacgaggtgtaccacatccgcatgggtgacagcaagttcttccgcgagtacgagggcaagagcttcacctacgcggccttccacgcccacaagaagtatggcgtgtgcctcatcgggctgaagcgggaggacaacaagagcatcctgctgaacccggggccccggcacatcctggccgcctctgacacctgcttctacatcaacatcaccaaggaggagaactcggccttcatcttcaagcaggaggagaagcggaagaagagggccttctcggggcaggggctgcacgagggtccggcccgcctgcccgtgcacagcatcatcgcctccatggggacagtggccatggacctgcagggcacagagcaccggcctacgcagagcggcggtgggggcgggggcagcaagctggcactgcccacggagaacggctcgggcagccggcggcccagcatcgcgcccgtcctggaactggccgacagctcagccctgctgccctgcgacctgctgagcgaccagtcggaggatgaggtgacgccgtcggacgacgaggggctctccgtggtagagtatgtgaagggctaccctcccaactcgccctacatcggcagctccccaaccctgtgccacctcctgcctgtgaaagcccccttctgctgcctgcggctggacaagggctgcaagcacaacagctatgaagacgccaaggcctacgggttcaagaacaagctgatcatcgtctcggcagagacggccggcaatgggctgtacaacttcatcgtgccactgcgggcctactacagatcccgcaaggagctgaaccccatcgtgctgctgctggacaacaagcccgaccaccacttcctggaagccatctgctgcttccccatggtctactacatggagggctctgtggacaacctggacagcctgctgcagtgtggcatcatctatgcggacaacctggtggtggtggacaaggagagcaccatgagcgccgaggaggactacatggcggacgccaagaccatcgtcaacgtgcagaccatgttccggctcttccccagcctcagcatcaccacggagctcacccacccttccaacatgcgcttcatgcagttccgcgccaaggacagctactctctggctctttccaaactagaaaagagggagcgagagaatggctccaacctggccttcatgttccgcctgccgttcgccgccggccgcgtcttcagcatcagcatgttggacacactgctctaccagtccttcgtgaaggactacatgatcaccatcacccggctgctgctgggcctggacaccacgccgggctcggggtacctctgtgccatgaaaatcaccgagggcgacctgtggatccgcacgtacggccgcctcttccagaagctctgctcctccagcgccgagatccccattggcatctaccggacagagagccacgtcttctccacctcggagccccacgacctcagagcccagtcccagatctcggtgaacgtggaggactgtgaggacacacgggaagtgaaggggccctggggctcccgcgctggcaccggaggcagctcccagggccgccacacgggcggcggtgaccccgcagagcacccactgctacggcgcaagagcctgcagtgggcccggaggctgagccgcaaggcgcccaagcaggcaggccgggcggcggccgcggagtggatcagccagcagcgcctcagcctgtaccggcgctctgagcgccaggagctctccgagctggtgaagaaccgcatgaagcacctggggctgcccaccaccggctacgaggacgtagcaaatttaacagccagtgatgtcatgaatcgggtaaacctgggatatttgcaagacgagatgaacgaccaccagaacaccctctcctacgtcctcatcaaccctccgcccgacacgaggctggagcccagtgacattgtctatctcatccgctccgaccccctggctcacgtggccagcagctcccagagccggaagagcagctgcagccacaagctgtcgtcctgcaaccccgagactcgcgacgagacacagctctga

SEQ ID NO: 168123 - DNA, 3845 bp, Homo sapiens
  Payload ID: 13070
  Gene Symbol: KCNT1
  Gene Name: potassium channel, sodium activated subfamily T, member 1
  Uniprot ID: Q5JUK3
  ENST ID: ENST00000487664
  CDS Start-End: 75-3845
agggcaacgcgagggaagaaggtggcggctcccactcgcttctccctcgggtcgggtccgagctgccaggccgcatgccactccctgacggggcgcggaccccggggggcgtctgccgggaggcgcgcggcgggggctacaccaaccggaccttcgagtttgacgacggccaatgcgcccccaggcggccctgcgcgggggacggcgcgctcctggacaccgccggcttcaagatgagcgacctggactccgaggtgctgcccttgccgccgcgctaccgcttccgggacctgctgctgggcgacccgtccttccagaacgacgacagggtccaggtggagttctacgtcaacgagaacaccttcaaggagcggctcaagctgttcttcatcaaaaaccaaagatcgagcctgaggatccggctgttcaacttctccctgaagctgctcacctgcctgctctacattgtgcgcgtcctgctcgatgacccggccctgggcatcggatgctggggctgcccaaagcagaactactccttcaatgactcgtcctccgagatcaactgggctcctattctgtgggtggagagaaagatgacactgtgggcgatccaggtcatcgtggccataataagcttcctggagacgatgcttctcatctacctcagctacaaaggcaacatctgggagcagatcttccgcgtgtccttcgtcctggagatgatcaacactctgcccttcatcatcacgatcttctggccgccgctgcggaacctgttcatccccgtctttctgaactgctggctggccaagcacgcgctggaaaacatgattaatgacttccaccgtgccatcctgcggacacagtcagccatgttcaaccaggtcctcatcctcttctgcaccctgctgtgcctcgttttcacggggacctgcggcatccagcacctggagcgggcgggcgagaacctgtccctcctgacctccttctacttctgcatcgtcaccttctccaccgtgggctacggtgacgtcacgcccaagatctggccatcgcagctgctggtggtcatcatgatctgcgtggccctcgtggtgctcccactgcagttcgaggagctcgtctacctctggatggagcggcagaagtcagggggcaactacagccgccaccgtgcgcagacggagaagcacgtggtcctgtgtgtcagctccctcaagatcgaccttctcatggacttcctgaacgagttctacgcccacccccggctccaggactattacgtggtcatcctgtgccccacggagatggatgtccaggtgcgcagagtcctgcagatccctctgtggtcccagcgggtcatctacctccagggctctgcactcaaagaccaggacctcatgcgagccaagatggacaatggggaggcctgcttcatcctcagcagcaggaacgaggtggaccgcacggctgcagaccaccagaccatcctgcgcgcctgggccgtgaaggacttcgcccccaactgccccctctacgtccagatcctcaaacctgaaaacaagtttcacgtcaagtttgctgaccacgtggtgtgtgaggaggagtgcaagtacgccatgctggcgctgaactgcatctgcccggcgacctccaccctcatcaccctgctggtgcacacgtcccgcggccaggagggacaggagtctccggagcagtggcagcgcatgtatgggcgctgctccggcaacgaggtgtaccacatccgcatgggtgacagcaagttcttccgcgagtacgagggcaagagcttcacctacgcggccttccacgcccacaagaagtatggcgtgtgcctcatcgggctgaagcgggaggacaacaagagcatcctgctgaacccggggccccggcacatcctggccgcctctgacacctgcttctacatcaacatcaccaaggaggagaactcggccttcatcttcaagcaggaggagaagcggaagaagagggccttctcggggcaggggctgcacgagggtccggcccgcctgcccgtgcacagcatcatcgcctccatggggacagtggccatggacctgcagggcacagagcaccggcctacgcagagcggcggtgggggcgggggcagcaagctggcactgcccacggagaacggctcgggcagccggcggcccagcatcgcgcccgtcctggaactggccgacagctcagccctgctgccctgcgacctgctgagcgaccagtcggaggatgaggtgacgccgtcggacgacgaggggctctccgtggtagagtatgtgaagggctaccctcccaactcgccctacatcggcagctccccaaccctgtgccacctcctgcctgtgaaagcccccttctgctgcctgcggctggacaagggctgcaagcacaacagctatgaagacgccaaggcctacgggttcaagaacaagctgatcatcgtctcggcagagacggccggcaatgggctgtacaacttcatcgtgccactgcgggcctactacagatcccgcaaggagctgaaccccatcgtgctgctgctggacaacaagcccgaccaccacttcctggaagccatctgctgcttccccatggtctactacatggagggctctgtggacaacctggacagcctgctgcagtgtggcatcatctatgcggacaacctggtggtggtggacaaggagagcaccatgagcgccgaggaggactacatggcggacgccaagaccatcgtcaacgtgcagaccatgttccggctcttccccagcctcagcatcaccacggagctcacccacccttccaacatgcgcttcatgcagttccgcgccaaggacagctactctctggctctttccaaactagaaaagagggagcgagagaatggctccaacctggccttcatgttccgcctgccgttcgccgccggccgcgtcttcagcatcagcatgttggacacactgctctaccagtccttcgtgaaggactacatgatcaccatcacccggctgctgctgggcctggacaccacgccgggctcggggtacctctgtgccatgaaaatcaccgagggcgacctgtggatccgcacgtacggccgcctcttccagaagctctgctcctccagcgccgagatccccattggcatctaccggacagagagccacgtcttctccacctcggagccccacgacctcagagcccagtcccagatctcggtgaacgtggaggactgtgaggacacacgggaagtgaaggggccctggggctcccgcgctggcaccggaggcagctcccagggccgccacacgggcggcggtgaccccgcagagcacccactgctacggcgcaagagcctgcagtgggcccggaggctgagccgcaaggcgcccaagcaggcaggccgggcggcggccgcggagtggatcagccagcagcgcctcagcctgtaccggcgctctgagcgccaggagctctccgagctggtgaagaaccgcatgaagcacctggggctgcccaccaccggctacgaggacgtagcaaatttaacagccagtgatgtcatgaatcgggtaaacctgggatatttgcaagacgagatgaacgaccaccagaacaccctctcctacgtcctcatcaaccctccgcccgacacgaggctggagcccagtgacattgtctatctcatccgctccgaccccctggctcacgtggccagcagctcccagagccggaagagcagctgcagccacaagctgtcgtcctgcaaccccgagactcgcgacgagacacagctctga

SEQ ID NO: 168124 - DNA, 3708 bp, Homo sapiens
  Payload ID: 13070
  Gene Symbol: KCNT1
  Gene Name: potassium channel, sodium activated subfamily T, member 1
  ENST ID: ENST00000490355
  CDS Start-End: 1-3708
atggcgcgggccaagctgccgcgctcgccgtccgagggcaaggcgggcccggggggcgccccagccggcgccgcagcccccgaggagcctcacgggctcagcccgctgctgccggcccgcggcgggggctccgtgggcagcgacgtgggccagaggcttcctgtagaagatttcagcctggactcctccctgtctcaggtccaggtggagttctacgtcaacgagaacaccttcaaggagcggctcaagctgttcttcatcaaaaaccaaagatcgagcctgaggatccggctgttcaacttctccctgaagctgctcacctgcctgctctacattgtgcgcgtcctgctcgatgacccggccctgggcatcggatgctggggctgcccaaagcagaactactccttcaatgactcgtcctccgagatcaactgggctcctattctgtgggtggagagaaagatgacactgtgggcgatccaggtcatcgtggccataataagcttcctggagacgatgcttctcatctacctcagctacaaaggcaacatctgggagcagatcttccgcgtgtccttcgtcctggagatgatcaacactctgcccttcatcatcacgatcttctggccgccgctgcggaacctgttcatccccgtctttctgaactgctggctggccaagcacgcgctggaaaacatgattaatgacttccaccgtgccatcctgcggacacagtcagccatgttcaaccaggtcctcatcctcttctgcaccctgctgtgcctcgttttcacggggacctgcggcatccagcacctggagcgggcgggcgagaacctgtccctcctgacctccttctacttctgcatcgtcaccttctccaccgtgggctacggtgacgtcacgcccaagatctggccatcgcagctgctggtggtcatcatgatctgcgtggccctcgtggtgctcccactgcagttcgaggagctcgtctacctctggatggagcggcagaagtcagggggcaactacagccgccaccgtgcgcagacggagaagcacgtggtcctgtgtgtcagctccctcaagatcgaccttctcatggacttcctgaacgagttctacgcccacccccggctccaggactattacgtggtcatcctgtgccccacggagatggatgtccaggtgcgcagagtcctgcagatccctctgtggtcccagcgggtcatctacctccagggctctgcactcaaagaccaggacctcatgcgagccaagatggacaatggggaggcctgcttcatcctcagcagcaggaacgaggtggaccgcacggctgcagaccaccagaccatcctgcgcgcctgggccgtgaaggacttcgcccccaactgccccctctacgtccagatcctcaaacctgaaaacaagtttcacgtcaagtttgctgaccacgtggtgtgtgaggaggagtgcaagtacgccatgctggcgctgaactgcatctgcccggcgacctccaccctcatcaccctgctggtgcacacgtcccgcggccaggagggacaggagtctccggagcagtggcagcgcatgtatgggcgctgctccggcaacgaggtgtaccacatccgcatgggtgacagcaagttcttccgcgagtacgagggcaagagcttcacctacgcggccttccacgcccacaagaagtatggcgtgtgcctcatcgggctgaagcgggaggacaacaagagcatcctgctgaacccggggccccggcacatcctggccgcctctgacacctgcttctacatcaacatcaccaaggaggagaactcggccttcatcttcaagcaggaggagaagcggaagaagagggccttctcggggcaggggctgcacgagggtccggcccgcctgcccgtgcacagcatcatcgcctccatggtggccatggacctgcagggcacagagcaccggcctacgcagagcggcggtgggggcgggggcagcaagctggcactgcccacggagaacggctcgggcagccggcggcccagcatcgcgcccgtcctggaactggccgacagctcagccctgctgccctgcgacctgctgagcgaccagtcggaggatgaggtgacgccgtcggacgacgaggggctctccgtggtagagtatgtgaagggctaccctcccaactcgccctacatcggcagctccccaaccctgtgccacctcctgcctgtgaaagcccccttctgctgcctgcggctggacaagggctgcaagcacaacagctatgaagacgccaaggcctacgggttcaagaacaagctgatcatcgtctcggcagagacggccggcaatgggctgtacaacttcatcgtgccactgcgggcctactacagatcccgcaaggagctgaaccccatcgtgctgctgctggacaacaagcccgaccaccacttcctggaagccatctgctgcttccccatggtctactacatggagggctctgtggacaacctggacagcctgctgcagtgtggcatcatctatgcggacaacctggtggtggtggacaaggagagcaccatgagcgccgaggaggactacatggcggacgccaagaccatcgtcaacgtgcagaccatgttccggctcttccccagcctcagcatcaccacggagctcacccacccttccaacatgcgcttcatgcagttccgcgccaaggacagctactctctggctctttccaaactagaaaagagggagcgagagaatggctccaacctggccttcatgttccgcctgccgttcgccgccggccgcgtcttcagcatcagcatgttggacacactgctctaccagtccttcgtgaaggactacatgatcaccatcacccggctgctgctgggcctggacaccacgccgggctcggggtacctctgtgccatgaaaatcaccgagggcgacctgtggatccgcacgtacggccgcctcttccagaagctctgctcctccagcgccgagatccccattggcatctaccggacagagagccacgtcttctccacctcggagccccacgacctcagagcccagtcccagatctcggtgaacgtggaggactgtgaggacacacgggaagtgaaggggccctggggctcccgcgctggcaccggaggcagctcccagggccgccacacgggcggcggtgaccccgcagagcacccactgctacggcgcaagagcctgcagtgggcccggaggctgagccgcaaggcgcccaagcaggcaggccgggcggcggccgcggagtggatcagccagcagcgcctcagcctgtaccggcgctctgagcgccaggagctctccgagctggtgaagaaccgcatgaagcacctggggctgcccaccaccggctacgaggacgtagcaaatttaacagccagtgatgtcatgaatcgggtaaacctgggatatttgcaagacgagatgaacgaccaccagaacaccctctcctacgtcctcatcaaccctccgcccgacacgaggctggagcccagtgacattgtctatctcatccgctccgaccccctggctcacgtggccagcagctcccagagccggaagagcagctgcagccacaagctgtcgtcctgcaaccccgagactcgcgacgagacacagctctga

SEQ ID NO: 168125 - DNA, 4738 bp, Homo sapiens
  Payload ID: 13070
  Gene Symbol: KCNT1
  Gene Name: potassium channel, sodium activated subfamily T, member 1
  ENST ID: ENST00000460750
  CDS Start-End: 47-415
ctcccactcgcttctccctcgggtcgggtccgagctgccaggccgcatgccactccctgacggggcgcggaccccggggggcgtctgccgggaggcgcgcggcgggggctacaccaaccggaccttcgagtttgacgacggccaatgcgcccccaggcggccctgcgcgggggacggcgcgctcctggacaccgccggcttcaagatgagcgacctggactccgaggtgctgcccttgccgccgcgctaccgcttccgggacctgctgctgggcgacccgtccttccagaacgacgacagggtccaggtggagttctacgtcaacgagaacaccttcaaggagcggctcaagctgttcttcatcaaaaaccaaagatcgagtcagaagagggcagaacccactaggagagtttgagaaggagaactgggccctgactgactctcaagctactttcctagctggggctgcccaaagcagaactactccttcaatgactcgtcctccgagatcaactgggctcctattctgtgggtggagagaaagatgacactgtgggcgatccaggtcatcgtggccataataagcttcctggagacgatgcttctcatctacctcagctacaaaggcaacatctgggagcagatcttccgcgtgtccttcgtcctggagatgatcaacactctgcccttcatcatcacgatcttctggccgccgctgcggaacctgttcatccccgtctttctgaactgctggctggccaagcacgcgctggaaaacatgattaatgacttccaccgtgccatcctgcggacacagtcagccatgttcaaccaggtcctcatcctcttctgcaccctgctgtgcctcgttttcacggggacctgcggcatccagcacctggagcgggcgggcgagaacctgtccctcctgacctccttctacttctgcatcgtcaccttctccaccgtgggctacggtgacgtcacgcccaagatctggccatcgcagctgctggtggtcatcatgatctgcgtggccctcgtggtgctcccactgcagttcgaggagctcgtctacctctggatggagcggcagaagtcagggggcaactacagccgccaccgtgcgcagacggagaagcacgtggtcctgtgtgtcagctccctcaagatcgaccttctcatggacttcctgaacgagttctacgcccacccccggctccaggactattacgtggtcatcctgtgccccacggagatggatgtccaggtgcgcagagtcctgcagatccctctgtggtcccagcgggtcatctacctccagggctctgcactcaaagaccaggacctcatgcgagccaagatggacaatggggaggcctgcttcatcctcagcagcaggaacgaggtggaccgcacggctgcagaccaccagaccatcctgcgcgcctgggccgtgaaggacttcgcccccaactgccccctctacgtccagatcctcaaacctgaaaacaagtttcacgtcaagtttgctgaccacgtggtgtgtgaggaggagtgcaagtacgccatgctggcgctgaactgcatctgcccggcgacctccaccctcatcaccctgctggtgcacacgtcccgcggccaggagggacaggagtctccggagcagtggcagcgcatgtatgggcgctgctccggcaacgaggtgtaccacatccgcatgggtgacagcaagttcttccgcgagtacgagggcaagagcttcacctacgcggccttccacgcccacaagaagtatggcgtgtgcctcatcgggctgaagcgggaggacaacaagagcatcctgctgaacccggggccccggcacatcctggccgcctctgacacctgcttctacatcaacatcaccaaggaggagaactcggccttcatcttcaagcaggaggagaagcggaagaagagggccttctcggggcaggggctgcacgagggtccggcccgcctgcccgtgcacagcatcatcgcctccatggggacagtggccatggacctgcagggcacagagcaccggcctacgcagagcggcggtgggggcgggggcagcaagctggcactgcccacggagaacggctcgggcagccggcggcccagcatcgcgcccgtcctggaactggccgacagctcagccctgctgccctgcgacctgctgagcgaccagtcggaggatgaggtgacgccgtcggacgacgaggggctctccgtggtagagtatgtgaagggctaccctcccaactcgccctacatcggcagctccccaaccctgtgccacctcctgcctgtgaaagcccccttctgctgcctgcggctggacaagggctgcaagcacaacagctatgaagacgccaaggcctacgggttcaagaacaagctgatcatcgtctcggcagagacggccggcaatgggctgtacaacttcatcgtgccactgcgggcctactacagatcccgcaaggagctgaaccccatcgtgctgctgctggacaacaagcccgaccaccacttcctggaagccatctgctgcttccccatggtctactacatggagggctctgtggacaacctggacagcctgctgcagtgtggcatcatctatgcggacaacctggtggtggtggacaaggagagcaccatgagcgccgaggaggactacatggcggacgccaagaccatcgtcaacgtgcagaccatgttccggctcttccccagcctcagcatcaccacggagctcacccacccttccaacatgcgcttcatgcagttccgcgccaaggacagctactctctggctctttccaaactagaaaagagggagcgagagaatggctccaacctggccttcatgttccgcctgccgttcgccgccggccgcgtcttcagcatcagcatgttggacacactgctctaccagtccttcgtgaaggactacatgatcaccatcacccggctgctgctgggcctggacaccacgccgggctcggggtacctctgtgccatgaaaatcaccgagggcgacctgtggatccgcacgtacggccgcctcttccagaagctctgctcctccagcgccgagatccccattggcatctaccggacagagagccacgtcttctccacctcggagccccacgacctcagagcccagtcccagatctcggtgaacgtggaggactgtgaggacacacgggaagtgaaggggccctggggctcccgcgctggcaccggaggcagctcccagggccgccacacgggcggcggtgaccccgcagagcacccactgctacggcgcaagagcctgcagtgggcccggaggctgagccgcaaggcgcccaagcaggcaggccgggcggcggccgcggagtggatcagccagcagcgcctcagcctgtaccggcgctctgagcgccaggagctctccgagctggtgaagaaccgcatgaagcacctggggctgcccaccaccggctacgaggacgtagcaaatttaacagccagtgatgtcatgaatcgggtaaacctgggatatttgcaagacgagatgaacgaccaccagaacaccctctcctacgtcctcatcaaccctccgcccgacacgaggctggagcccagtgacattgtctatctcatccgctccgaccccctggctcacgtggccagcagctcccagagccggaagagcagctgcagccacaagctgtcgtcctgcaaccccgagactcgcgacgagacacagctctgagccagccctgcacggagctcaggccaccaagcccggggtcctcaggaaggacgtggaggagcgtgtgaggacacggtggcactagcgtgaccctggggatggcacactctactcaccatggctcctgggactccaccctggaaaggagcccctcatgcggggggagggccagctcacccctgggcacctgcaggctagtgaggagagttttttaacctatttttacacgtcgatgcagtccacttctctttacacagatgtaccgcaactcgtgaccagggctggctgggagggcaacgcagggactggacgccctacagggccgagcccaggctgtgctggagggtggggctggggtgcatggggaggggagcagaacccagaacccaggagccccgcgtgggccacacccaactcagagccggcctgagcgttcacggccaggcagcctcgcttccttgcagccaagggctgggggccagggctgctgttctgcactctggggtgggtgagggggaccctgggctgtttgctgtcccaagccccttctggaagttagaagcagcaaagggcccggggaagccgggcatgtgagaggggtgcgtccccaggtcccccagagggccctgtcgccgaggacctttctgaaggaagcagaagacgccatttcctctacttcacactgaactgtcccagccactgcatctagggggcattgggcggaagatggtgcatttccatggaccattttacacttaccttttaaagcaaagcctcattttctaaacccctgacttgtgaagcacaattcagcctccgggctgggccacgtggagagagaggatcttctcagcaaggcgagatcccgggcggcggctgacatcaggagcgccaccctgcgtcctttgctgctggttccttactggtttgtacggtcagcgc

SEQ ID NO: 168126 - DNA, 3696 bp, Homo sapiens
  Payload ID: 13070
  Gene Symbol: KCNT1
  Gene Name: potassium channel, sodium activated subfamily T, member 1
  Uniprot ID: Q5JUK3
  ENST ID: ENST00000488444
  CDS Start-End: 4-3696
aggatggcgcgggccaagctgccgcgctcgccgtccgagggcaaggcgggcccggggggcgccccagccggcgccgcagcccccgaggagcctcacgggctcagcccgctgctgccggcccgcggcgggggctccgtgggcagcgacgtgggccagaggcttcctgtagaagatttcagcctggactcctccctgtctcaggtccaggtggagttctacgtcaacgagaacaccttcaaggagcggctcaagctgttcttcatcaaaaaccaaagatcgagcctgaggatccggctgttcaacttctccctgaagctgctcacctgcctgctctacattgtgcgcgtcctgctcgatgacccggccctgggcatcggatgctggggctgcccaaagcagaactactccttcaatgactcgtcctccgagatcaactgggctcctattctgtgggtggagagaaagatgacactgtgggcgatccaggtcatcgtggccataataagcttcctggagacgatgcttctcatctacctcagctacaaaggcaacatctgggagcagatcttccgcgtgtccttcgtcctggagatgatcaacactctgcccttcatcatcacgatcttctggccgccgctgcggaacctgttcatccccgtctttctgaactgctggctggccaagcacgcgctggaaaacatgattaatgacttccaccgtgccatcctgcggacacagtcagccatgttcaaccaggtcctcatcctcttctgcaccctgctgtgcctcgttttcacggggacctgcggcatccagcacctggagcgggcgggcgagaacctgtccctcctgacctccttctacttctgcatcgtcaccttctccaccgtgggctacggtgacgtcacgcccaagatctggccatcgcagctgctggtggtcatcatgatctgcgtggccctcgtggtgctcccactgcagttcgaggagctcgtctacctctggatggagcggcagaagtcagggggcaactacagccgccaccgtgcgcagacggagaagcacgtggtcctgtgtgtcagctccctcaagatcgaccttctcatggacttcctgaacgagttctacgcccacccccggctccaggactattacgtggtcatcctgtgccccacggagatggatgtccaggtgcgcagagtcctgcagatccctctgtggtcccagcgggtcatctacctccagggctctgcactcaaagaccaggacctcatgcgagccaagatggacaatggggaggcctgcttcatcctcagcagcaggaacgaggtggaccgcacggctgcagaccaccagaccatcctgcgcgcctgggccgtgaaggacttcgcccccaactgccccctctacgtccagatcctcaaacctgaaaacaagtttcacgtcaagtttgctgaccacgtggtgtgtgaggaggagtgcaagtacgccatgctggcgctgaactgcatctgcccggcgacctccaccctcatcaccctgctggtgcacacgtcccgcggccaggagggacaggagtctccggagcagtggcagcgcatgtatgggcgctgctccggcaacgaggtgtaccacatccgcatgggtgacagcaagttcttccgcgagtacgagggcaagagcttcacctacgcggccttccacgcccacaagaagtatggcgtgtgcctcatcgggctgaagcgggaggacaacaagagcatcctgctgaacccggggccccggcacatcctggccgcctctgacacctgcttctacatcaacatcaccaaggaggagaactcggccttcatcttcaagcaggaggagaagcggaagaagagggccttctcggggcaggggctgcacgagggtccggcccgcctgcccgtgcacagcatcatcgcctccatggggacagtggccatggacctgcagggcacagagcaccggcctacgcagagcggcggtgggggcgggggcagcaagctggcactgcccacggagaacggctcgggcagccggcggcccagcatcgcgcccgtcctggaactggccgacagctcagccctgctgccctgcgacctgctgagcgaccagtcggaggatgaggtgacgccgtcggacgacgaggggctctccgtggtagagtatgtgaagggctaccctcccaactcgccctacatcggcagctccccaaccctgtgccacctcctgcctgtgaaagcccccttctgctgcctgcggctggacaagggctgcaagcacaacagctatgaagacgccaaggcctacgggttcaagaacaagctgatcatcgtctcggcagagacggccggcaatgggctgtacaacttcatcgtgccactgcgggcctactacagatcccgcaaggagctgaaccccatcgtgctgctgctggacaacaagcccgaccaccacttcctggaagccatctgctgcttccccatggtctactacatggagggctctgtggacaacctggacagcctgctgcagtgtggcatcatctatgcggacaacctggtggtggtggacaaggagagcaccatgagcgccgaggaggactacatggcggacgccaagaccatcgtcaacgtgcagaccatgttccggctcttccccagcctcagcatcaccacggagctcacccacccttccaacatgcgcttcatgcagttccgcgccaaggacagctactctctggctctttccaaactagaaaagagggagcgagagaatggctccaacctggccttcatgttccgcctgccgttcgccgccggccgcgtcttcagcatcagcatgttggacacactgctctaccagtccttcgtgaaggactacatgatcaccatcacccggctgctgctgggcctggacaccacgccgggctcggggtacctctgtgccatgaaaatcaccgagggcgacctgtggatccgcacgtacggccgcctcttccagaagctctgctcctccagcgccgagatccccattggcatctaccggacagagagccacgtcttctccacctcggagtcccagatctcggtgaacgtggaggactgtgaggacacacgggaagtgaaggggccctggggctcccgcgctggcaccggaggcagctcccagggccgccacacgggcggcggtgaccccgcagagcacccactgctacggcgcaagagcctgcagtgggcccggaggctgagccgcaaggcgcccaagcaggcaggccgggcggcggccgcggagtggatcagccagcagcgcctcagcctgtaccggcgctctgagcgccaggagctctccgagctggtgaagaaccgcatgaagcacctggggctgcccaccaccggctacgaggacgtagcaaatttaacagccagtgatgtcatgaatcgggtaaacctgggatatttgcaagacgagatgaacgaccaccagaacaccctctcctacgtcctcatcaaccctccgcccgacacgaggctggagcccagtgacattgtctatctcatccgctccgaccccctggctcacgtggccagcagctcccagagccggaagagcagctgcagccacaagctgtcgtcctgcaaccccgagactcgcgacgagacacagctctga

SEQ ID NO: 168127 - DNA, 3678 bp, Homo sapiens
  Payload ID: 13070
  Gene Symbol: KCNT1
  Gene Name: potassium channel, sodium activated subfamily T, member 1
  ENST ID: ENST00000491806
  CDS Start-End: 19-3669
gccgagcgctcccgcaggatggcgcgggccaagctgccgcgctcgccgtccgagggcaaggcgggcccggggggcgccccagccggcgccgcagcccccgaggagcctcacgggctcagcccgctgctgccggcccgcggcgggggctccgtgggcagcgacgtgggccagaggcttcctgtagaagatttcagcctggactcctccctgtctcaggtccaggtggagttctacgtcaacgagaacaccttcaaggagcggctcaagctgttcttcatcaaaaaccaaagatcgagcctgaggatccggctgttcaacttctccctgaagctgctcacctgcctgctctacattgtgcgcgtcctgctcgatgacccggccctgggcatcggatgctggggctgcccaaagcagaactactccttcaatgactcgtcctccgagatcaactgggctcctattctgtgggtggagagaaagatgacactgtgggcgatccaggtcatcgtggccataataagcttcctggagacgatgcttctcatctacctcagctacaaaggcaacatctgggagcagatcttccgcgtgtccttcgtcctggagatgatcaacactctgcccttcatcatcacgatcttctggccgccgctgcggaacctgttcatccccgtctttctgaactgctggctggccaagcacgcgctggaaaacatgattaatgacttccaccgtgccatcctgcggacacagtcagccatgttcaaccaggtcctcatcctcttctgcaccctgctgtgcctcgttttcacggggacctgcggcatccagcacctggagcgggcgggcgagaacctgtccctcctgacctccttctacttctgcatcgtcaccttctccaccgtgggctacggtgacgtcacgcccaagatctggccatcgcagctgctggtggtcatcatgatctgcgtggccctcgtggtgctcccactgcagttcgaggagctcgtctacctctggatggagcggcagaagtcagggggcaactacagccgccaccgtgcgcagacggagaagcacgtggtcctgtgtgtcagctccctcaagatcgaccttctcatggacttcctgaacgagttctacgcccacccccggctccaggactattacgtggtcatcctgtgccccacggagatggatgtccaggtgcgcagagtcctgcagatccctctgtggtcccagcgggtcatctacctccagggctctgcactcaaagaccaggacctcatgcgagccaagatggacaatggggaggcctgcttcatcctcagcagcaggaacgaggtggaccgcacggctgcagaccaccagaccatcctgcgcgcctgggccgtgaaggacttcgcccccaactgccccctctacgtccagatcctcaaacctgaaaacaagtttcacgtcaagtttgctgaccacgtggtgtgtgaggaggagtgcaagtacgccatgctggcgctgaactgcatctgcccggcgacctccaccctcatcaccctgctggtgcacacgtcccgcggccaggagggacaggagtctccggagcagtggcagcgcatgtatgggcgctgctccggcaacgaggtgtaccacatccgcatgggtgacagcaagttcttccgcgagtacgagggcaagagcttcacctacgcggccttccacgcccacaagaagtatggcgtgtgcctcatcgggctgaagcgggaggacaacaagagcatcctgctgaacccggggccccggcacatcctggccgcctctgacacctgcttctacatcaacatcaccaaggaggagaactcggccttcatcttcaagcaggaggagaagcggaagaagagggccttctcggggcaggggctgcacgagggtccggcccgcctgcccgtgcacagcatcatcgcctccatggggacagtggccatggacctgcagggcacagagcaccggcctacgcagagcggcggtgggggcgggggcagcaagctggcactgcccacggagaacggctcgggcagccggcggcccagcatcgcgcccgtcctggaactggccgacagctcagccctgctgccctgcgacctgctgagcgaccagtcggaggatgaggtgacgccgtcggacgacgaggggctctccgtggtagagtatgtgaagggctaccctcccaactcgccctacatcggcagctccccaaccctgtgccacctcctgcctgtgaaagcccccttctgctgcctgcggctggacaagggctgcaagcacaacagctatgaagacgccaaggcctacgggttcaagaacaagctgatcatcgtctcggcagagacggccggcaatgggctgtacaacttcatcgtgccactgcgggcctactacagatcccgcaaggagctgaaccccatcgtgctgctgctggacaacaagcccgaccaccacttcctggaagccatctgctgcttccccatggtctactacatggagggctctgtggacaacctggacagcctgctgcagtgtggcatcatctatgcggacaacctggtggtggtggacaaggagagcaccatgagcgccgaggaggactacatggcggacgccaagaccatcgtcaacgtgcagaccatgttccggctcttccccagcctcagcatcaccacggagctcacccacccttccaacatgcgcttcatgcagttccgcgccaaggacagctactctctggctctttccaaactagaaaagagggagcgagagaatggctccaacctggccttcatgttccgcctgccgttcgccgccggccgcgtcttcagcatcagcatgttggacacactgctctaccagtccttcgtgaaggactacatgatcaccatcacccggctgctgctgggcctggacaccacgccgggctcggggtacctctgtgccatgaaaatcaccgagggcgacctgtggatccgcacgtacggccgcctcttccagaagctctgctcctccagcgccgagatccccattggcatctaccggacagagagccacgtcttctccacctcggagccccacgacctcagagcccagtcccagatctcggtgaacgtggaggactgtgaggacacacgggaagtgaaggggccctggggctcccgcgctggcaccggaggcagctcccagggccgccacacgggcggcggtgaccccgcagagcacccactgctacggcgcaagagcctgcagtgggcccggaggctgagccgcaaggcgcccaagcaggcaggccgggcggcggccgcggagtggatcagccagcagcgcctcagcctgtaccggcgctctgagcgccaggagctctccgagctggtgaagaaccgcatgaagcacctggggctgcccaccaccggctacgacgagatgaacgaccaccagaacaccctctcctacgtcctcatcaaccctccgcccgacacgaggctggagcccagtgacattgtctatctcatccgctccgaccccctggctcacgtggccagcagctcccagagccggaagagcagctgcagccacaagctgtcgtcctgcaaccccgagactcgcgacgagacacagctctgagccagccct

SEQ ID NO: 168128 - DNA, 1024 bp, Homo sapiens
  Payload ID: 13070
  Gene Symbol: KCNT1
  Gene Name: potassium channel, sodium activated subfamily T, member 1
  ENST ID: ENST00000473941
  CDS Start-End: 169-1024
cccggtgggtcgcggtggccgcgggctgcgctgcgcgggccgggcctggcgggccgggggctgcgcgcgtccgcgagggcgcccgacgcgggctgaggggcgctggcgtgtgcccgcaggcggccctgcgcgggggacggcgcgctcctggacaccgccggcttcaagatgagcgacctggactccgaggtgctgcccttgccgccgcgctaccgcttccgggacctgctgctgggcgacccgtccttccagaacgacgacagggtccaggtggagttctacgtcaacgagaacaccttcaaggagcggctcaagctgttcttcatcaaaaaccaaagatcgagcctgaggatccggctgttcaacttctccctgaagctgctcacctgcctgctctacattgtgcgcgtcctgctcgatgacccggccctgggcatcggatgctggggctgcccaaagcagaactactccttcaatgactcgtcctccgagatcaactgggctcctattctgtgggtggagagaaagatgacactgtgggcgatccaggtcatcgtggccataataagcttcctggagacgatgcttctcatctacctcagctacaaaggcaacatctgggagcagatcttccgcgtgtccttcgtcctggagatgatcaacactctgcccttcatcatcacgatcttctggccgccgctgcggaacctgttcatccccgtctttctgaactgctggctggccaagcacgcgctggaaaacatgattaatgacttccaccgtgccatcctgcggacacagtcagccatgttcaaccaggtcctcatcctcttctgcaccctgctgtgcctcgttttcacggggacctgcggcatccagcacctggagcgggcgggcgagaacctgtccctcctgacctccttctacttctgcatcgtcaccttctccaccgtgggctacggtgacgtcacgcccaagatctggccatcgcagctgctggtggtcatcatgatctgcgtggccc

SEQ ID NO: 168129 - DNA, 3948 bp, Homo sapiens
  Payload ID: 13070
  Gene Symbol: KCNT1
  Gene Name: potassium channel, sodium activated subfamily T, member 1
  ENST ID: ENST00000631073
  CDS Start-End: 9-3722
cccgcaggatggcgcgggccaagctgccgcgctcgccgtccgagggcaaggcgggcccggggggcgccccagccggcgccgcagcccccgaggagcctcacgggctcagcccgctgctgccggcccgcggcgggggctccgtgggcagcgacgtgggccagaggcttcctgtagaagatttcagcctggactcctccctgtctcaggtccaggtggagttctacgtcaacgagaacaccttcaaggagcggctcaagctgttcttcatcaaaaaccaaagatcgagcctgaggatccggctgttcaacttctccctgaagctgctcacctgcctgctctacattgtgcgcgtcctgctcgatgacccggccctgggcatcggatgctggggctgcccaaagcagaactactccttcaatgactcgtcctccgagatcaactgggctcctattctgtgggtggagagaaagatgacactgtgggcgatccaggtcatcgtggccataataagcttcctggagacgatgcttctcatctacctcagctacaaaggcaacatctgggagcagatcttccgcgtgtccttcgtcctggagatgatcaacactctgcccttcatcatcacgatcttctggccgccgctgcggaacctgttcatccccgtctttctgaactgctggctggccaagcacgcgctggaaaacatgattaatgacttccaccgtgccatcctgcggacacagtcagccatgttcaaccaggtcctcatcctcttctgcaccctgctgtgcctcgttttcacggggacctgcggcatccagcacctggagcgggcgggcgagaacctgtccctcctgacctccttctacttctgcatcgtcaccttctccaccgtgggctacggtgacgtcacgcccaagatctggccatcgcagctgctggtggtcatcatgatctgcgtggccctcgtggtgctcccactgcagttcgaggagctcgtctacctctggatggagcggcagaagtcagggggcaactacagccgccaccgtgcgcagacggagaagcacgtggtcctgtgtgtcagctccctcaagatcgaccttctcatggacttcctgaacgagttctacgcccacccccggctccaggactattacgtggtcatcctgtgccccacggagatggatgtccaggtgcgcagagtcctgcagatccctctgtggtcccagcgggtcatctacctccagggctctgcactcaaagaccaggacctcatgcgagccaagatggacaatggggaggcctgcttcatcctcagcagcaggaacgaggtggaccgcacggctgcagaccaccagaccatcctgcgcgcctgggccgtgaaggacttcgcccccaactgccccctctacgtccagatcctcaaacctgaaaacaagtttcacgtcaagtttgctgaccacgtggtgtgtgaggaggagtgcaagtacgccatgctggcgctgaactgcatctgcccggcgacctccaccctcatcaccctgctggtgcacacgtcccgcggccaggagggacaggagtctccggagcagtggcagcgcatgtatgggcgctgctccggcaacgaggtgtaccacatccgcatgggtgacagcaagttcttccgcgagtacgagggcaagagcttcacctacgcggccttccacgcccacaagaagtatggcgtgtgcctcatcgggctgaagcgggaggacaacaagagcatcctgctgaacccggggccccggcacatcctggccgcctctgacacctgcttctacatcaacatcaccaaggaggagaactcggccttcatcttcaagcaggaggagaagcggaagaagagggccttctcggggcaggggctgcacgagggtccggcccgcctgcccgtgcacagcatcatcgcctccatggggacagtggccatggacctgcagggcacagagcaccggcctacgcagagcggcggtgggggcgggggcagcaagctggcactgcccacggagaacggctcgggcagccggcggcccagcatcgcgcccgtcctggaactggccgacagctcagccctgctgccctgcgacctgctgagcgaccagtcggaggatgaggtgacgccgtcggacgacgaggggctctccgtggtagagtatgtgaagggctaccctcccaactcgccctacatcggcagctccccaaccctgtgccacctcctgcctgtgaaagcccccttctgctgcctgcggctggacaagggctgcaagcacaacagctatgaagacgccaaggcctacgggttcaagaacaagctgatcatcgtctcggcagagacggccggcaatgggctgtacaacttcatcgtgccactgcgggcctactacagatcccgcaaggagctgaaccccatcgtgctgctgctggacaacaagcccgaccaccacttcctggaagccatctgctgcttccccatggtctactacatggagggctctgtggacaacctggacagcctgctgcagtgtggcatcatctatgcggacaacctggtggtggtggacaaggagagcaccatgagcgccgaggaggactacatggcggacgccaagaccatcgtcaacgtgcagaccatgttccggctcttccccagcctcagcatcaccacggagctcacccacccttccaacatgcgcttcatgcagttccgcgccaaggacagctactctctggctctttccaaactagaaaagagggagcgagagaatggctccaacctggccttcatgttccgcctgccgttcgccgccggccgcgtcttcagcatcagcatgttggacacactgctctaccagtccttcgtgaaggactacatgatcaccatcacccggctgctgctgggcctggacaccacgccgggctcggggtacctctgtgccatgaaaatcaccgagggcgacctgtggatccgcacgtacggccgcctcttccagaagctctgctcctccagcgccgagatccccattggcatctaccggacagagagccacgtcttctccacctcggagccccacgacctcagagcccagtcccagatctcggtgaacgtggaggactgtgaggacacacgggaagtgaaggggccctggggctcccgcgctggcaccggaggcagctcccagggccgccacacgggcggcggtgaccccgcagagcacccactgctacggcgcaagagcctgcagtgggcccggaggctgagccgcaaggcgcccaagcaggcaggccgggcggcggccgcggagtggatcagccagcagcgcctcagcctgtaccggcgctctgagcgccaggagctctccgagctggtgaagaaccgcatgaagcacctggggctgcccaccaccggctacgaggacgtagcaaatttaacagccagtgatgtcatgaatcgggtaaacctgggatatttgcaagacgagatgaacgaccaccagaacaccctctcctacgtcctcatcaaccctccgcccgacacgaggctggagcccagtgacattgtctatctcatccgctccgaccccctggctcacgtggccagcagctcccagagccggaagagcagctgcagccacaagctgtcgtcctgcaaccccgagactcgcgacgagacacagctctgagccagccctgcacggagctcaggccaccaagcccggggtcctcaggaaggacgtggaggagcgtgtgaggacacggtggcactagcgtgaccctggggatggcacactctactcaccatggctcctgggactccaccctggaaaggagcccctcatgcggggggagggccagctcacccctgggcacctgcaggctagtgaggagagttttttaacctatttttac

SEQ ID NO: 168130 - DNA, 7057 bp, Homo sapiens
  Payload ID: 13070
  Gene Symbol: KCNT1
  Gene Name: potassium channel, sodium activated subfamily T, member 1
  Uniprot ID: Q5JUK3
  ENST ID: ENST00000628528
  CDS Start-End: 75-3710
agggcaacgcgagggaagaaggtggcggctcccactcgcttctccctcgggtcgggtccgagctgccaggccgcatgccactccctgacggggcgcggaccccggggggcgtctgccgggaggcgcgcggcgggggctacaccaaccggaccttcgagtttgacgacggccaatgcgcccccagggtccaggtggagttctacgtcaacgagaacaccttcaaggagcggctcaagctgttcttcatcaaaaaccaaagatcgagcctgaggatccggctgttcaacttctccctgaagctgctcacctgcctgctctacattgtgcgcgtcctgctcgatgacccggccctgggcatcggatgctggggctgcccaaagcagaactactccttcaatgactcgtcctccgagatcaactgggctcctattctgtgggtggagagaaagatgacactgtgggcgatccaggtcatcgtggccataataagcttcctggagacgatgcttctcatctacctcagctacaaaggcaacatctgggagcagatcttccgcgtgtccttcgtcctggagatgatcaacactctgcccttcatcatcacgatcttctggccgccgctgcggaacctgttcatccccgtctttctgaactgctggctggccaagcacgcgctggaaaacatgattaatgacttccaccgtgccatcctgcggacacagtcagccatgttcaaccaggtcctcatcctcttctgcaccctgctgtgcctcgttttcacggggggttgcaggacctgcggcatccagcacctggagcgggcgggcgagaacctgtccctcctgacctccttctacttctgcatcgtcaccttctccaccgtgggctacggtgacgtcacgcccaagatctggccatcgcagctgctggtggtcatcatgatctgcgtggccctcgtggtgctcccactgcagttcgaggagctcgtctacctctggatggagcggcagaagtcagggggcaactacagccgccaccgtgcgcagacggagaagcacgtggtcctgtgtgtcagctccctcaagatcgaccttctcatggacttcctgaacgagttctacgcccacccccggctccaggactattacgtggtcatcctgtgccccacggagatggatgtccaggtgcgcagagtcctgcagatccctctgtggtcccagcgggtcatctacctccagggctctgcactcaaagaccaggacctcatgcgagccaagatggacaatggggaggcctgcttcatcctcagcagcaggaacgaggtggaccgcacggctgcagaccaccagaccatcctgcgcgcctgggccgtgaaggacttcgcccccaactgccccctctacgtccagatcctcaaacctgaaaacaagtttcacgtcaagtttgctgaccacgtggtgtgtgaggaggagtgcaagtacgccatgctggcgctgaactgcatctgcccggcgacctccaccctcatcaccctgctggtgcacacgtcccgcggccaggagggacaggagtctccggagcagtggcagcgcatgtatgggcgctgctccggcaacgaggtgtaccacatccgcatgggtgacagcaagttcttccgcgagtacgagggcaagagcttcacctacgcggccttccacgcccacaagaagtatggcgtgtgcctcatcgggctgaagcgggaggacaacaagagcatcctgctgaacccggggccccggcacatcctggccgcctctgacacctgcttctacatcaacatcaccaaggaggagaactcggccttcatcttcaagcaggaggagaagcggaagaagagggccttctcggggcaggggctgcacgagggtccggcccgcctgcccgtgcacagcatcatcgcctccatggggacagtggccatggacctgcagggcacagagcaccggcctacgcagagcggcggtgggggcgggggcagcaagctggcactgcccacggagaacggctcgggcagccggcggcccagcatcgcgcccgtcctggaactggccgacagctcagccctgctgccctgcgacctgctgagcgaccagtcggaggatgaggtgacgccgtcggacgacgaggggctctccgtggtagagtatgtgaagggctaccctcccaactcgccctacatcggcagctccccaaccctgtgccacctcctgcctgtgaaagcccccttctgctgcctgcggctggacaagggctgcaagcacaacagctatgaagacgccaaggcctacgggttcaagaacaagctgatcatcgtctcggcagagacggccggcaatgggctgtacaacttcatcgtgccactgcgggcctactacagatcccgcaaggagctgaaccccatcgtgctgctgctggacaacaagcccgaccaccacttcctggaagccatctgctgcttccccatggtctactacatggagggctctgtggacaacctggacagcctgctgcagtgtggcatcatctatgcggacaacctggtggtggtggacaaggagagcaccatgagcgccgaggaggactacatggcggacgccaagaccatcgtcaacgtgcagaccatgttccggctcttccccagcctcagcatcaccacggagctcacccacccttccaacatgcgcttcatgcagttccgcgccaaggacagctactctctggctctttccaaactagaaaagagggagcgagagaatggctccaacctggccttcatgttccgcctgccgttcgccgccggccgcgtcttcagcatcagcatgttggacacactgctctaccagtccttcgtgaaggactacatgatcaccatcacccggctgctgctgggcctggacaccacgccgggctcggggtacctctgtgccatgaaaatcaccgagggcgacctgtggatccgcacgtacggccgcctcttccagaagctctgctcctccagcgccgagatccccattggcatctaccggacagagagccacgtcttctccacctcggagccccacgacctcagagcccagtcccagatctcggtgaacgtggaggactgtgaggacacacgggaagtgaaggggccctggggctcccgcgctggcaccggaggcagctcccagggccgccacacgggcggcggtgaccccgcagagcacccactgctacggcgcaagagcctgcagtgggcccggaggctgagccgcaaggcgcccaagcaggcaggccgggcggcggccgcggagtggatcagccagcagcgcctcagcctgtaccggcgctctgagcgccaggagctctccgagctggtgaagaaccgcatgaagcacctggggctgcccaccaccggctacgaggacgtagcaaatttaacagccagtgatgtcatgaatcgggtaaacctgggatatttgcaagacgagatgaacgaccaccagaacaccctctcctacgtcctcatcaaccctccgcccgacacgaggctggagcccagtgacattgtctatctcatccgctccgaccccctggctcacgtggccagcagctcccagagccggaagagcagctgcagccacaagctgtcgtcctgcaaccccgagactcgcgacgagacacagctctgagccagccctgcacggagctcaggccaccaagcccggggtcctcaggaaggacgtggaggagcgtgtgaggacacggtggcactagcgtgaccctggggatggcacactctactcaccatggctcctgggactccaccctggaaaggagcccctcatgcggggggagggccagctcacccctgggcacctgcaggctagtgaggagagttttttaacctatttttacacgtcgatgcagtccacttctctttacacagatgtaccgcaactcgtgaccagggctggctgggagggcaacgcagggactggacgccctacagggccgagcccaggctgtgctggagggtggggctggggtgcatggggaggggagcagaacccagaacccaggagccccgcgtgggccacacccaactcagagccggcctgagcgttcacggccaggcagcctcgcttccttgcagccaagggctgggggccagggctgctgttctgcactctggggtgggtgagggggaccctgggctgtttgctgtcccaagccccttctggaagttagaagcagcaaagggcccggggaagccgggcatgtgagaggggtgcgtccccaggtcccccagagggccctgtcgccgaggacctttctgaaggaagcagaagacgccatttcctctacttcacactgaactgtcccagccactgcatctagggggcattgggcggaagatggtgcatttccatggaccattttacacttaccttttaaagcaaagcctcattttctaaacccctgacttgtgaagcacaattcagcctccgggctgggccacgtggagagagaggatcttctcagcaaggcgagatcccgggcggcggctgacatcaggagcgccaccctgcgtcctttgctgctggttccttactggtttgtacggtcagcgctggaaacttctattaaatggatgcattctggaggcatgaagttacaagtcaagtcgccctgctcgtgtttccaaggctctcacccctcccagccaccccactttaagggttacaaacacctgctggggtccccaccccaaccccataggcaagcccccattccccagccaggccaggacagtccttccaaaactcgggaaccaaattgtatttggctactggtgactggatcctggtagccaggaaacctgcctggtggtgggggtcccagagtccaggagggctgtctggtgagctgcccatcagcctcacccctgcagccaggcatgtccctggggtgggcacagagaccccaggctctgcccgcagtggcacagaactcatctgaggccagtggctgctggggatcccctacactgggggtcagggctgccccaggtggggatgtgtgtgcacctcaccacgttcacttcagggtaccccaagaggctgaaggggaaggaccaaaaggccgaggtgcagcccctccccggtgtcagggcagacaacacagcagctgctggaggggccggccctggccacacagactagctagtcccttactcccggcctgtctggaaccctcctgctcagaaggtgcccactagccctctgtgggggacagagccagacatgggtggtcagggagaggctgtgtggattcaggggaccagaaagtaagtcccaggaccttgatggagcggcagggattgatgttgggctagggtggccagagcctgtcccagcagggctggggtctatcacgttcctgggatccaagcagcgagcacgccctgccccgcagtcaccccgccccgcagtcgccctgcagctggaaggcccaagtctgcctcacctgggtggcctctcatgtcccccacaccctggcccccaggcgaggggggctgcacagcacctgcagggaggagaagggagagaaaagccggtctggctgctgggatgggagggccacagttccagcagtggcaggggaagctgtagcccctggagccccacactggaagagctggcctgcaggaggcaccatgggggagtcgcatgacttattcgggattgacttgcgatgtggatggtgttcccggagtcccctgtggccactccaccaccatgaggccgggaggcatcttagcctttgagcctctctccaggggtgagcggagccccccaaagagggctgaaggcttgctgcccaagaggggctgggtgagcacttggggcctctgagaacatcagtggtccgttccctcctgcacactggtggcaagtggcagcattttttcataatctccagtaatgaggccacttcgggtccagccctggacatccgaggaggaggcgggcagtccctgccccttcactaaccgcagaggatgccagctctaggccccctgctccgcctggagctcatgcgggcagccgtggacacaggtggcacccagcgcccagcggcctgtgaatcctcccgtgggcaaagctgggagccaggggctggaaccaggcaggtcagtgactgtgagatgccagctgccagcccaagaaaagctgcctgcagcatctggaaacttctgtgctctccttggcctctgtgttcttcatctccaggtttagggagcacccgggtgcctctctgcttgtcccgagcccactcaccaacagccccagcttgcacagtcatgacatcaggaaggtgggtccctgctcccagccgtcctcgtccaccatcacttctcccagcctcgtgtcctgctgacccataaaaggtccccctgcaaagtacaccaagtgaagtaggatctgagcaaaggttgagggactgaattccctaagaagtcatcactgcctagaataagcgaaaagaattttttttaatgttttacggtagaattatttgaaacatacaaaatgagtgagacacctgctattttccttattcctgttttttgtttgtttttattttccttatacctaattcatctaacagaaaactgggcagggcgcagtgtctcacacctgtaatcccagcactttgggaggccaaggcaggtggactgcttgagcccaggagttgagtttaagatcagcgtgggcaacatgatgaaccctgactgtatcaaaaagtacaaaaaaaaaaatagctagacgtggtggcatgtgcatacagtcccaggtacccaagaggctgaggaaggaggatcacctgagctggggaggttgaggctgccgtgagctgagatggcaccactgcactccagcctgggtggcagagagagaccctgtctcaaacaaaacaaacaaacaaaaaagaaaaagaaaataaaactgtttgctcaaaatcagaataccaa

SEQ ID NO: 168131 - DNA, 3606 bp, Homo sapiens
  Payload ID: 13070
  Gene Symbol: KCNT1
  Gene Name: potassium channel, sodium activated subfamily T, member 1
  ENST ID: ENST00000630792
  CDS Start-End: 1-3606
atgagcgacctggactccgaggtgctgcccttgccgccgcgctaccgcttccgggacctgctgctgggcgacccgtccttccagaacgacgacagggtccaggtggagttctacgtcaacgagaacaccttcaaggagcggctcaagctgttcttcatcaaaaaccaaagatcgagcctgaggatccggctgttcaacttctccctgaagctgctcacctgcctgctctacattgtgcgcgtcctgctcgatgacccggccctgggcatcggatgctggggctgcccaaagcagaactactccttcaatgactcgtcctccgagatcaactgggctcctattctgtgggtggagagaaagatgacactgtgggcgatccaggtcatcgtggccataataagcttcctggagacgatgcttctcatctacctcagctacaaaggcaacatctgggagcagatcttccgcgtgtccttcgtcctggagatgatcaacactctgcccttcatcatcacgatcttctggccgccgctgcggaacctgttcatccccgtctttctgaactgctggctggccaagcacgcgctggaaaacatgattaatgacttccaccgtgccatcctgcggacacagtcagccatgttcaaccaggtcctcatcctcttctgcaccctgctgtgcctcgttttcacggggacctgcggcatccagcacctggagcgggcgggcgagaacctgtccctcctgacctccttctacttctgcatcgtcaccttctccaccgtgggctacggtgacgtcacgcccaagatctggccatcgcagctgctggtggtcatcatgatctgcgtggccctcgtggtgctcccactgcagttcgaggagctcgtctacctctggatggagcggcagaagtcagggggcaactacagccgccaccgtgcgcagacggagaagcacgtggtcctgtgtgtcagctccctcaagatcgaccttctcatggacttcctgaacgagttctacgcccacccccggctccaggactattacgtggtcatcctgtgccccacggagatggatgtccaggtgcgcagagtcctgcagatccctctgtggtcccagcgggtcatctacctccagggctctgcactcaaagaccaggacctcatgcgagccaagatggacaatggggaggcctgcttcatcctcagcagcaggaacgaggtggaccgcacggctgcagaccaccagaccatcctgcgcgcctgggccgtgaaggacttcgcccccaactgccccctctacgtccagatcctcaaacctgaaaacaagtttcacgtcaagtttgctgaccacgtggtgtgtgaggaggagtgcaagtacgccatgctggcgctgaactgcatctgcccggcgacctccaccctcatcaccctgctggtgcacacgtcccgcggccaggagggacaggagtctccggagcagtggcagcgcatgtatgggcgctgctccggcaacgaggtgtaccacatccgcatgggtgacagcaagttcttccgcgagtacgagggcaagagcttcacctacgcggccttccacgcccacaagaagtatggcgtgtgcctcatcgggctgaagcgggaggacaacaagagcatcctgctgaacccggggccccggcacatcctggccgcctctgacacctgcttctacatcaacatcaccaaggaggagaactcggccttcatcttcaagcaggaggagaagcggaagaagagggccttctcggggcaggggctgcacgagggtccggcccgcctgcccgtgcacagcatcatcgcctccatggtggccatggacctgcagggcacagagcaccggcctacgcagagcggcggtgggggcgggggcagcaagctggcactgcccacggagaacggctcgggcagccggcggcccagcatcgcgcccgtcctggaactggccgacagctcagccctgctgccctgcgacctgctgagcgaccagtcggaggatgaggtgacgccgtcggacgacgaggggctctccgtggtagagtatgtgaagggctaccctcccaactcgccctacatcggcagctccccaaccctgtgccacctcctgcctgtgaaagcccccttctgctgcctgcggctggacaagggctgcaagcacaacagctatgaagacgccaaggcctacgggttcaagaacaagctgatcatcgtctcggcagagacggccggcaatgggctgtacaacttcatcgtgccactgcgggcctactacagatcccgcaaggagctgaaccccatcgtgctgctgctggacaacaagcccgaccaccacttcctggaagccatctgctgcttccccatggtctactacatggagggctctgtggacaacctggacagcctgctgcagtgtggcatcatctatgcggacaacctggtggtggtggacaaggagagcaccatgagcgccgaggaggactacatggcggacgccaagaccatcgtcaacgtgcagaccatgttccggctcttccccagcctcagcatcaccacggagctcacccacccttccaacatgcgcttcatgcagttccgcgccaaggacagctactctctggctctttccaaactagaaaagagggagcgagagaatggctccaacctggccttcatgttccgcctgccgttcgccgccggccgcgtcttcagcatcagcatgttggacacactgctctaccagtccttcgtgaaggactacatgatcaccatcacccggctgctgctgggcctggacaccacgccgggctcggggtacctctgtgccatgaaaatcaccgagggcgacctgtggatccgcacgtacggccgcctcttccagaagctctgctcctccagcgccgagatccccattggcatctaccggacagagagccacgtcttctccacctcggagccccacgacctcagagcccagtcccagatctcggtgaacgtggaggactgtgaggacacacgggaagtgaaggggccctggggctcccgcgctggcaccggaggcagctcccagggccgccacacgggcggcggtgaccccgcagagcacccactgctacggcgcaagagcctgcagtgggcccggaggctgagccgcaaggcgcccaagcaggcaggccgggcggcggccgcggagtggatcagccagcagcgcctcagcctgtaccggcgctctgagcgccaggagctctccgagctggtgaagaaccgcatgaagcacctggggctgcccaccaccggctacgaggacgtagcaaatttaacagccagtgatgtcatgaatcgggtaaacctgggatatttgcaagacgagatgaacgaccaccagaacaccctctcctacgtcctcatcaaccctccgcccgacacgaggctggagcccagtgacattgtctatctcatccgctccgaccccctggctcacgtggccagcagctcccagagccggaagagcagctgcagccacaagctgtcgtcctgcaaccccgagactcgcgacgagacacagctctga

SEQ ID NO: 168132 - DNA, 991 bp, Homo sapiens
  Payload ID: 13070
  Gene Symbol: KCNT1
  Gene Name: potassium channel, sodium activated subfamily T, member 1
  ENST ID: ENST00000631193
  CDS Start-End: 1-534
gacagctcagccctgctgccctgcgacctgctgagcgaccagtcggaggatgaggtgacgccgtcggacgacgaggggctctccgtggtagagtatgtgaagggctaccctcccaactcgccctacatcggcagctccccaaccctgtgccacctcctgcctgtgaaagcccccttctgctgcctgcggctggacaagggctgcaagcacaacagctatgaagacgccaaggcctacgggttcaagaacaagctgatcatcgtctcggcagagacggccggcaatgggctgtacaacttcatcgtgccactgcgggcctactacagatcccgcaaggagctgaaccccatcgtgctgctgctggacaacaagaccgctgtccccacaggcccgaccaccacttcctggaagccatctgctgcttccccatggtctactacatggagggctctgtggacaacctggacagcctgctgcagtgtggcatcatctatgcggacaacctggtggtggtggacaaggagagcaccatgagcgccgaggaggactacatggcggacgccaagaccatcgtcaacgtgcagaccatgttccggctcttccccagcctcagcatcaccacggagctcacccacccttccaacatgcgcttcatgcagttccgcgccaaggacagctactctctggctctttccaaactagaaaagagggagcgagagaatggctccaacctggccttcatgttccgcctgccgttcgccgccggccgcgtcttcagcatcagcatgttggacacactgctctaccagtccttcgtgaaggactacatgatcaccatcacccggctgctgctgggcctggacaccacgccgggctcggggtacctctgtgccatgaaaatcaccgagggcgacctgtggatccgcacgtacggccgcctcttccagaagctctgctcctccagcgccgagatccccattggcatctaccg

SEQ ID NO: 168133 - DNA, 4409 bp, Homo sapiens
  Payload ID: 13071
  Gene Symbol: KCNT2
  Gene Name: potassium channel, sodium activated subfamily T, member 2
  Uniprot ID: Q6UVM3
  ENST ID: ENST00000294725
  CDS Start-End: 917-4324
tttttccccgagttcagggaaacacctcccttctttcagaatgtgagaaaaaaatgggattttcctggggctgagagtggggattccctttccagaaacgtgcaattttttcatcccgcccacctggactgaaggcaatcaaagcgagggagctcgtggcatagtggaacactccaagcaccctggcccccctcctcccagagaagggtctggagccccgcaatccgctaattagctcgcccccattggttgtccccaaggcacccccgtgccgtcactgtgctatgctaatgagggggagtctcattggctgggcctccagctccatctccacagggagattgcggggagagccgggttggccgcgtctggggccgaaacccaccgcccccgattcccgccagctcagggctgtgccggatgcaagcccgcccgagggaacagtagccgggaggctgccctctgggaggatctggcaactgcctttaaggaaagtgcttcaccatcaagcggcgctcactcccacccctctcccctctttctaggcaccgcgcgtctttttcggcgaagtaactttttatacccgcctccccctagtcctggggaccagaggcggtgccgagcctgggggcggttccttggcagcgttgattcttgtcagagccagacttttgctcctgggttgggtttgcatcatccccattacaccctcgggaaagaggagccagccccctttcaagccttagcttccggctccaagcggaccccctccccctccctgtccccttccccttctcccatccctctctcggccacagcgtcttgttagtcctctccctgtactccgcaatattttctttctttctccctcctctcctccatttgttgtttgatgtttcccactctttgaggaaggatggttgatttggagagcgaagtgccccctctgcctcccaggtacaggtttcgagatttgctgctaggggaccaaggatggcaaaacgacgacagggtacaagttgaattctatatgaatgaaaatacatttaaagaaagactaaaattatttttcataaaaaaccagagatcaagtctaaggatacgcctgttcaatttttctctcaaattactaagctgcttattatacataatccgagtactactagaaaacccttcacaaggaaatgaatggtctcatatcttttgggtgaacagaagtctacctttgtggggcttacaggtttcagtggcattgataagtctgtttgaaacaatattacttggttatcttagttataagggaaacatctgggaacagattttacgaatacccttcatcttggaaataattaatgcagttcccttcattatctcaatattctggccttccttaaggaatctatttgtcccagtctttctgaactgttggcttgccaaacatgccttggaaaatatgattaatgatctacacagagccattcagcgtacacagtctgcaatgtttaatcaagttttgattttaatatctacattactatgccttatcttcacctgcatttgtgggatccaacatctggaacgaataggaaagaagctgaatctctttgactccctttatttctgcattgtgacgttttctactgtgggcttcggggatgtcactcctgaaacatggtcctccaagctttttgtagttgctatgatttgtgttgctcttgtggttctacccatacagtttgaacagctggcttatttgtggatggagagacaaaagtcaggaggaaactatagtcgacatagagctcaaactgaaaagcatgtcgtcctgtgtgtcagctcactgaagattgatttacttatggattttttaaatgaattctatgctcatcctaggctccaggattattatgtggtgattttgtgtcctactgaaatggatgtacaggttcgaagggtactgcagattccaatgtggtcccaacgagttatctaccttcaaggttcagcccttaaagatcaagacctattgagagcaaagatggatgacgctgaggcctgttttattctcagtagccgttgtgaagtggataggacatcatctgatcaccaaacaattttgagagcatgggctgtgaaagattttgctccaaattgtcctttgtatgtccagatattaaagcctgaaaataaatttcacatcaaatttgctgatcatgttgtttgtgaagaagagtttaaatacgccatgttagctttaaactgtatatgcccagcaacatctacacttattacactactggttcatacctctagagggcaagaaggccagcaatcgccagaacaatggcagaagatgtacggtagatgctccgggaatgaagtctaccacattgttttggaagaaagtacattttttgctgaatatgaaggaaagagttttacatatgcctctttccatgcacacaaaaagtttggcgtctgcttgattggtgttaggagggaggataataaaaacattttgctgaatccaggtcctcgatacattatgaattctacagacatatgcttttatattaatattaccaaagaagagaattcagcatttaaaaaccaagaccagcagagaaaaagcaatgtgtccaggtcgttttatcatggaccttccagattacctgtacatagcataattgccagcatgggtactgtggctatagacttgcaagatacaagctgtagatcagcaagtggccctaccctgtctcttcctacagagggaagcaaagaaataagaagacctagcattgctcctgttttagaggttgcagatacatcatcgattcaaacatgtgatcttctaagtgaccaatcagaagatgaaactacaccagatgaagaaatgtcttcaaacttagagtatgctaaaggttacccaccttattctccatatataggaagttcacccactttttgtcatctccttcatgaaaaagtaccattttgctgcttaagattagacaagagttgccaacataactactatgaggatgcaaaagcctatggattcaaaaataaactaattatagttgcagctgaaacagctggaaatggattatataactttattgttcctctcagggcatattatagaccaaagaaagaacttaatcccatagtactgctattggataacccgccagatatgcattttctggatgcaatctgttggtttccaatggtttactacatggtgggctctattgacaacctagatgacttactcaggtgtggagtgacttttgctgctaatatggtggttgtggataaagagagcaccatgagtgccgaggaagactacatggcagatgccaaaaccattgtgaacgtgcagacactcttcaggttgttttccagtctcagtattatcacagagctaactcaccccgccaacatgagattcatgcaattcagagccaaagactgttactctcttgctctttcaaaactggaaaagaaagaacgggagagaggctctaacttggcctttatgtttcgactgccttttgctgctgggagggtgtttagcatcagtatgttggacactctgctgtatcagtcatttgtgaaggattatatgatttctatcacgagacttctgttgggactggacactacaccaggatctgggtttctttgttctatgaaaatcactgcagatgacttatggatcagaacttatgccagactttatcagaagttgtgttcttctactggagatgttcccattggaatctacaggactgagtctcagaaacttactacatctgagtctcaaatatctatcagtgtagaagagtgggaagacaccaaagactccaaagaacaagggcaccaccgcagcaaccaccgcaactcaacatccagtgatcagtcggaccatcccttgctgcggagaaaaagcatgcagtgggcccgaagactgagcagaaaaggcccaaaacactctggtaaaacagctgaaaaaataacccagcagcgactgaacctctacaggaggtcagaaagacaagagcttgctgaacttgtgaaaaatagaatgaaacacttgggtctttctacagtgggatatgatgaaatgaatgatcatcaaagtaccctctcctacatcctgattaacccatctccagataccagaatagagctgaatgatgttgtatacttaattcgaccagatccactggcctaccttccaaacagtgagcccagtcgaagaaacagcatctgcaatgtcactggtcaagattctcgggaggaaactcaactttgataaaaataaaatgagaaacttttttcctacaaagaccttgcttgaaaccacaaaagttttgctggcacgaaagaaactagatgga

SEQ ID NO: 168134 - DNA, 5883 bp, Homo sapiens
  Payload ID: 13071
  Gene Symbol: KCNT2
  Gene Name: potassium channel, sodium activated subfamily T, member 2
  Uniprot ID: Q6UVM3
  ENST ID: ENST00000367433
  CDS Start-End: 103-3438
acagcgtcttgttagtcctctccctgtactccgcaatattttctttctttctccctcctctcctccatttgttgtttgatgtttcccactctttgaggaaggatggttgatttggagagcgaagtgccccctctgcctcccaggtacaggtttcgagatttgctgctaggggaccaaggatggcaaaacgacgacagggtacaagttgaattctatatgaatgaaaatacatttaaagaaagactaaaattatttttcataaaaaaccagagatcaagtctaaggatacgcctgttcaatttttctctcaaattactaagctgcttattatacataatccgagtactactagaaaacccttcacaaggaaatgaatggtctcatatcttttgggtgaacagaagtctacctttgtggggcttacaggtttcagtggcattgataagtctgtttgaaacaatattacttggttatcttagttataagggaaacatctgggaacagattttacgaatacccttcatcttggaaataattaatgcagttcccttcattatctcaatattctggccttccttaaggaatctatttgtcccagtctttctgaactgttggcttgccaaacatgccttggaaaatatgattaatgatctacacagagccattcagcgtacacagtctgcaatgtttaatcaagttttgattttaatatctacattactatgccttatcttcacctgcatttgtgggatccaacatctggaacgaataggaaagaagctgaatctctttgactccctttatttctgcattgtgacgttttctactgtgggcttcggggatgtcactcctgaaacatggtcctccaagctttttgtagttgctatgatttgtgttgctcttgtggttctacccatacagtttgaacagctggcttatttgtggatggagagacaaaagtcaggaggaaactatagtcgacatagagctcaaactgaaaagcatgtcgtcctgtgtgtcagctcactgaagattgatttacttatggattttttaaatgaattctatgctcatcctaggctccaggattattatgtggtgattttgtgtcctactgaaatggatgtacaggttcgaagggtactgcagattccaatgtggtcccaacgagttatctaccttcaaggttcagcccttaaagatcaagacctattgagagcaaagatggatgacgctgaggcctgttttattctcagtagccgttgtgaagtggataggacatcatctgatcaccaaacaattttgagagcatgggctgtgaaagattttgctccaaattgtcctttgtatgtccagatattaaagcctgaaaataaatttcacatcaaatttgctgatcatgttgtttgtgaagaagagtttaaatacgccatgttagctttaaactgtatatgcccagcaacatctacacttattacactactggttcatacctctagagggcaagaaggccagcaatcgccagaacaatggcagaagatgtacggtagatgctccgggaatgaagtctaccacattgttttggaagaaagtacattttttgctgaatatgaaggaaagagttttacatatgcctctttccatgcacacaaaaagtttggcgtctgcttgattggtgttaggagggaggataataaaaacattttgctgaatccaggtcctcgatacattatgaattctacagacatatgcttttatattaatattaccaaagaagagaattcagcatttaaaaaccaagaccagcagagaaaaagcaatgtgtccaggtcgttttatcatggaccttccagattacctgtacatagcataattgccagcatgggtactgtggctatagacttgcaagatacaagctgtagatcagcaagtggccctaccctgtctcttcctacagagggaagcaaagaaataagaagacctagcattgctcctgttttagaggttgcagatacatcatcgattcaaacatgtgatcttctaagtgaccaatcagaagatgaaactacaccagatgaagaaatgtcttcaaacttagagtatgctaaaggttacccaccttattctccatatataggaagttcacccactttttgtcatctccttcatgaaaaagtaccattttgctgcttaagattagacaagagttgccaacataactactatgaggatgcaaaagcctatggattcaaaaataaactaattatagttgcagctgaaacagctggaaatggattatataactttattgttcctctcagggcatattatagaccaaagaaagaacttaatcccatagtactgctattggataaccccctagatgacttactcaggtgtggagtgacttttgctgctaatatggtggttgtggataaagagagcaccatgagtgccgaggaagactacatggcagatgccaaaaccattgtgaacgtgcagacactcttcaggttgttttccagtctcagtattatcacagagctaactcaccccgccaacatgagattcatgcaattcagagccaaagactgttactctcttgctctttcaaaactggaaaagaaagaacgggagagaggctctaacttggcctttatgtttcgactgccttttgctgctgggagggtgtttagcatcagtatgttggacactctgctgtatcagtcatttgtgaaggattatatgatttctatcacgagacttctgttgggactggacactacaccaggatctgggtttctttgttctatgaaaatcactgcagatgacttatggatcagaacttatgccagactttatcagaagttgtgttcttctactggagatgttcccattggaatctacaggactgagtctcagaaacttactacatctgagtctcaaatatctatcagtgtagaagagtgggaagacaccaaagactccaaagaacaagggcaccaccgcagcaaccaccgcaactcaacatccagtgatcagtcggaccatcccttgctgcggagaaaaagcatgcagtgggcccgaagactgagcagaaaaggcccaaaacactctggtaaaacagctgaaaaaataacccagcagcgactgaacctctacaggaggtcagaaagacaagagcttgctgaacttgtgaaaaatagaatgaaacacttgggtctttctacagtgggatatgatgaaatgaatgatcatcaaagtaccctctcctacatcctgattaacccatctccagataccagaatagagctgaatgatgttgtatacttaattcgaccagatccactggcctaccttccaaacagtgagcccagtcgaagaaacagcatctgcaatgtcactggtcaagattctcgggaggaaactcaactttgataaaaataaaatgagaaacttttttcctacaaagaccttgcttgaaaccacaaaagttttgctggcacgaaagaaactagatggaaatatatgtaattctctcatatttaaaaacgtaatctcttctcttagaagtatagatcattttgaaacttaatgtactacttactggtactctccctattaatatttgaaggacctcaatggaataaatttgaaaagctaaattaaaatacaaaaatttaaatctgacatttaattgttttataataatccaaactctatgaaagcaattttaaaaattattaaggttttatgaagttgacaaaatctaactatatttggtgcatcacaatggacacagaatgctgctgctcctcttaaaaattaaatgtgtcatattatattctttaaacttactgttttacaaaattgagctcatcgtaaatgtctagtcttctcacatagagattaaccaacaaacttgtgtggctgacttttgtgtaagaatcatagtttgctttagaatacaaatctttaagtcattttaacttttttttctgccttacgatataaaaatatttatcttagaatttgagatgttcatagcatgttttattacattgaagaaactaaaacataaatgaaaagaaacactaggttcctgcactttttggtaactttatgtctagcaaatattttatgccaagaaaagcatactataaagcaaatatctattattctcctaaacgaatgcctagcatagagaaaatacttaatacacatttgttgacttaaatttaattcaaggattgaaaaattaactggatatcttgaaatatacagtaatgattgtccttagactcttgaactttaccatctttcctattcatatatctatatagtaaatttcactagaaaaattcttttaaaattgacagaagataatttataccttttatggactctgaagacacttcaaaacattaaaagtccttatgtctttggtaatgaaacaataacactcaatgaaggatgtattaaaatttttgacttaattttgaaatcgtatatatgagctatactttaacattatgagagaaaagcataaaacaaaaataggtagttcttggcttttaacattaatgcaaatcatgcagaatttgagttataaatttaaatataaattgaccattgatgatatccagtttttcattttttacctgtattgcattttccccctagagaaatagatcaaaagagcacaagagtatgcgtacatagtttaccaggtagtagaagtgtgttaaaatgttcctgtaaaagaaacattggtaaatttaaatacatactgttctaattttgtattttttaatttttgaatttgacattgagtttaattcagcaacaacaaaaaatacatataaaactagaaagggactttttttcctttcttttcataatgaagcagatcaacttaaaggataataaaatttttaaagaaaagatattctaatgtactctcaataattctacagaaataaaactgtaaagtgcaatgtgaaatcaaagattatagtcattgtataatttggcttggaggctatgaaatgtctttttttctttttggtattttacattattcacattttagaataacaagaacaccaagaattacccctaaaacagagaccctgtatttaatctactttgatcagagaagtagaatttataacaggttagctaaaattgggagcatgccttaaaacttaaagattgtatgcatatatgtgtatatgttataaacgtgaaatatatttgacacacacattcacatataaattgttaaaaactgaaggcagaatggaactaatatatgtaacagagaaaaacaataaattttatgaacttgttttatatttgcatatcaagagtcaagtatgatgtttctttaagttgactttttttacttcattatttttaggaataaatgtaagattttacaaatcttttatttccccacaagatctgaagtttggtatttttgcattatgacagttgttgagactaggattttaagctaggatatgattatatttcctatataactaaaaattttgtttcataaattttaaaataattatttttgactatgaacattagtccaaatttaatatttgacacagttcataccagcttgctacaataatgataatttattagtctttctgttatttaaagaataaaaacatgcttataaaagacttttaatgaaatgttgcctttttaaaataattatacttgcacatgaaaataaaatataaagtcaataatagtccttgtagcccaatgggaattgattctgtttattgtctgtaccattttgctaccagttacattgaactgctttaaaataaataataaaattatttctaatgatgaaaa

SEQ ID NO: 168135 - DNA, 3146 bp, Homo sapiens
  Payload ID: 13071
  Gene Symbol: KCNT2
  Gene Name: potassium channel, sodium activated subfamily T, member 2
  ENST ID: ENST00000451324
  CDS Start-End: 671-1783
ccctcctctcctccatttgttgtttgatgtttcccactctttgaggaaggatggttgatttggagagcgaagtgccccctctgcctcccaggtacaggtttcgagatttgctgctaggggaccaaggatggcaaaacgacgacagggtacaagttgaattctatatgaatgaaaatacatttaaagaaagactaaaattatttttcataaaaaaccagagatcaagtctaaggatacgcctgttcaatttttctctcaaattactaagctgcttattatacataatccgagtactactagaaaacccttcacaaggaaatgaatggtctcatatcttttgggtgaacagaagtctacctttgtggggcttacaggtttcagtggcattgataagtctgtttgaaacaatattacttggttatcttagttataagggaaacatctgggaacagattttacgaatacccttcatcttggaaataattaatgcagttcccttcattatctcaatattctggccttccttaaggaatctatttgtcccagtctttctgaactgttggcttgccaaacatgccttggaaaatatgattaatgatctacacagagccattcagcgtacacagtctgcaatgtttaatcaagttttgattttaatatctacattactatgccttatcttcacctggatcaccaaacaattttgagagcatgggctgtgaaagattttgctccaaattgtcctttgtatgtccagatattaaagcctgaaaataaatttcacatcaaatttgctgatcatgttgtttgtgaagaagagtttaaatacgccatgttagctttaaactgtatatgcccagcaacatctacacttattacactactggttcatacctctagagggcaagaaggccagcaatcgccagaacaatggcagaagatgtacggtagatgctccgggaatgaagtctaccacattgttttggaagaaagtacattttttgctgaatatgaaggaaagagttttacatatgcctctttccatgcacacaaaaagtttggcgtctgcttgattggtgttaggagggaggataataaaaacattttgctgaatccaggtcctcgatacattatgaattctacagacatatgcttttatattaatattaccaaagaagagaattcagcatttaaaaaccaagaccagcagagaaaaagcaatgtgtccaggtcgttttatcatggaccttccagattacctgtacatagcataattgccagcatgggtactgtggctatagacttgcaagatacaagctgtagatcagcaagtggccctaccctgtctcttcctacagagggaagcaaagaaataagaagacctagcattgctcctgttttagaggttgcagatacatcatcgattcaaacatgtgatcttctaagtgaccaatcagaagatgaaactacaccagatgaagaaatgtcttcaaacttagagtatgctaaaggttacccaccttattctccatatataggaagttcacccactttttgtcatctccttcatgaaaaagtaccattttgctgcttaagattagacaagagttgccaacataactactatgaggatgcaaaagcctatggattcaaaaataaactaattatagttgcagctgaaacagctggaaatggattatataactttattgttcctctcagggcatattatagaccaaagaaagaacttaatcccatagtactgctattggataacccatgacttactcaggtgtggagtgacttttgctgctaatatggtggttgtggataaagagagcaccatgagtgccgaggaagactacatggcagatgccaaaaccattgtgaacgtgcagacactcttcagaaagaacgggagagaggctctaacttggcctttatgtttcgactgccttttgctgctgggagggtgtttagcatcagtatgttggacactctgctgtatcagtcatttgtgaaggattatatgatttctatcacgagacttctgttgggactggacactacaccaggatctgggtttctttgttctatgaaaatcactgcagatgacttatggatcagaacttatgccagactttatcagaagttgtgttcttctactggagatgttcccattggaatctacaggactgagtctcagaaacttactacatctgagtctcgaaaaatagcatcacaagattttattggatctacttcctgacgttacttaaattgtctcaaatatctatcagtgtagaagagtgggaagacaccaaagactccaaagaacaagggcaccaccgcagcaaccaccgcaactcaacatccagtgatcagtcggaccatcccttgctgcggagaaaaagcatgcagtgggcccgaagactgagcagaaaaggcccaaaacactctggtaaaacagctgaaaaaataacccagcagcgactgaacctctacaggaggtcagaaagacaagagcttgctgaacttgtgaaaaatagaatgaaacacttgggtctttctacagtgggatatgatgaaatgaatgatcatcaaagtaccctctcctacatcctgattaacccatctccagataccagaatagagctgaatgatgttgtatacttaattcgaccagatccactggcctaccttccaaacagtgagcccagtcgaagaaacagcatctgcaatgtcactggtcaagattctcgggaggaaactcaactttgataaaaataaaatgagaaacttttttcctacaaagaccttgcttgaaaccacaaaagttttgctggcacgaaagaaactagatggaaatatatgtaattctctcatatttaaaaacgtaatctcttctcttagaagtatagatcattttgaaacttaatgtactacttactggtactctccctattaatatttgaaggacctcaatggaataaatttgaaaagctaaattaaaatacaaaaatttaaatctgacatttaattgttttataataatccaaactctatgaaagcaattttaaaaattattaaggttttatgaagttgacaaaatctaactatatttggtgcatcacaatggacacaga

SEQ ID NO: 168136 - DNA, 3622 bp, Homo sapiens
  Payload ID: 13071
  Gene Symbol: KCNT2
  Gene Name: potassium channel, sodium activated subfamily T, member 2
  Uniprot ID: Q6UVM3
  ENST ID: ENST00000609185
  CDS Start-End: 51-3257
ccctcctctcctccatttgttgtttgatgtttcccactctttgaggaaggatggttgatttggagagcgaagtgccccctctgcctcccaggtacaggtttcgagatttgctgctaggggaccaaggatggcaaaacgacgacagggtacaagttgaattctatatgaatgaaaatacatttaaagaaagactaaaattatttttcataaaaaaccagagatcaagtctaaggatacgcctgttcaatttttctctcaaattactaagctgcttattatacataatccgagtactactagaaaacccttcacaaggaaatgaatggtctcatatcttttgggtgaacagaagtctacctttgtggggcttacaggtttcagtggcattgataagtctgtttgaaacaatattacttggttatcttagttataagggaaacatctgggaacagattttacgaatacccttcatcttggaaataattaatgcagttcccttcattatctcaatattctggccttccttaaggaatctatttgtcccagtctttctgaactgttggcttgccaaacatgccttggaaaatatgattaatgatctacacagagccattcagcgtacacagtctgcaatgtttaatcaagttttgattttaatatctacattactatgccttatcttcacctgcatttgtgggatccaacatctggaacgaataggaaagaagctgaatctctttgactccctttatttctgcattgtgacgttttctactgtgggcttcggggatgtcactcctgaaacatggtcctccaagctttttgtagttgctatgatttgtgttgctcttgtggttctacccatacagtttgaacagctggcttatttgtggatggagagacaaaagtcaggaggaaactatagtcgacatagagctcaaactgaaaagcatgtcgtcctgtgtgtcagctcactgaagattgatttacttatggattttttaaatgaattctatgctcatcctaggctccaggattattatgtggtgattttgtgtcctactgaaatggatgtacaggttcgaagggtactgcagattccaatgtggtcccaacgagttatctaccttcaaggttcagcccttaaagatcaagacctattgagagcaaagatggatgacgctgaggcctgttttattctcagtagccgttgtgaagtggataggacatcatctgatcaccaaacaattttgagagcatgggctgtgaaagattttgctccaaattgtcctttgtatgtccagatattaaagcctgaaaataaatttcacatcaaatttgctgatcatgttgtttgtgaagaagagtttaaatacgccatgttagctttaaactgtatatgcccagcaacatctacacttattacactactggttcatacctctagagggcagtttggcgtctgcttgattggtgttaggagggaggataataaaaacattttgctgaatccaggtcctcgatacattatgaattctacagacatatgcttttatattaatattaccaaagaagagaattcagcatttaaaaaccaagaccagcagagaaaaagcaatgtgtccaggtcgttttatcatggaccttccagattacctgtacatagcataattgccagcatgggtactgtggctatagacttgcaagatacaagctgtagatcagcaagtggccctaccctgtctcttcctacagagggaagcaaagaaataagaagacctagcattgctcctgttttagaggttgcagatacatcatcgattcaaacatgtgatcttctaagtgaccaatcagaagatgaaactacaccagatgaagaaatgtcttcaaacttagagtatgctaaaggttacccaccttattctccatatataggaagttcacccactttttgtcatctccttcatgaaaaagtaccattttgctgcttaagattagacaagagttgccaacataactactatgaggatgcaaaagcctatggattcaaaaataaactaattatagttgcagctgaaacagctggaaatggattatataactttattgttcctctcagggcatattatagaccaaagaaagaacttaatcccatagtactgctattggataaccccctagatgacttactcaggtgtggagtgacttttgctgctaatatggtggttgtggataaagagagcaccatgagtgccgaggaagactacatggcagatgccaaaaccattgtgaacgtgcagacactcttcaggttgttttccagtctcagtattatcacagagctaactcaccccgccaacatgagattcatgcaattcagagccaaagactgttactctcttgctctttcaaaactggaaaagaaagaacgggagagaggctctaacttggcctttatgtttcgactgccttttgctgctgggagggtgtttagcatcagtatgttggacactctgctgtatcagtcatttgtgaaggattatatgatttctatcacgagacttctgttgggactggacactacaccaggatctgggtttctttgttctatgaaaatcactgcagatgacttatggatcagaacttatgccagactttatcagaagttgtgttcttctactggagatgttcccattggaatctacaggactgagtctcagaaacttactacatctgagtctcgaaaaatagcatcacaatctcaaatatctatcagtgtagaagagtgggaagacaccaaagactccaaagaacaagggcaccaccgcagcaaccaccgcaactcaacatccagtgatcagtcggaccatcccttgctgcggagaaaaagcatgcagtgggcccgaagactgagcagaaaaggcccaaaacactctggtaaaacagctgaaaaaataacccagcagcgactgaacctctacaggaggtcagaaagacaagagcttgctgaacttgtgaaaaatagaatgaaacacttgggtctttctacagtgggatatgatgaaatgaatgatcatcaaagtaccctctcctacatcctgattaacccatctccagataccagaatagagctgaatgatgttgtatacttaattcgaccagatccactggcctaccttccaaacagtgagcccagtcgaagaaacagcatctgcaatgtcactggtcaagattctcgggaggaaactcaactttgataaaaataaaatgagaaacttttttcctacaaagaccttgcttgaaaccacaaaagttttgctggcacgaaagaaactagatggaaatatatgtaattctctcatatttaaaaacgtaatctcttctcttagaagtatagatcattttgaaacttaatgtactacttactggtactctccctattaatatttgaaggacctcaatggaataaatttgaaaagctaaattaaaatacaaaaatttaaatctgacatttaattgttttataataatccaaactctatgaaagcaattttaaaaattattaaggttttatgaagttgacaaaatctaactatatttggtgcatcacaatggacacaga

SEQ ID NO: 168137 - DNA, 695 bp, Homo sapiens
  Payload ID: 13071
  Gene Symbol: KCNT2
  Gene Name: potassium channel, sodium activated subfamily T, member 2
  ENST ID: ENST00000466914
  CDS Start-End: 1-508
tagagctcaaactgaaaagcatgtcgtcctgtgtgtcagctcactgaagattgatttacttatggattttttaaatgaattctatgctcatcctaggctccaggattattatgtggtgattttgtgtcctactgaaatggatgtacaggttcgaagggtactgcagattccaatgtggtcccaacgagttatctaccttcaaggttcagcccttaaagatcaagacctattgagagcaaagatggatgacgctgaggcctgttttattctcagtagccgttgtgaagtggataggacatcatctgatcaccaaacaattttgagagcatgggctgtgaaagattttgctccaaattgtcctttgtatgtccagatattaaagcctgaaaataaatttcacatcaaatttgctgttctgaaggctggaaatccaagatctaggtgccaacatgatccagtgctgagaaggccagcaatcgccagaacaatggcagaagatgtacggtagatgctccgggaatgaagtctaccacattgttttggaagaaagtacattttttgctgaatatgaaggaaagagttttacatatgcctctttccatgcacacaaaaagtttggcgtctgcttgattggtgttaggagggaggataataaaaacattttgctgaatccaggtcctcgatacattatgaat

SEQ ID NO: 168138 - DNA, 3695 bp, Homo sapiens
  Payload ID: 13072
  Gene Symbol: KCNU1
  Gene Name: potassium channel, subfamily U, member 1
  Uniprot ID: A8MYU2
  ENST ID: ENST00000399881
  CDS Start-End: 38-3487
aaatgacctggcaattccgtctactgatgtctcgaacatgtttcagactaagctacgaaatgaaacttgggaagacttgccaaaaatgtcctgcacaactgagatccaagcagcattcattctctcttcctttgtgaccttcttcagtggactcatcatcctgttgatcttcaggctgatctggagatctgttaaaaaatggcaaatcatcaagggaacaggaattatcttggaactgttcacatcaggtaccatcgctaggagccatgtaagaagcctccacttccagggacaatttcgtgatcatatagaaatgttgctttcagcccagacctttgtggggcaagtgttggtgatccttgtctttgtactaagcattgggtctcttataatctatttcatcaattctgctgaccctgttggaagctgttcatcatatgaagacaaaaccattcctattgatttggttttcaatgctttctttagtttctattttggattgaggtttatggcagctgatgacaagatcaagttctggctggagatgaattcaatcgtagacatctttaccatcccaccaacctttatttcttattatttgaagagcaattggctaggtttaaggttcctaagagccttgcgcctgctagaactccctcaaatcttgcaaattctacgagccatcaagaccagtaactcagtgaagttttccaaactgctgtcaataattctcagtacctggttcacagctgcgggattcattcacctggtggaaaattctggtgatccctggctcaaaggtagaaattcacagaatatatcatattttgagtcaatttacctggtcatggcaacaacgtcaaccgttggatttggagatgtggtagccaagacatccttaggacggaccttcatcatgttcttcacactggggagtttgatattatttgcgaactatatacctgaaatggtggaactgtttgctaacaagaggaaatacaccagttcctatgaagcactcaaaggaaagaagtttattgtggtctgtggaaacatcactgtggacagtgtgaccgctttcctgaggaatttcctccgcgacaagtcaggagagatcaacactgaaattgttttcctgggagaaacccctccttctttggaacttgaaaccatatttaaatgctacttggcctacacaacgttcatttctggatctgcaatgaagtgggaggatctgaggcgagttgcggtggaatctgcagaggcatgcctgattatagccaatcctttgtgcagtgattcccatgctgaagatatttccaacattatgagggtgctctctatcaagaactatgattctaccaccagaatcatcatacagatactgcaatcccataacaaggtttatctgccaaagattcccagctggaactgggacaccggagacaacatcatctgctttgctgaattaaaacttggatttatcgcccaaggctgtttggtgccaggcttgtgtaccttcctaacatctctatttgtggagcaaaacaaaaaggttatgcctaaacagacctggaagaaacacttcttgaatagcatgaaaaacaaaattctgacccaacgtctctctgatgactttgctggaatgagctttcctgaagttgcccggctctgctttctgaagatgcacctcctgttgatagccatcgaatacaagtccctctttacggatggtttctgtggtctgatactaaatccacctccacaagtgaggatacgtaagaacacattagggttctttattgctgaaactccaaaggacgtcagaagagccttgttttactgttcagtctgtcatgatgatgtgttcattcctgagctaattacaaactgtggctgcaaaagcagaagccggcagcacatcacagtgccatcggtaaagagaatgaaaaaatgtctgaagggaatctcctctcgtatatcagggcaggattctccgccaagggtatctgcaagcacttcgagcatatcaaacttcaccaccaggactcttcaacatgatgtagaacaagattctgaccagcttgatagcagtgggatgtttcactggtgcaaaccaacctctttggacaaggtgactctgaaacgaactggcaagtcaaagtataagtttcggaaccatattgtagcatgtgtatttggagatgcccactcagccccgatggggcttcggaactttgtaatgcccttgagagccagcaactataccaggaaggagctgaaggacatagtgttcattgggtctctggactatctacagagagaatggcgatttctctggaattttccccagatatacattctgcctggatgtgcactttattctggagacctccatgcggccaacatagagcaatgctccatgtgtgctgtcttgtcccccccaccccagccatcaagcaaccagactttggtagacacagaagccatcatggcaaccctcaccatcggatccttgcaaattgactcctcctctgacccgtcaccctcagtgtcagaggagactccaggttacacaaatggacataatgagaaatcaaactgccgaaaagtccctatccttactgaactgaaaaatccttccaacattcactttattgaacagcttggtggactggaagggtccctccaagaaacaaatctgcatctcagcactgccttttctacgggcactgttttttccggcagcttcttggattctctgctggccacggccttctacaattatcatgtcctggaattgcttcagatgctggtgacaggaggagtaagttctcagctggaacaacatttagataaggataaagtctatggtgtggcagatagctgcacgtcgctcttgtctggaagaaaccggtgtaagctggggcttctgtccttacacgaaaccattttatcagacgttaatccaagaaacacctttggacaactgttctgtggctcattagatctttttggaatcctgtgtgttggcttataccgaataattgatgaagaggagctcaacccagaaaacaaaaggtttgtgatcacccggccagccaatgagttcaagctgctgccttcagatcttgtgttttgtgccatacccttcagcactgcttgttataaaaggaatgaagagttctcattgcaaaagtcatatgaaattgtaaataaagcatcacagacaacagagacacattcagacacaaattgtcctcccaccattgattcagttactgagacattgtattcaccagtctattcttaccagccgagaactaactccctctcttttcctaagcaaatagcatggaatcagagtagaacaaacagtattatatcatctcagatacctttaggtgacaatgcaaaagaaaatgaaaggaaaacttcagatgaggtttatgatgaggatccctttgcatattcagagccactatagacctgcccatattcttcacgtgctcttaacttgctgcttacaaatcatctcctgagatgctaactttgaacaaagaaaataagaatggaagcatgccatttttctgcccattgcttagtggttcatgaaggccacactgttttgggtgagacaaaagtctaatgccactggatcttgtgtgataaataaagaaatatatgatcaatgc

SEQ ID NO: 168139 - DNA, 334 bp, Homo sapiens
  Payload ID: 13072
  Gene Symbol: KCNU1
  Gene Name: potassium channel, subfamily U, member 1
  ENST ID: ENST00000518904
  CDS Start-End: 70-225
ggagatctgggatcccagaaatctacactcattaatatcacttcagatgatccagatacatgagaagcaatgataaagaaaacagaatttagcaatgtgtgcagtatattttacttaatcctgcaagcaatgctaaaaggccttctacaattatcatgtcctggaattgcttcagatgctggtgacaggaggagtaagttctcagctggaacaacatttagataaggataaagtctatggtgtggcagatagctgcacgtcgctcttgtctggaagaaaccggtgtaagctggggcttctgtccttacacgaaaccattttatcagacgttaat

SEQ ID NO: 168140 - DNA, 3745 bp, Homo sapiens
  Payload ID: 13072
  Gene Symbol: KCNU1
  Gene Name: potassium channel, subfamily U, member 1
  ENST ID: ENST00000522372
  CDS Start-End: 29-2872
ggcaattccgtctactgatgtctcgaacatgtttcagactaagctacgaaatgaaacttgggaagacttgccaaaaatgtcctgcacaactgagatccaagcagcattcattctctcttcctttgtgaccttcttcagtggactcatcatcctgttgatcttcaggctgatctggagatctgttaaaaaatggcaaatcatcaagggaacaggaattatcttggaactgttcacatcaggtaccatcgctaggagccatgtaagaagcctccacttccagggacaatttcgtgatcatatagaaatgttgctttcagcccagacctttgtggggcaagtgttggtgatccttgtctttgtactaagcattgggtctcttataatctatttcatcaattctgctgaccctgttggaagctgttcatcatatgaagacaaaaccattcctattgatttggttttcaatgctttctttagtttctattttggattgaggtttatggcagctgatgacaagatcaagttctggctggagatgaattcaatcgtagacatctttaccatcccaccaacctttatttcttattatttgaagagcaattggctaggtttaaggttcctaagagccttgcgcctgctagaactccctcaaatcttgcaaattctacgagccatcaagaccagtaactcagtgaagttttccaaactgctgtcaataattctcagtacctggttcacagctgcgggattcattcacctggtggaaaattctggtgatccctggctcaaaggtagaaattcacagaatatatcatattttgagtcaatttacctggtcatggcaacaacgtcaaccgttggatttggagatgtggtagccaagacatccttaggacggaccttcatcatgttcttcacactggggagtttgatattatttgcgaactatatacctgaaatggtggaactgtttgctaacaagaggaaatacaccagttcctatgaagcactcaaaggaaagaagtttattgtggtctgtggaaacatcactgtggacagtgtgaccgctttcctgaggaatttcctccgcgacaagtcaggagagatcaacactgaaattgttttcctgggagaaacccctccttctttggaacttgaaaccatatttaaatgctacttggcctacacaacgttcatttctggatctgcaatgaagtgggaggatctgaggcgagttgcggtggaatctgcagaggcatgcctgattatagccaatcctttgtgcagtgattcccatgctgaagatatttccaacattatgagggtgctctctatcaagaactatgattctaccaccagaatcatcatacagatactgcaatcccataacaaggtttatctgccaaagattcccagctggaactgggacaccggagacaacatcatctgctttgctgaattaaaacttggatttatcgcccaaggctgtttggtgccaggcttgtgtaccttcctaacatctctatttgtggagcaaaacaaaaaggttatgcctaaacagacctggaagaaacacttcttgaatagcatgaaaaacaaaattctgacccaacgtctctctgatgactttgctggaatgagctttcctgaagttgcccggctctgctttctgaagatgcacctcctgttgatagccatcgaatacaagtccctctttacggatggtttctgtggtctgatactaaatccacctccacaagtgaggatacgtaagaacacattagggttctttattgctgaaactccaaaggacgtcagaagagccttgttttactgttcagtctgtcatgatgatgtgttcattcctgagctaattacaaactgtggctgcaaaagcagaagccggcagcacatcacagtgccatcggtaaagagaatgaaaaaatgtctgaagggaatctcctctcgtatatcagggcaggattctccgccaagggtatctgcaagcacttcgagcatatcaaacttcaccaccaggactcttcaacatgatgtagaacaagattctgaccagcttgatagcagtgggatgtttcactggtgcaaaccaacctctttggacaaggtgactctgaaacgaactggcaagtcaaagtataagtttcggaaccatattgtagcatgtgtatttggagatgcccactcagccccgatggggcttcggaactttgtaatgcccttgagagccagcaactataccaggaaggagctgaaggacatagtgttcattgggtctctggactatctacagagagaatggcgatttctctggaattttccccagatatacattctgcctggatgtgcactttattctggagacctccatgcggccaacatagagcaatgctccatgtgtgctgtcttgtcccccccaccccagccatcaagcaaccagactttggtagacacagaagccatcatggcaaccctcaccatcggatccttgcaaattgactcctcctctgacccgtcaccctcagtgtcagaggagactccaggttacacaaatggacataatgagaaatcaaactgccgaaaagtccctatccttactgaactgaaaaatccttccaacattcactttattgaacagcttggtggactggaagggtccctccaagaaacaaatctgcatctcagcactgccttttctacgggcactgttttttccggcagcttcttggattctctgctggccacgctcatgtggaaattggccataaagggatcccagtttcaaggaagaagctctggcctttgctggccttctacaattatcatgtcctggaattgcttcagatgctggtgacaggaggagtaagttctcagctggaacaacatttagataaggataaagtctatggtgtggcagatagctgcacgtcgctcttgtctggaagaaaccggtgtaagctggggcttctgtccttacacgaaaccattttatcagacgttaatccaagaaacacctttggacaactgttctgtggctcattagatctttttggaatcctgtgtgttggcttataccgaataattgatgaagaggagctcaacccagaaaacaaaaggtttgtgatcacccggccagccaatgagttcaagctgctgccttcagatcttgtgttttgtgccatacccttcagcactgcttgttataaaaggaatgaagagttctcattgcaaaagtcatatgaaattgtaaataaagcatcacagacaacagagacacattcagacacaaattgtcctcccaccattgattcagttactgagacattgtattcaccagtctattcttaccagccgagaactaactccctctcttttcctaagcaaatagcatggaatcagagtagaacaaacagtattatatcatctcagatacctttaggtgacaatgcaaaagaaaatgaaaggaaaacttcagatgaggtttatgatgaggatccctttgcatattcagagccactatagacctgcccatattcttcacgtgctcttaacttgctgcttacaaatcatctcctgagatgctaactttgaacaaagaaaataagaatggaagcatgccatttttctgcccattgcttagtggttcatgaaggccacactgttttgggtgagacaaaagtctaatgccactggatcttgtgtgataaataaagaaatatatgatcaa

SEQ ID NO: 168141 - DNA, 560 bp, Homo sapiens
  Payload ID: 13072
  Gene Symbol: KCNU1
  Gene Name: potassium channel, subfamily U, member 1
  ENST ID: ENST00000522417
  CDS Start-End: 13-354
gatgtctcgaacatgtttcagactaagctacgaaatgaaacttgggaagacttgccaaaaatgtcctgcacaactgagatccaagcagcattcattctctcttcctttgtgaccttcttcagtggactcatcatcctgttgatcttcaggctgatctggagatctgttaaaaaatggcaaatcatcaagggaacaggaattatcttggaactgttcacatcaggtaccatcgctaggagccatgtaagaagcctccacttccagggacaatttcgtgatcatatagaaatgttgctttcagcccagacctttgtggggcaagtgttgccctgttggaagctgttcatcatatgaagacaaaaccattcctattgatttggttttcaatgctttctttagtttctattttggattgaggtttatggcagctgatgacaagatcaagttctggctggagatgaattcaatcgtagacatctttaccatcccaccaacctttatttcttattatttgaagagcaattggctaggtttaaggttcctaagagccttgcgcctgc

SEQ ID NO: 168142 - DNA, 1013 bp, Homo sapiens
  Payload ID: 13072
  Gene Symbol: KCNU1
  Gene Name: potassium channel, subfamily U, member 1
  ENST ID: ENST00000523973
  CDS Start-End: 88-1013
acagtgaactctgattcctggaattgttaccaggcgaccacggcgtcatcaaatgacctggcaattccgtctactgatgtctcgaacatgtttcagactaagctacgaaatgaaacttgggaagacttgccaaaaatgtcctgcacaactgagatccaagcagcattcattctctcttcctttgtgaccttcttcagtggactcatcatcctgttgatcttcaggctgatctggagatctgttaaaaaatggcaaatcatcaagggaacaggaattatcttggaactgttcacatcaggtaccatcgctaggagccatgtaagaagcctccacttccagggacaatttcgtgatcatatagaaatgttgctttcagcccagacctttgtggggcaagtgttggtgatccttgtctttgtactaagcattgggtctcttataatctatttcatcaattctgctgaccctgttggaagctgttcatcatatgaagacaaaaccattcctattgatttggttttcaatgctttctttagtttctattttggattgaggtttatggcagctgatgacaagatcaagttctggctggagatgaattcaatcgtagacatctttaccatcccaccaacctttatttcttattatttgaagagcaattggctaggtttaaggttcctaagagccttgcgcctgctagaactccctcaaatcttgcaaattctacgagccatcaagaccagtaactcagtgaagttttccaaactgctgtcaataattctcagtacctggttcacagctgcgggattcattcacctggtggaaaattctggtgatccctggctcaaaggtagaaattcacagaatatatcatattttgagtcaatttacctggtcatggcaacaacgtcaaccgttggatttggagatgtggtagccaagacatccttaggacggaccttcatcatgttcttcacactggggagtttggtgaagaatatttttaatatatt

SEQ ID NO: 168143 - DNA, 2161 bp, Homo sapiens
  Payload ID: 13073
  Gene Symbol: KCNK1
  Gene Name: potassium channel, two pore domain subfamily K, member 1
  Uniprot ID: O00180
  ENST ID: ENST00000366621
  CDS Start-End: 169-1179
gcaggaagacggcgctgcccggaggagcggggcgggcgggcgcgcgggggagcgggcggcgggcgggagccaggcccgggcgggggcgggggcggcggggccagaagaggcggcgggccgcgctccggccggtctgcggcgttggccttggcggcggcggtggagaagatgctgcagtccctggccggcagctcgtgcgtgcgcctggtggagcggcaccgctcggcctggtgcttcggcttcctggtgctgggctacttgctctacctggtcttcggcgcagtggtcttctcctcggtggagctgccctatgaggacctgctgcgccaggagctgcgcaagctgaagcgacgcttcttggaggagcacgagtgcctgtctgagcagcagctggagcagttcctgggccgggtgctggaggccagcaactacggcgtgtcggtgctcagcaacgcctcgggcaactggaactgggacttcacctccgcgctcttcttcgccagcaccgtgctctccaccacaggttatggccacaccgtgcccttgtcagatggaggtaaggccttctgcatcatctactccgtcattggcattcccttcaccctcctgttcctgacggctgtggtccagcgcatcaccgtgcacgtcacccgcaggccggtcctctacttccacatccgctggggcttctccaagcaggtggtggccatcgtccatgccgtgctccttgggtttgtcactgtgtcctgcttcttcttcatcccggccgctgtcttctcagtcctggaggatgactggaacttcctggaatccttttatttttgttttatttccctgagcaccattggcctgggggattatgtgcctggggaaggctacaatcaaaaattcagagagctctataagattgggatcacgtgttacctgctacttggccttattgccatgttggtagttctggaaaccttctgtgaactccatgagctgaaaaaattcagaaaaatgttctatgtgaagaaggacaaggacgaggatcaggtgcacatcatagagcatgaccaactgtccttctcctcgatcacagaccaggcagctggcatgaaagaggaccagaagcaaaatgagccttttgtggccacccagtcatctgcctgcgtggatggccctgcaaaccattgagcgtaggatttgttgcattatgctagagcaccagggtcagggtgcaaggaagaggcttaagtatgttcatttttatcagaatgcaaaagcgaaaattatgtcactttaagaaatagctactgtttgcaatgtcttattaaaaaacaacaaaaaaagacaaatggaacaaagaagctgtgaccccagcaggatgtctaatatgtgaggaaatgagatgtccacctaaaattcatatgtgacaaaattatctcgaccttacataggaggagaatacttgaagcagtatgctgctgtggttagaagcagattttatacttttaactggaaactttggggtttgcatttagatcatttagctgatggctaaatagcaaaatttatatttagaagcaaaaaaaaaaagcatagagatgtgttttataaataggtttatgtgtactggtttgcatgtacccacccaaaatgattatttttgtagaatctaagttaaacttactatttataatgcataggtaaccattaactatgtacatataaagtataaatatgtttatattctgtacatatggtttaggtcaccagatcctagtgtagttctgaaactaagactatagatattttgtttcttttgatttctctttatactaaagaatccagagttgctacaataaaataaggggaataataaacttgagagtgaataaccatagtattctgctgcaataaatgtttctaccctcttgcgatagaatggtgtcagatgtctaacatgtttataaacatttttttgaattgaacaggttatgaaaaggatttattaaaaggttaagatactttgttttgaaagtacattgtgatttgcagccacctagcactaaagcatagaacttaaacacgaatccctaaatgaacagattatgttacattaatctgagaattttaaatttagaagctaaaataaataaaaatcacagctggttgt

SEQ ID NO: 168144 - DNA, 726 bp, Homo sapiens
  Payload ID: 13073
  Gene Symbol: KCNK1
  Gene Name: potassium channel, two pore domain subfamily K, member 1
  ENST ID: ENST00000446915
  CDS Start-End: 1-726
gtcctgagggttttatctcctgatttggttagaagattgttgaatctggctgtgagagcctttcaagtgcctaaaggagagagcttgaacttccctgagagtacaccaggttatggccacaccgtgcccttgtcagatggaggtaaggccttctgcatcatctactccgtcattggcattcccttcaccctcctgttcctgacggctgtggtccagcgcatcaccgtgcacgtcacccgcaggccggtcctctacttccacatccgctggggcttctccaagcaggtggtggccatcgtccatgccgtgctccttgggtttgtcactgtgtcctgcttcttcttcatcccggccgctgtcttctcagtcctggaggatgactggaacttcctggaatccttttatttttgttttatttccctgagcaccattggcctgggggattatgtgcctggggaaggctacaatcaaaaattcagagagctctataagattgggatcacgtgttacctgctacttggccttattgccatgttggtagttctggaaaccttctgtgaactccatgagctgaaaaaattcagaaaaatgttctatgtgaagaaggacaaggacgaggatcaggtgcacatcatagagcatgaccaactgtccttctcctcgatcacagaccaggcagctggcatgaaagaggaccagaagcaaaatgagccttttgtggccacc

SEQ ID NO: 168145 - DNA, 2396 bp, Homo sapiens
  Payload ID: 13074
  Gene Symbol: KCNK10
  Gene Name: potassium channel, two pore domain subfamily K, member 10
  Uniprot ID: P57789
  ENST ID: ENST00000312350
  CDS Start-End: 123-1754
gcaaggcatggagcctgcactttactctgaatgttggtggcgccttcagagcattgttagcaagggtccatgtgatcacactgacacctgagagagtgacacaccatgtacatggctggtatatggaggatggatttaagggggacaggactgaaggctgtcgcagtgattcagtggccgttcccgcagcagcaccggtgtgccagcccaagagcgccactaacgggcaacccccggctccggctccgactccaactccgcgcctgtccatttcctcccgagccacagtggtagccaggatggaaggcacctcccaagggggcttgcagaccgtcatgaagtggaagacggtggttgccatctttgtggttgtggtggtctaccttgtcactggcggtcttgtcttccgggcattggagcagccctttgagagcagccagaagaataccatcgccttggagaaggcggaattcctgcgggatcatgtctgtgtgagcccccaggagctggagacgttgatccagcatgctcttgatgctgacaatgcgggagtcagtccaataggaaactcttccaacaacagcagccactgggacctcggcagtgcctttttctttgctggaactgtcattacgaccatagggtatgggaatattgctccgagcactgaaggaggcaaaatcttttgtattttatatgccatctttggaattccactctttggtttcttattggctggaattggagaccaacttggaaccatctttgggaaaagcattgcaagagtggagaaggtctttcgaaaaaagcaagtgagtcagaccaagatccgggtcatctcaaccatcctgttcatcttggccggctgcattgtgtttgtgacgatccctgctgtcatctttaagtacatcgagggctggacggccttggagtccatttactttgtggtggtcactctgaccacggtgggctttggtgattttgtggcagggggaaacgctggcatcaattatcgggagtggtataagcccctagtgtggttttggatccttgttggccttgcctactttgcagctgtcctcagtatgatcggagattggctacgggttctgtccaaaaagacaaaagaagaggtgggtgaaatcaaggcccatgcggcagagtggaaggccaatgtcacggctgagttccgggagacacggcgaaggctcagcgtggagatccacgataagctgcagcgggcggccaccatccgcagcatggagcgccggcggctgggcctggaccagcgggcccactcactggacatgctgtcccccgagaagcgctctgtctttgctgccctggacaccggccgcttcaaggcctcatcccaggagagcatcaacaaccggcccaacaacctgcgcctgaaggggccggagcagctgaacaagcatgggcagggtgcgtccgaggacaacatcatcaacaagttcgggtccacctccagactcaccaagaggaaaaacaaggacctcaaaaagaccttgcccgaggacgttcagaaaatctacaagaccttccggaattactccctggacgaggagaagaaagaggaggagacggaaaagatgtgtaactcagacaactccagcacagccatgctgacggactgtatccagcagcacgctgagttggagaacggaatgatacccacggacaccaaagaccgggagccggagaacaactcattacttgaagacagaaactaaatgtgaaggacattggtcttggactgagcgttgtgtgtgtgtgtgtgtgtgtttttaatattcacactgagacatgtgccttaaacagactttttagtccaaaattacatagcattgaagaatatatttcactgtgccataaacaactgaaagcttgctctgccaaaaggaatcagagaacaagaacttcatttcagatagcaaacgcaggacacaccaagagtgtccgtgcacgtagccggttctggccgtacatgttaagggcatttcagtggcagtgctgtacccctgggcagtgctacctgggcacacacgtagacaagggcagctattccttagaccagcctcctgaaagaaacaggtgtgtctttttagtggagtcgtagtaatatgtgcacacacagaaggggacctgattgggtgggagctggttatgtgtaactagcgttggagttgacattttggcatgtgctctgagcttgaattttgataccaaccattcagtgcatcatacctagtctttctatgctccaaatgaatgtctgtggggacctgagagcacctggaatttgttggaagcagatcagagcacacgtacgaaaaggtgcaattgcttttctcatgacaaaagaaaaaaaataa

SEQ ID NO: 168146 - DNA, 2725 bp, Homo sapiens
  Payload ID: 13074
  Gene Symbol: KCNK10
  Gene Name: potassium channel, two pore domain subfamily K, member 10
  Uniprot ID: P57789
  ENST ID: ENST00000319231
  CDS Start-End: 452-2083
gtgtgcgggtgtgtgtgtgcgggagtgtgtgcgcacacgccttcgggggctggagtgacactgcagtgggcttctccgtagccccagccttcaggctgcgcagcccctaacctgccggcaccgcttttgggaagcagcttggctcttccatctccccaagccttcctctccatcctttcatccacccctcgccgatcttactttttcttttacccacggggccgcggccggccaccccctggccggtgcaaacacccaagccctctccagttctcccccaagctaatattttcccacctgtctttttctggggttcctccacgagccagtccaaggctcccccatcctcggaaattgttttgttggactgctaaaccgaggcgtgtaaagcttgaggactttattattatttgggttcttttcatttcttccccttctgggcaacgaagcaatgaaatttccaatcgagacgccaagaaaacaggtgaactgggatcctaaagtggccgttcccgcagcagcaccggtgtgccagcccaagagcgccactaacgggcaacccccggctccggctccgactccaactccgcgcctgtccatttcctcccgagccacagtggtagccaggatggaaggcacctcccaagggggcttgcagaccgtcatgaagtggaagacggtggttgccatctttgtggttgtggtggtctaccttgtcactggcggtcttgtcttccgggcattggagcagccctttgagagcagccagaagaataccatcgccttggagaaggcggaattcctgcgggatcatgtctgtgtgagcccccaggagctggagacgttgatccagcatgctcttgatgctgacaatgcgggagtcagtccaataggaaactcttccaacaacagcagccactgggacctcggcagtgcctttttctttgctggaactgtcattacgaccatagggtatgggaatattgctccgagcactgaaggaggcaaaatcttttgtattttatatgccatctttggaattccactctttggtttcttattggctggaattggagaccaacttggaaccatctttgggaaaagcattgcaagagtggagaaggtctttcgaaaaaagcaagtgagtcagaccaagatccgggtcatctcaaccatcctgttcatcttggccggctgcattgtgtttgtgacgatccctgctgtcatctttaagtacatcgagggctggacggccttggagtccatttactttgtggtggtcactctgaccacggtgggctttggtgattttgtggcagggggaaacgctggcatcaattatcgggagtggtataagcccctagtgtggttttggatccttgttggccttgcctactttgcagctgtcctcagtatgatcggagattggctacgggttctgtccaaaaagacaaaagaagaggtgggtgaaatcaaggcccatgcggcagagtggaaggccaatgtcacggctgagttccgggagacacggcgaaggctcagcgtggagatccacgataagctgcagcgggcggccaccatccgcagcatggagcgccggcggctgggcctggaccagcgggcccactcactggacatgctgtcccccgagaagcgctctgtctttgctgccctggacaccggccgcttcaaggcctcatcccaggagagcatcaacaaccggcccaacaacctgcgcctgaaggggccggagcagctgaacaagcatgggcagggtgcgtccgaggacaacatcatcaacaagttcgggtccacctccagactcaccaagaggaaaaacaaggacctcaaaaagaccttgcccgaggacgttcagaaaatctacaagaccttccggaattactccctggacgaggagaagaaagaggaggagacggaaaagatgtgtaactcagacaactccagcacagccatgctgacggactgtatccagcagcacgctgagttggagaacggaatgatacccacggacaccaaagaccgggagccggagaacaactcattacttgaagacagaaactaaatgtgaaggacattggtcttggactgagcgttgtgtgtgtgtgtgtgtgtgtttttaatattcacactgagacatgtgccttaaacagactttttagtccaaaattacatagcattgaagaatatatttcactgtgccataaacaactgaaagcttgctctgccaaaaggaatcagagaacaagaacttcatttcagatagcaaacgcaggacacaccaagagtgtccgtgcacgtagccggttctggccgtacatgttaagggcatttcagtggcagtgctgtacccctgggcagtgctacctgggcacacacgtagacaagggcagctattccttagaccagcctcctgaaagaaacaggtgtgtctttttagtggagtcgtagtaatatgtgcacacacagaaggggacctgattgggtgggagctggttatgtgtaactagcgttggagttgacattttggcatgtgctctgagcttgaattttgataccaaccattcagtgcatcatacctagtctttctatgctccaaatgaatgtctgtggggacctgagagcacctggaatttgttggaagcagatcagagcacacgtacgaaaaggtgcaattgcttttctcatgacaaaagaaaaaaaataa

SEQ ID NO: 168147 - DNA, 7501 bp, Homo sapiens
  Payload ID: 13074
  Gene Symbol: KCNK10
  Gene Name: potassium channel, two pore domain subfamily K, member 10
  Uniprot ID: P57789
  ENST ID: ENST00000340700
  CDS Start-End: 453-2069
gcaggcatcgtctcctccggtctcacagctaccccgggctggagcgtggggagggggtaagggagccagccaactcggggaaacttcgttgccagagatgactggggttttcgggctttcccagccttcccatgccgggccacacggcattcattaaagtggtggggcaactattggtgcgctccagccgggcaggttttgagctgcagagacccgtgcccggtagcagcgctttgccaccgagtgcacccaggacgcagtggccgccagcccgggtctcctgctgggggccggcgagtgcagggagactttgcgccacgatgttttgttttcctgccgcaggaacgctaggcagtctctttccaccagacttaacccgcctgaagcaatagccatggaagttgcggcggcacagagggagacagaaccgcttggagcggcatctttcttggatgttttttctctacacagacttctttctttccttggtggccgttcccgcagcagcaccggtgtgccagcccaagagcgccactaacgggcaacccccggctccggctccgactccaactccgcgcctgtccatttcctcccgagccacagtggtagccaggatggaaggcacctcccaagggggcttgcagaccgtcatgaagtggaagacggtggttgccatctttgtggttgtggtggtctaccttgtcactggcggtcttgtcttccgggcattggagcagccctttgagagcagccagaagaataccatcgccttggagaaggcggaattcctgcgggatcatgtctgtgtgagcccccaggagctggagacgttgatccagcatgctcttgatgctgacaatgcgggagtcagtccaataggaaactcttccaacaacagcagccactgggacctcggcagtgcctttttctttgctggaactgtcattacgaccatagggtatgggaatattgctccgagcactgaaggaggcaaaatcttttgtattttatatgccatctttggaattccactctttggtttcttattggctggaattggagaccaacttggaaccatctttgggaaaagcattgcaagagtggagaaggtctttcgaaaaaagcaagtgagtcagaccaagatccgggtcatctcaaccatcctgttcatcttggccggctgcattgtgtttgtgacgatccctgctgtcatctttaagtacatcgagggctggacggccttggagtccatttactttgtggtggtcactctgaccacggtgggctttggtgattttgtggcagggggaaacgctggcatcaattatcgggagtggtataagcccctagtgtggttttggatccttgttggccttgcctactttgcagctgtcctcagtatgatcggagattggctacgggttctgtccaaaaagacaaaagaagaggtgggtgaaatcaaggcccatgcggcagagtggaaggccaatgtcacggctgagttccgggagacacggcgaaggctcagcgtggagatccacgataagctgcagcgggcggccaccatccgcagcatggagcgccggcggctgggcctggaccagcgggcccactcactggacatgctgtcccccgagaagcgctctgtctttgctgccctggacaccggccgcttcaaggcctcatcccaggagagcatcaacaaccggcccaacaacctgcgcctgaaggggccggagcagctgaacaagcatgggcagggtgcgtccgaggacaacatcatcaacaagttcgggtccacctccagactcaccaagaggaaaaacaaggacctcaaaaagaccttgcccgaggacgttcagaaaatctacaagaccttccggaattactccctggacgaggagaagaaagaggaggagacggaaaagatgtgtaactcagacaactccagcacagccatgctgacggactgtatccagcagcacgctgagttggagaacggaatgatacccacggacaccaaagaccgggagccggagaacaactcattacttgaagacagaaactaaatgtgaaggacattggtcttggactgagcgttgtgtgtgtgtgtgtgtgtgtttttaatattcacactgagacatgtgccttaaacagactttttagtccaaaattacatagcattgaagaatatatttcactgtgccataaacaactgaaagcttgctctgccaaaaggaatcagagaacaagaacttcatttcagatagcaaacgcaggacacaccaagagtgtccgtgcacgtagccggttctggccgtacatgttaagggcatttcagtggcagtgctgtacccctgggcagtgctacctgggcacacacgtagacaagggcagctattccttagaccagcctcctgaaagaaacaggtgtgtctttttagtggagtcgtagtaatatgtgcacacacagaaggggacctgattgggtgggagctggttatgtgtaactagcgttggagttgacattttggcatgtgctctgagcttgaattttgataccaaccattcagtgcatcatacctagtctttctatgctccaaatgaatgtctgtggggacctgagagcacctggaatttgttggaagcagatcagagcacacgtacgaaaaggtgcaattgcttttctcatgacaaaagaaaaaaaataatcacaaacacatcacactgtggatatcaccttaaccaatgacagaagcctgctgagtttggtctttctcacaggggtaggtagtccacatgaactggcgagcagtggtgaaaacatgacatcaactgctgcgtggttaaaggccaatcatgcattttcctcagtgggtgcaatggtgacaataaactgatttggaaatgtccatgtactttggttataacttgttttgataagaggggtagaaataccaaaacaattgccttgcatgatgccagtggcttgctgttctgtctagctgatcctacatttttacaaaagtagacatcctgcatttctgagacacactgaggaggaccatggcatctttccatctcagggctttttgtcccttgggtgtcttagggtagacatagtgataagatccaatctcgctatctccaaacaaaaagaaaatgtaccccttgtacagtaagcttgaaatgtttttattgcttgcagcgtaagtgccattaattccatttaacaatgatacttagaaatatttaaaatatttcattttacttttatgtttgggcattcctttattctgaaaaagtcaccactgctccttgcttgtttctacatctcacatcggttactcactaaaactggaacaccctagactgattgttcccaggcaaacgataagctaacacatcataattatgattggtctgtgaggctagaacatcccgcagaggaaagtcggggaatggctagtcataggttgcatgatgattttaaatgggtttgtatcagaaaggggaaaatacatactcctgtgtatgcctcagtctttatcataattggctggttcacagctagctctttgggccacacgtgaaagcatttggacctggcaacaccaggcagttgctggttatgggtgttctaggctcactgctaccttttacagagttcacgggattttacgtaactaacccgcagtgtggatttaccaaaagatcacagcactagcggagacttccagaaactgtctcatgctttctgacctccagggaaagttgtacccacgacatcctcaaccactggtaccatggaagacctgtccctgcccatttctcaaaaatgcacagctcttccctgcctggagcacatgaagtcccatctccctgtccccagacctttaggctctgttgaagttctggcattgcttatgagacccttcctgtccaaggaaggtctaagtcaactcctccattggactggagatgaggctcactggtgacatcctgtgtcgactcagtaataaatagtcacttgggaggcgatgtttatgcaggtgtggatgttgagttttactatgggaatcattccagcctgacaaaatgtgttttaaggaataggtagataactgggacttcctctgttattctaacaagtcgaagcttcctaattaaactgtccatggatctcacttatttggtttccactctgtgttatctggtacgttctttgtagcagtgtgttaaaattccaggccctacggccaaatctggcagaggcttccctctcatttatccagtgccttctgtgggccaggcacaggattaggcactttatgaacgtcagctcattgaaacttcacgacactatgtgggaagtatttgcaaacccattatatacacaaggacacagaggctcagggaagctatgttatttatccaatggcacacagcaagaaagtggtagagctggtattcaaagtctgaccaaagtctgctttcaacttcactacagtgtctgtgtcatgcatccttgtgattgtgtgtgtttgtgtgtatgtgtgtctttctagcttcatggacacagcttacagatgtggggagcagatatggtggaatctccaccaccaagagggcacaaggtctttgtgtaaacatggctcaaagggttgcccctgcagacacctactgtacatttatttggttttggaaattttgtatgtggcaccctttaaaaaatgccctttgaaagcactcttttgcactttacttgctaactttgtagaaactctgcatacagcaggaataaaatagttcaaagcactaagctgcatactctaccaaatggaacaggtgcatgtgttggtatgtgcatagatgcttccccaaatgagtcaaatcagtcacacagagggatcaaacataaccttgggctgggggtgggaaaattttctacataacccattccctgagacatttggccaagaatgtgatgaacaaaatcaaagaagatcctctatggtgattgatcgattaaatatgtgtgcaaagtgtttagaaacctatgaaatactctcgcaaagatgctgagagagaataagaggttggattcctcttcatataaactaattttggaggaggccagttggtttgaagttacttgaatgttaccttttttagatggggccaaatggcatgtagaatacacgtgataggtcaaagctgctacacattctatacatgcatcagcacagccccccctttccaatctgcactcccattccagcataaacctaggagaaatgtttcgatttcacacaaagaaagagcacacgtccaccatcttcagtgggggctgtcttttgcttcactggcaagcaggcactgaatttttcttgcatgacaaatctggaggtttactggtgagagagccaatgggcattttttcctggaaagagtacagctccatacccagtcctaacccaacagtgatatttatcactttggggcagggctgtatagagtgtgtgtgtgtgtgtgtgtgtgtgtgtgtgtgtgtgtgtgtgtgtgtgcgggttggggtggtgttgggccatctctggcctgttactaaggtaactaggactatttgtgttccagcagtcatagcctgtgattgtgggtgcatcagttctctgcctagatctcttgttaccttgtctgcacatcaagggagggagttgagcacagatacttgtcaagggccattgtagttgtgcagttctctaatgaaacactccctagtccatgagttcacaaaatttattaagattaaattataagttggatttgtgaataatgactaattaattgtcttgcccattttaggttaaggtgagagcttagtctcttgccctttgggatttgtcttttgggggattaatggagaccagatgtacttgggagactggtgtccaaattcggatcatgccctgtgtaggctctctctatcctcccttatagctctttagtgtactgtcaccgggagggctcatgctgtgagggcattttttgcatggtgttaagactagttaaagaaattttaagctgttgttatttgcagtcaattgtagtacttcatgtatcatgaattcaagtactatgatcagacagacatctctctctctctcacacacacacacacacacacacacgcacacatacacacacacacacacacctgaggaaatggctgctttgggttctataaggaccattccatgtttaaagtcctagttgagctgaatgctaagaacctgcccccttgcctccctctgagatgatatcatttcctggcttcgtcaatgctgcctgtctatttgcatgctgggttctgaggactagtgagaaggtgaccagagtttgggtggggctggtttttacccactggatttggtgagaatatgaagcatccagtgtgtaccagggtttctgaaccacgggaaaggcgtaggaaaacaaacattcagagcccctgtaaaacgagaaaggaaaaaccagccagtgttgcattccacatctctgcttgttgcattttgctaatatggggttattctttctcactgttaggatgcaattgtgtgcaaagacagtggctgagtgaacagtaagagctggctagtaatggccttaaaaagaaaaagggtaactctctgaaacaaagatcactttagtgtggcattgtggatgctgttaattctgcatagggaaactttggaacagcatgctaattacatggctgtaagcaaagccctgtcctctgtctctgcaccataccttcattggacttcaccaacccatccatactccatgtaaacctcagttctctcatgcctgccctaagtcagttgacatcagtgcagtggcattgaggagaaatgagaggtgtctctgattttactgaaagttattatcattttcacaggtgcctgagatttggtatctactttgtgttcttgattcttaggtgaaaaatctgaaatagttccctgtgcattaaaataaattattttgagaggactcctgctccgtcgattcagcagacctatgctgcagaaggtaactgcggaagctctcttttgctgtcagggctctgagcttgaagggagaaggtgcagtggtgcctagaagtgatatgcaaaccacctcacatgccagcctctggcctccttcccatcccagagtcacagacaggggacccagtgacaatgatgataaatccatgtgtggaggtgttttacttatttttctttccgtaggatttcatggtgctttaaaaaaaaaggcattttacagaaaataatgtggggggagggagatttcataatgttcttagggaaagtacaaaacaaatttgcttgtgacatttcaataagctgtgctgctattgtctttatttgatgatgtaatttttttttcaatgatggagaaaaattgcaacaaagaccttctggaagatccaatccaa

SEQ ID NO: 168148 - DNA, 548 bp, Homo sapiens
  Payload ID: 13074
  Gene Symbol: KCNK10
  Gene Name: potassium channel, two pore domain subfamily K, member 10
  ENST ID: ENST00000556282
  CDS Start-End: 79-548
aaccaagcgtgtctccggctgcaactccagcaagcgcgccgctgccgcctccacgcccgcccgccggccggccgagccatggccgttcccgcagcagcaccggtgtgccagcccaagagcgccactaacgggcaacccccggctccggctccgactccaactccgcgcctgtccatttcctcccgagccacagtggtagccaggatggaaggcacctcccaagggggcttgcagaccgtcatgaagtggaagacggtggttgccatctttgtggttgtggtggtctaccttgtcactggcggtcttgtcttccgggcattggagcagccctttgagagcagccagaagaataccatcgccttggagaaggcggaattcctgcgggatcatgtctgtgtgagcccccaggagctggagacgttgatccagcatgctcttgatgctgacaatgcgggagtcagtccaataggaaactcttccaacaacagcagccactgggacctcggcagtgcctttttctttgctggaactgtcattacgaccatagg

SEQ ID NO: 168149 - DNA, 6227 bp, Homo sapiens
  Payload ID: 13075
  Gene Symbol: KCNK12
  Gene Name: potassium channel, two pore domain subfamily K, member 12
  Uniprot ID: Q9HB15
  ENST ID: ENST00000327876
  CDS Start-End: 609-1901
gaaaggagcgcttccccggactcggctcggctccgaggctctgaagccgacgccgccagctcagccccgggggcgggagcaggactgcccgcacagcccgcacctaggaggcgccgatcccgaacgcctcatgggacgcccccgggggctctctccacgccttgctgccgcgtcccggtcctaggcgcccgggatccacggcccaccccgcccgcagcccgcggcctgtctggagaggagtatgaggcccggggccccgcggacgccggccaccgggcggcaggggcctagctgcggagccccgcgcccgagagcggcgggtaaggagccgcgggagccggcgaggcgtcggggcgcgcagaggagcgcccctgcccgggcacccgctgggccacgggactcgcgtgtggcctgagcgccggggaggaggcggaggcgcccctctgtccgggctctgggaaggcgacgaggggctctgcgaaggcggcgaggggctccgcggcggccccggacccctggccaccatcctcacgctcctgctcccgccggggggatgtcgtggcccgggccccgagcgccgccccggccccggggctgagctccggaccatgtcctcccgcagcccccggcccccgccccgccgtagccgccgccgcctgccgcgcccctcctgctgctgctgctgctgccgccgttcgcacctcaacgaggacaccggccgcttcgtgctgctggcggcgctcatcggcctctacctggtggcgggtgccacagtcttctcggcgctcgagagccccggcgaggcggaggcgcgggcgcgctggggcgccacgctgcgcaacttcagcgctgcgcacggcgtggccgagccagagctgcgcgccttcctccggcactacgaggccgcgctggccgccggcgtccgcgccgacgcgctgcgcccgcgctgggacttccccggcgccttctacttcgtgggcaccgtggtgtcaaccataggtttcggcatgaccacccccgcgacggtgggcgggaaggccttcctcatcgcctacgggctgttcggctgcgctgggaccatcctgttcttcaacctcttcctggagcgcatcatctcgctgctggccttcatcatgcgcgcctgccgggagcgccagctgcgccgcagcggcctgctgcccgccaccttccgccgcggctccgcgctctcggaggccgacagcctggcgggctggaagccctcggtgtaccacgtgctgctcatcctgggcctgttcgccgtgctgctgtcctgctgcgcctcggccatgtacaccagcgtggagggctgggactacgtggactcgctctacttctgcttcgtcaccttcagcaccatcggcttcggggacctggtgagcagccagcacgccgcctaccggaaccaggggctctaccgcctgggcaacttcctcttcatcctgctcggcgtgtgctgcatttactcgctcttcaacgtcatctccatcctcatcaagcaggtgctcaactggatgctgcgcaagctgagctgccgctgctgcgcgcgctgctgcccggctcctggcgcgcccctggcccggcgcaatgccatcaccccaggctcccggctgcgccgccgcctggccgcgctcggtgccgaccccgcggcccgcgacagcgacgccgagggccgccgcctctcgggcgagctcatctccatgcgcgacctcacggcctccaacaaggtgtcgctggcgctgctgcagaagcagctgtcggagacggccaacggctacccgcgcagcgtgtgcgtcaacacgcgccagaacggcttctcgggcggcgtgggcgcgctgggcatcatgaacaaccggctggccgagaccagcgcctccaggtagaccgcccgtccgcccgcgccggggaccctctccaggccgcggggccgccgggcgtggtttgcttctctcagtcactgctggcgctttcttaatctttatccaataaaatgaaacaaaaaaaatttttttaaagaaatactatttggccaggcctgatgttatcaagggcaggttttggggacgcctgtgttccttgtgagtcccctcttggagaaccgtggcccccagcagattctccttcagggagagaaaacgtggccccccaggcccacacccagggcataccgcagcgaggagggttttgcagactggcactaaaccccgtccccatgcacagaagcagccggcaaccccaaagcatatggtgcaacttttcgtggctctgaattacctcctcagcatttagaatcctggcccagcctagcagcttccttctggtcgtcagaagtgatatagtcacagttttgacaggtgggggttgggacagccatatgttgcctcccgatgtatatatatagaacagccactacacacagagaatggtgtagtattatgcaatgagatgaaacatagcaccaacttgcggactgtggcatttcccccagatttggaaattgcagtggtgaggggcttagctggcctttctcagctcagagttagtccatttagcacagagcacagggcagctacttctaatggtgggcggtccagggcacctgtgaggaggggagcggtgaggctgcaggagccctgctgggcttttagctggctgatctccaggctcggatcggcagatcttgaatcccccaaccgtcctttctttcacaagctcatccacagcagtgcttttcaatattaaccaggaatatctgagtcttctcagacaagatatttatttgttggtgtggattttttttttcttaactactgttgatcagttcaacttttccccctttaagagatcatggggttgccgggcgcagccctccagcttctcctcctcctcctctgaaggaggcacctctgccagctgcgtccttgggaaccagggcctgcagcaccaggaacccaaaagaagccatcttgcaaatgtcagggtatttggctccagaggccatgatgtgtttggggtcaggaaagatagaatccctttctaaatattgtttatcaagaggatttgtcttctccatgcacagcctattggaggcagaggaaggcaggagggaggtagctggtgaaactggtggatggaagtaatgttaggattacagttttgctctcgggctgagggacagattctcccagacttgccttctgcagcatagggggtccctgacctggaggaaggccagatacccaggcttcattgaaaggatagtggtctgggggtgtaaacgaacactctctctgcccatttttctcatatatgatgagggcaaggacaggtgccagagtttatacaggcacggcgtgacccaccagtatgcacagcttctgataggaagtcttagaaaagcaccgcctcaccgcctccagctggagccatgctgtgaaatctctctccctggcaaatgtgcgtggaacacacacacacacaaacatgcacgcatgcgctcacgcacccagcattagagtcaaacttgaatgtcaaactcttctttccccttctagttcatggcaggaagggaaagcttacctgagatctcagtgactctccagctattttgggtaatttctgatttgagttgggattggtttttaaacacaggccctaatctggggtgaagccagtgaagcagcgctggccaggagagacgtcagtcttgctaaatcctgaaggtgggttcctgtgaaaaccatgctttcaggattcactgtgactgtcaggccagcccagtgagtgccccccatccaacccatggttgcggtcacagtgaagggattgcccacgcaggggcgcacgtgttctctagggcagggccctctgacaggacctggaaataaaatccacatttatccctttaaaaaagggaacgattaaaaggcatccaattagaggtgttacctaggcaacaggaaataacttggggatcagagccatccagagagggaagaagagatccccatgatagaggcatctagacagtgaggacttgatctgcgggcaaaataacagcctacccacaggaagtgagccccagcaacagtacagcagcctaaaacccaggcatcaagactgtgtgagctagacaggtctaaagaaacctccaggcaatcccccgcccagcgtgcaggactacacagaatcgtggtctccatgggaggaaccaggacccacctccagagaagaaaaactcaaaatgtttcttggcagtcttctctgttggcggtgcttcctagactctatcctaagttgcttatgctgcagcctcagctgtttttacttgttttcctatgctttggttttggaaagaggcaattggaggcagcttgagcaatcttctaaaggaatggtaagcatggtttcaaggggcaggaaaatgagacccttcctcttcccacctcccaacttcccagagaaacgccagtcctccaaggtacaatggcagctcaggatccagtggcacatgtgtatttttgcctatgttcccctgtccccatcccccaatccagtctcagtcacactgccatgatacatcacaccatcatccttcatctcaggccaaagggctcagcgccccagacgacagggactgcttccctgaagcagggatgtggttctcccatcatttcaggaacagtgacattgatagggatgcctttctttggtgcaggttcttctgaacctcaggccaagaaagagctccattccctcagatgctgtggcctctctcactgtcttgggggtctccagtttgcacaccactggtagctcactgtagcctacaatttcctcatgctccaggatttgcttcctaaccttaggcctggacttacccatcatgccggtgctgtggggctcccttaaagtttgaatgaactccaagaggccctcaccatatgactgtggccacagagaatccagagtcttggctagcagccttctcagagctgaggagaaaggtaaagaagccaccctgggtgtcctagcttgctaaagccaggtggtcaggcctttgtgtcctctgaatgaagcagtgcctccaggcctggagaaggcatcagaaggcttaggcaatctcaggctctcattttgtggaaaatgccagacagccctgggcatttgcacagcatcatgcatatatgtatatatatatacacacacacatacacaccagccttacaaagagctactaacccttttccccaaggaaaagtctcagtctgggccactttaagaagaaagatttcccatttttaactctctagagatgtaccagggcctggaaaatccctctctgccttgggggagttttatgtacaatttgcatgtattcaggtttcacacagaagccagcatccaaacccaagccaaaccctggaaaatagctgctaaattgacccaggatcctccgtccttcagacaggcctcccagcagaccccctcttcctgtggactctggggtgagggatgactgagccctcatggccaaaggagaagcttctggggaactgaggcagacggcagcccagtcaggcagagaccataggagcgacgggccctgtggttcgatcttactgtaactttttacattcttaaaaaacaaaaagcacaattccacatacacactgtctggaaagcacagccagacagccagcctagggcatctgagtccagaagaggcgctggggctttatctgttgcagggttcttgtattgttgtataatgtgctggtggtgactcaaggctcctcactttgtagggtggagagggagggagggagggcctgctgaggccattcctgacccccagggtgggctcatcagcatggacttggggcctggactcttgcccctgaagcagctctggcactttcaggcaccccagagcacaattgctacaccttccacgctagtctcatgcattgaggatttctgcactcggacctggccccaaaccctcttccccttccccttcttccctaaggaagctcccccttgctttacaaatcattttttatgctatctgttctctcaggagggggctagagcatgcgggacaagcctgcagggtttctcaaacaatacatctatttttctgagcagcattccaagagaggacttgaagggtgtttaaattaacgatgaataaaatgcagcctgcc

SEQ ID NO: 168150 - DNA, 2522 bp, Homo sapiens
  Payload ID: 13076
  Gene Symbol: KCNK13
  Gene Name: potassium channel, two pore domain subfamily K, member 13
  Uniprot ID: Q9HB14
  ENST ID: ENST00000282146
  CDS Start-End: 442-1668
cgggaaactcgagttggctcgagcttgccctgaagacgcgccacgccccctcccctatctgagccggacagggagccggggtggaaactgcgcccgcatcccagcgccaagcagacgtgaactctgcgcccgttccccgggaccttcagcgttaaggagaactccgaggagagcagggggagtggaggggaacggcggcgacaaagcggatttgaaactaggagtcaaggaggacgtggggagctggcgccacaggagctaccgaggcggcggccgggggagcctcgcggcctgcgggagagcccggcggtcatgggcgagccggcggtggggcgcccgggagctggctgagcgccggggcccttatttcccgggggtgtgggcgagactccgccgacgcccggtgccgtgggcctgggggctgcccccgggggcccggccatggctggccggggtttcagctggggcccgggccacctgaacgaggacaacgcgcgctttctgctgctggccgcgctcatcgtgctctacctgctgggcggcgccgccgtcttctccgcgctggagctggcgcacgagcgccaggccaagcagcgctgggaggagcgcctggccaacttcagccgcggccacaacctgagccgcgacgagctgcgcggcttcctccgccactacgaggaggccactcgggccggcatccgcgtggacaacgtccgcccgcgctgggacttcaccggcgccttctacttcgtgggcaccgtcgtttccaccatagggtttgggatgacaactccggcgacagtaggaggaaaaatctttctgatcttttacggccttgttgggtgttccagcaccatcttgttcttcaacctcttcctggagcgcctgatcaccatcatcgcctacatcatgaagtcgtgccaccagcggcagctccggagacgaggggccctgccccaggagagcctgaaggatgcggggcagtgtgaggtggacagcctggccggctggaagccctccgtgtactacgtcatgctgatcctatgcacagcctccatcctcatctcttgctgcgcctcagccatgtacacccccattgaaggctggagctactttgactcactctacttctgttttgtggctttcagcaccattggctttggggacctggtcagcagccagaacgcccactatgagagccaaggcctctatcgctttgccaacttcgtcttcatcctcatgggtgtctgctgcatctactccttgttcaatgtcatctctatcctcatcaaacagtccttgaactggatcctgaggaaaatggacagcgggtgctgcccgcaatgccagagaggactcttgcgatcacgcaggaacgtggtgatgccaggcagcgtccggaaccgctgcaacatctccatagagacagacggggtggcagagagtgacacggacgggcgccggctctcaggggagatgatctccatgaaggacttgctggcagccaacaaggcctcgttggccatcctgcagaagcaactgtctgagatggccaacggctgcccccaccagaccagcacactggcccgggacaatgaattctcagggggggtgggagcctttgcaatcatgaacaacaggttggcagagaccagtggggacaggtagaagccaggagtggatgctgggcagaggccagagtagaatggaggatgattgccgcccaggggacgagctcagccctgcgccttggctctgttccttctgggagctgttcccgggagcctccgcaagcatctttagaaatctgatctcggctccaaccaacagccaccttccagggatggggggcctgaagcctcgatgcttgtctcctgatccttattctttaagtctaaattcagtcttttcaaaacaaatcacaaaagcagcattagacattgccttgtttcattaatcttgtttcagagctttagctgcctgaggagataggttttccttaagccttgatttcctgaagctctctctgttccttatttgggaacaaaaattgcgaagactcatctttccctagaactctgaatggatgaatttttaaaagtggggagaatgtttggggatgtgtctgggctttctttttgccaggcttccttcaaagcatacctgccaatggtgtctgcatagggaaaatgtctgttgtactctttatacctgtttctgttttttgttgtccctttctttttatttttaaggccttaatgcctggctgtggcgtctgtgagacctcaatgtaataagaaaattaaattcagcttcaggcctttaaactgcagcaagatggtggtgtaggggtgtgggacggggagagactcacttttgtaactaaagaacatagcttaacattttccctttgaatggtcacacagaccatttcatttttaccagggcttggggacccaatgcaaagatgatgactatttaataaaatggaaaatttaataaatcctcattttattaactaa

SEQ ID NO: 168151 - DNA, 2599 bp, Homo sapiens
  Payload ID: 13077
  Gene Symbol: KCNK15
  Gene Name: potassium channel, two pore domain subfamily K, member 15
  Uniprot ID: Q9H427
  ENST ID: ENST00000372861
  CDS Start-End: 132-1124
ggttcccggcagtcgccccgcctcgcccgtcacaaccctgccgcgtggggccggggttggagggggcggagcgcgcggtccgggcacacggagcaggttgggaccgcggcgggtaccggggccggggcgccatgcggaggccgagcgtgcgcgcggccgggctggtcctgtgcaccctgtgttacctgctggtgggcgctgctgtcttcgacgcgctcgagtccgaggcggaaagcggccgccagcgactgctggtccagaagcggggcgctctccggaggaagttcggcttctcggccgaggactaccgcgagctggagcgcctggcgctccaggctgagccccaccgcgccggccgccagtggaagttccccggctccttctacttcgccatcaccgtcatcactaccatcgagtacggccacgccgcgccgggtacggactccggcaaggtcttctgcatgttctacgcgctcctgggcatcccgctgacgctggtcactttccagagcctgggcgaacggctgaacgcggtggtgcggcgcctcctgttggcggccaagtgctgcctgggcctgcggtggacgtgcgtgtccacggagaacctggtggtggccgggctgctggcgtgtgccgccaccctggccctcggggccgtcgccttctcgcacttcgagggctggaccttcttccacgcctactactactgcttcatcaccctcaccaccatcggcttcggcgacttcgtggcactgcagagcggcgaggcgctgcagaggaagctcccctacgtggccttcagcttcctctacatcctcctggggctcacggtcattggcgccttcctcaacctggtggtcctgcgcttcctcgttgccagcgccgactggcccgagcgcgctgcccgcacccccagcccgcgccccccgggggcgcccgagagccgtggcctctggctgccccgccgcccggcccgctccgtgggctccgcctctgtcttctgccacgtgcacaagctggagaggtgcgcccgcgacaacctgggcttttcgcccccctcgagcccgggggtcgtgcgtggcgggcaggctcccaggcttggggcccggtggaagtccatctgacaaccccacccaggccagggtcgaatctggaatgggagggtctggcttcagctatcagggcaccctccccagggattggaaacggatgacgggcctctaggcggtcttctgccacgagcagtttctcattactgtctgtggctaagtcccctccctcctttccaaaaatatattacagtcacaccataagcacaaaccaggctccagggtcaccctgtaggagcaaattccttgtagtccaaattgtatgagggcgtggccacatcagcacttaggagaggctctgcacaggtccacctcagagccgaccctccagagcaacttttctgttgtgaagaggctggttttctgagtaacggttgaaatgtgcaactttcaacactggaatcttcgctgcaattagtgaggtcagatgctcacactacgagaagcatggggaacaaaggtggaccaaatgggaccgtgtacagtccagtgttgacaagggggtcaatctcttgcgctaaacgatctcattctctgcccagtgtatagagtggaatcagcccatgtgtgaatgatggcctctttcccccagacagctgatgctctttgtccctggccagccccacttcaggatgagggaggccttgctgtcacccacccaccatgtcactggggccacttggacacagcagaatgccatgggacgagctctcttccgggtcctgtcaatcaccagcaatatgaccttggagaatcgcatcctctcccagggcctcagtttccacatctgtagaatgacggggttcatccagaaccctgctccctcttacgcatctctggcaggactttctggaacaggcccctgcaccataagggggcagagacaaagcccgaggtgtggcatcctggcaccccgtggcactcagccacttcccctggcttcccagatagggctgtctcaacacaaagcatgaacgagccaggttagaaaagccaaaaactttaatttcaacatgagctacatggtcatgaacacaatgcaacgcgaccccactccaacccaagggccccagaaaccctccctccctaaaggcctgggcggctgctgctccaagagagggaatgagggaaaggtgggtggatggagagaggcccccagcctaaggacccaggctcctgccttcccaccacccgtccaggaagcagtcataaagtgaaagggctccagaggtgatgctcacagccctgggttcggctccattctgacctccctgaagcgctgggttagacgggcaccatcagcccacctcacaggctcggcgtcgggtgagctcgtggacgctaatgctttctgtccactctgaggtgctgctccagatgtggggccctcccagagggcctcggagacaccataggggaacagggagaggggctcggtccctgggcctgacacagcactgctgctcaataaataaatgcaggtgaccttg

SEQ ID NO: 168152 - DNA, 789 bp, Homo sapiens
  Payload ID: 13078
  Gene Symbol: KCNK16
  Gene Name: potassium channel, two pore domain subfamily K, member 16
  Uniprot ID: Q96T55
  ENST ID: ENST00000373227
  CDS Start-End: 1-789
atgcccagtgctgggctctgcagctgctggggtggccgggtgctgcccctgctgctggcctatgtctgctacctgctgctcggtgccactatcttccagctgctagagaggcaggcggaggctcagtccagggaccagtttcagttggagaagctgcgcttcctggagaactacacctgcctggaccagtgggccatggagcagtttgtgcaggtcatcatggaagcctgggtgaaaggtgtgaaccccaaaggcaactctaccaaccccagcaactgggactttggcagcagtttcttctttgcaggcacagtcgtcactaccataggatatgggaacctggcacccagcacagaggcaggtcaggtcttctgtgtcttctatgccctgttgggcatcccgcttaacgtgatcttcctcaaccacctgggcacagggctgcgtgcccatctggccgccattgaaagatgggaggaccgtcccaggcgctcccaggtactgcaagtcctgggcctggctctgttcctgaccctggggacgctggtcattctcatcttcccacccatggtcttcagccatgtggagggctggagcttcagcgagggcttctactttgctttcatcactctcagcaccattggctttggggactatgttgttggtctgaggcaaggctgtggagccaaggcggctccaggcaggagacccaggagaggctctacagcagcaagaggagtccaagtcacaccccaggacttccccatatccaagaaaggactgggaagctga

SEQ ID NO: 168153 - DNA, 1248 bp, Homo sapiens
  Payload ID: 13078
  Gene Symbol: KCNK16
  Gene Name: potassium channel, two pore domain subfamily K, member 16
  Uniprot ID: Q96T55
  ENST ID: ENST00000373229
  CDS Start-End: 15-944
gtcctggccacagcatgcccagtgctgggctctgcagctgctggggtggccgggtgctgcccctgctgctggcctatgtctgctacctgctgctcggtgccactatcttccagctgctagagaggcaggcggaggctcagtccagggaccagtttcagttggagaagctgcgcttcctggagaactacacctgcctggaccagtgggccatggagcagtttgtgcaggtcatcatggaagcctgggtgaaaggtgtgaaccccaaaggcaactctaccaaccccagcaactgggactttggcagcagtttcttctttgcaggcacagtcgtcactaccataggatatgggaacctggcacccagcacagaggcaggtcaggtcttctgtgtcttctatgccctgttgggcatcccgcttaacgtgatcttcctcaaccacctgggcacagggctgcgtgcccatctggccgccattgaaagatgggaggaccgtcccaggcgctcccaggtactgcaagtcctgggcctggctctgttcctgaccctggggacgctggtcattctcatcttcccacccatggtcttcagccatgtggagggctggagcttcagcgagggcttctactttgctttcatcactctcagcaccattggctttggggactatgttgttggcacagaccccagcaagcattatatctcagtgtatcggagcctggcagccatctggatcctcctgggcctggcgtggctggcgctgatcctcccactgggccccctgcttctgcacagatgctgccagctctggctgctcagtctgaggcaaggctgtggagccaaggcggctccaggcaggagacccaggagaggctctacagcagcaagaggagtccaagtcacaccccaggacttccccatatccaagaaaggactgggaagctgaggacccacggactcttcacacagcctagacgcttcctccactccaggtagagggatttcgggggccttctcagaagcaaggagtggacaagcctcttggttaaggctcctcttacctcccaagctcatggacaagtggcaatcagctggggtccctcttttggggtacaaaggaaaggacagaggtgtgggagacccaaggtggtcttgagattgacagacagcaagtccttggagatagcccccgagtccaagaacttaggcaggggccccaagacaataaagttggtctctactatctccta

SEQ ID NO: 168154 - DNA, 1272 bp, Homo sapiens
  Payload ID: 13078
  Gene Symbol: KCNK16
  Gene Name: potassium channel, two pore domain subfamily K, member 16
  Uniprot ID: Q96T55
  ENST ID: ENST00000425054
  CDS Start-End: 1-969
atgcccagtgctgggctctgcagctgctggggtggccgggtgctgcccctgctgctggcctatgtctgctacctgctgctcggtgccactatcttccagctgctagagaggcaggcggaggctcagtccagggaccagtttcagttggagaagctgcgcttcctggagaactacacctgcctggaccagtgggccatggagcagtttgtgcaggtcatcatggaagcctgggtgaaaggtgtgaaccccaaaggcaactctaccaaccccagcaactgggactttggcagcagtttcttctttgcaggcacagtcgtcactaccataggatatgggaacctggcacccagcacagaggcaggtcaggtcttctgtgtcttctatgccctgttgggcatcccgcttaacgtgatcttcctcaaccacctgggcacagggctgcgtgcccatctggccgccattgaaagatgggaggaccgtcccaggcgctcccaggtactgcaagtcctgggcctggctctgttcctgaccctggggacgctggtcattctcatcttcccacccatggtcttcagccatgtggagggctggagcttcagcgagggcttctactttgctttcatcactctcagcaccattggctttggggactatgttgttggccacccccttaacttcatcactccctctgggctcctgccttctcaagagcctttccaaacaccccatgggaagccagagagccagcagatcccaggatccttccagaaagtgagctccatgaacgtctggcctctctcaggaatgcattctccaggtctggcctttcccctgccagactgcaacatccctgaccaggagagatttagaccactccatcccggggcctggaaattttggcctttgcctctcccatcatccaacagcaagtgggctcctatgtggctgggttcctctgcacaggtctgaggcaaggctgtggagccaaggcggctccaggcaggagacccaggagaggctctacagcagcaagaggagtccaagtcacaccccaggacttccccatatccaagaaaggactgggaagctgaggacccacggactcttcacacagcctagacgcttcctccactccaggtagagggatttcgggggccttctcagaagcaaggagtggacaagcctcttggttaaggctcctcttacctcccaagctcatggacaagtggcaatcagctggggtccctcttttggggtacaaaggaaaggaca

SEQ ID NO: 168155 - DNA, 981 bp, Homo sapiens
  Payload ID: 13078
  Gene Symbol: KCNK16
  Gene Name: potassium channel, two pore domain subfamily K, member 16
  Uniprot ID: Q96T55
  ENST ID: ENST00000437525
  CDS Start-End: 49-933
tctcccccatagccagccccacggccctggcagggtcctggccacagcatgcccagtgctgggctctgcagctgctggggtggccgggtgctgcccctgctgctggcctatgtctgctacctgctgctcggtgccactatcttccagctgctagagaggcaggcggaggctcagtccagggaccagtttcagttggagaagctgcgcttcctggagaactacacctgcctggaccagtgggccatggagcagtttgtgcaggtcatcatggaagcctgggtgaaaggtgtgaaccccaaaggcaactctaccaaccccagcaactgggactttggcagcagtttcttctttgcaggcacagtcgtcactaccataggatatgggaacctggcacccagcacagaggcaggtcaggtcttctgtgtcttctatgccctgttgggcatcccgcttaacgtgatcttcctcaaccacctgggcacagggctgcgtgcccatctggccgccattgaaagatgggaggaccgtcccaggcgctcccaggtactgcaagtcctgggcctggctctgttcctgaccctggggacgctggtcattctcatcttcccacccatggtcttcagccatgtggagggctggagcttcagcgagggcttctactttgctttcatcactctcagcaccattggctttggggactatgttgttggcacagaccccagcaagcattatatctcagtgtatcggagcctggcagccatctggatcctcctgggcctggcgtggctggcgctgatcctcccactgggccccctgcttctgcacagatgctgccagctctggctgctcagtaggggcctcggcgtcaaggatggggcagcctctgaccccagtgggctccccaggcctcagaagatccccatctctgcatgaggcccccggggggggcccagaaacccctttcatcctccccagtcccac

SEQ ID NO: 168156 - DNA, 889 bp, Homo sapiens
  Payload ID: 13078
  Gene Symbol: KCNK16
  Gene Name: potassium channel, two pore domain subfamily K, member 16
  ENST ID: ENST00000507712
  CDS Start-End: 242-835
cagccttcaagggtgaagacgctgggggcggccgagagagcccactggggcctggacagagtgagcacacctatccgatttagcccagaaacatctatccaacttggagacagagagagagacatgaagcactcaggagaacctgctgctagagaggcaggcggaggctcagtccagggaccagtttcagttggagaagctgcgcttcctggagaactacacctgcctggaccagtgggccatggagcagtttgtgcaggtcatcatggaagcctgggtgaaaggtgtgaaccccaaaggcaactctaccaaccccagcaactgggactttggcagcagtttcttctttgcaggcacagtcgtcactaccataggatatgggaacctggcacccagcacagaggcaggtcaggtcttctgtgtcttctatgccctgttgggcatcccgcttaacgtgatcttcctcaaccacctgggcacagggctgcgtgcccatctggccgccattgaaagatgggaggaccgtcccaggcgctcccaggtactgcaagtcctgggcctggctctgttcctgaccctggggacgctggtcattctcatcttcccacccatggtcttcagccatgtggagggctggagcttcagcgagggcttctactttgctttcatcactctcagcaccattggctttggggactatgttgttggtctgaggcaaggctgtggagccaaggcggctccaggcaggagacccaggagaggctctacagcagcaagaggagtccaagtcacaccccaggacttccccatatccaagaaaggactgggaagctgaggacccacggactcttcacacagcctagacgcttcctccactccaggtagaggg

SEQ ID NO: 168157 - DNA, 1658 bp, Homo sapiens
  Payload ID: 13079
  Gene Symbol: KCNK17
  Gene Name: potassium channel, two pore domain subfamily K, member 17
  Uniprot ID: Q96T54
  ENST ID: ENST00000373231
  CDS Start-End: 234-1232
acacatttgaggcggggccagatgcccacagttcagagcctctttttgtcccggggattggatcccagggctgggtggggccaggctgtcccattccccaacactcctcctccccggcgaaaccgggcaccagcaggcgtttgcgagaggagatacgagctggacgcctggcccttccctcccaccgggtcctagtccaccgctcccggcgccggctccccgcctctcccgctatgtaccgaccgcgagcccgggcggctcccgagggcagggtccggggctgcgcggtgcccagcaccgtgctcctgctgctcgcctacctggcttacctggcgctgggcaccggcgtgttctggacgctggagggccgcgcggcgcaggactccagccgcagcttccagcgcgacaagtgggagctgttgcagaacttcacgtgtctggaccgcccggcgctggactcgctgatccgggatgtcgtccaagcatacaaaaacggagccagcctcctcagcaacaccaccagcatggggcgctgggagctcgtgggctccttcttcttttctgtgtccaccatcaccaccattggctatggcaacctgagccccaacacgatggctgcccgcctcttctgcatcttctttgcccttgtggggatcccactcaacctcgtggtgctcaaccgactggggcatctcatgcagcagggagtaaaccactgggccagcaggctggggggcacctggcaggatcctgacaaggcgcggtggctggcgggctctggcgccctcctctcgggcctcctgctcttcctgctgctgccaccgctgctcttctcccacatggagggctggagctacacagagggcttctacttcgccttcatcaccctcagcaccgtgggcttcggcgactacgtgattggaatgaacccctcccagaggtacccactgtggtacaagaacatggtgtccctgtggatcctctttgggatggcatggctggccttgatcatcaaactcatcctctcccagctggagacgccagggagggtatgttcctgctgccaccacagctctaaggaagacttcaagtcccaaagctggagacagggacctgaccgggagccagagtcccactccccacagcaaggatgctatccagagggacccatgggaatcatacagcatctggaaccttctgctcacgctgcaggctgtggcaaggacagctagttatactccattctttggtcgtcgtcctcggtagcaagacccctgattttaagctttgcacatgtccacccaaactaaagactacattttccatccaccctagaggctgggtgcagctatatgattaattctgcccaatagggtatacagagacatgtcctgggtgacatgggatgtgactttcgggtgtcggggcagcatgcccttctcccccacttccttactttagcgggctgcaatgccgccgatatgatggctgggagctctggcagccatacggcaccatgaagtagcggcaatgtttgagcggcacaataagataggaagagtctggatctctgatgatcacagagccatcctaacaaacggaatatcacccgacctcctttatgtgagagagaaataaacatcttatgtaaaatacca

SEQ ID NO: 168158 - DNA, 1706 bp, Homo sapiens
  Payload ID: 13079
  Gene Symbol: KCNK17
  Gene Name: potassium channel, two pore domain subfamily K, member 17
  Uniprot ID: Q96T54
  ENST ID: ENST00000453413
  CDS Start-End: 142-957
attccccaacactcctcctccccggcgaaaccgggcaccagcaggcgtttgcgagaggagatacgagctggacgcctggcccttccctcccaccgggtcctagtccaccgctcccggcgccggctccccgcctctcccgctatgtaccgaccgcgagcccgggcggctcccgagggcagggtccggggctgcgcggtgcccagcaccgtgctcctgctgctcgcctacctggcttacctggcgctgggcaccggcgtgttctggacgctggagggccgcgcggcgcaggactccagccgcagcttccagcgcgacaagtgggagctgttgcagaacttcacgtgtctggaccgcccggcgctggactcgctgatccgggatgtcgtccaagcatacaaaaacggagccagcctcctcagcaacaccaccagcatggggcgctgggagctcgtgggctccttcttcttttctgtgtccaccatcaccaccattggctatggcaacctgagccccaacacgatggctgcccgcctcttctgcatcttctttgcccttgtggggatcccactcaacctcgtggtgctcaaccgactggggcatctcatgcagcagggagtaaaccactgggccagcaggctggggggcacctggcaggatcctgacaaggcgcggtggctggcgggctctggcgccctcctctcgggcctcctgctcttcctgctgctgccaccgctgctcttctcccacatggagggctggagctacacagagggcttctacttcgccttcatcaccctcagcaccgtgggcttcggcgactacgtgattgcaagctgcctcatttcagatacgagaaaaccaaacagagactggcaaacactagagcggacatcgaaatcctctgggggcttgttaaaatacagatttctggccgggcacggtggctcacacctgtaattctaacactttgggaggccgaggaatgaacccctcccagaggtacccactgtggtacaagaacatggtgtccctgtggatcctctttgggatggcatggctggccttgatcatcaaactcatcctctcccagctggagacgccagggagggtatgttcctgctgccaccacagctctaaggaagacttcaagtcccaaagctggagacagggacctgaccgggagccagagtcccactccccacagcaaggatgctatccagagggacccatgggaatcatacagcatctggaaccttctgctcacgctgcaggctgtggcaaggacagctagttatactccattctttggtcgtcgtcctcggtagcaagacccctgattttaagctttgcacatgtccacccaaactaaagactacattttccatccaccctagaggctgggtgcagctatatgattaattctgcccaatagggtatacagagacatgtcctgggtgacatgggatgtgactttcgggtgtcggggcagcatgcccttctcccccacttccttactttagcgggctgcaatgccgccgatatgatggctgggagctctggcagccatacggcaccatgaagtagcggcaatgtttgagcggcacaataagataggaagagtctggatctctgatgatcacagagccatcctaacaaacggaatatcacccgacctcctttatgtgagagagaaataaacatcttat

SEQ ID NO: 168159 - DNA, 1155 bp, Homo sapiens
  Payload ID: 13080
  Gene Symbol: KCNK18
  Gene Name: potassium channel, two pore domain subfamily K, member 18
  Uniprot ID: Q7Z418
  ENST ID: ENST00000334549
  CDS Start-End: 1-1155
atggaggtctcggggcacccccaggccaggagatgctgcccagaggccctgggaaagctcttccctggcctctgcttcctctgctttctggtgacctacgccctggtgggtgctgtggtcttctctgccattgaggacggccaggtcctggtggcagcagatgatggagagtttgagaagttcttggaggagctctgcagaatcttgaactgcagtgaaacagtggtggaagacagaaaacaggatctccaggggcatctgcagaaggtgaagcctcagtggtttaacaggaccacacactggtccttcctgagctcgctctttttctgctgcacggtgttcagcaccgtgggctatggctacatctaccccgtcaccaggcttggcaagtacttgtgcatgctctatgctctctttggtatccccctgatgttcctcgttctcacggacacaggcgacatcctggcaaccatcttatctacatcttataatcggttccgaaaattccctttctttacccgccccctcctctccaagtggtgccccaaatctctcttcaagaaaaaaccggaccccaagcccgcagatgaagctgtccctcagatcatcatcagtgctgaagagcttccaggccccaaacttggcacatgtccttcacgcccaagctgcagcatggagctgtttgagagatctcatgcgctagagaaacagaacacactgcaactgcccccacaagccatggagaggagtaactcgtgtcccgaactggtgttgggaagactctcatactccatcatcagcaacctggatgaagttggacagcaggtggagaggttggacatccccctccccatcattgcccttattgtttttgcctacatttcctgtgcagctgccatcctccccttctgggagacacagttggatttcgagaatgccttctatttctgctttgtcacactcaccaccattgggtttggggatactgttttagaacaccctaacttcttcctgttcttctccatttatatcatcgttggaatggagattgtgttcattgctttcaagttggtgcaaaacaggctgattgacatatacaaaaatgttatgctattctttgcaaaagggaagttttaccaccttgttaaaaagtga

SEQ ID NO: 168160 - DNA, 1491 bp, Homo sapiens
  Payload ID: 13081
  Gene Symbol: KCNK2
  Gene Name: potassium channel, two pore domain subfamily K, member 2
  Uniprot ID: O95069
  ENST ID: ENST00000391894
  CDS Start-End: 184-1419
ggcctccgcctcgccctctgcccagcccgccggtgtcccctccttcccgcgatttcgtttcttctcacgctcccccccccgccccctcccgcgtccagccccgctctccccaccttgtaaaacaaagccggggaaaatgcctgcccgtgcagctcggagcgcgcagcccgtctctgaataagaatggcggcacctgacttgctggatcctaaatctgccgctcagaactccaaaccgaggctctcgttttccacgaaacccacagtgcttgcttcccgggtggagagtgacacgaccattaatgttatgaaatggaagacggtctccacgatattcctggtggttgtcctctatctgatcatcggagccaccgtgttcaaagcattggagcagcctcatgagatttcacagaggaccaccattgtgatccagaagcaaacattcatatcccaacattcctgtgtcaattcgacggagctggatgaactcattcagcaaatagtggcagcaataaatgcagggattataccgttaggaaacacctccaatcaaatcagtcactgggatttgggaagttccttcttctttgctggcactgttattacaaccataggatttggaaacatctcaccacgcacagaaggcggcaaaatattctgtatcatctatgccttactgggaattcccctctttggttttctcttggctggagttggagatcagctaggcaccatatttggaaaaggaattgccaaagtggaagatacgtttattaagtggaatgttagtcagaccaagattcgcatcatctcaacaatcatatttatactatttggctgtgtactctttgtggctctgcctgcgatcatattcaaacacatagaaggctggagtgccctggacgccatttattttgtggttatcactctaacaactattggatttggtgactacgttgcaggtggatccgatattgaatatctggacttctataagcctgtcgtgtggttctggatccttgtagggcttgcttactttgctgctgtcctgagcatgattggagattggctccgagtgatatctaaaaagacaaaagaagaggtgggagagttcagagcacacgctgctgagtggacagccaacgtcacagccgaattcaaagaaaccaggaggcgactgagtgtggagatttatgacaagttccagcgggccacctccatcaagcggaagctctcggcagaactggctggaaaccacaatcaggagctgactccttgtaggaggaccctgtcagtgaaccacctgaccagcgagagggatgtcttgcctcccttactgaagactgagagtatctatctgaatggtttgacgccacactgtgctggtgaagagattgctgtgattgagaacatcaaatagccctctctttaaataaccttaggcatagccataggtgaggacttctctatgctctttatgactgttgctggt

SEQ ID NO: 168161 - DNA, 1410 bp, Homo sapiens
  Payload ID: 13081
  Gene Symbol: KCNK2
  Gene Name: potassium channel, two pore domain subfamily K, member 2
  Uniprot ID: O95069
  ENST ID: ENST00000391895
  CDS Start-End: 68-1336
gaaaccttggaggaagaacggcattaaagatcaaaagcatgatgactcctgatgaaaacatcaccaaatgatgaacccacgagcaaaaagggatttctacttggcggcacctgacttgctggatcctaaatctgccgctcagaactccaaaccgaggctctcgttttccacgaaacccacagtgcttgcttcccgggtggagagtgacacgaccattaatgttatgaaatggaagacggtctccacgatattcctggtggttgtcctctatctgatcatcggagccaccgtgttcaaagcattggagcagcctcatgagatttcacagaggaccaccattgtgatccagaagcaaacattcatatcccaacattcctgtgtcaattcgacggagctggatgaactcattcagcaaatagtggcagcaataaatgcagggattataccgttaggaaacacctccaatcaaatcagtcactgggatttgggaagttccttcttctttgctggcactgttattacaaccataggatttggaaacatctcaccacgcacagaaggcggcaaaatattctgtatcatctatgccttactgggaattcccctctttggttttctcttggctggagttggagatcagctaggcaccatatttggaaaaggaattgccaaagtggaagatacgtttattaagtggaatgttagtcagaccaagattcgcatcatctcaacaatcatatttatactatttggctgtgtactctttgtggctctgcctgcgatcatattcaaacacatagaaggctggagtgccctggacgccatttattttgtggttatcactctaacaactattggatttggtgactacgttgcaggtggatccgatattgaatatctggacttctataagcctgtcgtgtggttctggatccttgtagggcttgcttactttgctgctgtcctgagcatgattggagattggctccgagtgatatctaaaaagacaaaagaagaggtgggagagttcagagcacacgctgctgagtggacagccaacgtcacagccgaattcaaagaaaccaggaggcgactgagtgtggagatttatgacaagttccagcgggccacctccatcaagcggaagctctcggcagaactggctggaaaccacaatcaggagctgactccttgtaggaggaccctgtcagtgaaccacctgaccagcgagagggatgtcttgcctcccttactgaagactgagagtatctatctgaatggtttgacgccacactgtgctggtgaagagattgctgtgattgagaacatcaaatagccctctctttaaataaccttaggcatagccataggtgaggacttctctatgctctttatgactgttgctggtag

SEQ ID NO: 168162 - DNA, 3379 bp, Homo sapiens
  Payload ID: 13081
  Gene Symbol: KCNK2
  Gene Name: potassium channel, two pore domain subfamily K, member 2
  Uniprot ID: O95069
  ENST ID: ENST00000444842
  CDS Start-End: 151-1431
ccttgtaaaacaaagccggggaaaatgcctgcccgtgcagctcggagcgcgcagcccgtctctgaataagaagtgagtacaatggcgtgtttgtaaaaaaaagcttcaagtccgtctttttcaaaaaacattttgaatgctgcatgcctcatgcttcccagcgcctcgcgggagagacccggctatagagcaggagtggcggcacctgacttgctggatcctaaatctgccgctcagaactccaaaccgaggctctcgttttccacgaaacccacagtgcttgcttcccgggtggagagtgacacgaccattaatgttatgaaatggaagacggtctccacgatattcctggtggttgtcctctatctgatcatcggagccaccgtgttcaaagcattggagcagcctcatgagatttcacagaggaccaccattgtgatccagaagcaaacattcatatcccaacattcctgtgtcaattcgacggagctggatgaactcattcagcaaatagtggcagcaataaatgcagggattataccgttaggaaacacctccaatcaaatcagtcactgggatttgggaagttccttcttctttgctggcactgttattacaaccataggatttggaaacatctcaccacgcacagaaggcggcaaaatattctgtatcatctatgccttactgggaattcccctctttggttttctcttggctggagttggagatcagctaggcaccatatttggaaaaggaattgccaaagtggaagatacgtttattaagtggaatgttagtcagaccaagattcgcatcatctcaacaatcatatttatactatttggctgtgtactctttgtggctctgcctgcgatcatattcaaacacatagaaggctggagtgccctggacgccatttattttgtggttatcactctaacaactattggatttggtgactacgttgcaggtggatccgatattgaatatctggacttctataagcctgtcgtgtggttctggatccttgtagggcttgcttactttgctgctgtcctgagcatgattggagattggctccgagtgatatctaaaaagacaaaagaagaggtgggagagttcagagcacacgctgctgagtggacagccaacgtcacagccgaattcaaagaaaccaggaggcgactgagtgtggagatttatgacaagttccagcgggccacctccatcaagcggaagctctcggcagaactggctggaaaccacaatcaggagctgactccttgtaggaggaccctgtcagtgaaccacctgaccagcgagagggatgtcttgcctcccttactgaagactgagagtatctatctgaatggtttgacgccacactgtgctggtgaagagattgctgtgattgagaacatcaaatagccctctctttaaataaccttaggcatagccataggtgaggacttctctatgctctttatgactgttgctggtagcattttttaaattgtgcatgagctcaaagggggaacaaaatagatacacccatcatggtcatctatcatcaagagaatttggaattctgagccagcactttctttctgatgatgcttgttgaacggtccactttctttgatgagtggaatgacaagcaatgtctgatgcctttttgtgcccagactgttttcctctctctttccctaatgtgccataaggcctcagaatgaatgagaattgtttctggtaacaatgtagctttgagggatcagttcttaacttttcagggtctacctaactgagcctagatatggaccatttatggatgacaacaattttttttttgtaaatgacaagaaattcttatgcagccttttacctaagaaattttctgtcagtgccttatcttatgaagaaacagaacctctctagctaatgtgtggtttctccttccctgcccccacccctaggctcacctctgcagtcttttaccccagttctcccatttgaataccataccttgctggaaacagtgtgtaaaatgactgaagtgatgatgcccgaagatgaaatagatgccaaattagatggacattgaagcaacactcagcgttgcctagcgttaaaggcactgcagagaaatgaggtgcagaggtggcccctctgagtatttatttgactcaggtaccagtggtacatatatacagtgtaattatgaccaggctggtaaaattggctgctcgcaaacaatccccttttttcctggcagtatttggaatttatcatttattaataactatacatttttaaaggcagaagaagaaaatctatctatctatctatctatctatctatctatctatctatctatctatctaaatgacctgacagaagaaaactgttaaaaatggatattattggaggggatttaaaacagtgggtgtgaattatcattctgatggaaagaaaatagcaaaacaatgtgttacaagtatttgctaataaacagtatactgccagcttctaattgctttttgatgtatgaaaggcttatataattttcttttcgttgggtgacttttgccagatgagaggaggtggcacagtggtgagtgcagggcacagtcctagccttctgtgggtatacttttggagttgtgacttggctgtgagggcagaagttgaagttgggatcactgtgactttgcacatggaaaaatgcagattgcaggcataattcatctctgacattagagaaaaagctgttatagcacaatttaaattttgagagtttgctgtgtttttttttcacataaaagaggctgattattctttttagtttaattttatatcctgtaattctttggatggttccaagattcagaaaaaattcagtaaatgcaccccgtaaattgctaccctttcctttattttcatacttagatctgctgtacattgtatatatatataatttttaaaatgcagaaagaaaataatttccctaaatataattgcaaactgatttcttttacttttttgtgtgtgggggtgggagctgtatctgaataagtggcattcagattagggtcttgaaaaataaacccagaatctttaaaagaagcaaataaactaatagacgcttattttccaaaatttaaatttaagctagaaatgtaaatattcaattaatttgttaaaagtacttttataaagttaaaaaaaatccaaccaaaattttagaaagtcaggctcttttagaaagaaagctacacccatttcctcaaataactgttccgaaaatttatatggtggaatgcgccatgtataaactgtgaattgtattgacaaataaagtttgtaattaaagtcagca

SEQ ID NO: 168163 - DNA, 644 bp, Homo sapiens
  Payload ID: 13081
  Gene Symbol: KCNK2
  Gene Name: potassium channel, two pore domain subfamily K, member 2
  ENST ID: ENST00000457122
  CDS Start-End: 271-644
tctcagcaagcggccgtttcccatcttcgcttcgcgtccaaagtgttgggtcataatctggatttggaggcaaacccttgccagatcctctccacgccgcttctcccccctctcccgccggtgcccggggtttttgcatctgcctgagtggcggcacctgacttgctggatcctaaatctgccgctcagaactccaaaccgaggctctcgttttccacgaaacccacagtgcttgcttcccgggtggagagtgacacgaccattaatgttatgaaatggaagacggtctccacgatattcctggtggttgtcctctatctgatcatcggagccaccgtgttcaaagcattggagcagcctcatgagatttcacagaggaccaccattgtgatccagaagcaaacattcatatcccaacattcctgtgtcaattcgacggagctggatgaactcattcagcaaatagtggcagcaataaatgcagggattataccgttaggaaacacctccaatcaaatcagtcactgggatttgggaagttccttcttctttgctggcactgttattacaaccataggatttggaaacatctcaccacgcacagaaggcggcaaaatattctgtatcatctatgccttactggg

SEQ ID NO: 168164 - DNA, 1662 bp, Homo sapiens
  Payload ID: 13081
  Gene Symbol: KCNK2
  Gene Name: potassium channel, two pore domain subfamily K, member 2
  ENST ID: ENST00000486921
  CDS Start-End: 148-606
aacattcacacacaaaaaggaaacagtatgggacgatggcttgttagtacaagtgactctgttttggaaattacggacaagaaaccttggaggaagaacggcattaaagatcaaaagcatgatgactcctgatgaaaacatcaccaaatgatgaacccacgagcaaaaagggatttctacttggcggcacctgacttgctggatcctaaatctgccgctcagaactccaaaccgaggctctcgttttccacgaaacccacagtgcttgcttcccgggtggagagtgacacgaccattaatgttatgaaatggaagacggtctccacgatattcctggtggttgtcctctatctgatcatcggagccaccgtgttcaaagcattggagcagcctcatgagatttcacagaggaccaccattgtgatccagaagcaaacattcatatcccaacattcctgtgtcaattcgacggagctggatgaactcattcaggatttggaaacatctcaccacgcacagaaggcggcaaaatattctgtatcatctatgccttactgggaattcccctctttggttttctcttggctggagttggagatcagctaggcaccatatttggaaaaggaattgccaaagtggaagatacgtttattaagtggaatgttagtcagaccaagattcgcatcatctcaacaatcatatttatactatttggctgtgtactctttgtggctctgcctgcgatcatattcaaacacatagaaggctggagtgccctggacgccatttattttgtggttatcactctaacaactattggatttggtgactacgttgcaggtggatccgatattgaatatctggacttctataagcctgtcgtgtggttctggatccttgtagggcttgcttactttgctgctgtcctgagcatgattggagattggctccgagtgatatctaaaaagacaaaagaagaggtgggagagttcagagcacacgctgctgagtggacagccaacgtcacagccgaattcaaagaaaccaggaggcgactgagtgtggagatttatgacaagttccagcgggccacctccatcaagcggaagctctcggcagaactggctggaaaccacaatcaggagctgactccttgtaggaggaccctgtcagtgaaccacctgaccagcgagagggatgtcttgcctcccttactgaagactgagagtatctatctgaatggtttgacgccacactgtgctggtgaagagattgctgtgattgagaacatcaaatagccctctctttaaataaccttaggcatagccataggctcacctctgcagtcttttaccccagttctcccatttgaataccataccttgctggaaacagtgtgtaaaatgactgaagtgatgatgcccgaagatgaaatagatgccaaattagatggacattgaagcaacactcagcgttgcctagcgttaaaggcactgcagagaaatgaggtgcagaggtggcccctctgagtatttatttgactcaggtaccagtggtacatatatacagtgtaattatgaccaggctggtaaaattggctgctcgcaaacaatccccttttttcctggcagtatttggaatttatcatttattaataactat

SEQ ID NO: 168165 - DNA, 961 bp, Homo sapiens
  Payload ID: 13081
  Gene Symbol: KCNK2
  Gene Name: potassium channel, two pore domain subfamily K, member 2
  ENST ID: ENST00000470177
  CDS Start-End: 152-622
accttgtaaaacaaagccggggaaaatgcctgcccgtgcagctcggagcgcgcagcccgtctctgaataagaagtgagtacaatggcgtgtttgtaaaaaaaagcttcaagtccgtctttttcaaaaaacattttgaatgctgcatgcctcatgcttcccagcgcctcgcgggagagacccggctatagagcaggagtggcggcacctgacttgctggatcctaaatctgccgctcagaactccaaaccgaggctctcgttttccacgaaacccacagtgcttgcttcccgggtggagagtgacacgaccattaatgttatgaaatggaagacggtctccacgatattcctggtggttgtcctctatctgatcatcggagccaccgtgttcaaagcattggagcagcctcatgagatttcacagaggaccaccattgtgatccagaagcaaacattcatatcccaacattcctgtgtcaattcgacggagctggatgaactcattcaggatttggaaacatctcaccacgcacagaaggcggcaaaatattctgtatcatctatgccttactgggaattcccctctttggttttctcttggctggagttggagatcagctaggcaccatatttggaaaaggaattgccaaagtggaagatacgtttattaagtggaatgttagtcagaccaagattcgcatcatctcaacaatcatatttatactatttggctgtgtactctttgtggctctgcctgcgatcatattcaaacacatagaaggctggagtgccctggacgccatttattttgtggttatcactctaacaactattggatttggtgactacgttgcaggtggatccgatattgaatatctggacttctataagcctgtcgtgtggttctggatccttgtagggcttgcttactttgctgctgtcctgagcatgattggagatt

SEQ ID NO: 168166 - DNA, 1200 bp, Homo sapiens
  Payload ID: 13081
  Gene Symbol: KCNK2
  Gene Name: potassium channel, two pore domain subfamily K, member 2
  Uniprot ID: O95069
  ENST ID: ENST00000467031
  CDS Start-End: 73-759
gacaagaaaccttggaggaagaacggcattaaagatcaaaagcatgatgactcctgatgaaaacatcaccaaatgatgaacccacgagcaaaaagggatttctacttggcggcacctgacttgctggatcctaaatctgccgctcagaactccaaaccgaggctctcgttttccacgaaacccacagtgcttgcttcccgggtggagagtgacacgaccattaatgttatgaaatggaagacggtctccacgatattcctggtggttgtcctctatctgatcatcggagccaccgtgttcaaagcattggagcagcctcatgagatttcacagaggaccaccattgtgatccagaagcaaacattcatatcccaacattcctgtgtcaattcgacggagctggatgaactcattcagcaaatagtggcagcaataaatgcagggattataccgttaggaaacacctccaatcaaatcagtcactgggatttgggaagttccttcttctttgctggcactgttattacaaccataggatttggaaacatctcaccacgcacagaaggcggcaaaatattctgtatcatctatgccttactgggaattcccctctttggttttctcttggctggagttggagatcagctaggcaccatatttggaaaaggaattgccaaagtggaagatacgtttattgtggatccgatattgaatatctggacttctataagcctgtcgtgtggttctggatccttgtagggcttgcttactttgctgctgtcctgagcatgattggagattggctccgagtgatatctaaaaagacaaaagaagaggtgggagagttcagagcacacgctgctgagtggacagccaacgtcacagccgaattcaaagaaaccaggaggcgactgagtgtggagatttatgacaagttccagcgggccacctccatcaagcggaagctctcggcagaactggctggaaaccacaatcaggagctgactccttgtaggaggaccctgtcagtgaaccacctgaccagcgagagggatgtcttgcctcccttactgaagactgagagtatctatctgaatggtttgacgccacactgtgctggtgaagagattgctgtgattgagaacatcaaatagccctctctttaaataaccttaggcatagccataggtgaggacttct

SEQ ID NO: 168167 - DNA, 1130 bp, Homo sapiens
  Payload ID: 13081
  Gene Symbol: KCNK2
  Gene Name: potassium channel, two pore domain subfamily K, member 2
  ENST ID: ENST00000474771
  CDS Start-End: 73-726
accttgtaaaacaaagccggggaaaatgcctgcccgtgcagctcggagcgcgcagcccgtctctgaataagaatggcggcacctgacttgctggatcctaaatctgccgctcagaactccaaaccgaggctctcgttttccacgaaacccacagtgcttgcttcccgggtggagagtgacacgaccattaatgttatgaaatggaagacggtctccacgatattcctggtggttgtcctctatctgatcatcggagccaccgtgttcaaagcattggagcagcctcatgagatttcacagaggaccaccattgtgatccagaagcaaacattcatatcccaacattcctgtgtcaattcgacggagctggatgaactcattcagcaaatagtggcagcaataaatgcagggattataccgttaggaaacacctccaatcaaatcagtcactgggatttgggaagttccttcttctttgctggcactgttattacaaccataggatttggaaacatctcaccacgcacagaaggcggcaaaatattctgtatcatctatgccttactgggaattcccctctttggttttctcttggctggagttggagatcagctaggcaccatatttggaaaaggaattgccaaagtggaagatacgtttattgtggatccgatattgaatatctggacttctataagcctgtcgtgtggttctggatccttgtagggcttgcttactttgctgctgtcctgagcatgattggagattggctccgagtgatatctaaaaagacaaaagaagaggtgggagagttcagagcacacgctgctgagtggacagccaacgtcacagccgaattcaaagaaaccaggaggcgactgagtgtggagatttatgacaagttccagcgggccacctccatcaagcggaagctctcggcagaactggctggaaaccacaatcaggagctgactccttgtaggaggaccctgtcagtgaaccacctgaccagcgagagggatgtcttgcctcccttactgaagactgagagtatctatctgaatggtttgacgccacactgtgctggtgaagagattgctgtgattgagaacatcaaatagccctctctt

SEQ ID NO: 168168 - DNA, 566 bp, Homo sapiens
  Payload ID: 13081
  Gene Symbol: KCNK2
  Gene Name: potassium channel, two pore domain subfamily K, member 2
  ENST ID: ENST00000478774
  CDS Start-End: 213-566
gtgttgttagagaattcgcctattacgacgacagcaacgtctgatctcctggctttcttcccctccttgatgtcttcgccctggctccagtggcggcacctgacttgctggatcctaaatctgccgctcagaactccaaaccgaggctctcgttttccacgaaacccacagtgcttgcttcccgggtggagagtgacacgaccattaatgttatgaaatggaagacggtctccacgatattcctggtggttgtcctctatctgatcatcggagccaccgtgttcaaagcattggagcagcctcatgagatttcacagaggaccaccattgtgatccagaagcaaacattcatatcccaacattcctgtgtcaattcgacggagctggatgaactcattcagcaaatagtggcagcaataaatgcagggattataccgttaggaaacacctccaatcaaatcagtcactgggatttgggaagttccttcttctttgctggcactgttattacaaccataggatttggaaacatctcaccacgcacagaaggcggcaaaatattctgt

SEQ ID NO: 168169 - DNA, 6162 bp, Homo sapiens
  Payload ID: 13082
  Gene Symbol: KCNK3
  Gene Name: potassium channel, two pore domain subfamily K, member 3
  Uniprot ID: O14649
  ENST ID: ENST00000302909
  CDS Start-End: 126-1310
tgcccggcgcggagagcggcgagcgcagccatgccccaggccgcctccggggcagcagcagcggcggccggggccgaggcgcgggccgggggcgccggggggccggcggcggcccgggcgggacgatgaagcggcagaacgtgcgcacgctggcgctcatcgtgtgcaccttcacctacctgctggtgggcgccgcggtcttcgacgcgctggagtcggagcccgagctgatcgagcggcagcggctggagctgcggcagcaggagctgcgggcgcgctacaacctcagccagggcggctacgaggagctggagcgcgtcgtgctgcgcctcaagccgcacaaggccggcgtgcagtggcgcttcgccggctccttctacttcgccatcaccgtcatcaccaccatcggctacgggcacgcggcacccagcacggatggcggcaaggtgttctgcatgttctacgcgctgctgggcatcccgctcacgctcgtcatgttccagagcctgggcgagcgcatcaacaccttggtgaggtacctgctgcaccgcgccaagaaggggctgggcatgcggcgcgccgacgtgtccatggccaacatggtgctcatcggcttcttctcgtgcatcagcacgctgtgcatcggcgccgccgccttctcccactacgagcactggaccttcttccaggcctactactactgcttcatcaccctcaccaccatcggcttcggcgactacgtggcgctgcagaaggaccaggccctgcagacgcagccgcagtacgtggccttcagcttcgtctacatccttacgggcctcacggtcatcggcgccttcctcaacctcgtggtgctgcgcttcatgaccatgaacgccgaggacgagaagcgcgacgccgagcaccgcgcgctgctcacgcgcaacgggcaggcgggcggcggcggagggggtggcagcgcgcacactacggacaccgcctcatccacggcggcagcgggcggcggcggcttccgcaacgtctacgcggaggtgctgcacttccagtccatgtgctcgtgcctgtggtacaagagccgcgagaagctgcagtactccatccccatgatcatcccgcgggacctctccacgtccgacacgtgcgtggagcagagccactcgtcgccgggagggggcggccgctacagcgacacgccctcgcgacgctgcctgtgcagcggggcgccacgctccgccatcagctcggtgtccacgggtctgcacagcctgtccaccttccgcggcctcatgaagcgcaggagctccgtgtgactgccccgaggggcctggagcacctgggggcgcgggcgggggacccctgctgggaggccaggagactgcccctgctgccttctgcccagtgggaccccgcacaacatccctcaccactctcccccagcacccccatctccgactgtgcctgcttgcaccagccggcaggaggccgggctctgaggacccctggggcccccatcggagccctgcaaattccgagaaatgtgaaacttggtggggtcagggaggaaaggcagaagctgggagcctcccttccctttgaaaatctaagaagctcccagtcctcagagaccctgctggtacccagacccccaccttcggaggggacttcatgttccgtgtacgtttgcatctctatttatacctctgtcctgctaggtctcccaccttcccttggttccaaaagccagggtgtctatgtccaagtcacccctactcagccccactccccttcctcatccccagctgtgtctcccaacctcccttcgtgttgttttgcatggctttgcagttatggagaaagtggaaacccagcagtccctaaagctggtccccagaaagcaggacagaaagaaggagggacaggcaggcagcaggaggggcgagctgggaggcaggaggcagcggcctgtcagtctgcagaatggtcgcactggaggttcaagctaactggcctccagccacattctcatagcaggtaggacttcagccttccagacactgcccttagaatctggaacagaagacttcagactcaccataattgctgataattacccactcttaaatttgtcgagtgatttttagcctctgaaaactctatgctggccactgattcctttgagtctcacaaaaccctacttaggtcatcagggcaggagttctcactcccattttacagatgagaatactgaggcctggacaggtgaagtgaccagagagcaaaaggcaaaggggtgggggctgggtgcagtggctcacacctgtattcccaacacttttggaggctgaggttggaggattgcttgagcccaggaatttgagaccagcctaggtgacatagtgagaccccatctctacaaaaaataaaaaattaaccaggtgtggtggcacgtgcctgggagtcccagcgacttgggaggctgaggtgggaggattgtttgagcctgggaggtcgaggctgtagtgagccctgattgcaccactgtactccagcctgggtgacagggcaagaccctgtctcaaaaaaaaaaaaaaaaatggcaaagggagacaagagcccagcctgcttgttgctagccaaagtgttctttccttccagcttggcctgctcttaaaagcaaagctcctgcagtgtacatcctggcattgtgtggctacctgggttttaaaccagaatcagaagtcccggatcagagggcactgctgaggttcagcctcttctcttcttggccaggaggcagcagctctgaatgggcccctgaggctgcacaggggcctttgtcactggggcgcatgcttacaaacagtgcagttcttgggaccgaggtaagcagggctgggtctcatggcagaaaggccaggatctggggctctaggaatttgggaattgggcagagtggccaagaaagctggcaggcatatcctatgggacatcacacctggcaccattgtcattgttggtgcctgtgtcccaagtagctagtgataagctgaggctgcagcaagaaacacccttcccaggtgggggagtttggaccagaggtgccctctgcccaccacacctgcaacccagaagcccagatggaacgcagctgacgaaggtgatgcttgaggctcacttttggggccccacagctggagccggtataatgactgggacaacatcaaggggtggatgaggggcctctcctcccgcaacactgccttcccatgctgttcccctgccagctccttaacactgccgaccaaggccagccctggcattcagggaaattggagggcagcacccgtagggtggccagcctcaggccccaccccagctgtgtcctctagtctctggggacccctggggggaagaagtctaccctgcttgtgagtcccgtctcagtgtggaggaactggctgcacgtgggacctgaaggtgccctctgtgtttatgttgggggtgggggggcagtgctggctgcctctgtcctgtgtgtgaccctgccctcgaagggtcctgtcctgtcagtcccgagggagccacaaccaaagctgcggagagaaggtggggaagggtgcagaatggccgtggggcacagcgtggcagactgttcagtctctgctgggtctttcctagggacctggaaggccagtgttgcttccccctcactccctttcactgcaggcagcctctctgcttccccaatgccttatgcctgggcacactgccacagaatatgcaatatgtgtgggtgaccatgccctcacgaccacacccccaccccgggcagcccccggactccaaaggtcgtggctgccacagcctccctcagctcttcctgcctatctgtcttcacactgagaatggcgcccaataaatgctatccacggagaccaggctcaggctccagctgcctctgtcatcgtatgcccttgctgctgccagggaggggccatctcccaccccctcccctgccggggtctacaaacatatctagctgctgggtgccgtggctcacacctatagtcacagcactaggcgggcagatcacctgaggtcagaagttcaagaccagcctggccaacatggtaaaaccccgtctctactaaaaatacaaaaattagctgagcgtggtggcgcatgtctgtagtcccagctactcggctactcaggaggctgacgcacgagaatcgcttgaacccgggaggcggaggttgcagtgagctgagatcgtgccactgcactccagcctgagcgacagagtgagaccctgtctaaaaaaaaacaataataataaaataaaataacatacctagctgactcgccatgggctcgctggcctgtgggcgacactggcttcccttttgggatttcccagaagatccagattttcttaagtccccttggaacagactaagaaaggatcaccttagaaatcacctggtcctattgtcccccccgtacatgagtaactgaggcccacagagagcaaatcgcctgcctgagtcacacagcagtgagtggcagacctaggctaggaactaggactggggattgctattccagtgctccccatcctcacacagactgcacagtccgcctggacacaccccagctgacagtggtacctcccagtcagccaggagaatggattccttctcctgcagtaggggccccctggctgagtggcctgattgactaaaacatatgtctttgaaggagagtgcatcacaagcacctttctttggggtagatttttctctgggtctagagggacagctcaggcttgggactgggcctcagaacctacgacagaccgtgagagcagacccaccttatccatctggtgccagctccccaggtcagctacagcgacccccggacttcatagagtacaatccacagtaatagcacacagctctgtacctatctagctccatgcctatctatctgcctacctttcacaaaataattcttagcaaccctgctacagccaatgattctaatacgttctgttctattgcatgttataaaatgctggtcacgatccactaaattgatgtctctacctgctaatggtttaatacctgcagattgaaatatactggagaaataaagagagtgggagtagggacactttctcccagtgcccacaccgcccctcgttacccgcataggtcaactgaaagatacagagagggaagctttgatggggggttcagagttcaaaggaagaaatgatggcacctgcactccctgcccccagaggcaggacacagccagccctcctgtgacagcactcctggcagctccttgttggcctgcagccctcagggggcttagttgccattgactcacccactcctaaggccaccacatcaaaatctgaggcttactgccctgtcccacctgcctctgtctttcttaaaacagctaaatgcaacaatagcagaaattagcttgtttttgaggttggcaatgaccagttcaaggtgactcttattttcttaagcagtgcttgcaggacataaatgtgatgacacttgccctcctttctttatcgcctgggacagactttacaaacagacctgggagaagtcccctaaggggctgcatttatccccatctccctaggggtgatcagcattgtgacagctgggcagagcagtggtgaactgcacccatgtccctgctcacatctcctaagatctcagaattgcctgaggttctagcgtgggctccttctctccagatgatgccatccccacccccctcatttccacacagcatctgaggcatcctgcactaaaagatatatgtacagcaaaacaaaaatagaaaaccagcacagcagagtggaggtggggtataaatatacccagatccccgctgatttggttactcggggtgagcatcagatggaaatagaagtttccgggggccaagagagaaagagggatgtaacgacaattcttttcaaaacgtgtcccatggtatgcctcgtggaaaaaatggttcgttggtcaaatgaatttgggaaaatgctgtcaatatcaccgactcatggagcttcgcaaggcatcttagcttaataaaggttatgaaaagtcttgcagcaaa

SEQ ID NO: 168170 - DNA, 1956 bp, Homo sapiens
  Payload ID: 13082
  Gene Symbol: KCNK3
  Gene Name: potassium channel, two pore domain subfamily K, member 3
  ENST ID: ENST00000620977
  CDS Start-End: 454-1269
tggtgctgaagggacagctccgcggcggcggcggcggcggcggccccgggcgctgagcgggtgcccggcgcggagagcgggacgatgaagcggcagaacgtgcgcacgctggcgctcatcgtgtgcaccttcacctacctgctggtgggcgccgcggtcttcgacgcgctggagtcggagcccgagctgatcgagcggcagcggctggagctgcggcagcaggagctgcgggcgcgctacaacctcagccagggcggctacgaggagctggagcgcgtcgtgctgcgcctcaagccgcacaaggccggcgtgcagtggcgcttcgccggctccttctacttcgccatcaccgtcatcaccaccatcggctacgggcacgcggcacccagcacggatggcggcaaggtgttctgcatgttctacgcgctgctgggcatcccgctcacgctcgtcatgttccagagcctgggcgagcgcatcaacaccttggtgaggtacctgctgcaccgcgccaagaaggggctgggcatgcggcgcgccgacgtgtccatggccaacatggtgctcatcggcttcttctcgtgcatcagcacgctgtgcatcggcgccgccgccttctcccactacgagcactggaccttcttccaggcctactactactgcttcatcaccctcaccaccatcggcttcggcgactacgtggcgctgcagaaggaccaggccctgcagacgcagccgcagtacgtggccttcagcttcgtctacatccttacgggcctcacggtcatcggcgccttcctcaacctcgtggtgctgcgcttcatgaccatgaacgccgaggacgagaagcgcgacgccgagcaccgcgcgctgctcacgcgcaacgggcaggcgggcggcggcggagggggtggcagcgcgcacactacggacaccgcctcatccacggcggcagcgggcggcggcggcttccgcaacgtctacgcggaggtgctgcacttccagtccatgtgctcgtgcctgtggtacaagagccgcgagaagctgcagtactccatccccatgatcatcccgcgggacctctccacgtccgacacgtgcgtggagcagagccactcgtcgccgggagggggcggccgctacagcgacacgccctcgcgacgctgcctgtgcagcggggcgccacgctccgccatcagctcggtgtccacgggtctgcacagcctgtccaccttccgcggcctcatgaagcgcaggagctccgtgtgactgccccgaggggcctggagcacctgggggcgcgggcgggggacccctgctgggaggccaggagactgcccctgctgccttctgcccagtgggaccccgcacaacatccctcaccactctcccccagcacccccatctccgactgtgcctgcttgcaccagccggcaggaggccgggctctgaggacccctggggcccccatcggagccctgcaaattccgagaaatgtgaaacttggtggggtcagggaggaaaggcagaagctgggagcctcccttccctttgaaaatctaagaagctcccagtcctcagagaccctgctggtacccagacccccaccttcggaggggacttcatgttccgtgtacgtttgcatctctatttatacctctgtcctgctaggtctcccaccttcccttggttccaaaagccagggtgtctatgtccaagtcacccctactcagccccactccccttcctcatccccagctgtgtctcccaacctcccttcgtgttgttttgcatggctttgcagttatggagaaagtggaaacccagcagtccctaaagctggtccccagaaagcaggacagaaagaaggagggacaggcaggcagcaggaggggcgagctgggaggcaggaggcagcggcctgtcagtctgcagaatggtcgcactggaggttca

SEQ ID NO: 168171 - DNA, 1673 bp, Homo sapiens
  Payload ID: 13083
  Gene Symbol: KCNK4
  Gene Name: potassium channel, two pore domain subfamily K, member 4
  Uniprot ID: Q9NYG8
  ENST ID: ENST00000394525
  CDS Start-End: 187-1368
gtgcacgctagtgtccacacacgtgtgcgtgggctctgggtgccctggcgcggccggcacgcccatgggggccggggatgccggggcgtctgcggagagtgcaggtgggtgacgacagctccccaggagccccccgcccggcccctccaggcgggcagtggagctggcccggcgcctgggcgcgccatgcgcagcaccacgctcctggccctgctggcgctggtcttgctttacttggtgtctggtgccctggtgttccgggccctggagcagccccacgagcagcaggcccagagggagctgggggaggtccgagagaagttcctgagggcccatccgtgtgtgagcgaccaggagctgggcctcctcatcaaggaggtggctgatgccctgggagggggtgcggacccagaaaccaactcgaccagcaacagcagccactcagcctgggacctgggcagcgccttctttttctcagggaccatcatcaccaccatcggctatggcaatgtggccctgcgcacagatgccgggcgcctcttctgcatcttttatgcgctggtggggattccgctgtttgggatcctactggcaggggtcggggaccggctgggctcctccctgcgccatggcatcggtcacattgaagccatcttcttgaagtggcacgtgccaccggagctagtaagagtgctgtcggcgatgcttttcctgctgatcggctgcctgctctttgtcctcacgcccacgttcgtgttctgctatatggaggactggagcaagctggaggccatctactttgtcatagtgacgcttaccaccgtgggctttggcgactatgtggccggcgcggaccccaggcaggactccccggcctatcagccgctggtgtggttctggatcctgctcggcctggcttacttcgcctcagtgctcaccaccatcgggaactggctgcgagtagtgtcccgccgcactcgggcagagatgggcggcctcacggctcaggctgccagctggactggcacggtgacagcgcgcgtgacccagcgagccgggcccgccgccccgccgccggagaaggagcagccactgctgcctccaccgccctgtccagcgcagccgctgggcaggccccgatccccttcgccccccgagaaggctcagccgccttccccgcccacggcctcggccctggattatcccagcgagaacctggccttcatcgacgagtcctcggatacgcagagcgagcgcggctgcccgctgccccgcgcgccgagaggtcgccgccgcccaaatccccccaggaagcccgtgcggccccgcggccccgggcgtccccgagacaaaggcgtgccggtgtaggggcaggatccctggccgggcctctcaagggcttcgtttctgctctccccggcatgcctggcttgtttgaccaaagagccctctttccacgagactgaagtctggggaggaggctacagttgcctctccgcctcctccctggccccggcccttccctcacttccatccatctctagacccccccaaggctttctgtgtcgctgccccgggcgggtgtatccctcacagcacctcacgactgtgcctcaaagcctgcatcaataaatgaaaacggtctgcaccgctgcgggcgtgacgctcccgga

SEQ ID NO: 168172 - DNA, 1697 bp, Homo sapiens
  Payload ID: 13083
  Gene Symbol: KCNK4
  Gene Name: potassium channel, two pore domain subfamily K, member 4
  Uniprot ID: Q9NYG8
  ENST ID: ENST00000422670
  CDS Start-End: 236-1417
agagacgggccagctgatgcccaggtcggggccctgccgctggccacactgggctccggtccaaggctagaaggctggcccctgctgcaacccctctccggctcctctgccacccacctcccggggctggccggctgtggggagccaggcggccgcagtgacgacagctccccaggagccccccgcccggcccctccaggcgggcagtggagctggcccggcgcctgggcgcgccatgcgcagcaccacgctcctggccctgctggcgctggtcttgctttacttggtgtctggtgccctggtgttccgggccctggagcagccccacgagcagcaggcccagagggagctgggggaggtccgagagaagttcctgagggcccatccgtgtgtgagcgaccaggagctgggcctcctcatcaaggaggtggctgatgccctgggagggggtgcggacccagaaaccaactcgaccagcaacagcagccactcagcctgggacctgggcagcgccttctttttctcagggaccatcatcaccaccatcggctatggcaatgtggccctgcgcacagatgccgggcgcctcttctgcatcttttatgcgctggtggggattccgctgtttgggatcctactggcaggggtcggggaccggctgggctcctccctgcgccatggcatcggtcacattgaagccatcttcttgaagtggcacgtgccaccggagctagtaagagtgctgtcggcgatgcttttcctgctgatcggctgcctgctctttgtcctcacgcccacgttcgtgttctgctatatggaggactggagcaagctggaggccatctactttgtcatagtgacgcttaccaccgtgggctttggcgactatgtggccggcgcggaccccaggcaggactccccggcctatcagccgctggtgtggttctggatcctgctcggcctggcttacttcgcctcagtgctcaccaccatcgggaactggctgcgagtagtgtcccgccgcactcgggcagagatgggcggcctcacggctcaggctgccagctggactggcacggtgacagcgcgcgtgacccagcgagccgggcccgccgccccgccgccggagaaggagcagccactgctgcctccaccgccctgtccagcgcagccgctgggcaggccccgatccccttcgccccccgagaaggctcagccgccttccccgcccacggcctcggccctggattatcccagcgagaacctggccttcatcgacgagtcctcggatacgcagagcgagcgcggctgcccgctgccccgcgcgccgagaggtcgccgccgcccaaatccccccaggaagcccgtgcggccccgcggccccgggcgtccccgagacaaaggcgtgccggtgtaggggcaggatccctggccgggcctctcaagggcttcgtttctgctctccccggcatgcctggcttgtttgaccaaagagccctctttccacgagactgaagtctggggaggaggctacagttgcctctccgcctcctccctggccccggcccttccctcacttccatccatctctagacccccccaaggctttctgtgtcgctgccccgggcgggtgtatccctcacagcacctcacgactgtgcctcaaagcctgcatcaataaatgaaaacggtctgca

SEQ ID NO: 168173 - DNA, 1450 bp, Homo sapiens
  Payload ID: 13083
  Gene Symbol: KCNK4
  Gene Name: potassium channel, two pore domain subfamily K, member 4
  ENST ID: ENST00000541349
  CDS Start-End: 132-608
cggcgaggccgtgctggaacccgggcctcagccgcagccgcagcggggccgacatgacgacagctccccaggagccccccgcccggcccctccaggcgggcagtggagctggcccggcgcctgggcgcgccatgcgcagcaccacgctcctggccctgctggcgctggtcttgctttacttggtgtctggtgccctggtgttccgggccctggagcagccccacgagcagcaggcccagagggagctgggggaggtccgagagaagttcctgagggcccatccgtgtgtgagcgaccaggagctgggcctcctcatcaaggaggtggctgatgccctgggagggggtgcggacccagaaaccaactcgaccagcaacagcagccactcagcctgggacctgggcagcgccttctttttctcagggaccatcatcaccaccatcggctatggcaatgtggccctgcgcacagatgccgggcgcctcttctgcatcttttatgcgctggtggggattccgctgtttgggatcctactggcaggggtcggggaccggctgggctcctccctgcgccatggcatcggtcacattgaagccatcttcttgtgacgcttaccaccgtgggctttggcgactatgtggccggcgcggaccccaggcaggactccccggcctatcagccgctggtgtggttctggatcctgctcggcctggcttacttcgcctcagtgctcaccaccatcgggaactggctgcgagtagtgtcccgccgcactcgggcagagatgggcggcctcacggctcaggctgccagctggactggcacggtgacagcgcgcgtgacccagcgagccgggcccgccgccccgccgccggagaaggagcagccactgctgcctccaccgccctgtccagcgcagccgctgggcaggccccgatccccttcgccccccgagaaggctcagccgccttccccgcccacggcctcggccctggattatcccagcgagaacctggccttcatcgacgagtcctcggatacgcagagcgagcgcggctgcccgctgccccgcgcgccgagaggtcgccgccgcccaaatccccccaggaagcccgtgcggccccgcggccccgggcgtccccgagacaaaggcgtgccggtgtaggggcaggatccctggccgggcctctcaagggcttcgtttctgctctccccggcatgcctggcttgtttgaccaaagagccctctttccacgagactgaagtctggggaggaggctacagttgcctctccgcctcctccctggccccggcccttccctcacttccatccatctctagacccccccaaggctttctgtgtcgctgccccgggcgggtgtatccctcacagcacctcacgactgtgcctcaaagcctgcatcaataaatgaaaacggtctgcaccgct

SEQ ID NO: 168174 - DNA, 1723 bp, Homo sapiens
  Payload ID: 13083
  Gene Symbol: KCNK4
  Gene Name: potassium channel, two pore domain subfamily K, member 4
  Uniprot ID: Q9NYG8
  ENST ID: ENST00000539216
  CDS Start-End: 361-1542
caggcttaggctctctttcggcctcccactcgccttcctttcccttctcggtgccctcctctctttcctcacccggtagtcccagacaggggctgagggccgggcagcggaggtaaggggaaggctggagataggagggggactgggtgtgtccagccagagggatgtctgtggacagtgcagctgggggctttatggatctttgggtgtgtaggggatagaggaggagggtgtgggtgtcaggccagctcagtgaccccagcatccctggttttgcccgcagtgacgacagctccccaggagccccccgcccggcccctccaggcgggcagtggagctggcccggcgcctgggcgcgccatgcgcagcaccacgctcctggccctgctggcgctggtcttgctttacttggtgtctggtgccctggtgttccgggccctggagcagccccacgagcagcaggcccagagggagctgggggaggtccgagagaagttcctgagggcccatccgtgtgtgagcgaccaggagctgggcctcctcatcaaggaggtggctgatgccctgggagggggtgcggacccagaaaccaactcgaccagcaacagcagccactcagcctgggacctgggcagcgccttctttttctcagggaccatcatcaccaccatcggctatggcaatgtggccctgcgcacagatgccgggcgcctcttctgcatcttttatgcgctggtggggattccgctgtttgggatcctactggcaggggtcggggaccggctgggctcctccctgcgccatggcatcggtcacattgaagccatcttcttgaagtggcacgtgccaccggagctagtaagagtgctgtcggcgatgcttttcctgctgatcggctgcctgctctttgtcctcacgcccacgttcgtgttctgctatatggaggactggagcaagctggaggccatctactttgtcatagtgacgcttaccaccgtgggctttggcgactatgtggccggcgcggaccccaggcaggactccccggcctatcagccgctggtgtggttctggatcctgctcggcctggcttacttcgcctcagtgctcaccaccatcgggaactggctgcgagtagtgtcccgccgcactcgggcagagatgggcggcctcacggctcaggctgccagctggactggcacggtgacagcgcgcgtgacccagcgagccgggcccgccgccccgccgccggagaaggagcagccactgctgcctccaccgccctgtccagcgcagccgctgggcaggccccgatccccttcgccccccgagaaggctcagccgccttccccgcccacggcctcggccctggattatcccagcgagaacctggccttcatcgacgagtcctcggatacgcagagcgagcgcggctgcccgctgccccgcgcgccgagaggtcgccgccgcccaaatccccccaggaagcccgtgcggccccgcggccccgggcgtccccgagacaaaggcgtgccggtgtaggggcaggatccctggccgggcctctcaagggcttcgtttctgctctccccggcatgcctggcttgtttgaccaaagagccctctttccacgagactgaagtctggggaggaggctacagttgcctctccgcctcctccctggccccggcccttccctcacttccatccatctctagacccc

SEQ ID NO: 168175 - DNA, 1389 bp, Homo sapiens
  Payload ID: 13083
  Gene Symbol: KCNK4
  Gene Name: potassium channel, two pore domain subfamily K, member 4
  ENST ID: ENST00000538767
  CDS Start-End: 253-1185
tgtccccaggggcggagagttgcggacccttcccgatccggtaatgggcctgggagatgccagattagcgtggtgcctgtccggagagacgggccagctgatgcccaggtcggggccctgccgctggccacactgggctccggtccaaggctagaaggctggcccctgctgcaacccctctccggctcctctgccacccacctcccggggctggccggctgtggggagccaggcggccgcaggaggtggctgatgccctgggagggggtgcggacccagaaaccaactcgaccagcaacagcagccactcagcctgggacctgggcagcgccttctttttctcagggaccatcatcaccaccatcggctatggcaatgtggccctgcgcacagatgccgggcgcctcttctgcatcttttatgcgctggtggggattccgctgtttgggatcctactggcaggggtcggggaccggctgggctcctccctgcgccatggcatcggtcacattgaagccatcttcttgtgacgcttaccaccgtgggctttggcgactatgtggccggcgcggaccccaggcaggactccccggcctatcagccgctggtgtggttctggatcctgctcggcctggcttacttcgcctcagtgctcaccaccatcgggaactggctgcgagtagtgtcccgccgcactcgggcagagatgggcggcctcacggctcaggctgccagctggactggcacggtgacagcgcgcgtgacccagcgagccgggcccgccgccccgccgccggagaaggagcagccactgctgcctccaccgccctgtccagcgcagccgctgggcaggccccgatccccttcgccccccgagaaggctcagccgccttccccgcccacggcctcggccctggattatcccagcgagaacctggccttcatcgacgagtcctcggatacgcagagcgagcgcggctgcccgctgccccgcgcgccgagaggtcgccgccgcccaaatccccccaggaagcccgtgcggccccgcggccccgggcgtccccgagacaaaggcgtgccggtgtaggggcaggatccctggccgggcctctcaagggcttcgtttctgctctccccggcatgcctggcttgtttgaccaaagagccctctttccacgagactgaagtctggggaggaggctacagttgcctctccgcctcctccctggccccggcccttccctcacttccatccatctctagacccccccaaggctttctgtgtcgctgccccgggcgggtgtatccctcacagcacctcacgactgtgcctcaaagcctgcatcaataaatgaaaacggtctgcaccgctgcgggcgtgacgctccc

SEQ ID NO: 168176 - DNA, 3756 bp, Homo sapiens
  Payload ID: 13084
  Gene Symbol: KCNK5
  Gene Name: potassium channel, two pore domain subfamily K, member 5
  Uniprot ID: O95279
  ENST ID: ENST00000359534
  CDS Start-End: 340-1839
agcgacgcgtggagaagcggcccacgtgtctgcccagagtcaagtcctgtgttcttcccgctccttacgcatccgcggtccagggcgccctttcagccccgctggtgttcgcccaccccgggccgcgtgagtggggccccacgcagctccccgcactccgtgggccaacttggccaagcaactctgtccggggagcggtgcttgcggggggtgagtaccgggcactgcgcatgcggagctccaaattcaaacagctgttttcagaggctggagggcgggcggactggtagcagctggggctaggagaggctttctctaggaggcggccgctcgggagccatggtggaccggggccctctgctcacctcggccatcatcttctacctggccatcggggcggcgatcttcgaagtgctggaggagccacactggaaggaggccaagaaaaactactacacacagaagctgcatctgctcaaggagttcccgtgcctgggtcaggagggcctggacaagatcctagaggtggtatctgatgctgcaggacagggtgtggccatcacagggaaccagaccttcaacaactggaactggcccaatgcaatgatttttgcagcgaccgtcattaccaccattggatatggcaatgtggctcccaagacccccgccggtcgcctcttctgtgttttctatggtctcttcggggtgccgctctgcctgacgtggatcagtgccctgggcaagttcttcgggggacgtgccaagagactagggcagttccttaccaagagaggtgtgagtctgcggaaggcgcagatcacgtgcacagtcatcttcatcgtgtggggcgtcctagtccacctggtgatcccacccttcgtattcatggtgactgaggggtggaactacatcgagggcctctactactccttcatcaccatctccaccatcggcttcggtgactttgtggccggtgtgaaccccagcgccaactaccacgccctgtaccgctacttcgtggagctctggatctacttggggctggcctggctgtccctttttgtcaactggaaggtgagcatgtttgtggaagtccacaaagccattaagaagcggcggcggcgacggaaggagtcctttgagagctccccacactcccggaaggccctgcaggtgaaggggagcacagcctccaaggacgtcaacatcttcagctttctttccaagaaggaagagacctacaacgacctcatcaagcagatcgggaagaaggccatgaagacaagcgggggtggggagacgggcccgggcccagggctggggcctcaaggcggtgggctcccagcactgcccccttccctggtgcccctggtagtctactccaagaaccgggtgcccaccttggaagaggtgtcacagacactgaggagcaaaggccacgtatcaaggtccccagatgaggaggctgtggcacgggcccctgaagacagctcccctgcccccgaggtgttcatgaaccagctggaccgcatcagcgaggaatgcgagccatgggacgcccaggactaccacccactcatcttccaggacgccagcatcaccttcgtgaacacggaggctggcctctcagacgaggagacctccaagtcctcgctagaggacaacttggcaggggaggagagcccccagcagggggctgaagccaaggcgcccctgaacatgggcgagttcccctcctcctccgagtccaccttcaccagcactgagtctgagctctctgtgccttacgaacagctgatgaatgagtacaacaaggctaacagccccaagggcacatgaggcagggccggctccccaccccacctttgatggcctcttcccccctcaccctagggtgtcccgagatgaccgggacgcctggcccctggtgggggggcagcctcggaactgggagtggggggccaggggccttcctaaccttccatcatcctcagctagatgtatgcccgggacagggcctctgttctccagctgaaccataccctggctgtgggggcatctgtcctgagcttggctggtgtatctcacaatgcaaagacatgctggctggcgggacaggtgggcaggactgaccctgaggaggccttgcctgcagggtctttgtctcaccatttggtggagtatcacacggttctctgaggtctggggcctcagctgtttaagtttaccggtattactgagctcggcatttggagagggagctctgaagtgtctggggaggtaccgctgtgcgtggggtcaggtgtttccgtaccacagcaggagcagggcccgcccgcatcccagctgtgggcctgccggtcaggtcgggcacctactacaaaccgtagtggggtggaggctgctggaggtgggagtgaggagatgagggcagggtctcaaacagtcctgactcacagggcctggaaacaagtcctatgtgggcctggggcctggggtcctcatcctccttgttggtctactcaggcccagcccagagctgtgttccctgtctcaggtcaagcagtggcagacgcaaggctttctgtgggcccccaagtggtaggagggagagtagcagagcatgggttactggaagccgggactgctagggctggtggccagggagctgcaagagtgaggctcagctctggctggttctgcccttacccctcctgcccgcctgagaactgcacaccctgcccgctggccccaggacctgcactcccaatcctgctgtcttctccttccctgtgccctgaacaaggacctcactgcccgccttcccctcccaccagcccccttgggccaggcagggtgaggccaaattgctcttggcccacaaatgggtgatggtcagatatgtgaatcaagctcctttctctagctagtgtttgatgtgcacgtgtgtgtgcacagtgcgtgtgtgcacacgcacacctgtgcactcgtgtgtgtttaagaaaggaaaggatttgggctggggagcaaaagataatgtgaaactgttggtggactctctggtgaggggtgggcagaacttgctgctactagagttcttgggttctccatgatgttcaccctggggctggcccactgtgtcctgaatgtttttgttattttttgttttattttttaaacaaactgctgtttttatatacctggaatctgttgttggcttcagagccagtggttaaagagcagggtcccaaggattgggagatctagtgtctgccctcctgccctgcaactcaattgggcctttttcggtgacctcatccaaggccatgatgtcaagggccatgtccccaagcagaggtggagaaggggacactgaggtgagcaaaagcaggaaggggcatccactgcgggtgactggaggccgggcaggaagcaagtcatcagagccgctcagctccgttcactctctgccttctgccccactactgtggggcagtggggccagagcccacctccccaacatgtgaagacagtgatgggcacgtgcccacacccccacttctctagccgtttgcagaggccgccacccagcaggggcctgaaaaggagcagcctcgtatttttctgtgaaatgttttaatgaaccatgttgttgctggttgtcctggcatcgcgcacactgtatgtacatactggcaacgatgtcaaatgtaatttattttaacatttttacaataaaacatgaggtggacaggc

SEQ ID NO: 168177 - DNA, 5722 bp, Homo sapiens
  Payload ID: 13085
  Gene Symbol: KCNK6
  Gene Name: potassium channel, two pore domain subfamily K, member 6
  Uniprot ID: Q9Y257
  ENST ID: ENST00000263372
  CDS Start-End: 108-1049
tgccgcgcctgtagcactcccggaactggaactaggtgccagacggtccggaggcgggggccacgtcagcggggccacccagggctcgcggggtcccggtgggtgccatgcggaggggcgcgcttctggcgggcgccttggccgcgtacgccgcgtacctggtgctgggcgcgctgttggtggcgcggctggaggggccgcacgaagccaggctccgagccgagctggagacgctgcgggcgcagctgcttcagcgcagcccgtgtgtggctgcccccgccctggacgccttcgtggagcgagtgctggcggccggacggctggggcgggtcgtgcttgctaacgcttcggggtccgccaacgcctcggaccccgcctgggacttcgcctctgctctcttcttcgccagcacgctgatcaccaccgtgggctatgggtacacaacgccactgactgatgcgggcaaggccttctccatcgcctttgcgctcctgggcgtgccgaccaccatgctgctgctgaccgcctcagcccagcgcctgtcactgctgctgactcacgtgcccctgtcttggctgagcatgcgttggggctgggacccccggcgggcggcctgctggcacttggtggccctgttgggggtcgtagtgaccgtctgctttctggtgccggctgtgatctttgcccacctcgaggaggcctggagcttcttggatgccttctacttctgctttatctctctgtccaccatcggcctgggcgactacgtgcccggggaggcccctggccagccctaccgggccctctacaaggtgctggtcacagtctacctcttcctgggcctggtggccatggtgctggtgctgcagaccttccgccacgtgtccgacctccacggcctcacggagctcatcctgctgccccctccgtgccctgccagtttcaatgcggatgaggacgatcgggtggacatcctgggcccccagccggagtcgcaccagcaactctctgccagctcccacaccgactacgcttccatccccaggtagctggggcagcctctgccaggcttgggtgtgcctggcctgggactgaggggtccaggcgaccagagctggctgtacaggaatgtccacgagcacagcaggtgatcttgaggccttgccgtccaccgtctctcctttgtttcccagcatctggctgggatgtgaagggcagcactccctgtccccatgtcccgggctccactgggcaccaacataaccttgttctctgtcctttctctcatcctctttacactgtgtctctctggctctctggcattctcgctgcctctgtctttccctcttgctgtctctgtttctcattctctttcatgttccgtctgtgtctctcaattaaccactcgtcaactgctgattctactgggctgtgggctcagacctcatttcaggcaccagattggtcgctacaccctggacaagtgactgcccgtctctgagccttgatttcctcagctgccaaatgggaagaatagaagaatttgcccctaaacccctcctgtgtgctggccctgtgctagacagtgctggagacatagttgggggtggagaactgcccttatggagcttgcagtccagtgaggtggacagacctgtccccagacagtgatggcccaaaatggtcaggactttaatggaggaggtgaggtgttgaaagcacaggcagagtggtcagggctgaagtcggagaagcatagggactaggcccaatccagcctggaaagtcagggaggacttcctagaggaagggacatcgaactaagacctgaactatgagaaataggcaggaagaagttgtacctgactcatttttctcaggtgtctccagggagcaggacccatggagggacccctggtgtaggcctgggcgatagactcttcctcagcagcctggcaggcaggaaacagacataggaccccagcccagatctgaatggcatgggaggtgctgcccttaaccatgacaccattgtaagagctgtccacatttgtatgttgtgccctggaatcagcctggttgagctcaaatcccaacttagccacgtctggcctgtgtccttgggcagtcacactacctctctgattttgtttccttatctgtaaaatggtgatcatcataatacaacttcaaaaggatttcaggctgagtgtggtggctcacgcctatacacccagcactttggaaggctgaggaaggaggatcgcttgaggccaggagtttgagactagcctaggcaacacagtgaggccttatctcaacaacaaccacaaaatctaaaaattagctgggtgtggtggtgcatgcctgtgatcctggctacttcagaggctgaggtggaaggatcacttgaggccaggagtttgaggctgcagtgagttatgatggcactgctgcactccagcctgcgggacagagtgagaccctgtctgaaagaaagagagaaagaaagaaagaaagagagagaaagaaagaaagaaagaaagggaaagatggaaggaaggaaggaaaaagaaagagaaagagagagagagagaaagaaaaagaaagaaaagtaagaaagaaaaaagaaaaagaaagaaaagtaagaaagaaaaaaagaaaaagaaagaaagtaagtcctggctaacacggtgaaaccctgtctctactaaaaatacaaaaaattagccaggcgaggtggcaggcgcctgtagtcccagctactcgggaggctgaggcaggagaatggcgtgaaccccggtgggggcggagcctgcaatgagccgagatcgcgccactgcatccaacctgggtgacagcaagactccgtctcaaaaaaaaaaaagaaagaaagaaaagaaaagaaggaaagaagcggggcacagtggctcagtcctgtaatcccagcaccttgggaaggccaaggtgggaagatcacttgaggctaggagtttgagacaagcctggccaacatagcaagaccccatctctacaaaaataaaaattttaaaaagggctggggcatttgagctgggtcccaacagtagacaagtagaaaaggcatggagagggcataccaggtgggaggagctgtgtgcaaaggcctggagatggaaaagcatgctggccaccagcttctgacaagcagtttagtatgaacggtatgcagggaaagagggaaggagggcagaggggtgcgcacgagcacccgttagtgtccttaaatgaccagcatgggaacctggtctctttcctgagggccctagagagccatggaagggtttagagtaggagtgggtcatggttaggtttgggttttaggatgatccccctagttgctctggagaggtggagcagagcgggtactgaggctgggtgcctgtgggaggctgaggcaggaatgaagagggagacgatgggcctgggctgagccatggaagggaggaggggtgagtgcgggcacactcaggagccaagtggacaggccatagcccccacagactggagggacgcggctagggaatgtcccacagagtggccagttatccctgagagaaagagcaggttttagcggagacgctgaggctgctttagaatatggtgggtgtgtggggcaaaagggacacccaggggtgtatcaagaggtcatagggggcaggccaggtggctcacgcctgtaatcccagcactttgtgaggccgaggcaggtggatcacctgaggtcaggagttcaagaccagcctggccaacatggtgaaaccccgtctctactaaaaatacaaaaattagctgggtgtggtggcacatgcctgtagtcccagctacttgggaggctgagacagaattgcttgaacctgggaggtggcggctgcagtgggccgagatcacaccactgtactccagcctgggcgaaacagagactctgtctcaaaaaaaaaaaaaaagtcataggggctgggcatagtggctctcacctataatcctagcaaatcgtagtactttgggaggccgaggcaggaggattgcctgagcccaggggttcaagaccagcctcagcaacataaaatacaaaaaatacaaaaattagctgggtttggtggtgtgcacctgtggtcccagctactcaggaggctgaagtgggaggatcacttgagcctgggaggtcaaggctgcagtgagctgtgattgcatcactgtactccagcttgggtgacagagcaagaccctgtctcaaaaaaaaaaaaagaaaagaaaaagaaaaagaaaaagaaaatatgtatattggatatactatgtgccaggcacgattccaagcccctgatacattctctacattttacagatgggggaaggaggtccagagatgttaaatacttgcccaaggtcacacagaaagtggaacactgggatttgaacaaggttttggttgggcatcttttcctatgggagctcagaaatatctgttgtctagccctttctcagcctcccaaccttctcggttccttacctatgtcacagctgactttgagctaaagtcatctcggggcagctaggtgcctatgtgagctggcgttcatttctcactgtttctccttccaaatacctccaggaagaaaagcaagtcctttttggtccaagacattaaaaaagccaggctcagcggctcatgcctgtaatcccaacacttggggaggctgaggcaggaggatcgcttgagcccgggagctggagaccagcctggacatgttaacatagcaagacccctctacagaaaatgttaaaaatgagctgggtgtggtggcgcacacctgtagtcccagttactcaggaggatgaggcaggaggatcacttgagcctaggaggttgaggctgcagtgagccatgatcacactactggactccagcctgggccatagagcaagaccctgtcctaggagaaaaaaaagggccaggcacagtggctcacgcctgtaattccagtactttgggaggccgaggcgggcggatcacaaggtcaggagatcaagaccatcctggctaacacagtgaaacccgtctctactaaaaatacaaaaaaattagctgggtgcggtggcacgcacctgtgatcccagctactcgggaggctgaggcaggagaatcacttgaacccaggaggtggaggttgcagtgagccgagatcccaccattgcactccagcctgggagacagagcgagactccgtctcagaaaaaaaaaaaaaagaaaaaagtgtgtgctaaaaaattcatcaggtactaaagagtgtacggtggaaagtaagtctttctcctacactcagatcatggatggatgtctcaggtcttcccaggcacatttgatgttatgtaccagccatatgcatgtgtgtgtcatttatttttcactctacacaagtagtacctaatatggtgaggttgttatgattacagactctggaggcaaagttcctgggtataaatctgaactctgtcactcccaagctaagtggctttgggcaagtgatttcacctccatgtgcctcagtttgctagtctgtacaatgggatggtaatagcacctacctcatggacttgagaagtcagcaacttcatacctctaaagcccttagagctagcagtgtgtggcactcaataaaatgttgactaatgatgattctca

SEQ ID NO: 168178 - DNA, 1283 bp, Homo sapiens
  Payload ID: 13086
  Gene Symbol: KCNK7
  Gene Name: potassium channel, two pore domain subfamily K, member 7
  Uniprot ID: Q9Y2U2
  ENST ID: ENST00000342202
  CDS Start-End: 37-795
gagccgccagttcccacagcaccccagcggcctgccatggggggtctaaggccctggtcccgatacgggctcctggttgtggcccacttgctggccctggggcttggggctgtggtgttccaggccctggaggggcctcctgcatgcaggcttcaggctgagctcagggcagagctggcagccttccaggcagagcatagggcctgcctgccacccggagctctggaagagctgctgggcactgccctggccacccaggcccatggggtctccaccctgggcaacagctcagagggcaggacctgggaccttccctcagccctgctcttcgctgccagcatcctcaccaccacaggttatggccacatggccccactatcgccaggcggaaaggccttctgcatggtctatgcagccctggggctgccagcctccttagctctcgtggccaccctgcgccattgcctgctgcctgtgctcagccgcccacgtgcctgggtagcggtccactggcagctgtcaccggccagggctgcgctgctgcaggcagttgcactgggactgctggtggccagcagctttgtgctgctgccagcgctggtgctgtggggccttcagggcgactgcagcctgctgggggccgtctacttctgcttcagctcgctcagcaccattggcctggaggacttgctgcccggccgcggccgcagcctgcaccccgtgatttaccacctgggccagctcgcacttcttggtggagggacctcactccagggcacggcgtgggaggggtagtcgaagagctctggtggcagcgttgagaagggggtgagtggtgccagttgccagggcaagtcactgcgctgggaggtgggcggggagcatcaccagaacccaggcgctgccccagcaccttctcctccccaggttacttgcttctaggactcttggccatgctgctggcagtggagaccttctctgagctgccgcaggtccgtgccatggggaagttcttcagacccagtggtcctgtgactgctgaggaccaaggtggcatcctagggcaggatgaactggctctgagcaccctgccgcccgcggccccagcttcaggacaagcccctgcttgctgaagcgtcaggtgaccgagttcagctccgtaaggtggcggcacctgaggaggaagcagccaggagtggctggggaagaatctggagatggagccgcggtgagggtgggcgggaggcctcagaggatactgttaatcataaaatgagcaacga

SEQ ID NO: 168179 - DNA, 1298 bp, Homo sapiens
  Payload ID: 13086
  Gene Symbol: KCNK7
  Gene Name: potassium channel, two pore domain subfamily K, member 7
  Uniprot ID: Q9Y2U2
  ENST ID: ENST00000340313
  CDS Start-End: 225-1148
atccccaccatcccagctgctgtgaaatgggcaaatgtcttgcctccaggacctgggaagggtgatgcagctcacctccctcctgttcacaccccagccaccccagccatcccagccgggtcccagccacccacacagcacctcctcctggccccgccctgcccagcccctcccaggtgcctgaggtggagccgccagttcccacagcaccccagcggcctgccatggggggtctaaggccctggtcccgatacgggctcctggttgtggcccacttgctggccctggggcttggggctgtggtgttccaggccctggaggggcctcctgcatgcaggcttcaggctgagctcagggcagagctggcagccttccaggcagagcatagggcctgcctgccacccggagctctggaagagctgctgggcactgccctggccacccaggcccatggggtctccaccctgggcaacagctcagagggcaggacctgggaccttccctcagccctgctcttcgctgccagcatcctcaccaccacaggttatggccacatggccccactatcgccaggcggaaaggccttctgcatggtctatgcagccctggggctgccagcctccttagctctcgtggccaccctgcgccattgcctgctgcctgtgctcagccgcccacgtgcctgggtagcggtccactggcagctgtcaccggccagggctgcgctgctgcaggcagttgcactgggactgctggtggccagcagctttgtgctgctgccagcgctggtgctgtggggccttcagggcgactgcagcctgctgggggccgtctacttctgcttcagctcgctcagcaccattggcctggaggacttgctgcccggccgcggccgcagcctgcaccccgtgatttaccacctgggccagctcgcacttcttggttacttgcttctaggactcttggccatgctgctggcagtggagaccttctctgagctgccgcaggtccgtgccatggggaagttcttcagacccagtggtcctgtgactgctgaggaccaaggtggcatcctagggcaggatgaactggctctgagcaccctgccgcccgcggccccagcttcaggacaagcccctgcttgctgaagcgtcaggtgaccgagttcagctccgtaaggtggcggcacctgaggaggaagcagccaggagtggctggggaagaatctggagatggagccgcggtgagggtgggcgggaggcctcagaggatactgttaatcataaaatgagcaacga

SEQ ID NO: 168180 - DNA, 1563 bp, Homo sapiens
  Payload ID: 13086
  Gene Symbol: KCNK7
  Gene Name: potassium channel, two pore domain subfamily K, member 7
  Uniprot ID: Q9Y2U2
  ENST ID: ENST00000394216
  CDS Start-End: 225-998
atccccaccatcccagctgctgtgaaatgggcaaatgtcttgcctccaggacctgggaagggtgatgcagctcacctccctcctgttcacaccccagccaccccagccatcccagccgggtcccagccacccacacagcacctcctcctggccccgccctgcccagcccctcccaggtgcctgaggtggagccgccagttcccacagcaccccagcggcctgccatggggggtctaaggccctggtcccgatacgggctcctggttgtggcccacttgctggccctggggcttggggctgtggtgttccaggccctggaggggcctcctgcatgcaggcttcaggctgagctcagggcagagctggcagccttccaggcagagcatagggcctgcctgccacccggagctctggaagagctgctgggcactgccctggccacccaggcccatggggtctccaccctgggcaacagctcagagggcaggacctgggaccttccctcagccctgctcttcgctgccagcatcctcaccaccacaggttatggccacatggccccactatcgccaggcggaaaggccttctgcatggtctatgcagccctggggctgccagcctccttagctctcgtggccaccctgcgccattgcctgctgcctgtgctcagccgcccacgtgcctgggtagcggtccactggcagctgtcaccggccagggctgcgctgctgcaggcagttgcactgggactgctggtggccagcagctttgtgctgctgccagcgctggtgctgtggggccttcagggcgactgcagcctgctgggggccgtctacttctgcttcagctcgctcagcaccattggcctggaggacttgctgcccggccgcggccgcagcctgcaccccgtgatttaccacctgggccagctcgcacttcttggtaagtccagccacctaacagcgtgtgggggaagggggaagaggagcctggactaggactcccataaatcactggggggctgggccttgcaggtggagggacctcactccagggcacggcgtgggaggggtagtcgaagagctctggtggcagcgttgagaagggggtgagtggtgccagttgccagggcaagtcactgcgctgggaggtgggcggggagcatcaccagaacccaggcgctgccccagcaccttctcctccccaggttacttgcttctaggactcttggccatgctgctggcagtggagaccttctctgagctgccgcaggtccgtgccatggggaagttcttcagacccagtggtcctgtgactgctgaggaccaaggtggcatcctagggcaggatgaactggctctgagcaccctgccgcccgcggccccagcttcaggacaagcccctgcttgctgaagcgtcaggtgaccgagttcagctccgtaaggtggcggcacctgaggaggaagcagccaggagtggctggggaagaatctggagatggagccgcggtgagggtgggcgggaggcctcagaggatactgttaatcataaaatgagcaacga

SEQ ID NO: 168181 - DNA, 1372 bp, Homo sapiens
  Payload ID: 13086
  Gene Symbol: KCNK7
  Gene Name: potassium channel, two pore domain subfamily K, member 7
  Uniprot ID: Q9Y2U2
  ENST ID: ENST00000394217
  CDS Start-End: 225-983
atccccaccatcccagctgctgtgaaatgggcaaatgtcttgcctccaggacctgggaagggtgatgcagctcacctccctcctgttcacaccccagccaccccagccatcccagccgggtcccagccacccacacagcacctcctcctggccccgccctgcccagcccctcccaggtgcctgaggtggagccgccagttcccacagcaccccagcggcctgccatggggggtctaaggccctggtcccgatacgggctcctggttgtggcccacttgctggccctggggcttggggctgtggtgttccaggccctggaggggcctcctgcatgcaggcttcaggctgagctcagggcagagctggcagccttccaggcagagcatagggcctgcctgccacccggagctctggaagagctgctgggcactgccctggccacccaggcccatggggtctccaccctgggcaacagctcagagggcaggacctgggaccttccctcagccctgctcttcgctgccagcatcctcaccaccacaggttatggccacatggccccactatcgccaggcggaaaggccttctgcatggtctatgcagccctggggctgccagcctccttagctctcgtggccaccctgcgccattgcctgctgcctgtgctcagccgcccacgtgcctgggtagcggtccactggcagctgtcaccggccagggctgcgctgctgcaggcagttgcactgggactgctggtggccagcagctttgtgctgctgccagcgctggtgctgtggggccttcagggcgactgcagcctgctgggggccgtctacttctgcttcagctcgctcagcaccattggcctggaggacttgctgcccggccgcggccgcagcctgcaccccgtgatttaccacctgggccagctcgcacttcttggtggagggacctcactccagggcacggcgtgggaggggtagtcgaagagctctggtggcagcgttgagaagggggttacttgcttctaggactcttggccatgctgctggcagtggagaccttctctgagctgccgcaggtccgtgccatggggaagttcttcagacccagtggtcctgtgactgctgaggaccaaggtggcatcctagggcaggatgaactggctctgagcaccctgccgcccgcggccccagcttcaggacaagcccctgcttgctgaagcgtcaggtgaccgagttcagctccgtaaggtggcggcacctgaggaggaagcagccaggagtggctggggaagaatctggagatggagccgcggtgagggtgggcgggaggcctcagaggatactgttaatcataaaatgagcaacga

SEQ ID NO: 168182 - DNA, 356 bp, Homo sapiens
  Payload ID: 13086
  Gene Symbol: KCNK7
  Gene Name: potassium channel, two pore domain subfamily K, member 7
  ENST ID: ENST00000530380
  CDS Start-End: 1-217
ccacctgggccagctcgcacttcttggactcttggccatgctgctggcagtggagaccttctctgagctgccgcaggtccgtgccatggggaagttcttcagacccagtggtcctgtgactgctgaggaccaaggtggcatcctagggcaggatgaactggctctgagcaccctgccgcccgcggccccagcttcaggacaagcccctgcttgctgaagcgtcaggtgaccgagttcagctccgtaaggtggcggcacctgaggaggaagcagccaggagtggctggggaagaatctggagatggagccgcggtgagggtgggcgggaggcctcagaggatactgttaatcataaa

SEQ ID NO: 168183 - DNA, 445 bp, Homo sapiens
  Payload ID: 13086
  Gene Symbol: KCNK7
  Gene Name: potassium channel, two pore domain subfamily K, member 7
  ENST ID: ENST00000525254
  CDS Start-End: 1-85
cctgcaccccgtgatttaccacctgggccagctcgcacttcttggtggagggacctcactccagggcacggcgtgggaggggtagtcgaagagctctggtggcagcgttgagaagggggactcttggccatgctgctggcagtggagaccttctctgagctgccgcaggtccgtgccatggggaagttcttcagacccagtggtcctgtgactgctgaggaccaaggtggcatcctagggcaggatgaactggctctgagcaccctgccgcccgcggccccagcttcaggacaagcccctgcttgctgaagcgtcaggtgaccgagttcagctccgtaaggtggcggcacctgaggaggaagcagccaggagtggctggggaagaatctggagatggagccgcggtgagggtgggcgggaggcctcagaggatactgttaatcat

SEQ ID NO: 168184 - DNA, 1245 bp, Homo sapiens
  Payload ID: 13087
  Gene Symbol: KCNK9
  Gene Name: potassium channel, two pore domain subfamily K, member 9
  Uniprot ID: Q9NPC2
  ENST ID: ENST00000303015
  CDS Start-End: 7-1131
gcggccatgaagaggcagaacgtgcggactctgtccctcatcgtctgcaccttcacctacctgctggtgggcgccgccgtgttcgacgccctcgagtcggaccacgagatgcgcgaggaggagaaactcaaagccgaggagatccggatcaaggggaagtacaacatcagcagcgaggactaccggcagctggagctggtgatcctgcagtcggaaccgcaccgcgccggcgtccagtggaaattcgccggctccttctactttgcgatcacggtcatcaccaccataggttatgggcacgctgcacctggcaccgatgcgggcaaggccttctgcatgttctacgccgtgctgggcatcccgctgacactggtcatgttccagagcctgggcgagcgcatgaacaccttcgtgcgctacctgctgaagcgcattaagaagtgctgtggcatgcgcaacactgacgtgtctatggagaacatggtgactgtgggcttcttctcctgcatggggacgctgtgcatcggggcggccgccttctcccagtgtgaggagtggagcttcttccacgcctactactactgcttcatcacgttgactaccattgggttcggggactacgtggccctgcagaccaagggtgccctgcagaagaagccgctctacgtggcctttagctttatgtatatcctggtggggctgacggtcatcggggccttcctcaacctggtcgtcctcaggttcttgaccatgaacagtgaggatgagcggcgggatgctgaagagagggcatccctcgccggaaaccgcaacagcatggtcattcacatccctgaggagccgcggcccagccggcccaggtacaaggcggacgtcccggacctgcagtctgtgtgctcctgcacctgctaccgctcgcaggactatggcggccgctcggtggcaccgcagaactccttcagcgccaagcttgccccccactacttccactccatctcttacaagatcgaggagatctcaccaagcacattaaaaaacagcctcttcccatcgcctattagctccatctctcctgggttacacagctttaccgaccaccagaggctgatgaaacgccggaagtccgtttaggggaactaactgcacattcaagagaggcgtccgtggatgctgggtctcactgccaaagccgaacacggcttcgggatttctgccttctcaagtggacctctgctgtgctgggcg

SEQ ID NO: 168185 - DNA, 3276 bp, Homo sapiens
  Payload ID: 13087
  Gene Symbol: KCNK9
  Gene Name: potassium channel, two pore domain subfamily K, member 9
  Uniprot ID: Q9NPC2
  ENST ID: ENST00000522317
  CDS Start-End: 50-1174
ctgtgagcctgcgggacatgccccccgcgccggctccttgctggcggccatgaagaggcagaacgtgcggactctgtccctcatcgtctgcaccttcacctacctgctggtgggcgccgccgtgttcgacgccctcgagtcggaccacgagatgcgcgaggaggagaaactcaaagccgaggagatccggatcaaggggaagtacaacatcagcagcgaggactaccggcagctggagctggtgatcctgcagtcggaaccgcaccgcgccggcgtccagtggaaattcgccggctccttctactttgcgatcacggtcatcaccaccataggttatgggcacgctgcacctggcaccgatgcgggcaaggccttctgcatgttctacgccgtgctgggcatcccgctgacactggtcatgttccagagcctgggcgagcgcatgaacaccttcgtgcgctacctgctgaagcgcattaagaagtgctgtggcatgcgcaacactgacgtgtctatggagaacatggtgactgtgggcttcttctcctgcatggggacgctgtgcatcggggcggccgccttctcccagtgtgaggagtggagcttcttccacgcctactactactgcttcatcacgttgactaccattgggttcggggactacgtggccctgcagaccaagggtgccctgcagaagaagccgctctacgtggcctttagctttatgtatatcctggtggggctgacggtcatcggggccttcctcaacctggtcgtcctcaggttcttgaccatgaacagtgaggatgagcggcgggatgctgaagagagggcatccctcgccggaaaccgcaacagcatggtcattcacatccctgaggagccgcggcccagccggcccaggtacaaggcggacgtcccggacctgcagtctgtgtgctcctgcacctgctaccgctcgcaggactatggcggccgctcggtggcaccgcagaactccttcagcgccaagcttgccccccactacttccactccatctcttacaagatcgaggagatctcaccaagcacattaaaaaacagcctcttcccatcgcctattagctccatctctcctgggttacacagctttaccgaccaccagaggctgatgaaacgccggaagtccgtttaggggaactaactgcacattcaagagaggcgtccgtggatgctgggtctcactgccaaagccgaacacggcttcgggatttctgccttctcaagtggacctctgctgtgctgggcgaatgctctactcattcccctacacaactgtggggatggtccagctacacatagacaggaagcccagagaaacgctcgatgtgagggtccccgcaagcccgtcgggctctttcggcacctggcccccccaaagctcctcaacgaggagtagagactgccaagcccttccactcattcatcatcataaaaatgtaacttgctatggcagcctcttggccattaagggctatactttgtgacctctgtccttgagatctttgctctgacaagttctatagccttctcagtgctgctatcgtgacgcagtgtccctgctgtggctaagtaacctttcgttttgatcaagatttgtccacgcagactcctacctctgcgcctttgcccgtgccgttcccactacctggaaggtctccccgttgctctccagctttgaggtggagacagagcatctcacacttccttttggtgtctcctgacccttttgctccctgctggacttggcgatgtcctcttctgggctcccctagtccttgttttggttgtgagcgaccgcaccagggagcaaaccttctatggccccggccacaggagcagcaagcactgggcagtgccccagacggaaggaccatcgcgagaataaaggcactgagatgtctggcatcttgcccaaatggccacttatcaccgtgattgaggcacgtcttaacttgctgaagtggaaacagggtaactcaatgcacgcctctgcaccatccctggaaaccaatccagatctatgagaagaaaactggtcatcatagcactggtgattcaacggcacctgcctggcagggtggagtgtgccccatacaacagggctggaagctgccacgccaggtatttctcataaggccggtacagggatggcaccagactatgggagcatacttgtgatgtcactctgaagaagttgggccccgtgatgggaatgtcatcaggaaactgggtccacactgttttcttgtggcaacacttctggtggaggctgcgaggggatggggacatgcaccatgagtgactcaggaacccccagcctctgtggcctggctcctgcccacccctagctctggggccttgagagaggcaagcacacgctcttctcgcctccagagagcggcgtgggggtgtggatactgctcaggccctggcatctcgcacgcctaggaccagcctctgccattcacaggaccgtgcaggcggccccaacagaggacggggacagctctctccttctgtaagtgaggcagcctcatccttccctggatcctcagcatctcttaaccagcagtggcagaggttgaattagaatggcaccagcttcggataaaaatccagatctcgcttttcaaaatgtgtctagagctggtggctgtaaggaaccagtcaagcctcagctgtgactctaatcctgccaagtccacctgagagccgactcattcatccaaagagagaacggtttggatggagctcaaggtgcctggctcgctggcatagcccagacaacctcttaaaggccgggccacagagctagaaggtctgtcactactcagttggggaaatcgtctgagaagttcaagtccactgcctcgcaactcaaatgagtcagcctcaccaaccaagaatcgcgttcataaacagactcagagcctgcgtgccgtggggtttccccgtctgcaactctctcacctggccctcctgcagggcccggcggggactggggagggtcagtgctccctggggcggggactgggtctgtttccaggctcagtgcctctgagtcatacagatgccaggtggtcctgctgcttaccctcgctgaacctcaggcttctcgtgtaaacagggcgcttttgaggaattattattaacatctccctgtgagtcaaagcacctactgagataatgtatgtgatgcttgtaataaatgcagctacatgccaggcactctga

SEQ ID NO: 168186 - DNA, 1441 bp, Homo sapiens
  Payload ID: 13087
  Gene Symbol: KCNK9
  Gene Name: potassium channel, two pore domain subfamily K, member 9
  Uniprot ID: Q9NPC2
  ENST ID: ENST00000520439
  CDS Start-End: 65-1189
gtgggacgcgcgcggctgtgagcctgcgggacatgccccccgcgccggctccttgctggcggccatgaagaggcagaacgtgcggactctgtccctcatcgtctgcaccttcacctacctgctggtgggcgccgccgtgttcgacgccctcgagtcggaccacgagatgcgcgaggaggagaaactcaaagccgaggagatccggatcaaggggaagtacaacatcagcagcgaggactaccggcagctggagctggtgatcctgcagtcggaaccgcaccgcgccggcgtccagtggaaattcgccggctccttctactttgcgatcacggtcatcaccaccataggttatgggcacgctgcacctggcaccgatgcgggcaaggccttctgcatgttctacgccgtgctgggcatcccgctgacactggtcatgttccagagcctgggcgagcgcatgaacaccttcgtgcgctacctgctgaagcgcattaagaagtgctgtggcatgcgcaacactgacgtgtctatggagaacatggtgactgtgggcttcttctcctgcatggggacgctgtgcatcggggcggccgccttctcccagtgtgaggagtggagcttcttccacgcctactactactgcttcatcacgttgactaccattgggttcggggactacgtggccctgcagaccaagggtgccctgcagaagaagccgctctacgtggcctttagctttatgtatatcctggtggggctgacggtcatcggggccttcctcaacctggtcgtcctcaggttcttgaccatgaacagtgaggatgagcggcgggatgctgaagagagggcatccctcgccggaaaccgcaacagcatggtcattcacatccctgaggagccgcggcccagccggcccaggtacaaggcggacgtcccggacctgcagtctgtgtgctcctgcacctgctaccgctcgcaggactatggcggccgctcggtggcaccgcagaactccttcagcgccaagcttgccccccactacttccactccatctcttacaagatcgaggagatctcaccaagcacattaaaaaacagcctcttcccatcgcctattagctccatctctcctgggttacacagctttaccgaccaccagaggctgatgaaacgccggaagtccgtttaggtgtggggagggaaatgggacagaaaagtcatttgtcatagttggtgttaatttccattggtccaactcgtcttttcttatttatttattattattattgtcatcattattactttctctccttcctcctttcttggtctcttggtctcattttcccccacctttccagccagacagagcaggccaaagggaaatacaggcccatcctcctctgaaactcacatctgagcatgaagcatggatctcctcctt

SEQ ID NO: 168187 - DNA, 7964 bp, Homo sapiens
  Payload ID: 13088
  Gene Symbol: KCNH1
  Gene Name: potassium channel, voltage gated eag related subfamily H, member 1
  Uniprot ID: O95259
  ENST ID: ENST00000271751
  CDS Start-End: 29-2998
gcccgccggaccccgagctgctgggaggatgaccatggctgggggcaggaggggactagtggcccctcaaaacacgtttctggagaatattgttcggcggtccaatgatactaattttgtgttggggaatgctcagatagtggactggcctattgtgtacagcaatgatggattttgcaagctgtctggctatcacagggcagaagtgatgcaaaaaagcagcacctgcagttttatgtatggggagctgactgataaagacacgattgaaaaagtgcggcaaacatttgagaactatgagatgaattcctttgaaattctgatgtacaagaagaacaggacacctgtgtggttctttgtgaaaattgctccaattcgaaacgaacaggataaagtggttttatttctttgcactttcagtgacataacagctttcaaacagccaattgaggatgattcatgtaaaggctgggggaagtttgctcggctgacaagagcactgacaagcagcaggggtgtcctgcagcagctggctccaagcgtgcaaaaaggcgagaatgtccacaagcactcccgcctggcagaggtcctacagctgggctcagacatccttccccagtacaagcaagaggcaccaaagactccccctcacatcatcttacattattgtgtttttaagaccacgtgggattggatcatcttgatcttgaccttctatacagccatcttggtcccttataatgtctccttcaaaaccaggcagaataatgtggcctggctggttgttgatagcatcgtggatgttatctttttggtggacattgtgctcaattttcataccacctttgttggaccagcaggggaggtgatttctgaccccaaacttatccgcatgaactacctgaagacgtggtttgtgattgaccttctgtcctgtttgccatatgatgtcatcaacgcttttgagaacgtggatgaggttagtgcctttatgggtgatccagggaagattggttttgctgatcagattccaccaccactggaggggagagagagtcagggcatcagcagcctgttcagctctctaaaagttgtccggctgctccgtcttgggcgagtggcccgtaagctggaccactacattgaatatggagctgctgtgctggtcctgctggtgtgtgtgtttgggctggctgcacactggatggcctgcatctggtacagcattggggactatgagatctttgacgaggacaccaagacaatccgcaacaacagctggctgtaccaactagcgatggacattggcaccccttaccagtttaatgggtctggctcagggaagtgggaaggtggtcccagcaagaattctgtctacatctcctcgttgtatttcacaatgaccagcctcaccagtgtgggctttgggaacatcgccccatccacagacattgagaagatctttgcagtggccatcatgatgattggctcacttctctatgccaccatcttcgggaatgtgacgactattttccaacagatgtatgccaacaccaacagataccatgagatgctcaacagtgttcgggacttcctgaagctctaccaggtgccaaaaggattgagtgagcgagtaatggattatattgtgtccacttggtccatgtccagaggcattgacacagagaaggtcctgcagatctgccccaaggacatgagagccgacatctgcgtgcacctgaaccgcaaggtgttcaaggagcacccggccttccggctggccagtgatggctgcctccgggcactggccatggagttccagacggtgcactgtgccccaggggacctcatctaccatgcaggagagagcgttgacagcctctgctttgtggtttctggctccctggaggtgatccaagatgatgaggtggtggccattctaggaaaaggagacgtgtttggagatgtgttctggaaggaagccacccttgcccagtcctgtgccaatgttagggccttgacctactgtgatctgcatgtgatcaagcgggatgccctgcagaaagtgctggaattctacacggccttctcccattccttctcccggaacctgattctgacgtacaacttgaggaagaggattgtgttccggaagatcagcgatgtgaaacgtgaagaggaagaacgcatgaaacgaaagaatgaggcccccctgatcttgcccccggaccaccctgtccggcgcctcttccagagattccgacagcagaaagaggccaggctggcagctgagagagggggccgggacctggatgacctagatgtggagaagggcaatgtccttacagagcatgcctccgccaaccacagcctcgtgaaggccagcgtggtcaccgtgcgtgagagtcctgccacgcccgtatccttccaggcagcctccacctccggggtgccagaccacgcaaagctacaggcgccagggtccgagtgcctgggccccaaggggggcgggggcgattgtgccaagcgcaaaagctgggcccgcttcaaagatgcttgcgggaagagtgaggactggaacaaggtgtccaaggctgagtcgatggagacacttcccgagaggacaaaagcgtcaggcgaggccacactgaagaagacagactcgtgtgacagtggcatcaccaagagcgacttgcgcctggacaacgtgggtgaggccaggagtccccaggatcggagtcccatcctggcagaggtcaagcattcgttctaccccatccctgagcagacgctgcaggccacagtcctggaggtgaggcacgagctgaaggaggacatcaaggccttaaacgccaaaatgaccaatattgagaaacagctctctgagatactcaggatattaacttccagaagatcctctcagtctcctcaggagttgtttgaaatatcgaggccacagtccccagaatcagagagagacatttttggagccagctgagaggtctatttaaaaaaaaagtcagagacagatacctccaaccctgccgtcaccaccacccctaccacatatgtccacatgaccaacaattttcaagtaggcttttcctaacagaaaaagtggggccagtggcttagacgtgctctttctctatctggaaaaagatatgggaagggtagcgtgcccctaccctgcaaggtggcagctgcatctgaaccgtctttgcacaattttggaagaagggacatgctgtctaaagggtattttccttcatttttaattttttactaccatgatatttgtaaaagattaaaactaccagaacagagcagcagccatctggggactggtgggaaagtgccgagaacctctcatgtatatactatgctgggctcctttgccaagaccccccatggactgcagtgggccaaggacttcccggcatccccgtccttgtacagcccgtgtctgacgtcaccatgttttcctgtagttgtcatttataactagctcgggacaagcagagcttgagggacaggagggtagagctcagaaactttctgtctcatggttaaggccagaaaagcagctgcaggtgtggtgcatgcctcccatagacacttgaagctgggaatcctcaggtctccttccccaaaggaggtgaggcaagggtaagagctggagaggggcccttaagatccaggggttctctgcggtgcaacccatagcctgctcctctgggacagttgacagggagggctctggagtgcctggctgagcctctggccctgctccatgctgctggcctcacacacaggctcccttgcttctgttccttcttggcctcttcccaagtgtccccatggcattcctcagggtatggagcatcggcaggaagggtcatgagcccagagttgctttattaacaaagcagacacacagacacacacaacctcagaactgtagcaagtgctatgtttatactttgattctcattgggattgccctgcagacctttgtattttgttcaccgcacggggtcattataggcacttgggagccatgctgggccttattttaaagccagtctctctatttcctattaaagtcagtaggatttcaagagaaaatggaaaaagactgcaggatcatgattgtactctcttcaggagctggaaagagaatgaagcagtgagtttccagctctctgtaaggtgatggagagaagtggccttggagctgtggctcccagtgatggtcacagaactgcgtatgggccatccaagcccctatgccacgatgctcggggacacttcactgcctcatggtcacctaagtcaggttattcatgtgcttgggcttctctcaatggcatctgagaaaggaaaggagtgaagtctcttccaggcacagtggagctggccggggcatatgccctagagagaggtgtcaggaccccaaatactgacacgcaaggttagaagttcagctctgaaaagtcaacttggagggaatggaattaggagtacaggtgacagcatggacttatccagggagcttacctttgcctgtgttagacggtgaccccattcctggtacctctgccctaccaaagatattcagtgtttctgagagcctccggtctgagactgcccaccaccccaccccaccccacctccttagtcctgcccagtgctcacggcgagtcccagggctgggccctcggttgtctgtgcaaggcagggctgacctctcctggttcgcagggttggcacagatggccctgggaagacaaggcctgcgagctcaagggagagtcctgctccatgagccctaacctcatatgtagcttctcacatcaggcttacaggggctgcccctggcttctccaggttgcgacataattagatttagcctcagatggcggcatacaagtaagaggaagtctaatttcctaaggccgagtcacaactatctgtgactttgaataaagctgtgaggccttcagcctctttcacttgagaagctgccaaccagtccttgggtaagaggccgtaaaatatctggaatcccatctgttggctgccccctaacattctagtctgccatttcttaaacatgctcctcaacctgcttctgaagtttaggacccaccacttttaaggcagggcaggcctctaatcacccccaaaacccagcctcagaagaacctgccactggagacacttttttgcctctcagctctccagggacttgatgacaggcttcttgtctggcacccaacggtcaatgtcaagaggccctgccatttccctccagctctgcctgagggagacggatgtccgtgaaatttctcagacctctgggtatgaggggcaaagatggtataaggctttgaagtccagacatgttcttggggggaatgtagctttaggaatgcactcgtgaatcagcgcaaactgggctcatgactggaagccagctcctgcggcaggaatctgttcatcttgggtcacaggtgcacgtgtgggtgcatgggctttattctcctgtaatcctccctaggatttgagggattttttgctgtaattgttttctttgaaaaaacattgtgtaaatgagccaaacctttctcccttccttttcgcaccatgaacttgaccgcaggctgctttgtgctgactgccttcccatgccaggatgccactctgggttcccgagccaggaccatgtgcctcagataccagtgacctgagccttccagtataaaccattatctggtggctggagagagattagggaaacaaaaagttactaggtatgggacagaacatttagacttcagaaaaagtatgccaagagagaacagatttgcccaggatgtatgtttttcctctttgaggagtcggggcatgatatgtggcaccattatctagtaagtgctggttatttgatttctactaaattctttactttgaatgtcattcatattgaagctccatttcccagagaatatcctgacaggctgctttgaagagggtaggtcctgtccctgtcacttggctgctggttgaacgtgctcctcccggctgatggaggggtgggtttaaggttaactctaagaactaagatggtcaatgaggtggtgtttgttcttggtgggggggcattgactccagcaatgggcgctgccatcccatatacttacaaagggctcctccactggacatgacaagatagccaaaggacggaaacagagacgaccatttggttgagaaaccaaattgtctagtgtacaattaatgcaactcattgcattcatgaatgcaactcattgcattaatgcaatgctacattatgctaataaggttacaacattaatgctacaggatagcccaagtatttaaaaagctgagcccatttagcagccttccagcaaacttttggaaatgcatttcttacttgatttcttcttgttatccaatccctggggactgttttacccacaacctcttcgatccagtgtgctgctgttggccaaacatcagcccctttcctggaatcctcctctttcaaaagtggggagggctgggcaggggtaaaaatgtactataccaccccatcccattcagcaagcttcctctccaaatccttaaatggaaggtagaagtattatgccaactgtcaagctctttgtccaggcccttgtggggactaaatgaactctttaggaatactaggtataggaagactaggtataggaagattctcatttccccttgttgcactgaccactatgtctcccatgcatactctgggaaattttaggagccctggtggagatacacgttgctgatgtgcatttgattaataggttttactatgtcttgcaataaagacgtttagccttaagacccttgaatggaactccagctgtgatagagctgccaatgccccttcctctctcctcccttatcacctagtgttgcttaaagaggaggccattgagggcacacttgatgccccagacagcctccctctgttgctaaatcattgttattgctctatatactgccttctcactcgcttcaattaaaaattaccttcaccagctcctgtgccctccacctgggggagacttcatgatcctctcagcactgactgcaaacatcagagaaaaaaacattttctcaccaaaggtgttcatgttgagaagttttaatttctaccccctacagctcaaaagaatcaatgtgaatttatctgcagcttaaattcaagtgaaacttcattctcatgcaagcatatcagacttattctggaacctctagaactggacttgaattccctgcaggtgccagactggtgggtgccctccctgcctgccattaaacttttcttacagccactgtccctttatctgtgacttctgagtcatccgacggatccattagttgttcaatgagaagttcacagatcttgtatcaggatataaactgatcttatgttgaaggatgcaccctcccctaatgaatgtattctcttaatattccgatgctgtatttgtgcatcagttggagactgtccacatccgacatttcaccgacacctcaaggacacttctacttatgagcagttcatcattctggggcttctccttatattaatactctttccattgagtcctgccaaatcctttattgggttttctttttcctttgcatctgtcactttgtccaaatgagcatgaataaacaaaagtgtaaatgagctgatactatttttgtggtcagctgaggatgctgccaagaacaccactgtatatctgtggcttgggaatgttaagaggaacgtgcaggcccttccattgatgatattcccttctcaacatttttaaacaagcacaaatgatatttgtaaaaaaaaaaagttttatttattatggtaataaactattttatacatg

SEQ ID NO: 168188 - DNA, 3102 bp, Homo sapiens
  Payload ID: 13088
  Gene Symbol: KCNH1
  Gene Name: potassium channel, voltage gated eag related subfamily H, member 1
  Uniprot ID: O95259
  ENST ID: ENST00000367007
  CDS Start-End: 171-3059
gaagagggcgcgagggtagcagccagagggagccgccagccctgcctgcggatccccgccgggcgcatggggcgcttcgagccgggactgcgtgcgggccccgaggccagtttcctgctgtcgtaagaagccgcgccaggacgcccgccggaccccgagctgctgggaggatgaccatggctgggggcaggaggggactagtggcccctcaaaacacgtttctggagaatattgttcggcggtccaatgatactaattttgtgttggggaatgctcagatagtggactggcctattgtgtacagcaatgatggattttgcaagctgtctggctatcacagggcagaagtgatgcaaaaaagcagcacctgcagttttatgtatggggagctgactgataaagacacgattgaaaaagtgcggcaaacatttgagaactatgagatgaattcctttgaaattctgatgtacaagaagaacaggacacctgtgtggttctttgtgaaaattgctccaattcgaaacgaacaggataaagtggttttatttctttgcactttcagtgacataacagctttcaaacagccaattgaggatgattcatgtaaaggctgggggaagtttgctcggctgacaagagcactgacaagcagcaggggtgtcctgcagcagctggctccaagcgtgcaaaaaggcgagaatgtccacaagcactcccgcctggcagaggtcctacagctgggctcagacatccttccccagtacaagcaagaggcaccaaagactccccctcacatcatcttacattattgtgtttttaagaccacgtgggattggatcatcttgatcttgaccttctatacagccatcttggtcccttataatgtctccttcaaaaccaggcagaataatgtggcctggctggttgttgatagcatcgtggatgttatctttttggtggacattgtgctcaattttcataccacctttgttggaccagcaggggaggtgatttctgaccccaaacttatccgcatgaactacctgaagacgtggtttgtgattgaccttctgtcctgtttgccatatgatgtcatcaacgcttttgagaacgtggatgagggcatcagcagcctgttcagctctctaaaagttgtccggctgctccgtcttgggcgagtggcccgtaagctggaccactacattgaatatggagctgctgtgctggtcctgctggtgtgtgtgtttgggctggctgcacactggatggcctgcatctggtacagcattggggactatgagatctttgacgaggacaccaagacaatccgcaacaacagctggctgtaccaactagcgatggacattggcaccccttaccagtttaatgggtctggctcagggaagtgggaaggtggtcccagcaagaattctgtctacatctcctcgttgtatttcacaatgaccagcctcaccagtgtgggctttgggaacatcgccccatccacagacattgagaagatctttgcagtggccatcatgatgattggctcacttctctatgccaccatcttcgggaatgtgacgactattttccaacagatgtatgccaacaccaacagataccatgagatgctcaacagtgttcgggacttcctgaagctctaccaggtgccaaaaggattgagtgagcgagtaatggattatattgtgtccacttggtccatgtccagaggcattgacacagagaaggtcctgcagatctgccccaaggacatgagagccgacatctgcgtgcacctgaaccgcaaggtgttcaaggagcacccggccttccggctggccagtgatggctgcctccgggcactggccatggagttccagacggtgcactgtgccccaggggacctcatctaccatgcaggagagagcgttgacagcctctgctttgtggtttctggctccctggaggtgatccaagatgatgaggtggtggccattctaggaaaaggagacgtgtttggagatgtgttctggaaggaagccacccttgcccagtcctgtgccaatgttagggccttgacctactgtgatctgcatgtgatcaagcgggatgccctgcagaaagtgctggaattctacacggccttctcccattccttctcccggaacctgattctgacgtacaacttgaggaagaggattgtgttccggaagatcagcgatgtgaaacgtgaagaggaagaacgcatgaaacgaaagaatgaggcccccctgatcttgcccccggaccaccctgtccggcgcctcttccagagattccgacagcagaaagaggccaggctggcagctgagagagggggccgggacctggatgacctagatgtggagaagggcaatgtccttacagagcatgcctccgccaaccacagcctcgtgaaggccagcgtggtcaccgtgcgtgagagtcctgccacgcccgtatccttccaggcagcctccacctccggggtgccagaccacgcaaagctacaggcgccagggtccgagtgcctgggccccaaggggggcgggggcgattgtgccaagcgcaaaagctgggcccgcttcaaagatgcttgcgggaagagtgaggactggaacaaggtgtccaaggctgagtcgatggagacacttcccgagaggacaaaagcgtcaggcgaggccacactgaagaagacagactcgtgtgacagtggcatcaccaagagcgacttgcgcctggacaacgtgggtgaggccaggagtccccaggatcggagtcccatcctggcagaggtcaagcattcgttctaccccatccctgagcagacgctgcaggccacagtcctggaggtgaggcacgagctgaaggaggacatcaaggccttaaacgccaaaatgaccaatattgagaaacagctctctgagatactcaggatattaacttccagaagatcctctcagtctcctcaggagttgtttgaaatatcgaggccacagtccccagaatcagagagagacatttttggagccagctgagaggtctatttaaaaaaaaagtcagagacagatacctccaacc

SEQ ID NO: 168189 - DNA, 4286 bp, Homo sapiens
  Payload ID: 13089
  Gene Symbol: KCNH2
  Gene Name: potassium channel, voltage gated eag related subfamily H, member 2
  Uniprot ID: Q12809
  ENST ID: ENST00000262186
  CDS Start-End: 403-3882
tccgcggccgggccgagccgcaggcgctgcccgagccgcgggcgctggagcggctgtcggcgcggtggcaggcgggagccaggagtccggggctcgggcgggcggagcgcagcgcggggacgcggcggagcgggccccgcggctcggcgggggccggcagacaggtgtgccggcggcgggcggctcgcgctcaggcggctccaggccgggcccggggtccggagcggggagccgggagccgagcgaggacccggcgcccgcagtccagtcttggccgcgcccgtgctcggcttggccgcggggtgcggggaccacggcccggccgggccacccgaagcctagtgctgggccgggccgggccggggtgggtgggggcccgcccggcccgcccatgggctcaggatgccggtgcggaggggccacgtcgcgccgcagaacaccttcctggacaccatcatccgcaagtttgagggccagagccgtaagttcatcatcgccaacgctcgggtggagaactgcgccgtcatctactgcaacgacggcttctgcgagctgtgcggctactcgcgggccgaggtgatgcagcgaccctgcacctgcgacttcctgcacgggccgcgcacgcagcgccgcgctgccgcgcagatcgcgcaggcactgctgggcgccgaggagcgcaaagtggaaatcgccttctaccggaaagatgggagctgcttcctatgtctggtggatgtggtgcccgtgaagaacgaggatggggctgtcatcatgttcatcctcaatttcgaggtggtgatggagaaggacatggtggggtccccggctcatgacaccaaccaccggggcccccccaccagctggctggccccaggccgcgccaagaccttccgcctgaagctgcccgcgctgctggcgctgacggcccgggagtcgtcggtgcggtcgggcggcgcgggcggcgcgggcgccccgggggccgtggtggtggacgtggacctgacgcccgcggcacccagcagcgagtcgctggccctggacgaagtgacagccatggacaaccacgtggcagggctcgggcccgcggaggagcggcgtgcgctggtgggtcccggctctccgccccgcagcgcgcccggccagctcccatcgccccgggcgcacagcctcaaccccgacgcctcgggctccagctgcagcctggcccggacgcgctcccgagaaagctgcgccagcgtgcgccgcgcctcgtcggccgacgacatcgaggccatgcgcgccggggtgctgcccccgccaccgcgccacgccagcaccggggccatgcacccactgcgcagcggcttgctcaactccacctcggactccgacctcgtgcgctaccgcaccattagcaagattccccaaatcaccctcaactttgtggacctcaagggcgaccccttcttggcttcgcccaccagtgaccgtgagatcatagcacctaagataaaggagcgaacccacaatgtcactgagaaggtcacccaggtcctgtccctgggcgccgacgtgctgcctgagtacaagctgcaggcaccgcgcatccaccgctggaccatcctgcattacagccccttcaaggccgtgtgggactggctcatcctgctgctggtcatctacacggctgtcttcacaccctactcggctgccttcctgctgaaggagacggaagaaggcccgcctgctaccgagtgtggctacgcctgccagccgctggctgtggtggacctcatcgtggacatcatgttcattgtggacatcctcatcaacttccgcaccacctacgtcaatgccaacgaggaggtggtcagccaccccggccgcatcgccgtccactacttcaagggctggttcctcatcgacatggtggccgccatccccttcgacctgctcatcttcggctctggctctgaggagctgatcgggctgctgaagactgcgcggctgctgcggctggtgcgcgtggcgcggaagctggatcgctactcagagtacggcgcggccgtgctgttcttgctcatgtgcacctttgcgctcatcgcgcactggctagcctgcatctggtacgccatcggcaacatggagcagccacacatggactcacgcatcggctggctgcacaacctgggcgaccagataggcaaaccctacaacagcagcggcctgggcggcccctccatcaaggacaagtatgtgacggcgctctacttcaccttcagcagcctcaccagtgtgggcttcggcaacgtctctcccaacaccaactcagagaagatcttctccatctgcgtcatgctcattggctccctcatgtatgctagcatcttcggcaacgtgtcggccatcatccagcggctgtactcgggcacagcccgctaccacacacagatgctgcgggtgcgggagttcatccgcttccaccagatccccaatcccctgcgccagcgcctcgaggagtacttccagcacgcctggtcctacaccaacggcatcgacatgaacgcggtgctgaagggcttccctgagtgcctgcaggctgacatctgcctgcacctgaaccgctcactgctgcagcactgcaaacccttccgaggggccaccaagggctgccttcgggccctggccatgaagttcaagaccacacatgcaccgccaggggacacactggtgcatgctggggacctgctcaccgccctgtacttcatctcccggggctccatcgagatcctgcggggcgacgtcgtcgtggccatcctggggaagaatgacatctttggggagcctctgaacctgtatgcaaggcctggcaagtcgaacggggatgtgcgggccctcacctactgtgacctacacaagatccatcgggacgacctgctggaggtgctggacatgtaccctgagttctccgaccacttctggtccagcctggagatcaccttcaacctgcgagataccaacatgatcccgggctcccccggcagtacggagttagagggtggcttcagtcggcaacgcaagcgcaagttgtccttccgcaggcgcacggacaaggacacggagcagccaggggaggtgtcggccttggggccgggccgggcgggggcagggccgagtagccggggccggccgggggggccgtggggggagagcccgtccagtggcccctccagccctgagagcagtgaggatgagggcccaggccgcagctccagccccctccgcctggtgcccttctccagccccaggccccccggagagccgccgggtggggagcccctgatggaggactgcgagaagagcagcgacacttgcaaccccctgtcaggcgccttctcaggagtgtccaacattttcagcttctggggggacagtcggggccgccagtaccaggagctccctcgatgccccgcccccacccccagcctcctcaacatccccctctccagcccgggtcggcggccccggggcgacgtggagagcaggctggatgccctccagcgccagctcaacaggctggagacccggctgagtgcagacatggccactgtcctgcagctgctacagaggcagatgacgctggtcccgcccgcctacagtgctgtgaccaccccggggcctggccccacttccacatccccgctgttgcccgtcagccccctccccaccctcaccttggactcgctttctcaggtttcccagttcatggcgtgtgaggagctgcccccgggggccccagagcttccccaagaaggccccacacgacgcctctccctaccgggccagctgggggccctcacctcccagcccctgcacagacacggctcggacccgggcagttagtggggctgcccagtgtggacacgtggctcacccagggatcaaggcgctgctgggccgctccccttggaggccctgctcaggaggccctgaccgtggaaggggagaggaactcgaaagcacagctcctcccccagcccttgggaccatcttctcctgcagtcccctgggccccagtgagaggggcaggggcagggccggcagtaggtggggcctgtggtccccccactgccctgagggcattagctggtctaactgcccggaggcacccggccctgggccttaggcacctcaaggacttttctgctatttactgctcttattgttaaggataataattaaggatcatatgaataattaatgaagatgctgatgactatgaataataaataattatcctgaggaga

SEQ ID NO: 168190 - DNA, 3267 bp, Homo sapiens
  Payload ID: 13089
  Gene Symbol: KCNH2
  Gene Name: potassium channel, voltage gated eag related subfamily H, member 2
  Uniprot ID: Q12809
  ENST ID: ENST00000330883
  CDS Start-End: 404-2863
ggggccgctggctgggcaccggcggggcgggggagcctagtgtggcggggtgggggtggggacctggtagaaggaggggccggctggaggagctgaggttccgagtgcggccgctgctgggctggcgggcgggcagagcacggcaccctggcagcagggcccacgccacggggccatgggcagctcgagccaggcaggctgctgcccacgcttactgccagggtgaccccagccctggggcccagccacaaccaccctggcttcatgccaggggctgctctggttgccagtcggccagcctcgggggtgcagcctgggctgggactgctgctggggtgcaggtgaggcagtggccgggccctcaggccccagggcaggcaggctgcagggagccaagtcctccatggcggccccagccgggaaggcgagcaggacaggggctctgcggcccagggcccagaaaggccgggtgaggcgggccgtgcgcatctccagcctcgtggcccaggaggtcctgtccctgggcgccgacgtgctgcctgagtacaagctgcaggcaccgcgcatccaccgctggaccatcctgcattacagccccttcaaggccgtgtgggactggctcatcctgctgctggtcatctacacggctgtcttcacaccctactcggctgccttcctgctgaaggagacggaagaaggcccgcctgctaccgagtgtggctacgcctgccagccgctggctgtggtggacctcatcgtggacatcatgttcattgtggacatcctcatcaacttccgcaccacctacgtcaatgccaacgaggaggtggtcagccaccccggccgcatcgccgtccactacttcaagggctggttcctcatcgacatggtggccgccatccccttcgacctgctcatcttcggctctggctctgaggagctgatcgggctgctgaagactgcgcggctgctgcggctggtgcgcgtggcgcggaagctggatcgctactcagagtacggcgcggccgtgctgttcttgctcatgtgcacctttgcgctcatcgcgcactggctagcctgcatctggtacgccatcggcaacatggagcagccacacatggactcacgcatcggctggctgcacaacctgggcgaccagataggcaaaccctacaacagcagcggcctgggcggcccctccatcaaggacaagtatgtgacggcgctctacttcaccttcagcagcctcaccagtgtgggcttcggcaacgtctctcccaacaccaactcagagaagatcttctccatctgcgtcatgctcattggctccctcatgtatgctagcatcttcggcaacgtgtcggccatcatccagcggctgtactcgggcacagcccgctaccacacacagatgctgcgggtgcgggagttcatccgcttccaccagatccccaatcccctgcgccagcgcctcgaggagtacttccagcacgcctggtcctacaccaacggcatcgacatgaacgcggtgctgaagggcttccctgagtgcctgcaggctgacatctgcctgcacctgaaccgctcactgctgcagcactgcaaacccttccgaggggccaccaagggctgccttcgggccctggccatgaagttcaagaccacacatgcaccgccaggggacacactggtgcatgctggggacctgctcaccgccctgtacttcatctcccggggctccatcgagatcctgcggggcgacgtcgtcgtggccatcctggggaagaatgacatctttggggagcctctgaacctgtatgcaaggcctggcaagtcgaacggggatgtgcgggccctcacctactgtgacctacacaagatccatcgggacgacctgctggaggtgctggacatgtaccctgagttctccgaccacttctggtccagcctggagatcaccttcaacctgcgagataccaacatgatcccgggctcccccggcagtacggagttagagggtggcttcagtcggcaacgcaagcgcaagttgtccttccgcaggcgcacggacaaggacacggagcagccaggggaggtgtcggccttggggccgggccgggcgggggcagggccgagtagccggggccggccgggggggccgtggggggagagcccgtccagtggcccctccagccctgagagcagtgaggatgagggcccaggccgcagctccagccccctccgcctggtgcccttctccagccccaggccccccggagagccgccgggtggggagcccctgatggaggactgcgagaagagcagcgacacttgcaaccccctgtcaggcgccttctcaggagtgtccaacattttcagcttctggggggacagtcggggccgccagtaccaggagctccctcgatgccccgcccccacccccagcctcctcaacatccccctctccagcccgggtcggcggccccggggcgacgtggagagcaggctggatgccctccagcgccagctcaacaggctggagacccggctgagtgcagacatggccactgtcctgcagctgctacagaggcagatgacgctggtcccgcccgcctacagtgctgtgaccaccccggggcctggccccacttccacatccccgctgttgcccgtcagccccctccccaccctcaccttggactcgctttctcaggtttcccagttcatggcgtgtgaggagctgcccccgggggccccagagcttccccaagaaggccccacacgacgcctctccctaccgggccagctgggggccctcacctcccagcccctgcacagacacggctcggacccgggcagttagtggggctgcccagtgtggacacgtggctcacccagggatcaaggcgctgctgggccgctccccttggaggccctgctcaggaggccctgaccgtggaaggggagaggaactcgaaagcacagctcctcccccagcccttgggaccatcttctcctgcagtcccctgggccccagtgagaggggcaggggcagggccggcagtaggtggggcctgtggtccccccactgccctgagggcattagctggtctaactgcccggaggcacccggccctgggccttaggcacctcaaggacttttctgctatttactgctcttattgttaaggataataattaaggatcatatgaataattaatgaagatgctgatgactatgaataataaataattatcctgaggaga

SEQ ID NO: 168191 - DNA, 2648 bp, Homo sapiens
  Payload ID: 13089
  Gene Symbol: KCNH2
  Gene Name: potassium channel, voltage gated eag related subfamily H, member 2
  ENST ID: ENST00000430723
  CDS Start-End: 330-2648
ggtccggagcggggagccgggagccgagcgaggacccggcgcccgcagtccagtcttggccgcgcccgtgctcggcttggccgcggggtgcggggaccacggcccggccgggccacccgaagcctagtgctgggcccgcccatgggctcaggatgccggtgcggaggggccacgtcgcgccgcagaacaccttcctggacaccatcatccgcaagtttgagggccagagccgtaagttcatcatcgccaacgctcgggtggagaactgcgccgtcatctactgcaacgacggcttctgcgagctgtgcggctactcgcgggccgaggtgatgcagcgaccctgcacctgcgacttcctgcacgggccgcgcacgcagcgccgcgctgccgcgcagatcgcgcaggcactgctgggcgccgaggagcgcaaagtggaaatcgccttctaccggaaagatgggagctgcttcctatgtctggtggatgtggtgcccgtgaagaacgaggatggggctgtcatcatgttcatcctcaatttcgaggtggtgatggagaaggacatggtggtggacgtggacctgacgcccgcggcacccagcagcgagtcgctggccctggacgaagtgacagccatggacaaccacgtggcagggctcgggcccgcggaggagcggcgtgcgctggtgggtcccggctctccgccccgcagcgcgcccggccagctcccatcgccccgggcgcacagcctcaaccccgacgcctcgggctccagctgcagcctggcccggacgcgctcccgagaaagctgcgccagcgtgcgccgcgcctcgtcggccgacgacatcgaggccatgcgcgccggggtgctgcccccgccaccgcgccacgccagcaccggggccatgcacccactgcgcagcggcttgctcaactccacctcggactccgacctcgtgcgctaccgcaccattagcaagattccccaaatcaccctcaactttgtggacctcaagggcgaccccttcttggcttcgcccaccagtgaccgtgagatcatagcacctaagataaaggagcgaacccacaatgtcactgagaaggtcacccaggtcctgtccctgggcgccgacgtgctgcctgagtacaagctgcaggcaccgcgcatccaccgctggaccatcctgcattacagccccttcaaggccgtgtgggactggctcatcctgctgctggtcatctacacggctgtcttcacaccctactcggctgccttcctgctgaaggagacggaagaaggcccgcctgctaccgagtgtggctacgcctgccagccgctggctgtggtggacctcatcgtggacatcatgttcattgtggacatcctcatcaacttccgcaccacctacgtcaatgccaacgaggaggtggtcagccaccccggccgcatcgccgtccactacttcaagggctggttcctcatcgacatggtggccgccatccccttcgacctgctcatcttcggctctggctctgaggagctgatcgggctgctgaagactgcgcggctgctgcggctggtgcgcgtggcgcggaagctggatcgctactcagagtacggcgcggccgtgctgttcttgctcatgtgcacctttgcgctcatcgcgcactggctagcctgcatctggtacgccatcggcaacatggagcagccacacatggactcacgcatcggctggctgcacaacctgggcgaccagataggcaaaccctacaacagcagcggcctgggcggcccctccatcaaggacaagtatgtgacggcgctctacttcaccttcagcagcctcaccagtgtgggcttcggcaacgtctctcccaacaccaactcagagaagatcttctccatctgcgtcatgctcattggctccctcatgtatgctagcatcttcggcaacgtgtcggccatcatccagcggctgtactcgggcacagcccgctaccacacacagatgctgcgggtgcgggagttcatccgcttccaccagatccccaatcccctgcgccagcgcctcgaggagtacttccagcacgcctggtcctacaccaacggcatcgacatgaacgcggtgctgaagggcttccctgagtgcctgcaggctgacatctgcctgcacctgaaccgctcactgctgcagcactgcaaacccttccgaggggccaccaagggctgccttcgggccctggccatgaagttcaagaccacacatgcaccgccaggggacacactggtgcatgctggggacctgctcaccgccctgtacttcatctcccggggctccatcgagatcctgcggggcgacgtcgtcgtggccatcctgggtatggggtggggggcgggcactggactggaaatgccctctgcagcctcaagaggtgcgagccttctgaatatgcagtcactggggctgtggacctgggactgcctgcagggtcactgggctcctttaattcacctaaactcaggccctccaagcggggccatggagaggagccccacgtggggtgaggctgctgaactctggggttcccacattctccttcccttcaggatccgccacaaacagacactttttgcttccttaaagtag

SEQ ID NO: 168192 - DNA, 3867 bp, Homo sapiens
  Payload ID: 13090
  Gene Symbol: KCNH3
  Gene Name: potassium channel, voltage gated eag related subfamily H, member 3
  Uniprot ID: Q9ULD8
  ENST ID: ENST00000257981
  CDS Start-End: 261-3512
ggccgcggggcctggagcccgggatttgtgggcggcgagggcgcgaggggccgcgcgccatgctccgggccccgacggcgcggacgccccctcgcgcgccagcgtccggcgcgaccccggatcccggtctgcgcattgccccccgacggctgcgctagggagcgcggggcccggcggggggcggccgagctgggcgccctcccccggcgcggagtccccgcaccccggagggatggggcgggcagccgcgggcgcctaagatgccggccatgcggggcctcctggcgccgcagaacaccttcctggacaccatcgctacgcgcttcgacggcacgcacagtaacttcgtgctgggcaacgcccaggtggcggggctcttccccgtggtctactgctctgatggcttctgtgacctcacgggcttctcccgggctgaggtcatgcagcggggctgtgcctgctccttcctttatgggccagacaccagtgagctcgtccgccaacagatccgcaaggccctggacgagcacaaggagttcaaggctgagctgatcctgtaccggaagagcgggctcccgttctggtgtctcctggatgtgatacccataaagaatgagaaaggggaggtggctctcttcctagtctctcacaaggacatcagcgaaaccaagaaccgagggggccccgacagatggaaggagacaggtggtggccggcgccgatatggccgggcacgatccaaaggcttcaatgccaaccggcggcggagccgggccgtgctctaccacctgtccgggcacctgcagaagcagcccaagggcaagcacaagctcaataagggggtgtttggggagaaaccaaacttgcctgagtacaaagtagccgccatccggaagtcgcccttcatcctgttgcactgtggggcactgagagccacctgggatggcttcatcctgctcgccacactctatgtggctgtcactgtgccctacagcgtgtgtgtgagcacagcacgggagcccagtgccgcccgcggcccgcccagcgtctgtgacctggccgtggaggtcctcttcatccttgacattgtgctgaatttccgtaccacattcgtgtccaagtcgggccaggtggtgtttgccccaaagtccatttgcctccactacgtcaccacctggttcctgctggatgtcatcgcagcgctgccctttgacctgctacatgccttcaaggtcaacgtgtacttcggggcccatctgctgaagacggtgcgcctgctgcgcctgctgcgcctgcttccgcggctggaccggtactcgcagtacagcgccgtggtgctgacactgctcatggccgtgttcgccctgctcgcgcactgggtcgcctgcgtctggttttacattggccagcgggagatcgagagcagcgaatccgagctgcctgagattggctggctgcaggagctggcccgccgactggagactccctactacctggtgggccggaggccagctggagggaacagctccggccagagtgacaactgcagcagcagcagcgaggccaacgggacggggctggagctgctgggcggcccgtcgctgcgcagcgcctacatcacctccctctacttcgcactcagcagcctcaccagcgtgggcttcggcaacgtgtccgccaacacggacaccgagaagatcttctccatctgcaccatgctcatcggcgccctgatgcacgcggtggtgtttgggaacgtgacggccatcatccagcgcatgtacgcccgccgctttctgtaccacagccgcacgcgcgacctgcgcgactacatccgcatccaccgtatccccaagcccctcaagcagcgcatgctggagtacttccaggccacctgggcggtgaacaatggcatcgacaccaccgagctgctgcagagcctccctgacgagctgcgcgcagacatcgccatgcacctgcacaaggaggtcctgcagctgccactgtttgaggcggccagccgcggctgcctgcgggcactgtctctggccctgcggcccgccttctgcacgccgggcgagtacctcatccaccaaggcgatgccctgcaggccctctactttgtctgctctggctccatggaggtgctcaagggtggcaccgtgctcgccatcctagggaagggcgacctgatcggctgtgagctgccccggcgggagcaggtggtaaaggccaatgccgacgtgaaggggctgacgtactgcgtcctgcagtgtctgcagctggctggcctgcacgacagccttgcgctgtaccccgagtttgccccgcgcttcagtcgtggcctccgaggggagctcagctacaacctgggtgctgggggaggctctgcagaggtggacaccagctccctgagcggcgacaatacccttatgtccacgctggaggagaaggagacagatggggagcagggccccacggtctccccagccccagctgatgagccctccagccccctgctgtcccctggctgcacctcctcatcctcagctgccaagctgctatccccacgtcgaacagcaccccggcctcgtctaggtggcagagggaggccaggcagggcaggggctttgaaggctgaggctggcccctctgctcccccacgggccctagaggggctacggctgccccccatgccatggaatgtgcccccagatctgagccccagggtagtagatggcattgaagacggctgtggctcggaccagcccaagttctctttccgcgtgggccagtctggcccggaatgtagcagcagcccctcccctggaccagagagcggcctgctcactgttccccatgggcccagcgaggcaaggaacacagacacactggacaagcttcggcaggcggtgacagagctgtcagagcaggtgctgcagatgcgggaaggactgcagtcacttcgccaggctgtgcagcttgtcctggcgccccacagggagggtccgtgccctcgggcatcgggagaggggccgtgcccagccagcacctccgggcttctgcagcctctgtgtgtggacactggggcatcctcctactgcctgcagcccccagctggctctgtcttgagtgggacttggccccaccctcgtccggggcctcctcccctcatggcaccctggccctggggtcccccagcgtctcagagctccccctggcctcgagccacagctttctggacctccacctcagactcagagccccctgcctcaggagacctctgctctgagcccagcacccctgcctcccctcctccttctgaggaaggggctaggactgggcccgcagagcctgtgagccaggctgaggctaccagcactggagagcccccaccagggtcagggggcctggccttgccctgggacccccacagcctggagatggtgcttattggctgccatggctctggcacagtccagtggacccaggaagaaggcacaggggtctgagtaccagccctagaactcagcgttgccaggtgtgctgccatctgctgttcggcccaacctcagagtgaaggcagggtggcagcctccccacggactccatgcggcccgctggctcagggcagggagcctggaagcaaaggaggacctggctcctgactctcagagaggataggctggatccctggggcaggcctctcctcggcctgctcctctgacctcccggtctccctctgcaggctgggggcagaggcctgaggacaaggaagagctttgccatcccctgcatgtgcccctgcctctacctgtccccaaatttttatattaaaaaaaaaaaataaaataaactactttggaa

SEQ ID NO: 168193 - DNA, 3920 bp, Homo sapiens
  Payload ID: 13091
  Gene Symbol: KCNH4
  Gene Name: potassium channel, voltage gated eag related subfamily H, member 4
  Uniprot ID: Q9UQ05
  ENST ID: ENST00000264661
  CDS Start-End: 334-3387
gtgggccgctcccctctgggaggagggctgcccagaggggtgcgggtgtcgctagcggcccctccccgtgtggggccacgtggcgggtgcgggccgagcccgaggggaagaacctggcccgtggggaggtgggggggaccgaaacggcgctgagccgagccgagagctacggggttcggagcagaggcagcggcagcggcagcggcagtaagagggaggggaggaggcaggagggcgcatggggcgccccggcccctccgacagcgcgccccctccggcccggccgcgctgaaagctccccagcgccgcgccttgaacccacgccccggggccatgccggtcatgaaggggttgctggccccgcaaaacaccttcctggacaccatcgccacccgttttgacggaacgcacagcaacttcctgctggccaacgcacagggcacacggggctttcccatcgtctactgctccgacggcttctgcgagctcacaggctacggtcgcaccgaggtcatgcagaagacctgcagctgccgtttcctctacggcccagagaccagtgagccagccctgcagcgtctgcacaaagccctggagggccaccaggagcaccgggctgaaatctgcttctaccgcaaggatggctcagccttttggtgcctcctggacatgatgcccatcaagaatgagatgggggaggtcgtgctgttcctcttttccttcaaggatatcactcagagtggaagcccaggacttggcccccaaggaggccgcggggacagtaatcacgaaaactcccttggtagaaggggagccacctggaaatttcggtctgccagaagacggagccgtactgtcctacaccgactgaccggccactttggccgccggggccagggaggcatgaaggccaataataacgtgtttgagccaaagccatcagtgcccgagtacaaggtggcctccgtgggggggtctcgctgcctcctcctccactacagcgtctccaaggccatctgggacggccttatcctccttgccaccttctacgttgcggtcaccgtcccctacaatgtctgtttctcgggtgacgatgacacccccatcacttcgcgacacacccttgtcagcgacatcgccgtggaaatgctcttcatcctagatatcatcctgaacttccgcaccacctatgtgtcccagtccggccaggtaatctctgctcctcgttccattggcctccactacctggccacctggttcttcatcgaccttattgctgctctgccctttgacctgctttacatcttcaacatcaccgtgacctcgctggtgcacctactgaagacagtgcggctgttgcggctgctgcggctgctgcagaagctggagcggtactctcagtgcagtgctgtggtgctcacgctgctcatgtcggtctttgcgctccttgcccactggatggcctgcatctggtatgtcatcgggcgccgggagatggaggccaatgacccgctgctctgggacattggctggttgcatgagttgggcaagcgtctggaggtgccctatgtcaatggctcggtgggcggcccatcacggcgcagcgcctacatcgcggcactgtacttcactctaagcagcctcaccagtgtgggctttggcaacgtgtgtgccaacaccgacgcggagaagatcttctccatctgcacgatgctcataggcgccctgatgcacgctgtggtgttcgggaacgtgacagccatcatccagcgcatgtactcgcgccgctcgctctaccacagccgcatgaaggacctcaaggacttcatccgtgtgcaccgcctgccgcggccgctcaagcagcgcatgctcgaatacttccagaccacgtgggccgtcaacagcggcatcgacgccaacgagttactgcgtgacttcccagacgagctgagagctgacattgctatgcacctgaatcgggagatcctgcagctgccgttgttcggggcagcgagcaggggctgcctgcgggccctatcgctgcacatcaagacctcgttctgcgctccgggcgagtacctgttgcgccgtggggatgccctgcaggcacattactatgtctgctccggctcgcttgaggtgctccgagacaacatggtgctggccatcctggggaagggggacctgattggagcagatatccctgagccggggcaggagcctgggttgggagcagacccaaacttcgtgctaaagaccagtgctgatgtgaaagctctgacctactgtggcctgcagcagctgagcagccgagggctggctgaggtcctgaggctctatcctgagtatggggctgccttccgggctggcctgccccgggacctcaccttcaacctgcgccagggctctgacaccagtggcctcagccgcttttcccgatcccctcgcctctcccagccccgctcagaaagcctcggctcctcctcagacaagacgctgccatccatcacagaggccgagagtggcgcggagcctgggggtggtcccaggccccgacggcccctcctgctgcccaacctcagcccagcacggcctcggggctccctggtcagccttttgggcgaggagctgcccccattctcagcccttgtctcctctccttccttatccccatccctgtcccctgccctggctggccagggccacagtgcctcccctcacggcccccccaggtgctctgctgcctggaagccccctcagcttctcattcccccactgggaacctttggacctccggacctcagtccccggatagtggatggcattgaggactctggcagcacagctgaggccccttcattccgattcagcaggaggcctgaactgccaaggccccgctcccaggcgccccctacagggaccaggcccagcccagaattggccagtgaggctgaggaggtgaaggaaaaggtttgccggctgaaccaggagatctctcgtctcaatcaggaggtgtctcagcttagccgggagctgcggcacatcatgggcctgctgcaggccaggctgggtcccccaggccacccagcaggctccgcttggaccccagaccctccttgtccacagctgaggccaccatgcctctctccttgtgcgtccagaccaccacccagcctccaggatactacgcttgctgaagttcactgcccagccagtgtggggaccatggagacagggactgcgctcctggacttgagaccttccatattgcccccctacccctcagagcctgaccctctgggaccctctccagtgccagaggcctcacccccaaccccaagcctcttgaggcacagtttccagtccaggtcagacacgttccactgaccctggcccagggcccaggcctgtctggggtgggcgctgccgctcaccactcagggaggacctgggccccttggcttcctgccttggggtcagcagccaccagctggcctggttggctctggatttctggactttttaatgaagcgtggttacctctgacgctattcccttttccaagccttccccaacctccccctctgtgaggggagccacctgagggctgtggaacccagcaggcatgagatgaaccgcagtgcccattgggctgggcagatgagatcctactttctccccaggacctggaggcaggctgtctctcaaggtggtctcttctgctgctagcaactcaaaaatcccaacagcactccctatcctttccctgaccccagaccgctgccaagcctgttctcccccattacaacatggtctcactcagggcctggactgctccaaaactcgcccaggtctccagctctcctctaccacccaacaccctgggctcacttttggataggaaataaactctttatttt

SEQ ID NO: 168194 - DNA, 3723 bp, Homo sapiens
  Payload ID: 13091
  Gene Symbol: KCNH4
  Gene Name: potassium channel, voltage gated eag related subfamily H, member 4
  Uniprot ID: Q9UQ05
  ENST ID: ENST00000607371
  CDS Start-End: 137-3190
ggcagcggcagtaagagggaggggaggaggcaggagggcgcatggggcgccccggcccctccgacagcgcgccccctccggcccggccgcgctgaaagctccccagcgccgcgccttgaacccacgccccggggccatgccggtcatgaaggggttgctggccccgcaaaacaccttcctggacaccatcgccacccgttttgacggaacgcacagcaacttcctgctggccaacgcacagggcacacggggctttcccatcgtctactgctccgacggcttctgcgagctcacaggctacggtcgcaccgaggtcatgcagaagacctgcagctgccgtttcctctacggcccagagaccagtgagccagccctgcagcgtctgcacaaagccctggagggccaccaggagcaccgggctgaaatctgcttctaccgcaaggatggctcagccttttggtgcctcctggacatgatgcccatcaagaatgagatgggggaggtcgtgctgttcctcttttccttcaaggatatcactcagagtggaagcccaggacttggcccccaaggaggccgcggggacagtaatcacgaaaactcccttggtagaaggggagccacctggaaatttcggtctgccagaagacggagccgtactgtcctacaccgactgaccggccactttggccgccggggccagggaggcatgaaggccaataataacgtgtttgagccaaagccatcagtgcccgagtacaaggtggcctccgtgggggggtctcgctgcctcctcctccactacagcgtctccaaggccatctgggacggccttatcctccttgccaccttctacgttgcggtcaccgtcccctacaatgtctgtttctcgggtgacgatgacacccccatcacttcgcgacacacccttgtcagcgacatcgccgtggaaatgctcttcatcctagatatcatcctgaacttccgcaccacctatgtgtcccagtccggccaggtaatctctgctcctcgttccattggcctccactacctggccacctggttcttcatcgaccttattgctgctctgccctttgacctgctttacatcttcaacatcaccgtgacctcgctggtgcacctactgaagacagtgcggctgttgcggctgctgcggctgctgcagaagctggagcggtactctcagtgcagtgctgtggtgctcacgctgctcatgtcggtctttgcgctccttgcccactggatggcctgcatctggtatgtcatcgggcgccgggagatggaggccaatgacccgctgctctgggacattggctggttgcatgagttgggcaagcgtctggaggtgccctatgtcaatggctcggtgggcggcccatcacggcgcagcgcctacatcgcggcactgtacttcactctaagcagcctcaccagtgtgggctttggcaacgtgtgtgccaacaccgacgcggagaagatcttctccatctgcacgatgctcataggcgccctgatgcacgctgtggtgttcgggaacgtgacagccatcatccagcgcatgtactcgcgccgctcgctctaccacagccgcatgaaggacctcaaggacttcatccgtgtgcaccgcctgccgcggccgctcaagcagcgcatgctcgaatacttccagaccacgtgggccgtcaacagcggcatcgacgccaacgagttactgcgtgacttcccagacgagctgagagctgacattgctatgcacctgaatcgggagatcctgcagctgccgttgttcggggcagcgagcaggggctgcctgcgggccctatcgctgcacatcaagacctcgttctgcgctccgggcgagtacctgttgcgccgtggggatgccctgcaggcacattactatgtctgctccggctcgcttgaggtgctccgagacaacatggtgctggccatcctggggaagggggacctgattggagcagatatccctgagccggggcaggagcctgggttgggagcagacccaaacttcgtgctaaagaccagtgctgatgtgaaagctctgacctactgtggcctgcagcagctgagcagccgagggctggctgaggtcctgaggctctatcctgagtatggggctgccttccgggctggcctgccccgggacctcaccttcaacctgcgccagggctctgacaccagtggcctcagccgcttttcccgatcccctcgcctctcccagccccgctcagaaagcctcggctcctcctcagacaagacgctgccatccatcacagaggccgagagtggcgcggagcctgggggtggtcccaggccccgacggcccctcctgctgcccaacctcagcccagcacggcctcggggctccctggtcagccttttgggcgaggagctgcccccattctcagcccttgtctcctctccttccttatccccatccctgtcccctgccctggctggccagggccacagtgcctcccctcacggcccccccaggtgctctgctgcctggaagccccctcagcttctcattcccccactgggaacctttggacctccggacctcagtccccggatagtggatggcattgaggactctggcagcacagctgaggccccttcattccgattcagcaggaggcctgaactgccaaggccccgctcccaggcgccccctacagggaccaggcccagcccagaattggccagtgaggctgaggaggtgaaggaaaaggtttgccggctgaaccaggagatctctcgtctcaatcaggaggtgtctcagcttagccgggagctgcggcacatcatgggcctgctgcaggccaggctgggtcccccaggccacccagcaggctccgcttggaccccagaccctccttgtccacagctgaggccaccatgcctctctccttgtgcgtccagaccaccacccagcctccaggatactacgcttgctgaagttcactgcccagccagtgtggggaccatggagacagggactgcgctcctggacttgagaccttccatattgcccccctacccctcagagcctgaccctctgggaccctctccagtgccagaggcctcacccccaaccccaagcctcttgaggcacagtttccagtccaggtcagacacgttccactgaccctggcccagggcccaggcctgtctggggtgggcgctgccgctcaccactcagggaggacctgggccccttggcttcctgccttggggtcagcagccaccagctggcctggttggctctggatttctggactttttaatgaagcgtggttacctctgacgctattcccttttccaagccttccccaacctccccctctgtgaggggagccacctgagggctgtggaacccagcaggcatgagatgaaccgcagtgcccattgggctgggcagatgagatcctactttctccccaggacctggaggctgtctctcaaggtggtctcttctgctgctagcaactcaaaaatcccaacagcactccctatcctttccctgaccccagaccgctgccaagcctgttctcccccattacaacatggtctcactcagggcctggactgctccaaaactcgcccaggtctccagctctcctctaccacccaacaccctgggctcacttttggataggaaataaactctttatttttgta

SEQ ID NO: 168195 - DNA, 11290 bp, Homo sapiens
  Payload ID: 13092
  Gene Symbol: KCNH5
  Gene Name: potassium channel, voltage gated eag related subfamily H, member 5
  Uniprot ID: Q8NCM2
  ENST ID: ENST00000322893
  CDS Start-End: 270-3236
gttcccgagccccgtgtgcggcaccgccacagtctgggcagcggcggccgggggagcgctactaccatgaactgcctggtcctcctccccagagctgctcatccgggtcgggctggagacacagtcaggggaccccgtcgccgccgccgcgccccctcttctttcggctcaatcttctcttccaccttttcctcctcttcctccaccttctttgcctgcatccccccctcccccgccgcggatcctggccgctgctctccagacccaggatgccggggggcaagagagggctggtggcaccgcagaacacatttttggagaacatcgtcaggcgctccagtgaatcaagtttcttactgggaaatgcccagattgtggattggcctgtagtttatagtaatgacggtttttgtaaactctctggatatcatcgagctgacgtcatgcagaaaagcagcacttgcagttttatgtatggggaattgactgacaagaagaccattgagaaagtcaggcaaacttttgacaactacgaatcaaactgctttgaagttcttctgtacaagaaaaacagaacccctgtttggttttatatgcaaattgcaccaataagaaatgaacatgaaaaggtggtcttgttcctgtgtactttcaaggatattacgttgttcaaacagccaatagaggatgattcaacaaaaggttggacgaaatttgcccgattgacacgggctttgacaaatagccgaagtgttttgcagcagctcacgccaatgaataaaacagaggtggtccataaacattcaagactagctgaagttcttcagctgggatcagatatccttcctcagtataaacaagaagcgccaaagacgccaccacacattattttacattattgtgcttttaaaactacttgggattgggtgattttaattcttaccttctacaccgccattatggttccttataatgtttccttcaaaacaaagcagaacaacatagcctggctggtactggatagtgtggtggacgttatttttctggttgacatcgttttaaattttcacacgactttcgtggggcccggtggagaggtcatttctgaccctaagctcataaggatgaactatctgaaaacttggtttgtgatcgatctgctgtcttgtttaccttatgacatcatcaatgcctttgaaaatgtggatgagggaatcagcagtctcttcagttctttaaaagtggtgcgtctcttacgactgggccgtgtggctaggaaactggaccattacctagaatatggagcagcagtcctcgtgctcctggtgtgtgtgtttggactggtggcccactggctggcctgcatatggtatagcatcggagactacgaggtcattgatgaagtcactaacaccatccaaatagacagttggctctaccagctggctttgagcattgggactccatatcgctacaataccagtgctgggatatgggaaggaggacccagcaaggattcattgtacgtgtcctctctctactttaccatgacaagccttacaaccataggatttggaaacatagctcctaccacagatgtggagaagatgttttcggtggctatgatgatggttggctctcttctttatgcaactatttttggaaatgttacaacaattttccagcaaatgtatgccaacaccaaccgataccatgagatgctgaataatgtacgggacttcctaaaactctatcaggtcccaaaaggccttagtgagcgagtcatggattatattgtctcaacatggtccatgtcaaaaggcattgatacagaaaaggtcctctccatctgtcccaaggacatgagagctgatatctgtgttcatctaaaccggaaggtttttaatgaacatcctgcttttcgattggccagcgatgggtgtctgcgcgccttggcggtagagttccaaaccattcactgtgctcccggggacctcatttaccatgctggagaaagtgtggatgccctctgctttgtggtgtcaggatccttggaagtcatccaggatgatgaggtggtggctattttagggaagggtgatgtatttggagacatcttctggaaggaaaccacccttgcccatgcatgtgcgaacgtccgggcactgacgtactgtgacctacacatcatcaagcgggaagccttgctcaaagtcctggacttttatacagcttttgcaaactccttctcaaggaatctcactcttacttgcaatctgaggaaacggatcatctttcgtaagatcagtgatgtgaagaaagaggaggaggagcgcctccggcagaagaatgaggtgaccctcagcattcccgtggaccacccagtcagaaagctcttccagaagttcaagcagcagaaggagctgcggaatcagggctcaacacagggtgaccctgagaggaaccaactccaggtagagagccgctccttacagaatggagcctccatcaccggaaccagcgtggtgactgtgtcacagattactcccattcagacgtctctggcctatgtgaaaaccagtgaatcccttaagcagaacaaccgtgatgccatggaactcaagcccaacggcggtgctgaccaaaaatgtctcaaagtcaacagcccaataagaatgaagaatggaaatggaaaagggtggctgcgactcaagaataatatgggagcccatgaggagaaaaaggaagactggaataatgtcactaaagctgagtcaatggggctattgtctgaggaccccaagagcagtgattcagagaacagtgtgaccaaaaacccactaagaaaaacagattcttgtgacagtggaattacaaaaagtgaccttcgtttggataaggctggggaggcccgaagtccgctagagcacagtcccatccaggctgatgccaagcaccccttttatcccatccccgagcaggccttacagaccacactgcaggaagtcaaacacgaactcaaagaggacatccagctgctcagctgcagaatgactgccctagaaaagcaggtggcagaaattttaaaaatactgtcggaaaaaagcgtaccccaggcctcatctcccaaatcccaaatgccactccaagtacccccccagataccatgtcaggatatttttagtgtctcaaggcctgaatcacctgaatctgacaaagatgaaatccacttttaatatatatacatatatatttgttaatatattaaaacagtatatacatatgtgtgtatatacagtatatacatatatatattttcacttgctttcaagatgatgaccacacatggattttgatatgtaaatattgcatgtccagctggattctggcctgccaaagaagatgatgattaaaaacatagatattgcttgtatattatgcagttgactgcatgcacactttacatttatttataatctctattctataataaaagagtatgatttttgttacccaaggcaatgtaatatttgaagaatcagggtccaacctgccaatgttgccatgacaaatttgatctcaggctgagtatgtatatcgagctatcattttctcactgttctgttaagttaaaagtatagattaatgccaaggaagagttcagtcttttaaactattagtaccatgttatgatctctttccataggatatttttctgtaacttagtgttaggttcttttcccctacaggcagtgtttgctccatttaaatgactgtttagttgcctaagtcagataagagtgtgggatattgaaaacttattgctatgggttttgtgcatgaattacatttttgatcaactatacctctcgttttttaacattatacttagatagtaatcattagctcttatgtaaggaaatccctactccctccttcttggagaacagctgccatcttgtaagctgacattatcaacatcataaatactaaactattaatatagagtatgttattatagaaacactgcaccacagggtataagggccttttgacaattcatgtaagagatgctgaatttccaaagctgataaatgctctaaatttgtatttccaaaacatgttcaagagtgacattgaaaggcttgttagcaaagaaacatacaaaaaataaagcatttaagtaatcatatcaaaatgctaactattatggtataaaataaaaaagaatgtaaacagatagataaatttttgtggcatgtatataacttagaaagaatgaaacactggtacggattgttgacacatgaatcctagtgtttgtagtgataacacatgaaatgtggtaaaacaaacaaaccaaccaaccaagaagtagacattaagttgctcgactcagataactgcttttctatcattttattgtggttatagttttttaaagctttttgcacacagttctactgctggacttctgctgagttgattcaataagctattgtggctcaggcaggtccatttgtgaaagggggatactaaagactgaattttagtcttttgaattcaaatcctctttgtagaaagtgcctattatcaagtttttaaaaaaagtcacaaagagttgtcctgtatatagctagtcccttaaatgataaggattgagaataaaatacacattcacttgtaagaacccaggagaacttatttcttttgactaaactgtattttaggaagtcgttcagggaagcatacttttcagtcagtgcatgcacagcatttaatatggggagcaggggagttagtgtttgcatgaagttgaaaaaaatgtgtgagtaatttatatattacgggaccatctgtacatatatgttaacaatatgcaaaagatgatggcaaaatcgaaggagatatcttgatctattatacccatttgtatgagcttttctatctcccagtattcccaaccaaagccactagaactgaaagacatgttatcacattcagacttgagaagtgcaaaacagtgatttataaaaacagttgctattttagaatttctattgaacttcacatgcccacaagatgtgcctctttaatctaggagtctcaaaacatatgagccatgggctccattttcctttctttatgcgtataacttccattaaccataatggaagttttcaggggaacacgtctccatgtaatgctacaatatctacctaccacaaacacaagaaaatgaaataattatggagtaaagaatcagccttgaaattggaattttgttgctttcatggtgaggatgatatctttttcgtgacctctgacatttattgaatttcagggtatttttctatttgtttaagtcaagtttggcttaagcttttaaaggtgaatgtgtggttaaaataagaatctgattatagaagttgttagtttaactttagccagtgcttcaaaactaactattggtgtaaagctataaaagaatgactgtgaacaacatgatgatttgaagttctaattcatggctttgcatattagtggtgcaaatatttactgtgttctgacattgacgtagagtttcacctaatcgacctacaatgttattgttcatatatgtgagaaacataatggttttgaattactccagattgttaggaaggagggaaagtatcaattgtttaattatggtgcagttatcatagtgtcttttcagccatctctgttctctgtgtgcatgatatgaagaggtgctgaatgcaccctgctgttttcagcaggaatgcatgttttcagcaaacattgtatatagagtagtcttttaggttcccagattccacaaatcttagcagttgaatttactcagatttgaatgaagggagaatatttgctttaatacatgcaataatgataaaatcatgttctatgttgcctcaactagcacatagacagtagatgctcttttgaggaccagataactgcatgttttattcctacactgtatagatgctcttggtgcatccagaataaaaattttaatattatatttctaaataatatattaataggagtaaatggatatgtattagaaatccaaacattttccaaagcaatttacacaccttcaatatttttctatgatgttattaataggtaagatcagatgctgtatcctcgacaggtggttgtaacaaaatagcaaaagtcaaattagaatggaaatgtgagtgatgtatcataatggcaggttttatcagtctgtatcaggatattgttgcactaaatgtgatctagcagatggaagagattatgataaaaagcaaataggcacacaaaagccagatgacaataccaaagctatatgaatggtactgaaaatggttcaggcacagtggttgaattgaatgacgtggttgaatacaggcccatgcttcattgttaaaatggaaaatttttatgacactagttgcatcttgcattaagtataggactaaaaatgtcctaagtattttttacaaacaactttatgtatatcagagaaaaaaatggaaaatctggggtttgaaattgctctagaaaaaatgtgtacttctgttgtactcaacactttaataggaaaattagttgtgaccgctaactaaagtaccattatcaaaattaaccttattggagcccaaatgaaaatcacattttcccttctgtttaaggagattttgttcaccctgtgatatctggtccatttgatatcttattttaaatagctaaagtcatttggaattttttttaatattagccttcagagcagtgactgttttgaagtgtgcagtggcagatatttgtgaaattattcatcatatttctaatgaattccactatcttgtataatttttatcttttaagcaattttctatgagtttgttttccaaaattccatgtaggtaatgagaacatttatctagaatgtgcatatcatacatggataactttcaaatatgaatattttataatcatgtgaatgttgtgctataattttttctattaggtgtaaaagtatttctcttctcatcttaatggaaagggggaaaagacaaaaacagtcttttggaaaacaccttaagtcttagtatctgagctttgtcttgtgttctgaatttagctttaccacaaactagaagtgtaattatgggcaagttaacctttcctagtgtaccaaatggtaccatttccccgccaataaataagaaaacaaagataacagctgttgcttccttatatcaacatgctattggtcaatgaaaaaattatctttcttgcaggtgaaaatcacattatgacaagtgatcactttttcattctttcatagaagagtatccacgatgtactctctatcaaaatattcttctagattttagaagagatttcagggattgacggtgatgtgatttttatctaaatattcttttaggttttagaagagatttatctggtcagaggttaatggagagaggcatagtttgctagtggcaggtaagcataaaacttcatacttatgtgggaatttagaactacaaatcaaataaacgtggaaagaatgaagctcctttgacagaagagagagagaagagaaagataggtaaattttgtgatttttcttatttctacttaatcatactgcttggcagaaattctcaattttgtgaaaaaattggtaagtggccaaggtatagagtagttcaccaatgtatctatgtaacaaaactgaatgtgtaccccttaaatttatacaaataaaaactagagtagttcatccttcaactttttatattaaaataatcatgacctgttcaagatatatgattccacatgggcagacactcttataacaaaattcttaactatgtgctatgtgttgtaagttttggcctatattctgacttgagattttctatcacttcatttgtaggataagacccctgtgtttgcattctttatgagggtcaggaccactgaggatttggactgggaactagaaagatgatgaaggcaagggttgagaaaagactgattagaatctatctgcttctttactcttaggcttagaagttaaataagttaactaagcttatatttaccaaggtctcactatgataagcattttatttaggttatcaaatttaattcttgcagcaaccccatgaaggtataggttaaggaacttgtccaggatggcatacttgttacatggtaaagttgagtttctaacacaggcagtcagaccttagggagaaacctttattttgtagaatactgacattacaagaactatctagttcaaccatctagtctaggtttttccagacacatacttttaaagatttcttaaaataattcttaaaaattgcactcgataatgtgaatgtaaatgtttggtttttcttgataggtcagagtcaatgacagagtttgaaatcatactgtcttaagcaaaaggtgccctgtcccaacagtggaattttcctttacttctcctaacagttgaaagacatcggccaaagtaaactgtcaaatgtggtatgtttgatatatggtcactggtatcaacattttcttttccagttgaattttaacctaaagaggtaatgcctaatggttaaggaaagcaagagtcattcaggattttttttctataatttctttttctttttaatagtgggatttggatgagactccagaatttatttttaaaatttattttttgactcattgggttttaagtagattattcagatatttttattgattgcactgatgttggcttcttggccaaaccactattaaatacattatccaaatgaactatttctgtttagaatggcaacttgtatccttatttccaaaattaatgagctcacagtatgtatatttacttcagagagtttcaataattttctctaatgaaaaaatgttaattttctgaatgtgatttatttgttctaccctttgagatttctaaagcaagtgtcttgagataaggagaaaaaaacaagatattacaacactacatgctggaatcttcagcccaaaccatcttgttttcacttggctaataactgagccagaggtaatcatagaaaggaagaatcctacttttaaaataatgactgtgaaggaccccactgacaccatccaaagctttttatagtcagctcacttccatcctggcttttacattaccactgcatgattatttaaatgaggtcatgtcttgtactacttgtaaaggcacttggtcaaagaagagtaaaccaaaaagtgcagcttatgaccagagttataactgaggaaaaaggagtgtggagaagggacagcagttgcttccttttaatgagttttctgtatgtggtgccttttaaatagcttttgtttatttgtttttaagatgacacattgtcattaaggttttaacaaaaacctttggaagcagtttgaaagcttgtcaaatgctggggccttctttagaaataagtgttctcccaccaaccaatgagtttagaacctctggttctgacctacaaacccaatcccctaagcacttggctggttgggctgcattttgatgggaggaaacaaaaagatctgatcactctctctcattcatgcggaatcactgactgttgaatgaccaaagcagtcaaagccaaaatattcaccttgaagcttcaataaaccagattgagtatccataataactaatttaagtaattttatccccattctctgctaaatcatatttcataatataaaatgtaaccacttccctctatccaaagcttttggtcagactctccattgagttagagaaattggactttggcaaaaagcaacataaagattattgttgttcctagaaccattgttgccatggacccctcatttgctcctcaactttttcaaccaaattatagcgggaaagattcctgatgaagccaagactgcaaacaggaagaatacctagctagtaaactatgcaaaatcacaacaaagattcatttataattccatgttacagtgtttgatagtcctaagtatttaatattggtatattatgtcacagccatgaactgtcaacttacacaaaatccaaacgcactttcatttaaaatcaagattagcctatttcattttcaggaaaaaacagttgtcagaattgcttttttgacctctgcagggatgttttcacattgctattcttatgaccctttatcagagagggaataagtgtagtgttcactttcatctccttagggttgactgcaccagcatcttccatcaagcagtcgccttccaccttagaacctgttcacagttaataaagcaagggggaatatgcatttcatattaggaacagatttcttaagtgattgttatgaaaagtggaaaccagtttagaaccatttttttaccctaaaacatccattgtagtttgttgaaagagcaatgacttttagaagtgcttggtactcaaacaacacaaaatgtgcagattcacgatatattgaaaattatagagttctttttagtctatgttctagtgactttgtttacactagttgtggcattttgtatactacaatgtaaattctactataacactaatgttactatgggaattaattttgcaacttcttaaatgtttttgtcactgcaaccatattggtgagatattgggggtattaaaaatgcctctgcctttaagggttaattcaccagaaataattgattcatgcattgacaaaggaaacaatgcaaaaatttcatgtgggatgtttttaataccattatgctaagcagtacttgttggcttttttcaaaatctgattcatgctaagcagatccttttttctacttaaacaaagatactgcaatgtataatatagaaattttgtatgtactgttgacctatcacctgactgctgacaggatgtgtgaaaatattttaactttgtgactttagggtcaattatgaaacaattgtgatcaaaattcagttgcttctgggaagtttgtggtgattatcactttatttaacgtttgttctcaaaaaatggtcattttgaaaagtgaattggcaggtggaagcttttagcccaaaagaaatctgggtttcagcacaataaactgtatttcatcagggaggactaactttgctttttttcacactttatttaaatgtggatattttttcatgatacagaataaaatgtgcattttatggaattaatttgaa

SEQ ID NO: 168196 - DNA, 2490 bp, Homo sapiens
  Payload ID: 13092
  Gene Symbol: KCNH5
  Gene Name: potassium channel, voltage gated eag related subfamily H, member 5
  Uniprot ID: Q8NCM2
  ENST ID: ENST00000394968
  CDS Start-End: 169-2043
tgagcaaatgaaagacaccaacaaaatccaacacataaagattcacacttgaaacagattaatcaggaatcaagtttcttactgggaaatgcccagattgtggattggcctgtagtttatagtaatgacggtttttgtaaactctctggatatcatcgagctgacgtcatgcagaaaagcagcacttgcagttttatgtatggggaattgactgacaagaagaccattgagaaagtcaggcaaacttttgacaactacgaatcaaactgctttgaagttcttctgtacaagaaaaacagaacccctgtttggttttatatgcaaattgcaccaataagaaatgaacatgaaaaggtggtcttgttcctgtgtactttcaaggatattacgttgttcaaacagccaatagaggatgattcaacaaaaggttggacgaaatttgcccgattgacacgggctttgacaaatagccgaagtgttttgcagcagctcacgccaatgaataaaacagaggtggtccataaacattcaagactagctgaagttcttcagctgggatcagatatccttcctcagtataaacaagaagcgccaaagacgccaccacacattattttacattattgtgcttttaaaactacttgggattgggtgattttaattcttaccttctacaccgccattatggttccttataatgtttccttcaaaacaaagcagaacaacatagcctggctggtactggatagtgtggtggacgttatttttctggttgacatcgttttaaattttcacacgactttcgtggggcccggtggagaggtcatttctgaccctaagctcataaggatgaactatctgaaaacttggtttgtgatcgatctgctgtcttgtttaccttatgacatcatcaatgcctttgaaaatgtggatgagggaatcagcagtctcttcagttctttaaaagtggtgcgtctcttacgactgggccgtgtggctaggaaactggaccattacctagaatatggagcagcagtcctcgtgctcctggtgtgtgtgtttggactggtggcccactggctggcctgcatatggtatagcatcggagactacgaggtcattgatgaagtcactaacaccatccaaatagacagttggctctaccagctggctttgagcattgggactccatatcgctacaataccagtgctgggatatgggaaggaggacccagcaaggattcattgtacgtgtcctctctctactttaccatgacaagccttacaaccataggatttggaaacatagctcctaccacagatgtggagaagatgttttcggtggctatgatgatggttggctctcttctttatgcaactatttttggaaatgttacaacaattttccagcaaatgtatgccaacaccaaccgataccatgagatgctgaataatgtacgggacttcctaaaactctatcaggtcccaaaaggccttagtgagcgagtcatggattatattgtctcaacatggtccatgtcaaaaggcattgatacagaaaaggtcctctccatctgtcccaaggacatgagagctgatatctgtgttcatctaaaccggaaggtttttaatgaacatcctgcttttcgattggccagcgatgggtgtctgcgcgccttggcggtagagttccaaaccattcactgtgctcccggggacctcatttaccatgctggagaaagtgtggatgccctctgctttgtggtgtcaggatccttggaagtcatccaggatgatgaggtggtggctattttagggaagggtgatgtatttggagacatcttctggaaggaaaccacccttgcccatgcatgtgcgaacgtccgggcactgacgtactgtgacctacacatcatcaagcgggaagccttgctcaaagtcctggacttttatacagcttttgcaaactccttctcaaggaatctcactcttacttgcaatctgaggaaacggggatggttctccatggcaaacgctctgtgaagggtgacctgctgggtgtgaaactgctgcacgacttcctacttcacccattcatctatccgagttttcacggagtccaggagaaagtataaaagttaccttgaggagcaggagagtggaatggttaagactgtttggaatctgaccccttggatttgcatcctggacacacagttgtgtgacctaagggaaaccacttaaactctttatgcctcaatttgcttctctgtgataaaagaataatatgacctgtgtcctacagtagagaataataggtcctagctcgtaaaatgttctcattccatgacacttaaatgagaaaatacgtgtgtggaagtgaccactttgctatatacagatattttattatcattttacaatgccattattttgttccatagtcaaaagtaaaataaaacaaatgtcaatttgtcttattctaatcct

SEQ ID NO: 168197 - DNA, 2711 bp, Homo sapiens
  Payload ID: 13092
  Gene Symbol: KCNH5
  Gene Name: potassium channel, voltage gated eag related subfamily H, member 5
  Uniprot ID: Q8NCM2
  ENST ID: ENST00000420622
  CDS Start-End: 1-1836
atgccggggggcaagagagggctggtggcaccgcagaacacatttttggagaacatcgtcaggcgctccagtgaatcaagtttcttactgggaaatgcccagattgtggattggcctgtagtttatagtaatgacggtttttgtaaactctctggatatcatcgagctgacgtcatgcagaaaagcagcacttgcagttttatgtatggggaattgactgacaagaagaccattgagaaagtcaggcaaacttttgacaactacgaatcaaactgctttgaagttcttctgtacaagaaaaacagaacccctgtttggttttatatgcaaattgcaccaataagaaatgaacatgaaaaggtggtcttgttcctgtgtactttcaaggatattacgttgttcaaacagccaatagaggatgattcaacaaaaggttggacgaaatttgcccgattgacacgggctttgacaaatagccgaagtgttttgcagcagctcacgccaatgaataaaacagaggtggtccataaacattcaagactagctgaagttcttcagctgggatcagatatccttcctcagtataaacaagaagcgccaaagacgccaccacacattattttacattattgtgcttttaaaactacttgggattgggtgattttaattcttaccttctacaccgccattatggttccttataatgtttccttcaaaacaaagcagaacaacatagcctggctggtactggatagtgtggtggacgttatttttctggttgacatcgttttaaattttcacacgactttcgtggggcccggtggagaggtcatttctgaccctaagctcataaggatgaactatctgaaaacttggtttgtgatcgatctgctgtcttgtttaccttatgacatcatcaatgcctttgaaaatgtggatgagggaatcagcagtctcttcagttctttaaaagtggtgcgtctcttacgactgggccgtgtggctaggaaactggaccattacctagaatatggagcagcagtcctcgtgctcctggtgtgtgtgtttggactggtggcccactggctggcctgcatatggtatagcatcggagactacgaggtcattgatgaagtcactaacaccatccaaatagacagttggctctaccagctggctttgagcattgggactccatatcgctacaataccagtgctgggatatgggaaggaggacccagcaaggattcattgtacgtgtcctctctctactttaccatgacaagccttacaaccataggatttggaaacatagctcctaccacagatgtggagaagatgttttcggtggctatgatgatggttggctctcttctttatgcaactatttttggaaatgttacaacaattttccagcaaatgtatgccaacaccaaccgataccatgagatgctgaataatgtacgggacttcctaaaactctatcaggtcccaaaaggccttagtgagcgagtcatggattatattgtctcaacatggtccatgtcaaaaggcattgatacagaaaaggtcctctccatctgtcccaaggacatgagagctgatatctgtgttcatctaaaccggaaggtttttaatgaacatcctgcttttcgattggccagcgatgggtgtctgcgcgccttggcggtagagttccaaaccattcactgtgctcccggggacctcatttaccatgctggagaaagtgtggatgccctctgctttgtggtgtcaggatccttggaagtcatccaggatgatgaggtggtggctattttagatcatctttcgtaagatcagtgatgtgaagaaagaggaggaggagcgcctccggcagaagaatgaggtgaccctcagcattcccgtggaccacccagtcagaaagctcttccagaagttcaagcagcagaaggagctgcggaatcagggctcaacacagggtgaccctgagaggaaccaactccaggtagagagccgctccttacagaatggagcctccatcaccggaaccagcgtggtgactgtgtcacagattactcccattcagacgtctctggcctatgtgaaaaccagtgaatcccttaagcagaacaaccgtgatgccatggaactcaagcccaacggcggtgctgaccaaaaatgtctcaaagtcaacagcccaataagaatgaagaatggaaatggaaaagggtggctgcgactcaagaataatatgggagcccatgaggagaaaaaggaagactggaataatgtcactaaagctgagtcaatggggctattgtctgaggaccccaagagcagtgattcagagaacagtgtgaccaaaaacccactaagaaaaacagattcttgtgacagtggaattacaaaaagtgaccttcgtttggataaggctggggaggcccgaagtccgctagagcacagtcccatccaggctgatgccaagcaccccttttatcccatccccgagcaggccttacagaccacactgcaggaagtcaaacacgaactcaaagaggacatccagctgctcagctgcagaatgactgccctagaaaagcaggtggcagaaattttaaaaatactgtcggaaaaaagcgtaccccaggcctcatctcccaaatcccaaatgccactccaagtacccccccagataccatgtcaggata

SEQ ID NO: 168198 - DNA, 3062 bp, Homo sapiens
  Payload ID: 13093
  Gene Symbol: KCNH6
  Gene Name: potassium channel, voltage gated eag related subfamily H, member 6
  ENST ID: ENST00000314672
  CDS Start-End: 54-2930
gacgccgggagccagtggcgcctgtggctccgggcaggggccgcggccgaaagatgccggtccgcaggggccacgtcgctccccaaaacacttacctggacaccatcatccgcaagttcgagggccaaagtcggaagttcctgattgccaatgctcagatggagaactgcgccatcatttactgcaacgacggcttctgcgaactcttcggctactcccgagtggaggtgatgcagcaaccctgcacctgcgacttcctcacaggccccaacacaccaagcagcgccgtgtcccgcctagcgcaggccctgctgggggctgaggagtgcaaggtggacatcctctactaccgcaaggatgcctccagcttccgctgcctggtagatgtggtgcccgtgaagaacgaggacggggctgtcatcatgttcattctcaacttcgaggacctggcccagctcctggccaagtgcagcagccgcagcttgtcccagcgcctgttgtcccagagcttcctgggctccgagggctctcatggcaggccaggcggaccagggccaggcacaggcaggggcaagtacaggaccatcagccagatcccacagttcacgctcaacttcgtggagttcaacttggagaagcaccgctccagctccaccacggagattgagatcatcgcgccccataaggtggtggagcggacacagaacgtcactgagaaggtcacccaggtcctgtccctgggcgcggatgtgctgccggagtacaagctgcaggcgccgcgcatccaccgctggaccatcctgcactacagccccttcaaggccgtgtgggactggctcatcctgctgctggtcatctacacggctgtcttcacgccctactcagccgccttcctgctcagcgatcaggacgaatcacggcgtggggcctgcagctatacctgcagtcccctcactgtggtggatctcatcgtggacatcatgttcgtcgtggacatcgtcatcaacttccgcaccacctatgtcaacaccaatgatgaggtggtcagccacccccgccgcatcgccgtccactacttcaagggctggttcctcattgacatggtggccgccatccctttcgacctcctgatcttccgcactggctccgatgagaccacaaccctgattgggctattgaagacagcgcggctgctgcggctggtgcgcgtagcacggaagctggaccgctactctgagtatggggcggctgtgctcttcttgctcatgtgcaccttcgcgctcatagcgcactggctggcctgcatctggtacgccatcggcaatgtggagcggccctacctagaacacaagatcggctggctggacagcctgggtgtgcagcttggcaagcgctacaacggcagcgacccagcctcgggcccctcggtgcaggacaagtatgtcacagccctctacttcaccttcagcagcctcaccagcgtgggcttcggcaatgtctcgcccaacaccaactccgagaaggtcttctccatctgcgtcatgctcatcggctccctgatgtacgccagcatcttcgggaacgtgtccgcgatcatccagcgcctgtactcgggcaccgcgcgctaccacacgcagatgctgcgtgtcaaggagttcatccgcttccaccagatccccaacccactgcgccagcgcctggaggagtatttccagcacgcctggtcctacaccaatggcattgacatgaacgcggtgctgaagggcttccccgagtgcctgcaggctgacatctgcctgcacctgcaccgcgcactgctgcagcactgcccagctttcagcggcgccggcaagggctgcctgcgcgcgctagccgtcaagttcaagaccacccacgcgccgcctggggacacgctggtgcacctcggcgacgtgctctccaccctctacttcatctcccgaggctccatcgagatcctgcgcgacgacgtggtcgtggccatcctaggaaagaatgacatctttggggaacccgtcagcctccatgcccagccaggcaagtccagtgcagacgtgcgggctctgacctactgcgacctgcacaagatccagcgggcagatctgctggaggtgctggacatgtacccggcctttgcggagagcttctggagtaagctggaggtcaccttcaacctgcgggacgcagccgggggtctccactcatccccccgacaggctcctggcagccaagaccaccaaggtttctttctcagtgacaaccagtcagatgcagcccctcccctgagcatctcagatgcatctggcctctggcctgagctactgcaggaaatgcccccaaggcacagcccccaaagccctcaggaagacccagattgctggcctctgaagctgggctccaggctagagcagctccaggcccagatgaacaggctggagtcccgcgtgtcctcagacctcagccgcatcttgcagctcctccagaagcccatgccccagggccacgccagctacattctggaagcccctgcctccaatgacctggccttggttcctatagcctcggagacgacgagtccagggcccaggctgccccagggctttctgcctcctgcacagaccccaagctatggagacttggatgactgtagtccaaagcacaggaactcctcccccaggatgcctcacctggctgtggcaacggacaaaactctggcaccatcctcagaacaggaacagcctgaggggctctggccacccctagcctcacctctacatcccctggaagtacaaggactcatctgtggtccctgcttctcctccctccctgaacaccttggctctgttcccaagcagctggacttccagagacatggctcagatcctggatttgcagggagttggggccactgaactccaagataaagacaccatgaggggactgaaggtgggcaaggtgagagttaaggatcttggggaggtggccgggtgcagtggctcgcctgtaatcccagcactttgggaggccgaggcgggcggatcaga

SEQ ID NO: 168199 - DNA, 2928 bp, Homo sapiens
  Payload ID: 13093
  Gene Symbol: KCNH6
  Gene Name: potassium channel, voltage gated eag related subfamily H, member 6
  Uniprot ID: Q9H252
  ENST ID: ENST00000456941
  CDS Start-End: 81-2798
acgctgctgagcccgaggacagacggagacgccgggagccagtggcgcctgtggctccgggcaggggccgcggccgaaagatgccggtccgcaggggccacgtcgctccccaaaacacttacctggacaccatcatccgcaagttcgagggccaaagtcggaagttcctgattgccaatgctcagatggagaactgcgccatcatttactgcaacgacggcttctgcgaactcttcggctactcccgagtggaggtgatgcagcaaccctgcacctgcgacttcctcacaggccccaacacaccaagcagcgccgtgtcccgcctagcgcaggccctgctgggggctgaggagtgcaaggtggacatcctctactaccgcaaggatgcctccagcttccgctgcctggtagatgtggtgcccgtgaagaacgaggacggggctgtcatcatgttcattctcaacttcgaggacctggcccagctcctggccaagtgcagcagccgcagcttgtcccagcgcctgttgtcccagagcttcctgggctccgagggctctcatggcaggccaggcggaccagggccaggcacaggcaggggcaagtacaggaccatcagccagatcccacagttcacgctcaacttcgtggagttcaacttggagaagcaccgctccagctccaccacggagattgagatcatcgcgccccataaggtggtggagcggacacagaacgtcactgagaaggtcacccaggtcctgtccctgggcgcggatgtgctgccggagtacaagctgcaggcgccgcgcatccaccgctggaccatcctgcactacagccccttcaaggccgtgtgggactggctcatcctgctgctggtcatctacacggctgtcttcacgccctactcagccgccttcctgctcagcgatcaggacgaatcacggcgtggggcctgcagctatacctgcagtcccctcactgtggtggatctcatcgtggacatcatgttcgtcgtggacatcgtcatcaacttccgcaccacctatgtcaacaccaatgatgaggtggtcagccacccccgccgcatcgccgtccactacttcaagggctggttcctcattgacatggtggccgccatccctttcgacctcctgatcttccgcactggctccgatgagaccacaaccctgattgggctattgaagacagcgcggctgctgcggctggtgcgcgtagcacggaagctggaccgctactctgagtatggggcggctgtgctcttcttgctcatgtgcaccttcgcgctcatagcgcactggctggcctgcatctgcagcctcaccagcgtgggcttcggcaatgtctcgcccaacaccaactccgagaaggtcttctccatctgcgtcatgctcatcggctccctgatgtacgccagcatcttcgggaacgtgtccgcgatcatccagcgcctgtactcgggcaccgcgcgctaccacacgcagatgctgcgtgtcaaggagttcatccgcttccaccagatccccaacccactgcgccagcgcctggaggagtatttccagcacgcctggtcctacaccaatggcattgacatgaacgcggtgctgaagggcttccccgagtgcctgcaggctgacatctgcctgcacctgcaccgcgcactgctgcagcactgcccagctttcagcggcgccggcaagggctgcctgcgcgcgctagccgtcaagttcaagaccacccacgcgccgcctggggacacgctggtgcacctcggcgacgtgctctccaccctctacttcatctcccgaggctccatcgagatcctgcgcgacgacgtggtcgtggccatcctaggaaagaatgacatctttggggaacccgtcagcctccatgcccagccaggcaagtccagtgcagacgtgcgggctctgacctactgcgacctgcacaagatccagcgggcagatctgctggaggtgctggacatgtacccggcctttgcggagagcttctggagtaagctggaggtcaccttcaacctgcgggacgcagccgggggtctccactcatccccccgacaggctcctggcagccaagaccaccaaggtttctttctcagtgacaaccagtcagatgcagcccctcccctgagcatctcagatgcatctggcctctggcctgagctactgcaggaaatgcccccaaggcacagcccccaaagccctcaggaagacccagattgctggcctctgaagctgggctccaggctagagcagctccaggcccagatgaacaggctggagtcccgcgtgtcctcagacctcagccgcatcttgcagctcctccagaagcccatgccccagggccacgccagctacattctggaagcccctgcctccaatgacctggccttggttcctatagcctcggagacgacgagtccagggcccaggctgccccagggctttctgcctcctgcacagaccccaagctatggagacttggatgactgtagtccaaagcacaggaactcctcccccaggatgcctcacctggctgtggcaacggacaaaactctggcaccatcctcagaacaggaacagcctgaggggctctggccacccctagcctcacctctacatcccctggaagtacaaggactcatctgtggtccctgcttctcctccctccctgaacaccttggctctgttcccaagcagctggacttccagagacatggctcagatcctggatttgcagggagttggggccactgaactccaagataaagacaccatgaggggactgaaggtgggcaaggtgagagttaaggatcttggggaggtggccgggtgcagtggctcgcctgtaatcccagcactttgggaggccgaggcgggcggatca

SEQ ID NO: 168200 - DNA, 2973 bp, Homo sapiens
  Payload ID: 13093
  Gene Symbol: KCNH6
  Gene Name: potassium channel, voltage gated eag related subfamily H, member 6
  ENST ID: ENST00000583465
  CDS Start-End: 56-253
gagacgccgggagccagtggcgcctgtggctccgggcaggggccgcggccgaaagatgccggtccgcaggggccacgtcgctccccaaaacacttacctggacaccatcatccgcaagttcgagggccaaagtcggaagttcctgattgccaatgctcagatggagaactgcgccatcatttactgcaacgacggcttctgcgaactcttcggctactcccgagtggagcctccagcttccgctgcctggtagatgtggtgcccgtgaagaacgaggacggggctgtcatcatgttcattctcaacttcgaggacctggcccagctcctggccaagtgcagcagccgcagcttgtcccagcgcctgttgtcccagagcttcctgggctccgagggctctcatggcaggccaggcggaccagggccaggcacaggcaggggcaagtacaggaccatcagccagatcccacagttcacgctcaacttcgtggagttcaacttggagaagcaccgctccagctccaccacggagattgagatcatcgcgccccataaggtggtggagcggacacagaacgtcactgagaaggtcacccaggtcctgtccctgggcgcggatgtgctgccggagtacaagctgcaggcgccgcgcatccaccgctggaccatcctgcactacagccccttcaaggccgtgtgggactggctcatcctgctgctggtcatctacacggctgtcttcacgccctactcagccgccttcctgctcagcgatcaggacgaatcacggcgtggggcctgcagctatacctgcagtcccctcactgtggtggatctcatcgtggacatcatgttcgtcgtggacatcgtcatcaacttccgcaccacctatgtcaacaccaatgatgaggtggtcagccacccccgccgcatcgccgtccactacttcaagggctggttcctcattgacatggtggccgccatccctttcgacctcctgatcttccgcactggctccgatgagaccacaaccctgattgggctattgaagacagcgcggctgctgcggctggtgcgcgtagcacggaagctggaccgctactctgagtatggggcggctgtgctcttcttgctcatgtgcaccttcgcgctcatagcgcactggctggcctgcatctggtacgccatcggcaatgtggagcggccctacctagaacacaagatcggctggctggacagcctgggtgtgcagcttggcaagcgctacaacggcagcgacccagcctcgggcccctcggtgcaggacaagtatgtcacagccctctacttcaccttcagcagcctcaccagcgtgggcttcggcaatgtctcgcccaacaccaactccgagaaggtcttctccatctgcgtcatgctcatcggctccctgatgtacgccagcatcttcgggaacgtgtccgcgatcatccagcgcctgtactcgggcaccgcgcgctaccacacgcagatgctgcgtgtcaaggagttcatccgcttccaccagatccccaacccactgcgccagcgcctggaggagtatttccagcacgcctggtcctacaccaatggcattgacatgaacgcggtgctgaagggcttccccgagtgcctgcaggctgacatctgcctgcacctgcaccgcgcactgctgcagcactgcccagctttcagcggcgccggcaagggctgcctgcgcgcgctagccgtcaagttcaagaccacccacgcgccgcctggggacacgctggtgcacctcggcgacgtgctctccaccctctacttcatctcccgaggctccatcgagatcctgcgcgacgacgtggtcgtggccatcctaggaaagaatgacatctttggggaacccgtcagcctccatgcccagccaggcaagtccagtgcagacgtgcgggctctgacctactgcgacctgcacaagatccagcgggcagatctgctggaggtgctggacatgtacccggcctttgcggagagcttctggagtaagctggaggtcaccttcaacctgcgggacgcagccgggggtctccactcatccccccgacaggctcctggcagccaagaccaccaaggtttctttctcagtgacaaccagtcagatgcagcccctcccctgagcatctcagatgcatctggcctctggcctgagctactgcaggaaatgcccccaaggcacagcccccaaagccctcaggaagacccagattgctggcctctgaagctgggctccaggctagagcagctccaggcccagatgaacaggctggagtcccgcgtgtcctcagacctcagccgcatcttgcagctcctccagaagcccatgccccagggccacgccagctacattctggaagcccctgcctccaatgacctggccttggttcctatagcctcggagacgacgagtccagggcccaggctgccccagggctttctgcctcctgcacagaccccaagctatggagacttggatgactgtagtccaaagcacaggaactcctcccccaggatgcctcacctggctgtggcaacggacaaaactctggcaccatcctcagaacaggaacagcctgaggggctctggccacccctagcctcacctctacatcccctggaagtacaaggactcatctgtggtccctgcttctcctccctccctgaacaccttggctctgttcccaagcagctggacttccagagacatggctcagatcctggatttgcagggagttggggccactgaactccaagataaagacaccatgaggggactgaaggtgggcaaggtgagagttaaggatcttggggaggtggccgggtgcagtggctcgcctgtaatcccagcactttgggaggccgaggcgggcggatcagaccatcctggctaacacggtgaaaccccacctctactaaaatt

SEQ ID NO: 168201 - DNA, 3821 bp, Homo sapiens
  Payload ID: 13093
  Gene Symbol: KCNH6
  Gene Name: potassium channel, voltage gated eag related subfamily H, member 6
  Uniprot ID: Q9H252
  ENST ID: ENST00000583023
  CDS Start-End: 12-2996
gcggccgaaagatgccggtccgcaggggccacgtcgctccccaaaacacttacctggacaccatcatccgcaagttcgagggccaaagtcggaagttcctgattgccaatgctcagatggagaactgcgccatcatttactgcaacgacggcttctgcgaactcttcggctactcccgagtggaggtgatgcagcaaccctgcacctgcgacttcctcacaggccccaacacaccaagcagcgccgtgtcccgcctagcgcaggccctgctgggggctgaggagtgcaaggtggacatcctctactaccgcaaggatgcctccagcttccgctgcctggtagatgtggtgcccgtgaagaacgaggacggggctgtcatcatgttcattctcaacttcgaggacctggcccagctcctggccaagtgcagcagccgcagcttgtcccagcgcctgttgtcccagagcttcctgggctccgagggctctcatggcaggccaggcggaccagggccaggcacaggcaggggcaagtacaggaccatcagccagatcccacagttcacgctcaacttcgtggagttcaacttggagaagcaccgctccagctccaccacggagattgagatcatcgcgccccataaggtggtggagcggacacagaacgtcactgagaaggtcacccaggtcctgtccctgggcgcggatgtgctgccggagtacaagctgcaggcgccgcgcatccaccgctggaccatcctgcactacagccccttcaaggccgtgtgggactggctcatcctgctgctggtcatctacacggctgtcttcacgccctactcagccgccttcctgctcagcgatcaggacgaatcacggcgtggggcctgcagctatacctgcagtcccctcactgtggtggatctcatcgtggacatcatgttcgtcgtggacatcgtcatcaacttccgcaccacctatgtcaacaccaatgatgaggtggtcagccacccccgccgcatcgccgtccactacttcaagggctggttcctcattgacatggtggccgccatccctttcgacctcctgatcttccgcactggctccgatgagaccacaaccctgattgggctattgaagacagcgcggctgctgcggctggtgcgcgtagcacggaagctggaccgctactctgagtatggggcggctgtgctcttcttgctcatgtgcaccttcgcgctcatagcgcactggctggcctgcatctggtacgccatcggcaatgtggagcggccctacctagaacacaagatcggctggctggacagcctgggtgtgcagcttggcaagcgctacaacggcagcgacccagcctcgggcccctcggtgcaggacaagtatgtcacagccctctacttcaccttcagcagcctcaccagcgtgggcttcggcaatgtctcgcccaacaccaactccgagaaggtcttctccatctgcgtcatgctcatcggctccctgatgtacgccagcatcttcgggaacgtgtccgcgatcatccagcgcctgtactcgggcaccgcgcgctaccacacgcagatgctgcgtgtcaaggagttcatccgcttccaccagatccccaacccactgcgccagcgcctggaggagtatttccagcacgcctggtcctacaccaatggcattgacatgaacgcggtgctgaagggcttccccgagtgcctgcaggctgacatctgcctgcacctgcaccgcgcactgctgcagcactgcccagctttcagcggcgccggcaagggctgcctgcgcgcgctagccgtcaagttcaagaccacccacgcgccgcctggggacacgctggtgcacctcggcgacgtgctctccaccctctacttcatctcccgaggctccatcgagatcctgcgcgacgacgtggtcgtggccatcctaggaaagaatgacatctttggggaacccgtcagcctccatgcccagccaggcaagtccagtgcagacgtgcgggctctgacctactgcgacctgcacaagatccagcgggcagatctgctggaggtgctggacatgtacccggcctttgcggagagcttctggagtaagctggaggtcaccttcaacctgcgggacgcagccgggggtctccactcatccccccgacaggctcctggcagccaagaccaccaaggtttctttctcagtgacaaccagtcagggtctccccatgagctggggccccagttcccctctaagggctacagcctcctgggtcctgggagccagaactccatgggggcaggaccttgtgctccagggcacccagatgcagcccctcccctgagcatctcagatgcatctggcctctggcctgagctactgcaggaaatgcccccaaggcacagcccccaaagccctcaggaagacccagattgctggcctctgaagctgggctccaggctagagcagctccaggcccagatgaacaggctggagtcccgcgtgtcctcagacctcagccgcatcttgcagctcctccagaagcccatgccccagggccacgccagctacattctggaagcccctgcctccaatgacctggccttggttcctatagcctcggagacgacgagtccagggcccaggctgccccagggctttctgcctcctgcacagaccccaagctatggagacttggatgactgtagtccaaagcacaggaactcctcccccaggatgcctcacctggctgtggcaacggacaaaactctggcaccatcctcagaacaggaacagcctgaggggctctggccacccctagcctcacctctacatcccctggaagtacaaggactcatctgtggtccctgcttctcctccctccctgaacaccttggctctgttcccaagcagctggacttccagagacatggctcagatcctggatttgcagggagttggggccactgaactccaagataaagacaccatgaggggactgaaggtgggcaaggtgagagttaaggatcttggggaggtggccgggtgcagtggctcgcctgtaatcccagcactttgggaggccgaggcgggcggatcagaccatcctggctaacacggtgaaaccccacctctactaaaattaaaaaagaaaaaaaatagccgggcgtggtggcaggcgcctgtaatcccagctactggggaggctgaggcaggagaatggcatgaacccgggaggtggaggttgcagggagccgaggccgcaccactgcactccagcctgggtgacagagtgagactccaactcaaaaaaaaaaaaaaaaaagatcttggggaggcagacagccccccagatgggcctctcctaaagtagctacaaactgctgatccaggtgacccaggatggcgtgggtgaagaagctcacgacttttcccagcctcctccagggctccatttaaacagcaagcctggtgcagggtgggagagtctcaggtgtggaggcagcttacaggattgagggggcagtgaagaaagaggtttctgatctacatgagtaccttgctctgagcctcccagctcagaaccctccagcacctcatggctcagcaccaaggcccggggttggtcagaactcttaccatgagcctctgacctggctggagatggaggtatgttctgtggcagacatgtcaggacagtcctccagccctctgctcctgatggttctgtgacattgggtctcttgagggcagtggagtgtcacacagctaataaagtacacatttcatgttgga

SEQ ID NO: 168202 - DNA, 3017 bp, Homo sapiens
  Payload ID: 13093
  Gene Symbol: KCNH6
  Gene Name: potassium channel, voltage gated eag related subfamily H, member 6
  Uniprot ID: Q9H252
  ENST ID: ENST00000581784
  CDS Start-End: 81-2798
acgctgctgagcccgaggacagacggagacgccgggagccagtggcgcctgtggctccgggcaggggccgcggccgaaagatgccggtccgcaggggccacgtcgctccccaaaacacttacctggacaccatcatccgcaagttcgagggccaaagtcggaagttcctgattgccaatgctcagatggagaactgcgccatcatttactgcaacgacggcttctgcgaactcttcggctactcccgagtggaggtgatgcagcaaccctgcacctgcgacttcctcacaggccccaacacaccaagcagcgccgtgtcccgcctagcgcaggccctgctgggggctgaggagtgcaaggtggacatcctctactaccgcaaggatgcctccagcttccgctgcctggtagatgtggtgcccgtgaagaacgaggacggggctgtcatcatgttcattctcaacttcgaggacctggcccagctcctggccaagtgcagcagccgcagcttgtcccagcgcctgttgtcccagagcttcctgggctccgagggctctcatggcaggccaggcggaccagggccaggcacaggcaggggcaagtacaggaccatcagccagatcccacagttcacgctcaacttcgtggagttcaacttggagaagcaccgctccagctccaccacggagattgagatcatcgcgccccataaggtggtggagcggacacagaacgtcactgagaaggtcacccaggtcctgtccctgggcgcggatgtgctgccggagtacaagctgcaggcgccgcgcatccaccgctggaccatcctgcactacagccccttcaaggccgtgtgggactggctcatcctgctgctggtcatctacacggctgtcttcacgccctactcagccgccttcctgctcagcgatcaggacgaatcacggcgtggggcctgcagctatacctgcagtcccctcactgtggtggatctcatcgtggacatcatgttcgtcgtggacatcgtcatcaacttccgcaccacctatgtcaacaccaatgatgaggtggtcagccacccccgccgcatcgccgtccactacttcaagggctggttcctcattgacatggtggccgccatccctttcgacctcctgatcttccgcactggctccgatgagaccacaaccctgattgggctattgaagacagcgcggctgctgcggctggtgcgcgtagcacggaagctggaccgctactctgagtatggggcggctgtgctcttcttgctcatgtgcaccttcgcgctcatagcgcactggctggcctgcatctgcagcctcaccagcgtgggcttcggcaatgtctcgcccaacaccaactccgagaaggtcttctccatctgcgtcatgctcatcggctccctgatgtacgccagcatcttcgggaacgtgtccgcgatcatccagcgcctgtactcgggcaccgcgcgctaccacacgcagatgctgcgtgtcaaggagttcatccgcttccaccagatccccaacccactgcgccagcgcctggaggagtatttccagcacgcctggtcctacaccaatggcattgacatgaacgcggtgctgaagggcttccccgagtgcctgcaggctgacatctgcctgcacctgcaccgcgcactgctgcagcactgcccagctttcagcggcgccggcaagggctgcctgcgcgcgctagccgtcaagttcaagaccacccacgcgccgcctggggacacgctggtgcacctcggcgacgtgctctccaccctctacttcatctcccgaggctccatcgagatcctgcgcgacgacgtggtcgtggccatcctaggaaagaatgacatctttggggaacccgtcagcctccatgcccagccaggcaagtccagtgcagacgtgcgggctctgacctactgcgacctgcacaagatccagcgggcagatctgctggaggtgctggacatgtacccggcctttgcggagagcttctggagtaagctggaggtcaccttcaacctgcgggacgcagccgggggtctccactcatccccccgacaggctcctggcagccaagaccaccaaggtttctttctcagtgacaaccagtcagatgcagcccctcccctgagcatctcagatgcatctggcctctggcctgagctactgcaggaaatgcccccaaggcacagcccccaaagccctcaggaagacccagattgctggcctctgaagctgggctccaggctagagcagctccaggcccagatgaacaggctggagtcccgcgtgtcctcagacctcagccgcatcttgcagctcctccagaagcccatgccccagggccacgccagctacattctggaagcccctgcctccaatgacctggccttggttcctatagcctcggagacgacgagtccagggcccaggctgccccagggctttctgcctcctgcacagaccccaagctatggagacttggatgactgtagtccaaagcacaggaactcctcccccaggatgcctcacctggctgtggcaacggacaaaactctggcaccatcctcagaacaggaacagcctgaggggctctggccacccctagcctcacctctacatcccctggaagtacaaggactcatctgtggtccctgcttctcctccctccctgaacaccttggctctgttcccaagcagctggacttccagagacatggctcagatcctggatttgcagggagttggggccactgaactccaagataaagacaccatgaggggactgaaggtgggcaaggggatttcctttagctgggcatggtggcgggcgcctgtaatcccagctactcaggaggctgaagcaagagaatcacttgaaccctaaaggcagaggttgcagtgagccgagatagtgccactgcactacagcccgggcgacagagtgagactccatctcaaaaataaaataaaatt

SEQ ID NO: 168203 - DNA, 1703 bp, Homo sapiens
  Payload ID: 13093
  Gene Symbol: KCNH6
  Gene Name: potassium channel, voltage gated eag related subfamily H, member 6
  Uniprot ID: Q9H252
  ENST ID: ENST00000580652
  CDS Start-End: 58-1566
cggagacgccgggagccagtggcgcctgtggctccgggcaggggccgcggccgaaagatgccggtccgcaggggccacgtcgctccccaaaacacttacctggacaccatcatccgcaagttcgagggccaaagtcggaagttcctgattgccaatgctcagatggagaactgcgccatcatttactgcaacgacggcttctgcgaactcttcggctactcccgagtggaggtgatgcagcaaccctgcacctgcgacttcctcacaggccccaacacaccaagcagcgccgtgtcccgcctagcgcaggccctgctgggggctgaggagtgcaaggtggacatcctctactaccgcaaggatgcctccagcttccgctgcctggtagatgtggtgcccgtgaagaacgaggacggggctgtcatcatgttcattctcaacttcgaggacctggcccagctcctggccaagtgcagcagccgcagcttgtcccagcgcctgttgtcccagagcttcctgggctccgagggctctcatggcaggccaggcggaccagggccaggcacaggcaggggcaagtacaggaccatcagccagatcccacagttcacgctcaacttcgtggagttcaacttggagaagcaccgctccagctccaccacggagattgagatcatcgcgccccataaggtggtggagcggacacagaacgtcactgagaaggtcacccaggtcctgtccctgggcgcggatgtgctgccggagtacaagctgcaggcgccgcgcatccaccgctggaccatcctgcactacagccccttcaaggccgtgtgggactggctcatcctgctgctggtcatctacacggctgtcttcacgccctactcagccgccttcctgctcagcgatcaggacgaatcacggcgtggggcctgcagctatacctgcagtcccctcactgtggtggatctcatcgtggacatcatgttcgtcgtggacatcgtcatcaacttccgcaccacctatgtcaacaccaatgatgaggtggtcagccacccccgccgcatcgccgtccactacttcaagggctggttcctcattgacatggtggccgccatccctttcgacctcctgatcttccgcactggctccgatgagaccacaaccctgattgggctattgaagacagcgcggctgctgcggctggtgcgcgtagcacggaagctggaccgctactctgagtatggggcggctgtgctcttcttgctcatgtgcaccttcgcgctcatagcgcactggctggcctgcatctggtacgccatcggcaatgtggagcggccctacctagaacacaagatcggctggctggacagcctgggtgtgcagcttggcaagcgctacaacggcagcgacccagcctcgggcccctcggtgcaggacaagtatgtcacagccctctacttcaccttcagcagcctcaccagcgtgggcttcggcaatgtctcgcccaacaccaactccgagaaggtcttctccatctgcgtcatgctcatcggctgtgagtgagacctcatgccacggcctaacttcatgctctggtcttacccgtgaaattttatgtgtagttttgtactgagatagaacataacacatagcaacaattcatgcagtacactgatcctaagtgtgcagcacaatgaatt

SEQ ID NO: 168204 - DNA, 4113 bp, Homo sapiens
  Payload ID: 13094
  Gene Symbol: KCNH7
  Gene Name: potassium channel, voltage gated eag related subfamily H, member 7
  Uniprot ID: Q9NS40
  ENST ID: ENST00000332142
  CDS Start-End: 101-3691
caaagagcggctcgcgcgctggcctgggctctagccgaggagagatcccgggagaactccagagctccgggggagcgctcctcggaagaccggggccaacatgcctgtgcgcagggggcatgtggcaccacaaaatacatttctggggaccatcattcggaaatttgaagggcaaaataaaaaatttatcattgcaaatgccagagtgcagaactgtgccatcatttattgcaacgatgggttctgtgagatgactggtttctccaggccagatgtcatgcaaaagccatgcacctgcgactttctccatggacccgagaccaagaggcatgatattgcccaaattgcccaggcattgctggggtcagaagagaggaaagtggaggtcacctactatcacaaaaatgggtccacttttatttgtaacactcacataattccagtgaaaaaccaagagggcgtggctatgatgttcatcattaattttgaatatgtgacggataatgaaaacgctgccaccccagagagggtaaacccaatattaccaatcaaaactgtaaaccggaaattttttgggttcaaattccctggtctgagagttctcacttacagaaagcagtccttaccacaagaagaccccgatgtggtggtcatcgattcatctaaacacagtgatgattcagtagccatgaagcattttaagtctcctacaaaagaaagctgcagcccctctgaagcagatgacacaaaagctttgatacagcccagcaaatgttctcccttggtgaatatatccggacctcttgaccattcctctcccaaaaggcaatgggaccgactctaccctgacatgctgcagtcaagttcccagctgtcccattccagatcaagggaaagcttatgtagtatacggagagcatcttcggtccatgatatagaaggattcggcgtccaccccaagaacatatttagagaccgacatgccagcgaagacaatggtcgcaatgtcaaagggccttttaatcatatcaagtcaagcctcctgggatccacatcagattcaaacctcaacaaatacagcaccattaacaagattccacagctcactctgaatttttcagaggtcaaaactgagaaaaagaattcatcacctccttcttcagataaaaccattattgcacccaaggttaaagatcgaacacacaatgtgactgagaaagtgacccaggttctctctttaggagcagatgtcctacctgaatacaaactgcagacaccacgcatcaacaagtttacgatattgcactacagccctttcaaggcagtctgggactggcttatcctgctgttggtcatatacactgctatatttactccctactctgcagccttcctcctcaatgacagagaagaacagaaaagacgagaatgtggctattcttgtagccctttgaatgtggtagacttgattgtggatattatgtttatcatagatattttaataaacttcagaacaacatatgtaaatcagaatgaagaagtggtaagtgatcccgccaaaatagcaatacactacttcaaaggctggttcctgattgacatggttgcagcaattccttttgacttgctgatttttggatcaggttctgatgagacaacaacattaattggtcttttgaagactgcccgactcctccgtcttgtgcgcgtggccaggaaactggatcgatattcagaatatggcgctgctgttctaatgctcttaatgtgcatctttgccctgattgctcactggctggcttgcatttggtatgcgattgggaatgtagaaaggccttacctgactgacaaaatcggatggttggattccttaggacagcaaattgggaaacgttacaatgacagtgactcaagttctggaccatccattaaagacaaatacgtcacagcactttattttaccttcagcagtttaaccagtgtaggattcgggaatgtgtctcctaacacgaattcggagaaaatcttttcaatttgtgtcatgttgattggctcactaatgtatgcaagcatttttgggaatgtatctgcaattatccaaagactatactcgggaactgccaggtaccacatgcagatgctgcgagtaaaagagttcattcgctttcaccaaatccccaaccctctgaggcaacgtcttgaagaatatttccagcacgcatggacttacaccaatggcattgacatgaacatggtcctaaagggtttcccagaatgcttacaagcagacatttgtctacatctcaaccagacattgctgcaaaactgcaaagcctttcggggggcaagtaaaggttgccttagagctttggcaatgaagttcaaaaccacccatgcacctccaggagacaccctcgttcactgtggggatgtcctcactgcactttatttcttatccagaggctccattgaaattctcaaagatgacattgtggtggctattctgggaaaaaatgatatatttggagaaatggttcatctttatgccaaacctggaaagtctaatgcagatgtaagagccctcacatactgtgacttgcataagattcagcgagaagacttgttagaggttttggatatgtatcctgagttttctgatcactttctaacaaacctagagttgactttcaacctaaggcatgagagcgcaaaggctgatctcctacgatcacaatccatgaatgattcagaaggagacaactgtaaactaagaagaaggaaattgtcatttgaaagtgaaggagagaaagaaaacagtacaaatgatcctgaagactctgcagataccataagacattatcagagttccaagagacactttgaagagaaaaaaagcagatcctcatctttcatctcctccattgatgatgaacaaaagccgctcttctcaggaatagtagactcttctccaggaatagggaaagcatctgggctcgattttgaagaaacagtgcccacctcaggaagaatgcacatagataaaagaagtcactcttgcaaagatatcactgacatgcgaagctgggaacgagaaaatgcacatccccagcctgaagactccagtccatctgcacttcagcgagctgcctggggtatctctgaaaccgaaagcgacctcacctacggggaagtggaacaaagattagatctgctccaggagcaacttaacaggcttgaatcccaaatgaccactgacatccagaccatcttacagttgctgcagaaacaaaccactgtggtccccccagcctacagtatggtaacagcaggatcagaatatcagagacccatcatccagctgatgagaaccagtcaaccggaagcatccatcaaaactgaccgaagtttcagcccttcctcacaatgtcctgaatttctagaccttgaaaaatctaaacttaaatccaaagaatccctttcaagtggggtgcatctgaacacagcttcagaagacaacttgacttcacttttaaaacaagacagtgatctctctttagagcttcacctgcggcaaagaaaaacttacgttcatccaattaggcatccttctttgccagattcatccctaagcactgtaggaatcgtgggtcttcataggcatgtttctgatcctggtcttccagggaaataatcattttgtactatttactccacatacaatgtaagtgcttttaatggctgttttcctttttctatttaaatcctctctacttgactcaggggctcacaaggtaccattatatgcaaaagtactgtatattttcctaaattgaagcttgtaaggtaaaactgagcagttaggatgtaaatatacataagaacttttggttccaaatgttaaaactgccagcatctcacggcaccttattttttatttttattttttaaatcacatgcatgttaggaaactccaatttctcttgcatggagactcctatttactgcttttactaaaccagtacttcgttatgaaaatgccttccacgcaaataagaaaccaagggataaaactgttcatggatgcaactcaaattcagatgatcctcaactcat

SEQ ID NO: 168205 - DNA, 2434 bp, Homo sapiens
  Payload ID: 13094
  Gene Symbol: KCNH7
  Gene Name: potassium channel, voltage gated eag related subfamily H, member 7
  Uniprot ID: Q9NS40
  ENST ID: ENST00000328032
  CDS Start-End: 213-2411
ggccccctccggaaggtgaggggaatggattggactccggtggggaaagcgggtgtctagaagtggtgctaatgggaagagaattctggtttcaaaagaggatgctctgccacaaagagcggctcgcgcgctggcctgggctctagccgaggagagatcccgggagaactccagagctccgggggagcgctcctcggaagaccggggccaacatgcctgtgcgcagggggcatgtggcaccacaaaatacatttctggggaccatcattcggaaatttgaagggcaaaataaaaaatttatcattgcaaatgccagagtgcagaactgtgccatcatttattgcaacgatgggttctgtgagatgactggtttctccaggccagatgtcatgcaaaagccatgcacctgcgactttctccatggacccgagaccaagaggcatgatattgcccaaattgcccaggcattgctggggtcagaagagaggaaagtggaggtcacctactatcacaaaaatgggtccacttttatttgtaacactcacataattccagtgaaaaaccaagagggcgtggctatgatgttcatcattaattttgaatatgtgacggataatgaaaacgctgccaccccagagagggtaaacccaatattaccaatcaaaactgtaaaccggaaattttttgggttcaaattccctggtctgagagttctcacttacagaaagcagtccttaccacaagaagaccccgatgtggtggtcatcgattcatctaaacacagtgatgattcagtagccatgaagcattttaagtctcctacaaaagaaagctgcagcccctctgaagcagatgacacaaaagctttgatacagcccagcaaatgttctcccttggtgaatatatccggacctcttgaccattcctctcccaaaaggcaatgggaccgactctaccctgacatgctgcagtcaagttcccagctgtcccattccagatcaagggaaagcttatgtagtatacggagagcatcttcggtccatgatatagaaggattcggcgtccaccccaagaacatatttagagaccgacatgccagcgaagggccttttaatcatatcaagtcaagcctcctgggatccacatcagattcaaacctcaacaaatacagcaccattaacaagattccacagctcactctgaatttttcagaggtcaaaactgagaaaaagaattcatcacctccttcttcagataaaaccattattgcacccaaggttaaagatcgaacacacaatgtgactgagaaagtgacccaggttctctctttaggagcagatgtcctacctgaatacaaactgcagacaccacgcatcaacaagtttacgatattgcactacagccctttcaaggcagtctgggactggcttatcctgctgttggtcatatacactgctatatttactccctactctgcagccttcctcctcaatgacagagaagaacagaaaagacgagaatgtggctattcttgtagccctttgaatgtggtagacttgattgtggatattatgtttatcatagatattttaataaacttcagaacaacatatgtaaatcagaatgaagaagtggtaagtgatcccgccaaaatagcaatacactacttcaaaggctggttcctgattgacatggttgcagcaattccttttgacttgctgatttttggatcaggttctgatgagacaacaacattaattggtcttttgaagactgcccgactcctccgtcttgtgcgcgtggccaggaaactggatcgatattcagaatatggcgctgctgttctaatgctcttaatgtgcatctttgccctgattgctcactggctggcttgcatttggtatgcgattgggaatgtagaaaggccttacctgactgacaaaatcggatggttggattccttaggacagcaaattgggaaacgttacaatgacagtgactcaagttctggaccatccattaaagacaaatacgtcacagcactttattttaccttcagcagtttaaccagtgtaggattcgggaatgtgtctcctaacacgaattcggagaaaatcttttcaatttgtgtcatgttgattggctcactaatgtatgcaagcatttttgggaatgtatctgcaattatccaaagactatactcgggaactgccaggtaccacatgcagatgctgcgagtaaaagagttcattcgctttcaccaaatccccaaccctctgaggcaacgtcttgaagaatatttccagcacgcatggacttacaccaatggcattgacatgaacatggtatgtatgtctgttttccaaaatgaaagtgccgcaggcattatagtgatagccaaaatggaataaaagccggaatcaccagctttgaa

SEQ ID NO: 168206 - DNA, 3713 bp, Homo sapiens
  Payload ID: 13094
  Gene Symbol: KCNH7
  Gene Name: potassium channel, voltage gated eag related subfamily H, member 7
  ENST ID: ENST00000618399
  CDS Start-End: 1-3291
aaaaataggtccacttttatttgtaacactcacataattccagtgaaaaaccaagagggcgtggctatgatgttcatcattaattttgaatatgtgacggataatgaaaacgctgccaccccagagagggtaaacccaatattaccaatcaaaactgtaaaccggaaattttttgggttcaaattccctggtctgagagttctcacttacagaaagcagtccttaccacaagaagaccccgatgtggtggtcatcgattcatctaaacacagtgatgattcagtagccatgaagcattttaagtctcctacaaaagaaagctgcagcccctctgaagcagatgacacaaaagctttgatacagcccagcaaatgttctcccttggtgaatatatccggacctcttgaccattcctctcccaaaaggcaatgggaccgactctaccctgacatgctgcagtcaagttcccagctgtcccattccagatcaagggaaagcttatgtagtatacggagagcatcttcggtccatgatatagaaggattcggcgtccaccccaagaacatatttagagaccgacatgccagcgaagacaatggtcgcaatgtcaaagggccttttaatcatatcaagtcaagcctcctgggatccacatcagattcaaacctcaacaaatacagcaccattaacaagattccacagctcactctgaatttttcagaggtcaaaactgagaaaaagaattcatcacctccttcttcagataaaaccattattgcacccaaggttaaagatcgaacacacaatgtgactgagaaagtgacccaggttctctctttaggagcagatgtcctacctgaatacaaactgcagacaccacgcatcaacaagtttacgatattgcactacagccctttcaaggcagtctgggactggcttatcctgctgttggtcatatacactgctatatttactccctactctgcagccttcctcctcaatgacagagaagaacagaaaagacgagaatgtggctattcttgtagccctttgaatgtggtagacttgattgtggatattatgtttatcatagatattttaataaacttcagaacaacatatgtaaatcagaatgaagaagtggtaagtgatcccgccaaaatagcaatacactacttcaaaggctggttcctgattgacatggttgcagcaattccttttgacttgctgatttttggatcaggttctgatgagacaacaacattaattggtcttttgaagactgcccgactcctccgtcttgtgcgcgtggccaggaaactggatcgatattcagaatatggcgctgctgttctaatgctcttaatgtgcatctttgccctgattgctcactggctggcttgcatttggtatgcgattgggaatgtagaaaggccttacctgactgacaaaatcggatggttggattccttaggacagcaaattgggaaacgttacaatgacagtgactcaagttctggaccatccattaaagacaaatacgtcacagcactttattttaccttcagcagtttaaccagtgtaggattcgggaatgtgtctcctaacacgaattcggagaaaatcttttcaatttgtgtcatgttgattggctcactaatgtatgcaagcatttttgggaatgtatctgcaattatccaaagactatactcgggaactgccaggtaccacatgcagatgctgcgagtaaaagagttcattcgctttcaccaaatccccaaccctctgaggcaacgtcttgaagaatatttccagcacgcatggacttacaccaatggcattgacatgaacatggtcctaaagggtttcccagaatgcttacaagcagacatttgtctacatctcaaccagacattgctgcaaaactgcaaagcctttcggggggcaagtaaaggttgccttagagctttggcaatgaagttcaaaaccacccatgcacctccaggagacaccctcgttcactgtggggatgtcctcactgcactttatttcttatccagaggctccattgaaattctcaaagatgacattgtggtggctattctgggaaaaaatgatatatttggagaaatggttcatctttatgccaaacctggaaagtctaatgcagatgtaagagccctcacatactgtgacttgcataagattcagcgagaagacttgttagaggttttggatatgtatcctgagttttctgatcactttctaacaaacctagagttgactttcaacctaaggcatgagagcgcaaaggctgatctcctacgatcacaatccatgaatgattcagaaggagacaactgtaaactaagaagaaggaaattgtcatttgaaagtgaaggagagaaagaaaacagtacaaatgatcctgaagactctgcagataccataagacattatcagagttccaagagacactttgaagagaaaaaaagcagatcctcatctttcatctcctccattgatgatgaacaaaagccgctcttctcaggaatagtagactcttctccaggaatagggaaagcatctgggctcgattttgaagaaacagtgcccacctcaggaagaatgcacatagataaaagaagtcactcttgcaaagatatcactgacatgcgaagctgggaacgagaaaatgcacatccccagcctgaagactccagtccatctgcacttcagcgagctgcctggggtatctctgaaaccgaaagcgacctcacctacggggaagtggaacaaagattagatctgctccaggagcaacttaacaggcttgaatcccaaatgaccactgacatccagaccatcttacagttgctgcagaaacaaaccactgtggtccccccagcctacagtatggtaacagcaggatcagaatatcagagacccatcatccagctgatgagaaccagtcaaccggaagcatccatcaaaactgaccgaagtttcagcccttcctcacaatgtcctgaatttctagaccttgaaaaatctaaacttaaatccaaagaatccctttcaagtggggtgcatctgaacacagcttcagaagacaacttgacttcacttttaaaacaagacagtgatctctctttagagcttcacctgcggcaaagaaaaacttacgttcatccaattaggcatccttctttgccagattcatccctaagcactgtaggaatcgtgggtcttcataggcatgtttctgatcctggtcttccagggaaataatcattttgtactatttactccacatacaatgtaagtgcttttaatggctgttttcctttttctatttaaatcctctctacttgactcaggggctcacaaggtaccattatatgcaaaagtactgtatattttcctaaattgaagcttgtaaggtaaaactgagcagttaggatgtaaatatacataagaacttttggttccaaatgttaaaactgccagcatctcacggcaccttattttttatttttattttttaaatcacatgcatgttaggaaactccaatttctcttgcatggagactcctatttactgcttttactaaaccagtacttcgttatgaaaatgccttccacgcaaataagaaaccaagggataaaactgttcatggatgcaactcaaattcagatgatcctcaactcat

SEQ ID NO: 168207 - DNA, 1893 bp, Homo sapiens
  Payload ID: 13094
  Gene Symbol: KCNH7
  Gene Name: potassium channel, voltage gated eag related subfamily H, member 7
  ENST ID: ENST00000621889
  CDS Start-End: 1-1893
gggtccacttttatttgtaacactcacataattccagtgaaaaaccaagagggcgtggctatgatgttcatcattaattttgaatatgtgacggataatgaaaacgctgccaccccagagagggtaaacccaatattaccaatcaaaactgtaaaccggaaattttttgggttcaaattccctggtctgagagttctcacttacagaaagcagtccttaccacaagaagaccccgatgtggtggtcatcgattcatctaaacacagtgatgattcagtagccatgaagcattttaagtctcctacaaaagaaagctgcagcccctctgaagcagatgacacaaaagctttgatacagcccagcaaatgttctcccttggtgaatatatccggacctcttgaccattcctctcccaaaaggcaatgggaccgactctaccctgacatgctgcagtcaagttcccagctgtcccattccagatcaagggaaagcttatgtagtatacggagagcatcttcggtccatgatatagaaggattcggcgtccaccccaagaacatatttagagaccgacatgccagcgaagggccttttaatcatatcaagtcaagcctcctgggatccacatcagattcaaacctcaacaaatacagcaccattaacaagattccacagctcactctgaatttttcagaggtcaaaactgagaaaaagaattcatcacctccttcttcagataaaaccattattgcacccaaggttaaagatcgaacacacaatgtgactgagaaagtgacccaggttctctctttaggagcagatgtcctacctgaatacaaactgcagacaccacgcatcaacaagtttacgatattgcactacagccctttcaaggcagtctgggactggcttatcctgctgttggtcatatacactgctatatttactccctactctgcagccttcctcctcaatgacagagaagaacagaaaagacgagaatgtggctattcttgtagccctttgaatgtggtagacttgattgtggatattatgtttatcatagatattttaataaacttcagaacaacatatgtaaatcagaatgaagaagtggtaagtgatcccgccaaaatagcaatacactacttcaaaggctggttcctgattgacatggttgcagcaattccttttgacttgctgatttttggatcaggttctgatgagacaacaacattaattggtcttttgaagactgcccgactcctccgtcttgtgcgcgtggccaggaaactggatcgatattcagaatatggcgctgctgttctaatgctcttaatgtgcatctttgccctgattgctcactggctggcttgcatttggtatgcgattgggaatgtagaaaggccttacctgactgacaaaatcggatggttggattccttaggacagcaaattgggaaacgttacaatgacagtgactcaagttctggaccatccattaaagacaaatacgtcacagcactttattttaccttcagcagtttaaccagtgtaggattcgggaatgtgtctcctaacacgaattcggagaaaatcttttcaatttgtgtcatgttgattggctcactaatgtatgcaagcatttttgggaatgtatctgcaattatccaaagactatactcgggaactgccaggtaccacatgcagatgctgcgagtaaaagagttcattcgctttcaccaaatccccaaccctctgaggcaacgtcttgaagaatatttccagcacgcatggacttacaccaatggcattgacatgaacatggtatgtatgtctgttttccaaaatgaaagtgccgcaggcattatagtgatagccaaaatggaataa

SEQ ID NO: 168208 - DNA, 5137 bp, Homo sapiens
  Payload ID: 13095
  Gene Symbol: KCNH8
  Gene Name: potassium channel, voltage gated eag related subfamily H, member 8
  Uniprot ID: Q96L42
  ENST ID: ENST00000328405
  CDS Start-End: 267-3590
gggagagggagcctgcgccgggctgagcctggaggtgcggggcgggctcggggagcgctcttggggctcctcctgccacagccggggcggctggaactctctccctttctccctccatccttccacttcccctgctcggccccgccgtcaggccgggtcccccttccctgccgtcatcaggttccccttctcccttcttggcactttcctttcgaaccatccttctggacaaactttgatggagaatttcacaccacgctggaaaaatgccggttatgaaaggattactggcgccgcaaaacaccttcctggacaccatcgccacccgttttgacggaacacatagcaacttcatccttgccaatgcccaggtggctaagggtttccccatagtctactgttccgatggcttctgcgagcttgctggatttgcccgaactgaagtcatgcagaagagttgtagctgcaagttcttatttggggttgaaaccaatgagcaactgatgcttcaaatagaaaagtcactggaggagaaaacagaattcaaaggagaaattatgttctacaagaaaaacgggtctccattttggtgcctactggatattgttcccataaagaatgaaaaaggagatgtagtactttttctggcctcgttcaaagatataacagatacaaaagtgaagattactccagaagataaaaaagaagacaaagtcaaaggaagatcaagagcagggacccactttgactcagcccggagacggagtcgagcagtcctttatcacatctctgggcacctgcaaagaagagaaaagaacaaattgaaaataaataacaatgtttttgtagataaaccagcatttccggagtataaagtttctgatgcaaaaaagtccaaattcatacttctgcattttagcacttttaaagctggctgggactggcttattttgttggcaacgttttatgttgctgtgactgtaccttacaacgtttgctttattggcaatgacgacctgtccacaactcggagcacaaccgtcagtgacattgcagtggagattctttttattatagatattattttaaatttccgaacaacttatgtcagcaagtctggccaagttatctttgaagcaagatcaatttgcatccactatgtcacaacctggttcatcattgatttaatcgctgccctgccttttgatcttctgtatgctttcaacgtcacagtggtgtctctcgtgcatcttctaaagacagtgcgcctcttgcgtcttttgcgtctgctgcagaagttagaccgctattcccaacacagtactatcgtcctgactctgctcatgtccatgtttgcactccttgcacactggatggcgtgtatctggtacgtcattggaaaaatggagagggaagacaacagccttctgaagtgggaagttggttggcttcatgagttgggaaagagactggaatctccatactatggcaacaataccttggggggcccgtcgatccgaagtgcctatattgccgctctgtacttcacgctgagcagcctcaccagcgtgggttttgggaacgtctctgctaatacagatgcagaaaagatcttctccatctgcaccatgctgattggtgccttgatgcacgccttggtgtttggaaacgtgacagcaatcatacagaggatgtactccagatggtccctctatcacactagaactaaggatctgaaagatttcatccgtgtccatcacttgccccaacaactcaagcagaggatgctcgaatattttcaaacaacctggtcagtcaacaatggaatagattcaaatgagcttttgaaagactttccagatgaactgcgttctgacatcactatgcacttgaacaaggagatcttacagttgtccctttttgaatgtgccagccggggctgcctcaggtctctgtctctacacatcaaaacctctttctgtgctccgggggagtatctgctgcgtcaaggggatgctttgcaggccatctactttgtatgctcgggctccatggaagttcttaaagacagcatggtgctggctattcttgggaaaggggatttaattggagcaaatctatcaattaaggaccaagtgatcaagaccaatgcagatgtaaaggctttaacctactgtgatctccagtgtatcatcctcaaaggactctttgaagtgctagacctttacccagaatatgctcacaaattcgtggaagacattcagcatgacctcacatacaacctccgagaaggtcatgagagtgatgtgatatcaagactatcaaacaaatctatggtctcacagtcagagcccaagggaaatggcaacatcaacaagcgactcccatccattgtggaagatgaggaagaggaggaggagggggaggaagaggaggcagtctccctctctcccatctgcacaaggggatcttcttcgcgcaacaagaaggttggaagcaataaagcctacctgggcttaagcttaaagcaactggcctcgggaacggtgccctttcactcgcctatcagagtctccaggtcaaattcccccaaaaccaagcaggaaattgacccccccaaccataataaaaggaaagagaagaacttgaaattgcaactttcaactttgaataatgctggacccccagacctcagtccaaggattgttgatggaattgaagatggaaacagcagtgaagaaagtcagacttttgattttggctctgaacgaatcagatcagagcccagaatttctcctcctcttggagatccagagattggagctgctgttctcttcatcaaagcagaggagaccaagcagcagataaacaaactcaacagtgaggtaacaacattgactcaggaagtttctcagttgggtaaagacatgagaaatgtgatccagcttctggaaaacgttctgtcacctcagcagccatcacggttttgctctttgcacagcacctctgtgtgtccctccagggagagcttacagaccagaacgagctggagtgcacaccagccttgcctacacttgcaaacaggcggggctgcttatacccaagcacaactttgtagcagtaatatcacctcagacatttggagtgtggatccctcctctgtggggagcagcccccaacgaactggagctcatgagcaaaatcctgcagacagtgaactttatcattctccaagccttgattattcaccttcccactaccaggttgtccaagaaggtcatttgcaatttttaaggtgcatctctccacattcagattctacgttgacgcctctgcagtccatttcagcaactctctcatcttctgtctgctcctcttcggaaacatctttgcacctagttctcccaagcagatcagaggagggcagcttcagtcagggaactgtgagttccttcagtctggaaaacttaccaggatcttggaaccaggaaggaatggcatcagcttctacaaaacctttggagaaccttccactggaagttgtcacaagcacagcagaagtgaaagataacaaagccataaatgtatgatattagtgcccatgatgcagcagctaatttcaaacctaccactgcatgacagttttagtttgcctttttgcctctggtgggcatgaagactgagcaaagctgggaatcctgcagaaaagagtgtgaggagccagggaaaggcagaaccacctccatgctgtagcaaacaatttctagatactagaagcataatagaaacatttttctgtacaggtattaaactactggtctgtttgacagactttggtaacaatccaaagaccctgagggtctgagcagctagaagtcctagacaaagaacttgtggatgacttttgtcccatgtggcttttgtgaagtatggcaaaggtttttcatgagtgcctgattgttattcctgaacaatatccatagcactgttggcctcaggagtgcacagctcctgctgatgtatttttctttttgtgaaggcaaagggacaattatcactgcatgtcatctcctagacaatcagtcaaatagagctggtggccagtggttagctattcgcacgttatttgccatgtaaatgaaaacgtctttatttatcaaaaaaacacagaggctatttttatatccttggtatgaaatatgtatttaaactatttaaatatttataaagaaatgaatgttttcttttcattttggtaaaaaaaaagcttgctgttttaacaagaaatgcactactgttgtgtatagtagatcaaaaattatttattactaagaggatgtagtttccaaaggaatcccccattttttctgcatgcagtttgcaacaaatgtattctcatgcttctggattataaaagaaaagtgaagtcatattttgttaatgaaataaaaacatggactgagtgtcaactacatgagctttggcatggggatagagaggctccatctaggctctgccaactcatgtcaatgacatgatttaaggtcgttgtgccagcagaaatgtctctcctctaggtatcgtattttgttgctcaagaatccaaaatgggtctgtggacatagggcaatttggggctcaaagtgagggagaaaacctgggtgtgtcctttcccagtgcttttcttttacaagaggtagtagactagtggaaatccccaaatggagccaagacttctgagctataacttgtgggagtaataccagcttgcaatgggtcagcactttaccttttttctttaaggctcccaacaatgctatacagcgcagttgtttccattcctatttttaataaatctcaggggaagcctcagagattacacagttaggatgctgacacagtctagaatccataatgctccctacatctcacactaacaggcaaattcagatgctgggattggcaatgatttaagcaccttcactaaagtcttattttatgttttagaacagttacagtctaattgtcttggacattttgggaagatatattgggttcacattctggagttctctttattttccaccacaaaaaataatctgagaattgtatcattaaaagtatctaaacacaccaa

SEQ ID NO: 168209 - DNA, 5082 bp, Homo sapiens
  Payload ID: 13095
  Gene Symbol: KCNH8
  Gene Name: potassium channel, voltage gated eag related subfamily H, member 8
  ENST ID: ENST00000452398
  CDS Start-End: 187-774
gccggggcggctggaactctctccctttctccctccatccttccacttcccctgctcggccccgccgtcaggccgggtcccccttccctgccgtcatcaggttccccttctcccttcttggcactttcctttcgaaccatccttctggacaaactttgatggagaatttcacaccacgctggaaaaatgccggttatgaaaggattactggcgccgcaaaacaccttcctggacaccatcgccacccgttttgacggaacacatagcaacttcatccttgccaatgcccaggtggctaagggtttccccatagtctactgttccgatggcttctgcgagcttgctggatttgcccgaactgaagtcatgcagaagagttgtagctgcaagttcttatttggggttgaaaccaatgagcaactgatgcttcaaatagaaaagtcactggaggagaaaacagaattcaaaggagaaattatgttctacaagaaaaacgggtctccattttggtgcctactggatattgttcccataaagaatgaaaaaggagatgtagtactttttctggcctcgttcaaagatataacagatacaaaagtgaagattactccagaagataaaaaagaagacaaagtcaaaggaagatcaagagcagggacccactttgactcagcccggagacggagtcgagcagtcctttatcacatctctgggcacctgcaaagaagagaaaagaacaaattgaaaataaataacgtacttcaggatccctgaacacatcacattaatctgcccttccctcaatgagtgagacaagaacacaacattgtgacctacaaaatgtttttgtagataaaccagcatttccggagtataaagtttctgatgcaaaaaagtccaaattcatacttctgcattttagcacttttaaagctggctgggactggcttattttgttggcaacgttttatgttgctgtgactgtaccttacaacgtttgctttattggcaatgacgacctgtccacaactcggagcacaaccgtcagtgacattgcagtggagattctttttattatagatattattttaaatttccgaacaacttatgtcagcaagtctggccaagttatctttgaagcaagatcaatttgcatccactatgtcacaacctggttcatcattgatttaatcgctgccctgccttttgatcttctgtatgctttcaacgtcacagtggtgtctctcgtgcatcttctaaagacagtgcgcctcttgcgtcttttgcgtctgctgcagaagttagaccgctattcccaacacagtactatcgtcctgactctgctcatgtccatgtttgcactccttgcacactggatggcgtgtatctggtacgtcattggaaaaatggagagggaagacaacagccttctgaagtgggaagttggttggcttcatgagttgggaaagagactggaatctccatactatggcaacaataccttggggggcccgtcgatccgaagtgcctatattgccgctctgtacttcacgctgagcagcctcaccagcgtgggttttgggaacgtctctgctaatacagatgcagaaaagatcttctccatctgcaccatgctgattggtgccttgatgcacgccttggtgtttggaaacgtgacagcaatcatacagaggatgtactccagatggtccctctatcacactagaactaaggatctgaaagatttcatccgtgtccatcacttgccccaacaactcaagcagaggatgctcgaatattttcaaacaacctggtcagtcaacaatggaatagattcaaatgaggtaatgttcatttctcatgttgttttcaggcagaaagcacatattctaaggtaaacgcaagatgttctaatgcaggtatcagaagtgaaaagcataccaacttctttattcctttacatttttaattattcatgaatcccaatccatcttctttcacttgctttggcttgtgttttcacaatgccaatttggattgaccgaagttttatattaacttgctgcttattcgatcaggtggatttattttccttcttattgtctcttttcaaaggaatcaattcttacgataatttaacagtgtaatctgggataattatattaatcaagtttctgtttcccttaacatcaataaagttaaaaaattccatcaaaggggttatctttatacttccagaaacaccccagactgccactataaaaacagtattatataaatcaacgaaccatttcatcaacccaccagccaaacctgtaaccaacattttagtagtgattaattggtttctcctctcttcgcataatcaccagtgggtccaaattccatatcttctgtcctgactaggactctctgtgagaaggaagtcacaatgagttatatgttttcctgctagaggcttttttaatttgttctgtttctccagacttcttatcagctgattattcagtagcacataattcacagtcactgaaaaatctctccaggattatacatacttagatttcctcttctgtatgctggatggccaaacagcaggagacagtaggaagagcatccctgctgtcttgcaaagtaaatcagttagactacacttaccccaatttgatttcctccttcatcttctctgacagcttttgaaagactttccagatgaactgcgttctgacatcactatgcacttgaacaaggagatcttacagttgtccctttttgaatgtgccagccggggctgcctcaggtctctgtctctacacatcaaaacctctttctgtgctccgggggagtatctgctgcgtcaaggggatgctttgcaggccatctactttgtatgctcgggctccatggaagttcttaaagacagcatggtgctggctattcttgggaaaggggatttaattggagcaaatctatcaattaaggaccaagtgatcaagaccaatgcagatgtaaaggctttaacctactgtgatctccagtgtatcatcctcaaaggactctttgaagtgctagacctttacccagaatatgctcacaaattcgtggaagacattcagcatgacctcacatacaacctccgagaaggtcatgagagtgatgtgatatcaagactatcaaacaaatctatggtctcacagtcagagcccaagggaaatggcaacatcaacaagcgactcccatccattgtggaagatgaggaagaggaggaggagggggaggaagaggaggcagtctccctctctcccatctgcacaaggggatcttcttcgcgcaacaagaaggttggaagcaataaagcctacctgggcttaagcttaaagcaactggcctcgggaacggtgccctttcactcgcctatcagagtctccaggtcaaattcccccaaaaccaagcaggaaattgacccccccaaccataataaaaggaaagagaagaacttgaaattgcaactttcaactttgaataatgctggacccccagacctcagtccaaggattgttgatggaattgaagatggaaacagcagtgaagaaagtcagacttttgattttggctctgaacgaatcagatcagagcccagaatttctcctcctcttggagatccagagattggagctgctgttctcttcatcaaagcagaggagaccaagcagcagataaacaaactcaacagtgaggtaacaacattgactcaggaagtttctcagttgggtaaagacatgagaaatgtgatccagcttctggaaaacgttctgtcacctcagcagccatcacggttttgctctttgcacagcacctctgtgtgtccctccagggagagcttacagaccagaacgagctggagtgcacaccagccttgcctacacttgcaaacaggcggggctgcttatacccaagcacaactttgtagcagtaatatcacctcagacatttggagtgtggatccctcctctgtggggagcagcccccaacgaactggagctcatgagcaaaatcctgcagacagtgaactttatcattctccaagccttgattattcaccttcccactaccaggttgtccaagaaggtcatttgcaatttttaaggtgcatctctccacattcagattctacgttgacgcctctgcagtccatttcagcaactctctcatcttctgtctgctcctcttcggaaacatctttgcacctagttctcccaagcagatcagaggagggcagcttcagtcagggaactgtgagttccttcagtctggaaaacttaccaggatcttggaaccaggaaggaatggcatcagcttctacaaaacctttggagaaccttccactggaagttgtcacaagcacagcagaagtgaaagataacaaagccataaatgtatgatattagtgcccatgatgcagcagctaatttcaaacctaccactgcatgacagttttagtttgcctttttgcctctggtgggcatgaagactgagcaaagctgggaatcctgcagaaaagagtgtgaggagccagggaaaggcagaaccacctccatgctgtagcaaacaatttctagatactagaagcataatagaaacatttttctgtacaggtattaaactactggtctgtttgacagactttggtaacaatccaaagaccctgagggtctgagcagctagaagtcctagacaaagaacttgtggatgacttttgtcccatgtggcttttgtgaagtatggcaaaggtttttcatgagtgcctgattgttattcctgaacaatatccatagcactgttggcctcaggagtgcacagctcctgctgatgtatttttctttttgtgaaggcaaagggacaattatcactgcatgtcatctcctagacaatcagtcaaatagagctggtggccagtggttagctattcgcacgttatttgccatgtaaatgaaaacgtctttatttatcaaaaaaacacagaggctatttttatatccttggtatgaaatatgtatttaaactatttaaatatttataaag

SEQ ID NO: 168210 - DNA, 3245 bp, Homo sapiens
  Payload ID: 13096
  Gene Symbol: KCNQ1
  Gene Name: potassium channel, voltage gated KQT-like subfamily Q, member 1
  Uniprot ID: P51787
  ENST ID: ENST00000155840
  CDS Start-End: 109-2139
gcggcggggctggcagcagtggctgcccgcactgcgcccgggcgctcgccttcgctgcagctcccggtgccgccgctcgggccggccccccggcaggccctcctcgttatggccgcggcctcctccccgcccagggccgagaggaagcgctggggttggggccgcctgccaggcgcccggcggggcagcgcgggcctggccaagaagtgccccttctcgctggagctggcggagggcggcccggcgggcggcgcgctctacgcgcccatcgcgcccggcgccccaggtcccgcgccccctgcgtccccggccgcgcccgccgcgcccccagttgcctccgaccttggcccgcggccgccggtgagcctagacccgcgcgtctccatctacagcacgcgccgcccggtgttggcgcgcacccacgtccagggccgcgtctacaacttcctcgagcgtcccaccggctggaaatgcttcgtttaccacttcgccgtcttcctcatcgtcctggtctgcctcatcttcagcgtgctgtccaccatcgagcagtatgccgccctggccacggggactctcttctggatggagatcgtgctggtggtgttcttcgggacggagtacgtggtccgcctctggtccgccggctgccgcagcaagtacgtgggcctctgggggcggctgcgctttgcccggaagcccatttccatcatcgacctcatcgtggtcgtggcctccatggtggtcctctgcgtgggctccaaggggcaggtgtttgccacgtcggccatcaggggcatccgcttcctgcagatcctgaggatgctacacgtcgaccgccagggaggcacctggaggctcctgggctccgtggtcttcatccaccgccaggagctgataaccaccctgtacatcggcttcctgggcctcatcttctcctcgtactttgtgtacctggctgagaaggacgcggtgaacgagtcaggccgcgtggagttcggcagctacgcagatgcgctgtggtggggggtggtcacagtcaccaccatcggctatggggacaaggtgccccagacgtgggtcgggaagaccatcgcctcctgcttctctgtctttgccatctccttctttgcgctcccagcggggattcttggctcggggtttgccctgaaggtgcagcagaagcagaggcagaagcacttcaaccggcagatcccggcggcagcctcactcattcagaccgcatggaggtgctatgctgccgagaaccccgactcctccacctggaagatctacatccggaaggccccccggagccacactctgctgtcacccagccccaaacccaagaagtctgtggtggtaaagaaaaaaaagttcaagctggacaaagacaatggggtgactcctggagagaagatgctcacagtcccccatatcacgtgcgaccccccagaagagcggcggctggaccacttctctgtcgacggctatgacagttctgtaaggaagagcccaacactgctggaagtgagcatgccccatttcatgagaaccaacagcttcgccgaggacctggacctggaaggggagactctgctgacacccatcacccacatctcacagctgcgggaacaccatcgggccaccattaaggtcattcgacgcatgcagtactttgtggccaagaagaaattccagcaagcgcggaagccttacgatgtgcgggacgtcattgagcagtactcgcagggccacctcaacctcatggtgcgcatcaaggagctgcagaggaggctggaccagtccattgggaagccctcactgttcatctccgtctcagaaaagagcaaggatcgcggcagcaacacgatcggcgcccgcctgaaccgagtagaagacaaggtgacgcagctggaccagaggctggcactcatcaccgacatgcttcaccagctgctctccttgcacggtggcagcacccccggcagcggcggcccccccagagagggcggggcccacatcacccagccctgcggcagtggcggctccgtcgaccctgagctcttcctgcccagcaacaccctgcccacctacgagcagctgaccgtgcccaggaggggccccgatgaggggtcctgaggaggggatggggctgggggatgggcctgagtgagaggggaggccaagagtggccccacctggccctctctgaaggaggccacctcctaaaaggcccagagagaagagccccactctcagaggccccaataccccatggaccatgctgtctggcacagcctgcacttgggggctcagcaaggccacctcttcctggccggtgtgggggccccgtctcaggtctgagttgttaccccaagcgccctggcccccacatggtgatgttgacatcactggcatggtggttgggacccagtggcagggcacagggcctggcccatgtatggccaggaagtagcacaggctgagtgcaggcccaccctgcttggcccagggggcttcctgaggggagacagagcaacccctggaccccagcctcaaatccaggaccctgccaggcacaggcagggcaggaccagcccacgctgactacagggccgccggcaataaaagcccaggagcccatttggagggcctgggcctggctccctcactctcaggaaatgctgacccatgggcaggagactgtggagactgctcctgagcccccagcttccagcaggagggacagtctcaccatttccccagggcacgtggttgagtggggggaacgcccacttccctgggttagactgccagctcttcctagctggagaggagccctgcctctccgcccctgagcccactgtgcgtggggctcccgcctccaacccctcgcccagtcccagcagccagccaaacacacagaaggggactgccacctccccttgccagctgctgagccgcagagaagtgacggttcctacacaggacaggggttccttctgggcattacatcgcatagaaatcaataatttgtggtgatttggatctgtgttttaatgagtttcacagtgtgattttgattattaattgtgcaagcttttcctaataaacgtggagaatcacaggctgggctgggcactgctctcaccttggttcctggggcatccatggggtctctcacagacaggacccctgcagttcccctggaagcagtgcccaggtggctgtggaataggaacgct

SEQ ID NO: 168211 - DNA, 2159 bp, Homo sapiens
  Payload ID: 13096
  Gene Symbol: KCNQ1
  Gene Name: potassium channel, voltage gated KQT-like subfamily Q, member 1
  Uniprot ID: P51787
  ENST ID: ENST00000335475
  CDS Start-End: 275-1924
ctcttcccttcctcccctgcagcttccatggcctggggctgtgagaggcccgggaaggcactgtctttgcgcctgcacatgtgtgtgtctggagtgtaggatggcactggtgccgggcctggatttactcagcccagatcacggctgcttttgtttacgtggcccctgctctcacccacaactccaggtttctggctctcgggaatttgaggcctgtggctgctgtggaccctgggaaagagcctgtgcttcctgagccagtgcggggcctggcatggacttcctcatcgtcctggtctgcctcatcttcagcgtgctgtccaccatcgagcagtatgccgccctggccacggggactctcttctggatggagatcgtgctggtggtgttcttcgggacggagtacgtggtccgcctctggtccgccggctgccgcagcaagtacgtgggcctctgggggcggctgcgctttgcccggaagcccatttccatcatcgacctcatcgtggtcgtggcctccatggtggtcctctgcgtgggctccaaggggcaggtgtttgccacgtcggccatcaggggcatccgcttcctgcagatcctgaggatgctacacgtcgaccgccagggaggcacctggaggctcctgggctccgtggtcttcatccaccgccaggagctgataaccaccctgtacatcggcttcctgggcctcatcttctcctcgtactttgtgtacctggctgagaaggacgcggtgaacgagtcaggccgcgtggagttcggcagctacgcagatgcgctgtggtggggggtggtcacagtcaccaccatcggctatggggacaaggtgccccagacgtgggtcgggaagaccatcgcctcctgcttctctgtctttgccatctccttctttgcgctcccagcggggattcttggctcggggtttgccctgaaggtgcagcagaagcagaggcagaagcacttcaaccggcagatcccggcggcagcctcactcattcagaccgcatggaggtgctatgctgccgagaaccccgactcctccacctggaagatctacatccggaaggccccccggagccacactctgctgtcacccagccccaaacccaagaagtctgtggtggtaaagaaaaaaaagttcaagctggacaaagacaatggggtgactcctggagagaagatgctcacagtcccccatatcacgtgcgaccccccagaagagcggcggctggaccacttctctgtcgacggctatgacagttctgtaaggaagagcccaacactgctggaagtgagcatgccccatttcatgagaaccaacagcttcgccgaggacctggacctggaaggggagactctgctgacacccatcacccacatctcacagctgcgggaacaccatcgggccaccattaaggtcattcgacgcatgcagtactttgtggccaagaagaaattccagcaagcgcggaagccttacgatgtgcgggacgtcattgagcagtactcgcagggccacctcaacctcatggtgcgcatcaaggagctgcagaggaggctggaccagtccattgggaagccctcactgttcatctccgtctcagaaaagagcaaggatcgcggcagcaacacgatcggcgcccgcctgaaccgagtagaagacaaggtgacgcagctggaccagaggctggcactcatcaccgacatgcttcaccagctgctctccttgcacggtggcagcacccccggcagcggcggcccccccagagagggcggggcccacatcacccagccctgcggcagtggcggctccgtcgaccctgagctcttcctgcccagcaacaccctgcccacctacgagcagctgaccgtgcccaggaggggccccgatgaggggtcctgaggaggggatggggctgggggatgggcctgagtgagaggggaggccaagagtggccccacctggccctctctgaaggaggccacctcctaaaaggcccagagagaagagccccactctcagaggccccaataccccatggaccatgctgtctggcacagcctgcacttgggggctcagcaaggccacctcttcctggccggtgtgggggccccgtctcaggtctgagttgttaccc

SEQ ID NO: 168212 - DNA, 229 bp, Homo sapiens
  Payload ID: 13096
  Gene Symbol: KCNQ1
  Gene Name: potassium channel, voltage gated KQT-like subfamily Q, member 1
  ENST ID: ENST00000380776
  CDS Start-End: 8-229
gaaatggatggggcatgctgcttccagcacccactgggtgcagctgtctgctgtctgctgtcctgggggaaggtctggagagggcctctcgattcaagaaattaagcatacggtcacgagagtgcaaagttctgtgaaacgctccagtggttacacgccccggggtttcagcttcgaccctggcttcctcatcgtcctggtctgcctcatcttcagcgtgctgtccacc

SEQ ID NO: 168213 - DNA, 582 bp, Homo sapiens
  Payload ID: 13096
  Gene Symbol: KCNQ1
  Gene Name: potassium channel, voltage gated KQT-like subfamily Q, member 1
  ENST ID: ENST00000496887
  CDS Start-End: 3-582
agatgacacgagcggggctaagcagcacgcgccgcccggtgttggcgcgcacccacgtccagggccgcgtctacaacttcctcgagcgtcccaccggctggaaatgcttcgtttaccacttcgccgtcttcctcatcgtcctggtctgcctcatcttcagcgtgctgtccaccatcgagcagtatgccgccctggccacggggactctcttctggatggagatcgtgctggtggtgttcttcgggacggagtacgtggtccgcctctggtccgccggctgccgcagcaagtacgtgggcctctgggggcggctgcgctttgcccggaagcccatttccatcatcgacctcatcgtggtcgtggcctccatggtggtcctctgcgtgggctccaaggggcaggtgtttgccacgtcggccatcaggggcatccgcttcctgcagatcctgaggatgctacacgtcgaccgccagggaggcacctggaggctcctgggctccgtggtcttcatccaccgccaggagctgataaccaccctgtacatcggcttcctgggcctcatcttctcctcgtactttgtgt

SEQ ID NO: 168214 - DNA, 1624 bp, Homo sapiens
  Payload ID: 13096
  Gene Symbol: KCNQ1
  Gene Name: potassium channel, voltage gated KQT-like subfamily Q, member 1
  ENST ID: ENST00000632153
  CDS Start-End: 1-517
gctgcgggaacaccatcgggccaccattaaggtcattcgacgcatgcagtactttgtggccaagaagaaattccagcaagcgcggaagccttacgatgtgcgggacgtcattgagcagtactcgcagggccacctcaacctcatggtgcgcatcaaggagctgcagaggaggctggaccagtccattgggaagccctcactgttcatctccgtctcagaaaagagcaaggatcgcggcagcaacacgatcggcgcccgcctgaaccgagtagaagacaaggtgacgcagctggaccagaggctggcactcatcaccgacatgcttcaccagctgctctccttgcacggtggcagcacccccggcagcggcggcccccccagagagggcggggcccacatcacccagccctgcggcagtggcggctccgtcgaccctgagctcttcctgcccagcaacaccctgcccacctacgagcagctgaccgtgcccaggaggggccccgatgaggggtcctgaggaggggatggggctgggggatgggcctgagtgagaggggaggccaagagtggccccacctggccctctctgaaggaggccacctcctaaaaggcccagagagaagagccccactctcagaggccccaataccccatggaccatgctgtctggcacagcctgcacttgggggctcagcaaggccacctcttcctggccggtgtgggggccccgtctcaggtgtgagttgttaccccaagcgccctggcccccacatggtgatgttgacatcactggcatggtggttgggacccagtggcagggcacagggcctggcccatgtatggccaggaagtagcacaggctgagtgcaggcccaccctgcttggcccagggggcttcctgaggggagacagagcaacccctggaccccagcctcaaatccaggaccctgccaggcacaggcagggcaggaccagcccacgctgactacagggccgccggcaataaaagcccaggagcccatttggagggcctgggcctggctccctcactctcaggaaatgctgacccatgggcaggagactgtggagactgctcctgagcccccagcttccagcaggagggacagtctcaccatttccccagggcacgtggttgagtggggggaacgcccacttccctgggttagactgccagctcttcctagctggagaggagccctgcctctccgcccctgagcccactgtgcgtggggctcccgcctccaacccctcgcccagtcccagcagccagccaaacacacagaaggggactgccacctccccttgccagctgctgagccgcagagaagtgacggttcctacacaggacaggggttccttctgggcattacatcgcatacaaatcaataatttgtggtgatttggatctgtgttttaatgagtttcacagtgtgattttgattattaattgtgcaagcttttcctaataaacgtggagaatcacaggctgggctgggcactgctctcaccttggttcctggggcatccatggggtctctcacagacaggacccctgcagttcccctggaagcagtgcccaggtggctgtggaataggaacgcta

SEQ ID NO: 168215 - DNA, 752 bp, Homo sapiens
  Payload ID: 13096
  Gene Symbol: KCNQ1
  Gene Name: potassium channel, voltage gated KQT-like subfamily Q, member 1
  ENST ID: ENST00000632981
  CDS Start-End: 1-517
gctgcgggaacaccatcgggccaccattaaggtcattcgacgcatgcagtactttgtggccaagaagaaattccagcaagcgcggaagccttacgatgtgcgggacgtcattgagcagtactcgcagggccacctcaacctcatggtgcgcatcaaggagctgcagaggaggctggaccagtccattgggaagccctcactgttcatctccgtctcagaaaagagcaaggatcgcggcagcaacacgatcggcgcccgcctgaaccgagtagaagacaaggtgacgcagctggaccagaggctggcactcatcaccgacatgcttcaccagctgctctccttgcacggtggcagcacccccggcagcggcggcccccccagagagggcggggcccacatcacccagccctgcggcagtggcggctccgtcgaccctgagctcttcctgcccagcaacaccctgcccacctacgagcagctgaccgtgcccaggaggggccccgatgaggggtcctgaggaggggatggggctgggggatgggcctgagtgagaggggaggccaagagtggccccacctggccctctctgaaggaggccacctcctaaaaggcccagagagaagagccccactctcagaggccccaataccccatggaccatgctgtctggcacagcctgcacttgggggctcagcaaggccacctcttcctggccggtgtgggggccccgtctcaggtgtgagttgttaccc

SEQ ID NO: 168216 - DNA, 2750 bp, Homo sapiens
  Payload ID: 13097
  Gene Symbol: KCNQ2
  Gene Name: potassium channel, voltage gated KQT-like subfamily Q, member 2
  Uniprot ID: O43526
  ENST ID: ENST00000344462
  CDS Start-End: 47-2572
ccccgctgagcctgagcccgacccggggcgcctcccgccaggcaccatggtgcagaagtcgcgcaacggcggcgtataccccggcccgagcggggagaagaagctgaaggtgggcttcgtggggctggaccccggcgcgcccgactccacccgggacggggcgctgctgatcgccggctccgaggcccccaagcgcggcagcatcctcagcaaacctcgcgcgggcggcgcgggcgccgggaagccccccaagcgcaacgccttctaccgcaagctgcagaatttcctctacaacgtgctggagcggccgcgcggctgggcgttcatctaccacgcctacgtgttcctcctggttttctcctgcctcgtgctgtctgtgttttccaccatcaaggagtatgagaagagctcggagggggccctctacatcctggaaatcgtgactatcgtggtgtttggcgtggagtacttcgtgcggatctgggccgcaggctgctgctgccggtaccgtggctggagggggcggctcaagtttgcccggaaaccgttctgtgtgattgacatcatggtgctcatcgcctccattgcggtgctggccgccggctcccagggcaacgtctttgccacatctgcgctccggagcctgcgcttcctgcagattctgcggatgatccgcatggaccggcggggaggcacctggaagctgctgggctctgtggtctatgcccacagcaaggagctggtcactgcctggtacatcggcttcctttgtctcatcctggcctcgttcctggtgtacttggcagagaagggggagaacgaccactttgacacctacgcggatgcactctggtggggcctgatcacgctgaccaccattggctacggggacaagtacccccagacctggaacggcaggctccttgcggcaaccttcaccctcatcggtgtctccttcttcgcgctgcctgcaggcatcttggggtctgggtttgccctgaaggttcaggagcagcacaggcagaagcactttgagaagaggcggaacccggcagcaggcctgatccagtcggcctggagattctacgccaccaacctctcgcgcacagacctgcactccacgtggcagtactacgagcgaacggtcaccgtgcccatgtacagttcgcaaactcaaacctacggggcctccagacttatccccccgctgaaccagctggagctgctgaggaacctcaagagtaaatctggactcgctttcaggaaggaccccccgccggagccgtctccaagcccccgaggcgtggctgccaaggggaaggggtccccgcaggcccagactgtgaggcggtcacccagcgccgaccagagcctcgaggacagccccagcaaggtgcccaagagctggagcttcggggaccgcagccgggcacgccaggctttccgcatcaagggtgccgcgtcacggcagaactcagaagcaagcctccccggagaggacattgtggatgacaagagctgcccctgcgagtttgtgaccgaggacctgaccccgggcctcaaagtcagcatcagagccgtgtgtgtcatgcggttcctggtgtccaagcggaagttcaaggagagcctgcggccctacgacgtgatggacgtcatcgagcagtactcagccggccacctggacatgctgtcccgaattaagagcctgcagtccagagtggaccagatcgtggggcggggcccagcgatcacggacaaggaccgcaccaagggcccggccgaggcggagctgcccgaggaccccagcatgatgggacggctcgggaaggtggagaagcaggtcttgtccatggagaagaagctggacttcctggtgaatatctacatgcagcggatgggcatccccccgacagagaccgaggcctactttggggccaaagagccggagccggcgccgccgtaccacagcccggaagacagccgggagcatgtcgacaggcacggctgcattgtcaagatcgtgcgctccagcagctccacgggccagaagaacttctcggcgcccccggccgcgccccctgtccagtgtccgccctccacctcctggcagccacagagccacccgcgccagggccacggcacctcccccgtgggggaccacggctccctggtgcgcatcccgccgccgcctgcccacgagcggtcgctgtccgcctacggcgggggcaaccgcgccagcatggagttcctgcggcaggaggacaccccgggctgcaggccccccgaggggaacctgcgggacagcgacacgtccatctccatcccgtccgtggaccacgaggagctggagcgttccttcagcggcttcagcatctcccagtccaaggagaacctggatgctctcaacagctgctacgcggccgtggcgccttgtgccaaagtcaggccctacattgcggagggagagtcagacaccgactccgacctctgtaccccgtgcgggcccccgccacgctcggccaccggcgagggtccctttggtgacgtgggctgggccgggcccaggaagtgaggcggcgctgggccagtggacccgcccgcggccctcctcagcacggtgcctccgaggttttgaggcgggaaccctctggggcccttttcttacagtaactgagtgtggcgggaagggtgggccctggaggggcccatgtgggctgaaggatgggggctcctggcagtgaccttttaca

SEQ ID NO: 168217 - DNA, 1426 bp, Homo sapiens
  Payload ID: 13097
  Gene Symbol: KCNQ2
  Gene Name: potassium channel, voltage gated KQT-like subfamily Q, member 2
  Uniprot ID: O43526
  ENST ID: ENST00000344425
  CDS Start-End: 178-1359
cgcggagcgaggtggccgcagcgtctccgcgcgcggcccaagcccggcaggagtgcggaaccgccgcctcggccatgcggctcccggccggggggcctgggctggggcccgcgccgccccccgcgctccgcccccgctgagcctgagcccgacccggggcgcctcccgccaggcaccatggtgcagaagtcgcgcaacggcggcgtataccccggcccgagcggggagaagaagctgaaggtgggcttcgtggggctggaccccggcgcgcccgactccacccgggacggggcgctgctgatcgccggctccgaggcccccaagcgcggcagcatcctcagcaaacctcgcgcgggcggcgcgggcgccgggaagccccccaagcgcaacgccttctaccgcaagctgcagaatttcctctacaacgtgctggagcggccgcgcggctgggcgttcatctaccacgcctacgtgttcctcctggttttctcctgcctcgtgctgtctgtgttttccaccatcaaggagtatgagaagagctcggagggggccctctacatcctggaaatcgtgactatcgtggtgtttggcgtggagtacttcgtgcggatctgggccgcaggctgctgctgccggtaccgtggctggagggggcggctcaagtttgcccggaaaccgttctgtgtgattgacatcatggtgctcatcgcctccattgcggtgctggccgccggctcccagggcaacgtctttgccacatctgcgctccggagcctgcgcttcctgcagattctgcggatgatccgcatggaccggcggggaggcacctggaagctgctgggctctgtggtctatgcccacagcaaggagctggtcactgcctggtacatcggcttcctttgtctcatcctggcctcgttcctggtgtacttggcagagaagggggagaacgaccactttgacacctacgcggatgcactctggtggggcctgatcacgctgaccaccattggctacggggacaagtacccccagacctggaacggcaggctccttgcggcaaccttcaccctcatcggtgtctccttcttcgcgctgcctgcaggcatcttggggtctgggtttgccctgaaggttcaggagcagcacaggcagaagcactttgagaagaggcggaacccggcagcaggcctgatccagtcggcctggagattctacgccaccaacctctcgcgcacagacctgcactccacgtggcagtactacgagcgaacggtcaccgtgcccatgtacaggtaccgccgccgggcacctgccaccaagcaactgtttcattttttattttccatttgttcttaaaccccactttttgttgttcattattttgattgattttttttctttaaaatgtatttttcacaaagga

SEQ ID NO: 168218 - DNA, 2594 bp, Homo sapiens
  Payload ID: 13097
  Gene Symbol: KCNQ2
  Gene Name: potassium channel, voltage gated KQT-like subfamily Q, member 2
  ENST ID: ENST00000357249
  CDS Start-End: 1-2187
atcaaggagtatgagaagagctcggagggggccctctacatcctggaaatcgtgactatcgtggtgtttggcgtggagtacttcgtgcggatctgggccgcaggctgctgctgccggtaccgtggctggagggggcggctcaagtttgcccggaaaccgttctgtgtgattgacatcatggtgctcatcgcctccattgcggtgctggccgccggctcccagggcaacgtctttgccacatctgcgctccggagcctgcgcttcctgcagattctgcggatgatccgcatggaccggcggggaggcacctggaagctgctgggctctgtggtctatgcccacagcaaggagctggtcactgcctggtacatcggcttcctttgtctcatcctggcctcgttcctggtgtacttggcagagaagggggagaacgaccactttgacacctacgcggatgcactctggtggggcctgatcacgctgaccaccattggctacggggacaagtacccccagacctggaacggcaggctccttgcggcaaccttcaccctcatcggtgtctccttcttcgcgctgcctgcaggcatcttggggtctgggtttgccctgaaggttcaggagcagcacaggcagaagcactttgagaagaggcggaacccggcagcaggcctgatccagtcggcctggagattctacgccaccaacctctcgcgcacagacctgcactccacgtggcagtactacgagcgaacggtcaccgtgcccatgtacagttcgcaaactcaaacctacggggcctccagacttatccccccgctgaaccagctggagctgctgaggaacctcaagagtaaatctggactcgctttcaggaaggaccccccgccggagccgtctccaagcccccgaggcgtggctgccaaggggaaggggtccccgcaggcccagactgtgaggcggtcacccagcgccgaccagagcctcgaggacagccccagcaaggtgcccaagagctggagcttcggggaccgcagccgggcacgccaggctttccgcatcaagggtgccgcgtcacggcagaactcagaagaagcaagcctccccggagaggacattgtggatgacaagagctgcccctgcgagtttgtgaccgaggacctgaccccgggcctcaaagtcagcatcagagccgtgtgtgtcatgcggttcctggtgtccaagcggaagttcaaggagagcctgcggccctacgacgtgatggacgtcatcgagcagtactcagccggccacctggacatgctgtcccgaattaagagcctgcagtccagagtggaccagatcgtggggcggggcccagcgatcacggacaaggaccgcaccaagggcccggccgaggcggagctgcccgaggaccccagcatgatgggacggctcgggaaggtggagaagcaggtcttgtccatggagaagaagctggacttcctggtgaatatctacatgcagcggatgggcatccccccgacagagaccgaggcctactttggggccaaagagccggagccggcgccgccgtaccacagcccggaagacagccgggagcatgtcgacaggcacggctgcattgtcaagatcgtgcgctccagcagctccacgggccagaagaacttctcggcgcccccggccgcgccccctgtccagtgtccgccctccacctcctggcagccacagagccacccgcgccagggccacggcacctcccccgtgggggaccacggctccctggtgcgcatcccgccgccgcctgcccacgagcggtcgctgtccgcctacggcgggggcaaccgcgccagcatggagttcctgcggcaggaggacaccccgggctgcaggccccccgaggggaacctgcgggacagcgacacgtccatctccatcccgtccgtggaccacgaggagctggagcgttccttcagcggcttcagcatctcccagtccaaggagaacctggatgctctcaacagctgctacgcggccgtggcgccttgtgccaaagtcaggccctacattgcggagggagagtcagacaccgactccgacctctgtaccccgtgcgggcccccgccacgctcggccaccggcgagggtccctttggtgacgtgggctgggccgggcccaggaagtgaggcggcgctgggccagtggacccgcccgcggccctcctcagcacggtgcctccgaggttttgaggcgggaaccctctggggcccttttcttacagtaactgagtgtggcgggaagggtgggccctggaggggcccatgtgggctgaaggatgggggctcctggcagtgaccttttacaaaagttattttccaacaggggctggagggctgggcagggccctgtggctccaggagcagcgtgcaggagcaaggctgccctgtccactctgctcagggccgcggccgacatcagcccggtgtgaggaggggcgggagtgatgacggggtgttgccagcgtggcaacaggcggggggttgtctcagccgagcccaggggaggcacaaagggcaggcctgttccctgagga

SEQ ID NO: 168219 - DNA, 3253 bp, Homo sapiens
  Payload ID: 13097
  Gene Symbol: KCNQ2
  Gene Name: potassium channel, voltage gated KQT-like subfamily Q, member 2
  Uniprot ID: O43526
  ENST ID: ENST00000359125
  CDS Start-End: 128-2746
gagtgcggaaccgccgcctcggccatgcggctcccggccggggggcctgggctggggcccgcgccgccccccgcgctccgcccccgctgagcctgagcccgacccggggcgcctcccgccaggcaccatggtgcagaagtcgcgcaacggcggcgtataccccggcccgagcggggagaagaagctgaaggtgggcttcgtggggctggaccccggcgcgcccgactccacccgggacggggcgctgctgatcgccggctccgaggcccccaagcgcggcagcatcctcagcaaacctcgcgcgggcggcgcgggcgccgggaagccccccaagcgcaacgccttctaccgcaagctgcagaatttcctctacaacgtgctggagcggccgcgcggctgggcgttcatctaccacgcctacgtgttcctcctggttttctcctgcctcgtgctgtctgtgttttccaccatcaaggagtatgagaagagctcggagggggccctctacatcctggaaatcgtgactatcgtggtgtttggcgtggagtacttcgtgcggatctgggccgcaggctgctgctgccggtaccgtggctggagggggcggctcaagtttgcccggaaaccgttctgtgtgattgacatcatggtgctcatcgcctccattgcggtgctggccgccggctcccagggcaacgtctttgccacatctgcgctccggagcctgcgcttcctgcagattctgcggatgatccgcatggaccggcggggaggcacctggaagctgctgggctctgtggtctatgcccacagcaaggagctggtcactgcctggtacatcggcttcctttgtctcatcctggcctcgttcctggtgtacttggcagagaagggggagaacgaccactttgacacctacgcggatgcactctggtggggcctgatcacgctgaccaccattggctacggggacaagtacccccagacctggaacggcaggctccttgcggcaaccttcaccctcatcggtgtctccttcttcgcgctgcctgcaggcatcttggggtctgggtttgccctgaaggttcaggagcagcacaggcagaagcactttgagaagaggcggaacccggcagcaggcctgatccagtcggcctggagattctacgccaccaacctctcgcgcacagacctgcactccacgtggcagtactacgagcgaacggtcaccgtgcccatgtacagttcgcaaactcaaacctacggggcctccagacttatccccccgctgaaccagctggagctgctgaggaacctcaagagtaaatctggactcgctttcaggaaggaccccccgccggagccgtctccaagtaaaggcagcccgtgcagagggcccctgtgtggatgctgccccggacgctctagccagaaggtcagtttgaaagatcgtgtcttctccagcccccgaggcgtggctgccaaggggaaggggtccccgcaggcccagactgtgaggcggtcacccagcgccgaccagagcctcgaggacagccccagcaaggtgcccaagagctggagcttcggggaccgcagccgggcacgccaggctttccgcatcaagggtgccgcgtcacggcagaactcagaagaagcaagcctccccggagaggacattgtggatgacaagagctgcccctgcgagtttgtgaccgaggacctgaccccgggcctcaaagtcagcatcagagccgtgtgtgtcatgcggttcctggtgtccaagcggaagttcaaggagagcctgcggccctacgacgtgatggacgtcatcgagcagtactcagccggccacctggacatgctgtcccgaattaagagcctgcagtccagagtggaccagatcgtggggcggggcccagcgatcacggacaaggaccgcaccaagggcccggccgaggcggagctgcccgaggaccccagcatgatgggacggctcgggaaggtggagaagcaggtcttgtccatggagaagaagctggacttcctggtgaatatctacatgcagcggatgggcatccccccgacagagaccgaggcctactttggggccaaagagccggagccggcgccgccgtaccacagcccggaagacagccgggagcatgtcgacaggcacggctgcattgtcaagatcgtgcgctccagcagctccacgggccagaagaacttctcggcgcccccggccgcgccccctgtccagtgtccgccctccacctcctggcagccacagagccacccgcgccagggccacggcacctcccccgtgggggaccacggctccctggtgcgcatcccgccgccgcctgcccacgagcggtcgctgtccgcctacggcgggggcaaccgcgccagcatggagttcctgcggcaggaggacaccccgggctgcaggccccccgaggggaacctgcgggacagcgacacgtccatctccatcccgtccgtggaccacgaggagctggagcgttccttcagcggcttcagcatctcccagtccaaggagaacctggatgctctcaacagctgctacgcggccgtggcgccttgtgccaaagtcaggccctacattgcggagggagagtcagacaccgactccgacctctgtaccccgtgcgggcccccgccacgctcggccaccggcgagggtccctttggtgacgtgggctgggccgggcccaggaagtgaggcggcgctgggccagtggacccgcccgcggccctcctcagcacggtgcctccgaggttttgaggcgggaaccctctggggcccttttcttacagtaactgagtgtggcgggaagggtgggccctggaggggcccatgtgggctgaaggatgggggctcctggcagtgaccttttacaaaagttattttccaacaggggctggagggctgggcagggccctgtggctccaggagcagcgtgcaggagcaaggctgccctgtccactctgctcagggccgcggccgacatcagcccggtgtgaggaggggcgggagtgatgacggggtgttgccagcgtggcaacaggcggggggttgtctcagccgagcccaggggaggcacaaagggcaggcctgttccctgaggacctgcgcaaagggcgggcctgtttggtgaggacctgcggccttgggtcccggtggggtttccgggcagctacaggcgggtgtggccggccgctgtgcgtg

SEQ ID NO: 168220 - DNA, 2775 bp, Homo sapiens
  Payload ID: 13097
  Gene Symbol: KCNQ2
  Gene Name: potassium channel, voltage gated KQT-like subfamily Q, member 2
  Uniprot ID: O43526
  ENST ID: ENST00000360480
  CDS Start-End: 43-2577
gctgagcctgagcccgacccggggcgcctcccgccaggcaccatggtgcagaagtcgcgcaacggcggcgtataccccggcccgagcggggagaagaagctgaaggtgggcttcgtggggctggaccccggcgcgcccgactccacccgggacggggcgctgctgatcgccggctccgaggcccccaagcgcggcagcatcctcagcaaacctcgcgcgggcggcgcgggcgccgggaagccccccaagcgcaacgccttctaccgcaagctgcagaatttcctctacaacgtgctggagcggccgcgcggctgggcgttcatctaccacgcctacgtgttcctcctggttttctcctgcctcgtgctgtctgtgttttccaccatcaaggagtatgagaagagctcggagggggccctctacatcctggaaatcgtgactatcgtggtgtttggcgtggagtacttcgtgcggatctgggccgcaggctgctgctgccggtaccgtggctggagggggcggctcaagtttgcccggaaaccgttctgtgtgattgacatcatggtgctcatcgcctccattgcggtgctggccgccggctcccagggcaacgtctttgccacatctgcgctccggagcctgcgcttcctgcagattctgcggatgatccgcatggaccggcggggaggcacctggaagctgctgggctctgtggtctatgcccacagcaaggagctggtcactgcctggtacatcggcttcctttgtctcatcctggcctcgttcctggtgtacttggcagagaagggggagaacgaccactttgacacctacgcggatgcactctggtggggcctgatcacgctgaccaccattggctacggggacaagtacccccagacctggaacggcaggctccttgcggcaaccttcaccctcatcggtgtctccttcttcgcgctgcctgcaggcatcttggggtctgggtttgccctgaaggttcaggagcagcacaggcagaagcactttgagaagaggcggaacccggcagcaggcctgatccagtcggcctggagattctacgccaccaacctctcgcgcacagacctgcactccacgtggcagtactacgagcgaacggtcaccgtgcccatgtacagacttatccccccgctgaaccagctggagctgctgaggaacctcaagagtaaatctggactcgctttcaggaaggaccccccgccggagccgtctccaagccagaaggtcagtttgaaagatcgtgtcttctccagcccccgaggcgtggctgccaaggggaaggggtccccgcaggcccagactgtgaggcggtcacccagcgccgaccagagcctcgaggacagccccagcaaggtgcccaagagctggagcttcggggaccgcagccgggcacgccaggctttccgcatcaagggtgccgcgtcacggcagaactcagaagaagcaagcctccccggagaggacattgtggatgacaagagctgcccctgcgagtttgtgaccgaggacctgaccccgggcctcaaagtcagcatcagagccgtgtgtgtcatgcggttcctggtgtccaagcggaagttcaaggagagcctgcggccctacgacgtgatggacgtcatcgagcagtactcagccggccacctggacatgctgtcccgaattaagagcctgcagtccagagtggaccagatcgtggggcggggcccagcgatcacggacaaggaccgcaccaagggcccggccgaggcggagctgcccgaggaccccagcatgatgggacggctcgggaaggtggagaagcaggtcttgtccatggagaagaagctggacttcctggtgaatatctacatgcagcggatgggcatccccccgacagagaccgaggcctactttggggccaaagagccggagccggcgccgccgtaccacagcccggaagacagccgggagcatgtcgacaggcacggctgcattgtcaagatcgtgcgctccagcagctccacgggccagaagaacttctcggcgcccccggccgcgccccctgtccagtgtccgccctccacctcctggcagccacagagccacccgcgccagggccacggcacctcccccgtgggggaccacggctccctggtgcgcatcccgccgccgcctgcccacgagcggtcgctgtccgcctacggcgggggcaaccgcgccagcatggagttcctgcggcaggaggacaccccgggctgcaggccccccgaggggaacctgcgggacagcgacacgtccatctccatcccgtccgtggaccacgaggagctggagcgttccttcagcggcttcagcatctcccagtccaaggagaacctggatgctctcaacagctgctacgcggccgtggcgccttgtgccaaagtcaggccctacattgcggagggagagtcagacaccgactccgacctctgtaccccgtgcgggcccccgccacgctcggccaccggcgagggtccctttggtgacgtgggctgggccgggcccaggaagtgaggcggcgctgggccagtggacccgcccgcggccctcctcagcacggtgcctccgaggttttgaggcgggaaccctctggggcccttttcttacagtaactgagtgtggcgggaagggtgggccctggaggggcccatgtgggctgaaggatgggggctcctggcagtgaccttttacaaaagttattttccaacaggg

SEQ ID NO: 168221 - DNA, 3004 bp, Homo sapiens
  Payload ID: 13097
  Gene Symbol: KCNQ2
  Gene Name: potassium channel, voltage gated KQT-like subfamily Q, member 2
  ENST ID: ENST00000370224
  CDS Start-End: 136-2436
cccggcaggagtgcggaaccgccgcctcggccatgcggctcccggccggggggcctgggctggggcccgcgccgccccccgcgctccgcccccgctgagcctgagcccgacccggggcgcctcccgccaggcaccatggtgcagaagtcgcgcaacggcggcgtataccccggcccgagcggggagaagaagctgaaggtgggcttcgtggggctggaccccggcgcgcccgactccacccgggacggggcgctgctgatcgccggctccgaggcccccaagcgcggcagcatcctcagcaaacctcgcgcgggcggcgcgggcgccgggaagccccccaagcgcaacgccttctaccgcaagctgcagaatttcctctacaacgtgctggagcggccgcgcggctgggcgttcatctaccacgcctacgtgttcctcctggttttctcctgcctcgtgctgtctgtgttttccaccatcaaggagtatgagaagagctcggagggggccctctacatcctggaaatcgtgactatcgtggtgtttggcgtggagtacttcgtgcggatctgggccgcaggctgctgctgccggtaccgtggctggagggggcggctcaagtttgcccggaaaccgttctgtgtgattgacatcatggtgctcatcgcctccattgcggtgctggccgccggctcccagggcaacgtctttgccacatctgcgctccggagcctgcgcttcctgcagattctgcggatgatccgcatggaccggcggggaggcacctggaagctgctgggctctgtggtctatgcccacagcaaggagctggtcactgcctggtacatcggcttcctttgtctcatcctggcctcgttcctggtgtacttggcagagaagggggagaacgaccactttgacacctacgcggatgcactctggtggggcctgatcacgctgaccaccattggctacggggacaagtacccccagacctggaacggcaggctccttgcggcaaccttcaccctcatcggtgtctccttcttcgcgctgcctgcaggcatcttggggtctgggtttgccctgaaggttcaggagcagcacaggcagaagcactttgagaagaggcggaacccggcagcaggcctgatccagtcggcctggagattctacgccaccaacctctcgcgcacagacctgcactccacgtggcagtactacgagcgaacggtcaccgtgcccatgtacagacttatccccccgctgaaccagctggagctgctgaggaacctcaagagtaaatctggactcgctttcaggaaggaccccccgccggagccgtctccaagccagaaggtcagtttgaaagatcgtgtcttctccagcccccgaggcgtggctgccaaggggaaggggtccccgcaggcccagactgtgaggcggtcacccagcgccgaccagagcctcgaggacagccccagcaaggtgcccaagagctggagcttcggggaccgcagccgggcacgccaggctttccgcatcaagggtgccgcgtcacggcagaactcagaagaagcaagcctccccggagaggacattgtggatgacaagagctgcccctgcgagtttgtgaccgaggacctgaccccgggcctcaaagtcagcatcagagccgtgtgtgtcatgcggttcctggtgtccaagcggaagttcaaggagagcctgcggccctacgacgtgatggacgtcatcgagcagtactcagccggccacctggacatgctgtcccgaattaagagcctgcagtccaggatagatatgattgtgggtcccccgcccccttcaactccccggcacaagaagtaccccaccaaaggacccacggcccctccgagagagtcaccccagtactcacctagagtggaccagatcgtggggcggggcccagcgatcacggacaaggaccgcaccaagggcccggccgaggcggagctgcccgaggaccccagcatgatgggacggctcgggaaggtggagaagcaggtcttgtccatggagaagaagctggacttcctggtgaatatctacatgcagcggatgggcatccccccgacagagaccgaggcctactttggggccaaagagccggagccggcgccgccgtaccacagcccggaagacagccgggagcatgtcgacaggcacggctgcattgtcaagatcgtgcgctccagcagctccacgggccagaagaacttctcggcgcccccggccgcgccccctgtccagtgtccgccctccacctcctggcagccacagagccacccgcgccagggccacggcacctcccccgtgggggaccacggctccctgggacgggctccagagacacgcgcagggcaggaggggtctcacggaggggtctcgcactgaggcgcccagagctggtggtcccgctggacgccatccctctgcccgggatccacacggcccacgtgtgcccgccatgcccgcgccccacgccattgcagtctgccatcctctggccgtgacggtggctgcagcttccccatttgcgccgttgcctctggctgtctgcacttttgttcatgctccaaagaacatttcataatgccttcagtaccgacgtacacttctgaccattttgtatgtgtccttgtgccgtagtgaccaggcctttttttggtggatgtgttaccccgcacacttcaatctcaactttgtgcaccgtccattttctagggatagacgcccagggaatgaactctagttttctaacagattagctgagatattaacttactcacacggacaggttgatgccagagccgtaagaatgcgccagtgcgggtttgcgggggacttcgggtgtggggtcctgcggccgcgatggccgtggaaggttctggggatccctgctgccacggggacgagttcggacgccaggtggacctgtgcactcagtaaaacgcagtgattc

SEQ ID NO: 168222 - DNA, 1139 bp, Homo sapiens
  Payload ID: 13097
  Gene Symbol: KCNQ2
  Gene Name: potassium channel, voltage gated KQT-like subfamily Q, member 2
  ENST ID: ENST00000626962
  CDS Start-End: 1-1139
gttcctcctggttttctcctgcctcgtgctgtctgtgttttccaccatcaaggagtatgagaagagctcggagggggccctctacatcctggaaatcgtgactatcgtggtgtttggcgtggagtacttcgtgcggatctgggccgcaggctgctgctgccggtaccgtggctggagggggcggctcaagtttgcccggaaaccgttctgtgtgattgacatcatggtgctcatcgcctccattgcggtgctggccgccggctcccagggcaacgtctttgccacatctgcgctccggagcctgcgcttcctgcagattctgcggatgatccgcatggaccggcggggaggcacctggaagctgctgggctctgtggtctatgcccacagcaaggagctggtcactgcctggtacatcggcttcctttgtctcatcctggcctcgttcctggtgtacttggcagagaagggggagaacgaccactttgacacctacgcggatgcactctggtggggcctgatcacgctgaccaccattggctacggggacaagtacccccagacctggaacggcaggctccttgcggcaaccttcaccctcatcggtgtctccttcttcgcgctgcctgcaggcatcttggggtctgggtttgccctgaaggttcaggagcagcacaggcagaagcactttgagaagaggcggaacccggcagcaggcctgatccagtcggcctggagattctacgccaccaacctctcgcgcacagacctgcactccacgtggcagtactacgagcgaacggtcaccgtgcccatgtacagttcgcaaactcaaacctacggggcctccagacttatccccccgctgaaccagctggagctgctgaggaacctcaagagtaaatctggactcgctttcaggaaggaccccccgccggagccgtctccaagcccccgaggcgtggctgccaaggggaaggggtccccgcaggcccagactgtgaggcggtcacccagcgccgaccagagcctcgaggacagccccagcaaggtgcccaagagctggagcttcggggaccgcagccgggcacgccaggctttccgcatcaagggtgccgcgtcacggcagaactcagaag

SEQ ID NO: 168223 - DNA, 1109 bp, Homo sapiens
  Payload ID: 13097
  Gene Symbol: KCNQ2
  Gene Name: potassium channel, voltage gated KQT-like subfamily Q, member 2
  ENST ID: ENST00000627416
  CDS Start-End: 1-1109
gttcctcctggttttctcctgcctcgtgctgtctgtgttttccaccatcaaggagtatgagaagagctcggagggggccctctacatcctggaaatcgtgactatcgtggtgtttggcgtggagtacttcgtgcggatctgggccgcaggctgctgctgccggtaccgtggctggagggggcggctcaagtttgcccggaaaccgttctgtgtgattgacatcatggtgctcatcgcctccattgcggtgctggccgccggctcccagggcaacgtctttgccacatctgcgctccggagcctgcgcttcctgcagattctgcggatgatccgcatggaccggcggggaggcacctggaagctgctgggctctgtggtctatgcccacagcaaggagctggtcactgcctggtacatcggcttcctttgtctcatcctggcctcgttcctggtgtacttggcagagaagggggagaacgaccactttgacacctacgcggatgcactctggtggggcctgatcacgctgaccaccattggctacggggacaagtacccccagacctggaacggcaggctccttgcggcaaccttcaccctcatcggtgtctccttcttcgcgctgcctgcaggcatcttggggtctgggtttgccctgaaggttcaggagcagcacaggcagaagcactttgagaagaggcggaacccggcagcaggcctgatccagtcggcctggagattctacgccaccaacctctcgcgcacagacctgcactccacgtggcagtactacgagcgaacggtcaccgtgcccatgtacagacttatccccccgctgaaccagctggagctgctgaggaacctcaagagtaaatctggactcgctttcaggaaggaccccccgccggagccgtctccaagcccccgaggcgtggctgccaaggggaaggggtccccgcaggcccagactgtgaggcggtcacccagcgccgaccagagcctcgaggacagccccagcaaggtgcccaagagctggagcttcggggaccgcagccgggcacgccaggctttccgcatcaagggtgccgcgtcacggcagaactcagaag

SEQ ID NO: 168224 - DNA, 716 bp, Homo sapiens
  Payload ID: 13097
  Gene Symbol: KCNQ2
  Gene Name: potassium channel, voltage gated KQT-like subfamily Q, member 2
  ENST ID: ENST00000625248
  CDS Start-End: 1-462
acatctgcgctccggagcctgcgcttcctgcagattctgcggatgatccgcatggaccggcggggaggcacctggaagctgctgggctctgtggtctatgcccacagcaaggagctggtcactgcctggtacatcggcttcctttgtctcatcctggcctcgttcctggtgtacttggcagagaagggggagaacgaccactttgacacctacgcggatgcactctggtggggcctgccccgagtcgccagcgggcgtccagcctgccctcaggggtgtgagcaggcccttcgtgtgactagagcctgcggtcccacagatcacgctgaccaccattggctacggggacaagtacccccagacctggaacggcaggctccttgcggcaaccttcaccctcatcggtgtctccttcttcgcgctgcctgcagttcaggagcagcacaggcagaagcactttgagaagaggcggaacccggcagcaggcctgatccagtcggcctggagattctacgccaccaacctctcgcgcacagacctgcactccacgtggcagtactacgagcgaacggtcaccgtgcccatgtacaggtaccgccgccgggcacctgccaccaagcaactgtttcattttttattttccatttgttcttaaaccccactttttgttgttcattattttgattgattttttttctttaaaatgtatttttcac

SEQ ID NO: 168225 - DNA, 1145 bp, Homo sapiens
  Payload ID: 13097
  Gene Symbol: KCNQ2
  Gene Name: potassium channel, voltage gated KQT-like subfamily Q, member 2
  ENST ID: ENST00000629518
  CDS Start-End: 1-1145
gttcctcctggttttctcctgcctcgtgctgtctgtgttttccaccatcaaggagtatgagaagagctcggagggggccctctacatcctggaaatcgtgactatcgtggtgtttggcgtggagtacttcgtgcggatctgggccgcaggctgctgctgccggtaccgtggctggagggggcggctcaagtttgcccggaaaccgttctgtgtgattgacatcatggtgctcatcgcctccattgcggtgctggccgccggctcccagggcaacgtctttgccacatctgcgctccggagcctgcgcttcctgcagattctgcggatgatccgcatggaccggcggggaggcacctggaagctgctgggctctgtggtctatgcccacagcaaggagctggtcactgcctggtacatcggcttcctttgtctcatcctggcctcgttcctggtgtacttggcagagaagggggagaacgaccactttgacacctacgcggatgcactctggtggggcctgatcacgctgaccaccattggctacggggacaagtacccccagacctggaacggcaggctccttgcggcaaccttcaccctcatcggtgtctccttcttcgcgctgcctgcaggcatcttggggtctgggtttgccctgaaggttcaggagcagcacaggcagaagcactttgagaagaggcggaacccggcagcaggcctgatccagtcggcctggagattctacgccaccaacctctcgcgcacagacctgcactccacgtggcagtactacgagcgaacggtcaccgtgcccatgtacagacttatccccccgctgaaccagctggagctgctgaggaacctcaagagtaaatctggactcgctttcaggaaggaccccccgccggagccgtctccaagccagaaggtcagtttgaaagatcgtgtcttctccagcccccgaggcgtggctgccaaggggaaggggtccccgcaggcccagactgtgaggcggtcacccagcgccgaccagagcctcgaggacagccccagcaaggtgcccaagagctggagcttcggggaccgcagccgggcacgccaggctttccgcatcaagggtgccgcgtcacggcagaactcagaag

SEQ ID NO: 168226 - DNA, 2925 bp, Homo sapiens
  Payload ID: 13097
  Gene Symbol: KCNQ2
  Gene Name: potassium channel, voltage gated KQT-like subfamily Q, member 2
  ENST ID: ENST00000625514
  CDS Start-End: 93-2357
ggccggggggcctgggctggggcccgcgccgccccccgcgctccgcccccgctgagcctgagcccgacccggggcgcctcccgccaggcaccatggtgcagaagtcgcgcaacggcggcgtataccccggcccgagcggggagaagaagctgaaggtgggcttcgtggggctggaccccggcgcgcccgactccacccgggacggggcgctgctgatcgccggctccgaggcccccaagcgcggcagcatcctcagcaaacctcgcgcgggcggcgcgggcgccgggaagccccccaagcgcaacgccttctaccgcaagctgcagaatttcctctacaacgtgctggagcggccgcgcggctgggcgttcatctaccacgcctacgtgttcctcctggttttctcctgcctcgtgctgtctgtgttttccaccatcaaggagtatgagaagagctcggagggggccctctacatcctggaaatcgtgactatcgtggtgtttggcgtggagtacttcgtgcggatctgggccgcaggctgctgctgccggtaccgtggctggagggggcggctcaagtttgcccggaaaccgttctgtgtgattgacatcatggtgctcatcgcctccattgcggtgctggccgccggctcccagggcaacgtctttgccacatctgcgctccggagcctgcgcttcctgcagattctgcggatgatccgcatggaccggcggggaggcacctggaagctgctgggctctgtggtctatgcccacagcaaggagctggtcactgcctggtacatcggcttcctttgtctcatcctggcctcgttcctggtgtacttggcagagaagggggagaacgaccactttgacacctacgcggatgcactctggtggggcctgatcacgctgaccaccattggctacggggacaagtacccccagacctggaacggcaggctccttgcggcaaccttcaccctcatcggtgtctccttcttcgcgctgcctgcaggcatcttggggtctgggtttgccctgaaggttcaggagcagcacaggcagaagcactttgagaagaggcggaacccggcagcaggcctgatccagtcggcctggagattctacgccaccaacctctcgcgcacagacctgcactccacgtggcagtactacgagcgaacggtcaccgtgcccatgtacagacttatccccccgctgaaccagctggagctgctgaggaacctcaagagtaaatctggactcgctttcaggaaggaccccccgccggagccgtctccaagcccccgaggcgtggctgccaaggggaaggggtccccgcaggcccagactgtgaggcggtcacccagcgccgaccagagcctcgaggacagccccagcaaggtgcccaagagctggagcttcggggaccgcagccgggcacgccaggctttccgcatcaagggtgccgcgtcacggcagaactcagaagaagcaagcctccccggagaggacattgtggatgacaagagctgcccctgcgagtttgtgaccgaggacctgaccccgggcctcaaagtcagcatcagagccgtgtgtgtcatgcggttcctggtgtccaagcggaagttcaaggagagcctgcggccctacgacgtgatggacgtcatcgagcagtactcagccggccacctggacatgctgtcccgaattaagagcctgcagtccaggatagatatgattgtgggtcccccgcccccttcaactccccggcacaagaagtaccccaccaaaggacccacggcccctccgagagagtcaccccagtactcacctagagtggaccagatcgtggggcggggcccagcgatcacggacaaggaccgcaccaagggcccggccgaggcggagctgcccgaggaccccagcatgatgggacggctcgggaaggtggagaagcaggtcttgtccatggagaagaagctggacttcctggtgaatatctacatgcagcggatgggcatccccccgacagagaccgaggcctactttggggccaaagagccggagccggcgccgccgtaccacagcccggaagacagccgggagcatgtcgacaggcacggctgcattgtcaagatcgtgcgctccagcagctccacgggccagaagaacttctcggcgcccccggccgcgccccctgtccagtgtccgccctccacctcctggcagccacagagccacccgcgccagggccacggcacctcccccgtgggggaccacggctccctgggacgggctccagagacacgcgcagggcaggaggggtctcacggaggggtctcgcactgaggcgcccagagctggtggtcccgctggacgccatccctctgcccgggatccacacggcccacgtgtgcccgccatgcccgcgccccacgccattgcagtctgccatcctctggccgtgacggtggctgcagcttccccatttgcgccgttgcctctggctgtctgcacttttgttcatgctccaaagaacatttcataatgccttcagtaccgacgtacacttctgaccattttgtatgtgtccttgtgccgtagtgaccaggcctttttttggtggatgtgttaccccgcacacttcaatctcaactttgtgcaccgtccattttctagggatagacgcccagggaatgaactctagttttctaacagattagctgagatattaacttactcacacggacaggttgatgccagagccgtaagaatgcgccagtgcgggtttgcgggggacttcgggtgtggggtcctgcggccgcgatggccgtggaaggttctggggatccctgctgccacggggacgagttcggacgccaggtggacctgtgcactcagtaaaacgcagtgattc

SEQ ID NO: 168227 - DNA, 2399 bp, Homo sapiens
  Payload ID: 13097
  Gene Symbol: KCNQ2
  Gene Name: potassium channel, voltage gated KQT-like subfamily Q, member 2
  ENST ID: ENST00000629676
  CDS Start-End: 93-2030
ggccggggggcctgggctggggcccgcgccgccccccgcgctccgcccccgctgagcctgagcccgacccggggcgcctcccgccaggcaccatggtgcagaagtcgcgcaacggcggcgtataccccggcccgagcggggagaagaagctgaaggtgggcttcgtggggctggaccccggcgcgcccgactccacccgggacggggcgctgctgatcgccggctccgaggcccccaagcgcggcagcatcctcagcaaacctcgcgcgggcggcgcgggcgccgggaagccccccaagcgcaacgccttctaccgcaagctgcagaatttcctctacaacgtgctggagcggccgcgcggctgggcgttcatctaccacgcctacgtgttcctcctggttttctcctgcctcgtgctgtctgtgttttccaccatcaaggagtatgagaagagctcggagggggccctctacatcctggaaatcgtgactatcgtggtgtttggcgtggagtacttcgtgcggatctgggccgcaggctgctgctgccggtaccgtggctggagggggcggctcaagtttgcccggaaaccgttctgtgtgattgacatcatggtgctcatcgcctccattgcggtgctggccgccggctcccagggcaacgtctttgccacatctgcgctccggagcctgcgcttcctgcagattctgcggatgatccgcatggaccggcggggaggcacctggaagctgctgggctctgtggtctatgcccacagcaaggagctggtcactgcctggtacatcggcttcctttgtctcatcctggcctcgttcctggtgtacttggcagagaagggggagaacgaccactttgacacctacgcggatgcactctggtggggcctgatcacgctgaccaccattggctacggggacaagtacccccagacctggaacggcaggctccttgcggcaaccttcaccctcatcggtgtctccttcttcgcgctgcctgcaggcatcttggggtctgggtttgccctgaaggttcaggagcagcacaggcagaagcactttgagaagaggcggaacccggcagcaggcctgatccagtcggcctggagattctacgccaccaacctctcgcgcacagacctgcactccacgtggcagtactacgagcgaacggtcaccgtgcccatgtacagacttatccccccgctgaaccagctggagctgctgaggaacctcaagagtaaatctggactcgctttcaggaaggaccccccgccggagccgtctccaagccagaaggtcagtttgaaagatcgtgtcttctccagcccccgaggcgtggctgccaaggggaaggggtccccgcaggcccagactgtgaggcggtcacccagcgccgaccagagcctcgaggacagccccagcaaggtgcccaagagctggagcttcggggaccgcagccgggcacgccaggctttccgcatcaagggtgccgcgtcacggcagaactcagaagaagcaagcctccccggagaggacattgtggatgacaagagctgcccctgcgagtttgtgaccgaggacctgaccccgggcctcaaagtcagcatcagagccgtgtgtgtcatgcggttcctggtgtccaagcggaagttcaaggagagcctgcggccctacgacgtgatggacgtcatcgagcagtactcagccggccacctggacatgctgtcccgaattaagagcctgcagtccagggacgggctccagagacacgcgcagggcaggaggggtctcacggaggggtctcgcactgaggcgcccagagctggtggtcccgctggacgccatccctctgcccgggatccacacggcccacgtgtgcccgccatgcccgcgccccacgccattgcagtctgccatcctctggccgtgacggtggctgcagcttccccatttgcgccgttgcctctggctgtctgcacttttgttcatgctccaaagaacatttcataatgccttcagtaccgacgtacacttctgaccattttgtatgtgtccttgtgccgtagtgaccaggcctttttttggtggatgtgttaccccgcacacttcaatctcaactttgtgcaccgtccattttctagggatagacgcccagggaatgaactctagttttctaacagattagctgagatattaacttactcacacggacaggttgatgccagagccgtaagaatgcgccagtgcgggtttgcgggggacttcgggtgtggggtcctgcggccgcgatggccgtggaaggttctggggatccctgctgccacggggacgagttcggacgccaggtggacctgtgcactcagtaaaacgcagtgattc

SEQ ID NO: 168228 - DNA, 1229 bp, Homo sapiens
  Payload ID: 13097
  Gene Symbol: KCNQ2
  Gene Name: potassium channel, voltage gated KQT-like subfamily Q, member 2
  ENST ID: ENST00000627948
  CDS Start-End: 1-1229
gttcctcctggttttctcctgcctcgtgctgtctgtgttttccaccatcaaggagtatgagaagagctcggagggggccctctacatcctggaaatcgtgactatcgtggtgtttggcgtggagtacttcgtgcggatctgggccgcaggctgctgctgccggtaccgtggctggagggggcggctcaagtttgcccggaaaccgttctgtgtgattgacatcatggtgctcatcgcctccattgcggtgctggccgccggctcccagggcaacgtctttgccacatctgcgctccggagcctgcgcttcctgcagattctgcggatgatccgcatggaccggcggggaggcacctggaagctgctgggctctgtggtctatgcccacagcaaggagctggtcactgcctggtacatcggcttcctttgtctcatcctggcctcgttcctggtgtacttggcagagaagggggagaacgaccactttgacacctacgcggatgcactctggtggggcctgatcacgctgaccaccattggctacggggacaagtacccccagacctggaacggcaggctccttgcggcaaccttcaccctcatcggtgtctccttcttcgcgctgcctgcaggcatcttggggtctgggtttgccctgaaggttcaggagcagcacaggcagaagcactttgagaagaggcggaacccggcagcaggcctgatccagtcggcctggagattctacgccaccaacctctcgcgcacagacctgcactccacgtggcagtactacgagcgaacggtcaccgtgcccatgtacagttcgcaaactcaaacctacggggcctccagacttatccccccgctgaaccagctggagctgctgaggaacctcaagagtaaatctggactcgctttcaggaaggaccccccgccggagccgtctccaagtaaaggcagcccgtgcagagggcccctgtgtggatgctgccccggacgctctagccagaaggtcagtttgaaagatcgtgtcttctccagcccccgaggcgtggctgccaaggggaaggggtccccgcaggcccagactgtgaggcggtcacccagcgccgaccagagcctcgaggacagccccagcaaggtgcccaagagctggagcttcggggaccgcagccgggcacgccaggctttccgcatcaagggtgccgcgtcacggcagaactcagaag

SEQ ID NO: 168229 - DNA, 950 bp, Homo sapiens
  Payload ID: 13097
  Gene Symbol: KCNQ2
  Gene Name: potassium channel, voltage gated KQT-like subfamily Q, member 2
  ENST ID: ENST00000630648
  CDS Start-End: 1-886
gttcctcctggttttctcctgcctcgtgctgtctgtgttttccaccatcaaggagtatgagaagagctcggagggggccctctacatcctggaaatcgtgactatcgtggtgtttggcgtggagtacttcgtgcggatctgggccgcaggctgctgctgccggtaccgtggctggagggggcggctcaagtttgcccggaaaccgttctgtgtgattgacatcatggtgctcatcgcctccattgcggtgctggccgccggctcccagggcaacgtctttgccacatctgcgctccggagcctgcgcttcctgcagattctgcggatgatccgcatggaccggcggggaggcacctggaagctgctgggctctgtggtctatgcccacagcaaggagctggtcactgcctggtacatcggcttcctttgtctcatcctggcctcgttcctggtgtacttggcagagaagggggagaacgaccactttgacacctacgcggatgcactctggtggggcctgatcacgctgaccaccattggctacggggacaagtacccccagacctggaacggcaggctccttgcggcaaccttcaccctcatcggtgtctccttcttcgcgctgcctgcaggcatcttggggtctgggtttgccctgaaggttcaggagcagcacaggcagaagcactttgagaagaggcggaacccggcagcaggcctgatccagtcggcctggagattctacgccaccaacctctcgcgcacagacctgcactccacgtggcagtactacgagcgaacggtcaccgtgcccatgtacaggtaccgccgccgggcacctgccaccaagcaactgtttcattttttattttccatttgttcttaaaccccactttttgttgttcattattttgattgattttttttctttaaaatgtatttttcacaaa

SEQ ID NO: 168230 - DNA, 716 bp, Homo sapiens; identical to SEQ ID NO: 168224
  Payload ID: 13097
  Gene Symbol: KCNQ2
  Gene Name: potassium channel, voltage gated KQT-like subfamily Q, member 2
  ENST ID: ENST00000629498
  CDS Start-End: 1-462

SEQ ID NO: 168231 - DNA, 585 bp, Homo sapiens
  Payload ID: 13097
  Gene Symbol: KCNQ2
  Gene Name: potassium channel, voltage gated KQT-like subfamily Q, member 2
  ENST ID: ENST00000628732
  CDS Start-End: 1-585
agacctggaacggcaggctccttgcggcaaccttcaccctcatcggtgtctccttcttcgcgctgcctgcaggcatcttggggtctgggtttgccctgaaggttcaggagcagcacaggcagaagcactttgagaagaggcggaacccggcagcaggcctgatccagtcggcctggagattctacgccaccaacctctcgcgcacagacctgcactccacgtggcagtactacgagcgaacggtcaccgtgcccatgtacagacttatccccccgctgaaccagctggagctgctgaggaacctcaagagtaaatctggactcgctttcaggaaggaccccccgccggagccgtctccaagccagaaggtcagtttgaaagatcgtgtcttctccagcccccgaggcgtggctgccaaggggaaggggtccccgcaggcccagactgtgaggcggtcacccagcgccgaccagagcctcgaggacagccccagcaaggtgcccaagagctggagcttcggggaccgcagccgggcacgccaggctttccgcatcaagggtgccgcgtcacggcagaactcagaag

SEQ ID NO: 168232 - DNA, 1145 bp, Homo sapiens; identical to SEQ ID NO: 168225
  Payload ID: 13097
  Gene Symbol: KCNQ2
  Gene Name: potassium channel, voltage gated KQT-like subfamily Q, member 2
  ENST ID: ENST00000628544
  CDS Start-End: 1-1145

SEQ ID NO: 168233 - DNA, 9213 bp, Homo sapiens
  Payload ID: 13097
  Gene Symbol: KCNQ2
  Gene Name: potassium channel, voltage gated KQT-like subfamily Q, member 2
  Uniprot ID: O43526
  ENST ID: ENST00000626839
  CDS Start-End: 215-2779
ggagccggcgcggccgcgggccaggcgccgaggtgcgcgcggagcgaggtggccgcagcgtctccgcgcgcggcccaagcccggcaggagtgcggaaccgccgcctcggccatgcggctcccggccggggggcctgggctggggcccgcgccgccccccgcgctccgcccccgctgagcctgagcccgacccggggcgcctcccgccaggcaccatggtgcagaagtcgcgcaacggcggcgtataccccggcccgagcggggagaagaagctgaaggtgggcttcgtggggctggaccccggcgcgcccgactccacccgggacggggcgctgctgatcgccggctccgaggcccccaagcgcggcagcatcctcagcaaacctcgcgcgggcggcgcgggcgccgggaagccccccaagcgcaacgccttctaccgcaagctgcagaatttcctctacaacgtgctggagcggccgcgcggctgggcgttcatctaccacgcctacgtgttcctcctggttttctcctgcctcgtgctgtctgtgttttccaccatcaaggagtatgagaagagctcggagggggccctctacatcctggaaatcgtgactatcgtggtgtttggcgtggagtacttcgtgcggatctgggccgcaggctgctgctgccggtaccgtggctggagggggcggctcaagtttgcccggaaaccgttctgtgtgattgacatcatggtgctcatcgcctccattgcggtgctggccgccggctcccagggcaacgtctttgccacatctgcgctccggagcctgcgcttcctgcagattctgcggatgatccgcatggaccggcggggaggcacctggaagctgctgggctctgtggtctatgcccacagcaaggagctggtcactgcctggtacatcggcttcctttgtctcatcctggcctcgttcctggtgtacttggcagagaagggggagaacgaccactttgacacctacgcggatgcactctggtggggcctgatcacgctgaccaccattggctacggggacaagtacccccagacctggaacggcaggctccttgcggcaaccttcaccctcatcggtgtctccttcttcgcgctgcctgcaggcatcttggggtctgggtttgccctgaaggttcaggagcagcacaggcagaagcactttgagaagaggcggaacccggcagcaggcctgatccagtcggcctggagattctacgccaccaacctctcgcgcacagacctgcactccacgtggcagtactacgagcgaacggtcaccgtgcccatgtacagttcgcaaactcaaacctacggggcctccagacttatccccccgctgaaccagctggagctgctgaggaacctcaagagtaaatctggactcgctttcaggaaggaccccccgccggagccgtctccaagccagaaggtcagtttgaaagatcgtgtcttctccagcccccgaggcgtggctgccaaggggaaggggtccccgcaggcccagactgtgaggcggtcacccagcgccgaccagagcctcgaggacagccccagcaaggtgcccaagagctggagcttcggggaccgcagccgggcacgccaggctttccgcatcaagggtgccgcgtcacggcagaactcagaagaagcaagcctccccggagaggacattgtggatgacaagagctgcccctgcgagtttgtgaccgaggacctgaccccgggcctcaaagtcagcatcagagccgtgtgtgtcatgcggttcctggtgtccaagcggaagttcaaggagagcctgcggccctacgacgtgatggacgtcatcgagcagtactcagccggccacctggacatgctgtcccgaattaagagcctgcagtccagagtggaccagatcgtggggcggggcccagcgatcacggacaaggaccgcaccaagggcccggccgaggcggagctgcccgaggaccccagcatgatgggacggctcgggaaggtggagaagcaggtcttgtccatggagaagaagctggacttcctggtgaatatctacatgcagcggatgggcatccccccgacagagaccgaggcctactttggggccaaagagccggagccggcgccgccgtaccacagcccggaagacagccgggagcatgtcgacaggcacggctgcattgtcaagatcgtgcgctccagcagctccacgggccagaagaacttctcggcgcccccggccgcgccccctgtccagtgtccgccctccacctcctggcagccacagagccacccgcgccagggccacggcacctcccccgtgggggaccacggctccctggtgcgcatcccgccgccgcctgcccacgagcggtcgctgtccgcctacggcgggggcaaccgcgccagcatggagttcctgcggcaggaggacaccccgggctgcaggccccccgaggggaacctgcgggacagcgacacgtccatctccatcccgtccgtggaccacgaggagctggagcgttccttcagcggcttcagcatctcccagtccaaggagaacctggatgctctcaacagctgctacgcggccgtggcgccttgtgccaaagtcaggccctacattgcggagggagagtcagacaccgactccgacctctgtaccccgtgcgggcccccgccacgctcggccaccggcgagggtccctttggtgacgtgggctgggccgggcccaggaagtgaggcggcgctgggccagtggacccgcccgcggccctcctcagcacggtgcctccgaggttttgaggcgggaaccctctggggcccttttcttacagtaactgagtgtggcgggaagggtgggccctggaggggcccatgtgggctgaaggatgggggctcctggcagtgaccttttacaaaagttattttccaacaggggctggagggctgggcagggccctgtggctccaggagcagcgtgcaggagcaaggctgccctgtccactctgctcagggccgcggccgacatcagcccggtgtgaggaggggcgggagtgatgacggggtgttgccagcgtggcaacaggcggggggttgtctcagccgagcccaggggaggcacaaagggcaggcctgttccctgaggacctgcgcaaagggcgggcctgtttggtgaggacctgcggccttgggtcccggtggggtttccgggcagctacaggcgggtgtggccggccgctgtgcgtggcctctgccttcacacctgacctgcccggcgggctttcctgttccccacctcaggggcgcccaaatacagagctattggttggcgtcttctccctgtaccttctgggatctgagggctctttccatggaagccagccccgaggtggagaccttcgcctgcagccgaggagcgggtggggcctgggaaccaaactggagccagagtggacgtccagccctctggtcttggcctccagagggagggcctggctcacggtggggccagggagccggctccaaagggtcttcaaaaagggggtccttgggggctccagctgcctcgccctggcctttctgtgggtgcgtgagagccagcagcaccccagccttggagaccgggggggcaggaccccaagtcctcccctctctcctgactgccctggccgggtgccggcactgcgagacccacctggtgagcaggcctcacagttcttagccagggccccacctcgcctgtgtcccaccagtgccccgacagacctggggcagggctgggccatgatgcagcgggccaggatagcctccaccgtcagcacagggccgccctccccgcctttccggaggaaaccactcccacctcagcccagctgtgcgccctccctagctctcctgccccctggagctgatggccccttctccactgaccgattccttagcggggcctcttggggtctcgggcctcgggtgcaccgtcccatgcccgtcctgttgtgggcaccgtggcccttggggcaggcggctctaatgcgggagcgagtccctagctccagacttaagaaccagaccccgggagcatctggcatttggcgtgacggcgtcgcaggcgggcctgggctccctggagagtggcctccctgggagtgagcagggctggggtcgtgggcgcaaatactcctgcagagcaagtgcaggggagtcctgggcccgtttctcctccacctgcgttttcagtgcacttggcttggctgggaggtcctgaggccctgaggccagcaggggaaccagtcctgagggagaggactttgaaagcagcatttgagggtcgtacgcccctggctggtgggggtcctggcgctcagggtgttcggggagccatgtctggcgtccattgtggggagctgctgccctggcctctctgcctacccccagcccggccagggcactcccaggccctgtcgccattgaggtgcctccgctgggctgtctcctcacccctccctgtgctggagcctgtcccaaaaaggtgccaactgggaggcctcggaagccactgtccaggctcccactgcctgtctgctctgttcccaaaggcagcgtgtgtggcctcgggccctgcggtggcatgaagcatcccttctggtgtgggcatcgctacgtgttttgggggcagcgtttcacggcggtgcccttgctgtctcccttgggctggctcgagcctggggtccatgtccctttgccgtcccgtcatggggcagggaatccatagcggggcccacaggcaggggtatgagtgcgtcccacccaacgcagcaccagccccggccaccgctccccgtgtccccagttccgtctcagctacctggactccaggaccctggagaagggagacctggcagtggagggaggctgtgctgtgtgtccccctgcaggtgtgaccccgcctgctctttcctcccccgccaggtgtggccccgcctgctctttcctcccccaccagtatggccccacctgctctttcctccccccccaaggtgtggccccacctgttctttcctcccctgccgaggtgtgaccccacctgctctttcctccctcccagtatggccccacctgctctttcctcccccgaggtgaggccccgcctgctctttcctcccatggggccgctgaggcatgagcacctgggcacaggttggggctctgcaggatgaggaagacaggccaatcccttccctcccagaagctggccgcccagcaggagggactgaggccagactcatgtccagcaaggaacgtgtggtgtgtcccctgggaagtctctgggccctgggaagagggaaggtgcacgtcctgggatggttgcggggccctgttttgggagacaaaggggtagagggtctgtcttgggcccccccagactctagcctgagcagtgcagccacctactgccccacctcagagaagtgcagcgggaaggaggctggaggtggtgcggcgctgcctcgggtgtctgcgtgaatgagcgtggccaaggaccagtgccacctcatggcaaagagctcccgcagtgtttgttagagtgcacatccctacgtgcccactggcacacacacgtgctcacatacatgtccgcatacaggcgtacacatgcacgcttgcacacatgcacacagaccacatagcacacatgtgcactgaccacacctgtatagaccatgcacagtacacatacgtgcatacacatgcctgcatacaggcatacacatgcacgcttacatgtacacgtgcacagatcacacacatgcacacacgtgtagctcacacacagtatacacatacacaagtgcacagaccacacacagcactaacacatgcacacacaaagtgcataggccacacagcacatgcacacaggtgcacagaccacacagcacacacaagtgcacagagcacactgcacacatgcacacacacacgcgtgcatgcacactcctcgcacttccagccttggagcccttctgtctctggtctttctctttgaccctgctgagtgtaagctgcctggggaggggctacaaggagtaattgtggctttaggggtcgtggtgatgctggaatgtcaagcgccgtcgtggggtatccgactgtccgggctcctggtccgcagtggcagagcgccaggcagagcccaatcagggtctcgtgctgcccttccctcccacagcctggcagccatccagaggaggggctctaccagatgccaaggtgccccggtgtctgtatgggtgtccggttgggtcctgtgtttggtctgccctggaggtgctgggccctcctgggatgggtggctcagcctcgaatcccaggccccagcccaggcaggtgctgctgcctgttgtggtttcctggcccagcttctccttctccctctgcataaaatcacagtccgtgagtcttccagctgccaccacggctgggacacgctgggggagggctcctcccatgcctcctgcacacagccgtctgagcagggcaggtgcccaacaccccccaccggaggacacgctgcccctcagcgatgcccctaccttttggggggcctcgtctcaagcccccccttggaggctgaaatcaccccaggcactgtgagggcttctccagggggcaccctttgagctgtgggtctgatcaccccaagtcccgcccggaggagaggcacagccagggcgtgtggtttaatgtttgcccccttcggggctggaggtctcagtgtttctagattccagaccctgctgccagagagacctgctgccggagagaaggggaggaggactccagctgggctcggtcccccacagtcagggacccccataaaggacacccccttctctctagaaagagctgggctctcagctatttctagttgcttcccagaagccgaggagcagaaggagctgtgagagctttgcagaaacgcccttgtccccgccctcctgagctatgaatgccgtacagagcagaggctggggcattggcaagatcacaggttgatgctgcacagccccattgacacaaaccctcaaagcagacgtgagagggacggttcacaaagctcggacctgccgtggagggtgcccggcagacgtggcgtgagagggacggctcacgaggcttggacctgctgtggagggtgcccagcagacgtggtgtgagaggaacggctcacgagacttggacctggtggagggtgcccagcagacgtggtgtgagagggacggctcacagggcttggacctgccatggagggtgcccggcagacgtggtgtgagagggatggttcacagggcttggacctgccatggagggtgcccggcagatgtggtgggagagagatggctcatgaggcttggacctgccgtggagggtgcccagcagacgtggtatgagagggatggctcacgaggcttggacctggtggagggtgcccggcagacgtgtgagagggacggttcacaaggcttggacctgccatggagggtgcccagcagacgtggtgtgagagggacagctcacgaggcttggacctgctgtggagggtgcccagcagggggctgagctctgaggggtgggtgctcagtgcacgggtgcccccagtgtcctctgatcctgtccggtgcctcccccaacccccacacccatgcagaactcccaggtcacatgcacgtatgtccagggcatgggggtggcgtgaagaggcctggtcagggcctttaggggctgcaggacggaatggccgcctggggagcctgtgtggctgtgccgggcagccatcctgcattcccacccagcgcgcagtctccacctcggccccagcaaagcgctaagcagccggagagacagccagggcggcttcctgaaggatgtgggatggtggactccggggtcgagggaatacgcaggttcctgtccctccgggagacctagagaagctgcacacccaggagctttccatgacccgggagcatgagtgaatgggggttccagtttgctgaactttgccgtcttgtaagggtgggggctgacggccgaccctgggaggaggtgacatcgccgggggaggttgtgggcaacggtggaggaggagagacgggaggggaccatttgggatggaggggcctcttcagagttttaaaaggcgtttgtggggtggagttgagtgtgctctgggcttggacacttgccgtggtgcccctggctggccgaggagactggctctggccaggggccccgtcctgagaggtcctcagcgtctgactctcggccaggcgccagcaaggaggggccggtccccggggctaccaggcaggcacgtgcacatcgccatcgccacacgccaactccgcctgggttttacaaagtcgttgccttaatgcatgtggacaggaactccctgaggtcgccccatgccccctggctgtgccaggtacggacgccctggaccctgcgaacaggtggggcgggcgaggggcccaagggacgggctccagagacacgcgcagggcaggaggggtctcacggaggggtctcgcactgaggcgcccagagctggtggtcccgctggacgccatccctctgcccgggatccacacggcccacgtgtgcccgccatgcccgcgccccacgccattgcagtctgccatcctctggccgtgacggtggctgcagcttccccatttgcgccgttgcctctggctgtctgcacttttgttcatgctccaaagaacatttcataatgccttcagtaccgacgtacacttctgaccattttgtatgtgtccttgtgccgtagtgaccaggcctttttttggtggatgtgttaccccgcacacttcaatctcaactttgtgcaccgtccattttctagggatagacgcccagggaatgaactctagttttctaacagattagctgagatattaacttactcacacggacaggttgatgccagagccgtaagaatgcgccagtgcgggtttgcgggggacttcgggtgtggggtcctgcggccgcgatggccgtggaaggttctggggatccctgctgccacggggacgagttcggacgccaggtggacctgtgcactcagtaaaacgcagtgattcaacctg

SEQ ID NO: 168234 - DNA, 1145 bp, Homo sapiens; identical to SEQ ID NO: 168225
  Payload ID: 13097
  Gene Symbol: KCNQ2
  Gene Name: potassium channel, voltage gated KQT-like subfamily Q, member 2
  ENST ID: ENST00000629641
  CDS Start-End: 1-1145

SEQ ID NO: 168235 - DNA, 1175 bp, Homo sapiens
  Payload ID: 13097
  Gene Symbol: KCNQ2
  Gene Name: potassium channel, voltage gated KQT-like subfamily Q, member 2
  ENST ID: ENST00000628790
  CDS Start-End: 1-1175
gttcctcctggttttctcctgcctcgtgctgtctgtgttttccaccatcaaggagtatgagaagagctcggagggggccctctacatcctggaaatcgtgactatcgtggtgtttggcgtggagtacttcgtgcggatctgggccgcaggctgctgctgccggtaccgtggctggagggggcggctcaagtttgcccggaaaccgttctgtgtgattgacatcatggtgctcatcgcctccattgcggtgctggccgccggctcccagggcaacgtctttgccacatctgcgctccggagcctgcgcttcctgcagattctgcggatgatccgcatggaccggcggggaggcacctggaagctgctgggctctgtggtctatgcccacagcaaggagctggtcactgcctggtacatcggcttcctttgtctcatcctggcctcgttcctggtgtacttggcagagaagggggagaacgaccactttgacacctacgcggatgcactctggtggggcctgatcacgctgaccaccattggctacggggacaagtacccccagacctggaacggcaggctccttgcggcaaccttcaccctcatcggtgtctccttcttcgcgctgcctgcaggcatcttggggtctgggtttgccctgaaggttcaggagcagcacaggcagaagcactttgagaagaggcggaacccggcagcaggcctgatccagtcggcctggagattctacgccaccaacctctcgcgcacagacctgcactccacgtggcagtactacgagcgaacggtcaccgtgcccatgtacagttcgcaaactcaaacctacggggcctccagacttatccccccgctgaaccagctggagctgctgaggaacctcaagagtaaatctggactcgctttcaggaaggaccccccgccggagccgtctccaagccagaaggtcagtttgaaagatcgtgtcttctccagcccccgaggcgtggctgccaaggggaaggggtccccgcaggcccagactgtgaggcggtcacccagcgccgaccagagcctcgaggacagccccagcaaggtgcccaagagctggagcttcggggaccgcagccgggcacgccaggctttccgcatcaagggtgccgcgtcacggcagaactcagaag

SEQ ID NO: 168236 - DNA, 1145 bp, Homo sapiens; identical to SEQ ID NO: 168225
  Payload ID: 13097
  Gene Symbol: KCNQ2
  Gene Name: potassium channel, voltage gated KQT-like subfamily Q, member 2
  ENST ID: ENST00000626723
  CDS Start-End: 1-1145

SEQ ID NO: 168237 - DNA, 2853 bp, Homo sapiens
  Payload ID: 13097
  Gene Symbol: KCNQ2
  Gene Name: potassium channel, voltage gated KQT-like subfamily Q, member 2
  ENST ID: ENST00000629241
  CDS Start-End: 93-2285
ggccggggggcctgggctggggcccgcgccgccccccgcgctccgcccccgctgagcctgagcccgacccggggcgcctcccgccaggcaccatggtgcagaagtcgcgcaacggcggcgtataccccggcccgagcggggagaagaagctgaaggtgggcttcgtggggctggaccccggcgcgcccgactccacccgggacggggcgctgctgatcgccggctccgaggcccccaagcgcggcagcatcctcagcaaacctcgcgcgggcggcgcgggcgccgggaagccccccaagcgcaacgccttctaccgcaagctgcagaatttcctctacaacgtgctggagcggccgcgcggctgggcgttcatctaccacgcctacgtgttcctcctggttttctcctgcctcgtgctgtctgtgttttccaccatcaaggagtatgagaagagctcggagggggccctctacatcctggaaatcgtgactatcgtggtgtttggcgtggagtacttcgtgcggatctgggccgcaggctgctgctgccggtaccgtggctggagggggcggctcaagtttgcccggaaaccgttctgtgtgattgacatcatggtgctcatcgcctccattgcggtgctggccgccggctcccagggcaacgtctttgccacatctgcgctccggagcctgcgcttcctgcagattctgcggatgatccgcatggaccggcggggaggcacctggaagctgctgggctctgtggtctatgcccacagcaaggagctggtcactgcctggtacatcggcttcctttgtctcatcctggcctcgttcctggtgtacttggcagagaagggggagaacgaccactttgacacctacgcggatgcactctggtggggcctgatcacgctgaccaccattggctacggggacaagtacccccagacctggaacggcaggctccttgcggcaaccttcaccctcatcggtgtctccttcttcgcgctgcctgcaggcatcttggggtctgggtttgccctgaaggttcaggagcagcacaggcagaagcactttgagaagaggcggaacccggcagcaggcctgatccagtcggcctggagattctacgccaccaacctctcgcgcacagacctgcactccacgtggcagtactacgagcgaacggtcaccgtgcccatgtacagacttatccccccgctgaaccagctggagctgctgaggaacctcaagagtaaatctggactcgctttcaggaaggaccccccgccggagccgtctccaagccagaaggtcagtttgaaagatcgtgtcttctccagcccccgaggcgtggctgccaaggggaaggggtccccgcaggcccagactgtgaggcggtcacccagcgccgaccagagcctcgaggacagccccagcaaggtgcccaagagctggagcttcggggaccgcagccgggcacgccaggctttccgcatcaagggtgccgcgtcacggcagaactcagaagaagcaagcctccccggagaggacattgtggatgacaagagctgcccctgcgagtttgtgaccgaggacctgaccccgggcctcaaagtcagcatcagagccgtgtgtgtcatgcggttcctggtgtccaagcggaagttcaaggagagcctgcggccctacgacgtgatggacgtcatcgagcagtactcagccggccacctggacatgctgtcccgaattaagagcctgcagtccagagtggaccagatcgtggggcggggcccagcgatcacggacaaggaccgcaccaagggcccggccgaggcggagctgcccgaggaccccagcatgatgggacggctcgggaaggtggagaagcaggtcttgtccatggagaagaagctggacttcctggtgaatatctacatgcagcggatgggcatccccccgacagagaccgaggcctactttggggccaaagagccggagccggcgccgccgtaccacagcccggaagacagccgggagcatgtcgacaggcacggctgcattgtcaagatcgtgcgctccagcagctccacgggccagaagaacttctcggcgcccccggccgcgccccctgtccagtgtccgccctccacctcctggcagccacagagccacccgcgccagggccacggcacctcccccgtgggggaccacggctccctgggacgggctccagagacacgcgcagggcaggaggggtctcacggaggggtctcgcactgaggcgcccagagctggtggtcccgctggacgccatccctctgcccgggatccacacggcccacgtgtgcccgccatgcccgcgccccacgccattgcagtctgccatcctctggccgtgacggtggctgcagcttccccatttgcgccgttgcctctggctgtctgcacttttgttcatgctccaaagaacatttcataatgccttcagtaccgacgtacacttctgaccattttgtatgtgtccttgtgccgtagtgaccaggcctttttttggtggatgtgttaccccgcacacttcaatctcaactttgtgcaccgtccattttctagggatagacgcccagggaatgaactctagttttctaacagattagctgagatattaacttactcacacggacaggttgatgccagagccgtaagaatgcgccagtgcgggtttgcgggggacttcgggtgtggggtcctgcggccgcgatggccgtggaaggttctggggatccctgctgccacggggacgagttcggacgccaggtggacctgtgcactcagtaaaacgcagtgattc

SEQ ID NO: 168238 - DNA, 545 bp, Homo sapiens
  Payload ID: 13097
  Gene Symbol: KCNQ2
  Gene Name: potassium channel, voltage gated KQT-like subfamily Q, member 2
  ENST ID: ENST00000629318
  CDS Start-End: 1-540
cggtcacccagcgccgaccagagcctcgaggacagccccagcaaggtgcccaagagctggagcttcggggaccgcagccgggcacgccaggctttccgcatcaagggtgccgcgtcacggcagaactcagaagaagcaagcctccccggagaggacattgtggatgacaagagctgcccctgcgagtttgtgaccgaggacctgaccccgggcctcaaagtcagcatcagagccgtgtgtgtcatgcggttcctggtgtccaagcggaagttcaaggagagcctgcggccctacgacgtgatggacgtcatcgagcagtactcagccggccacctggacatgctgtcccgaattaagagcctgcagtccaggcaagagccccgcctgcctgtccagcaggggacaagaacggggtgggcttctgggacaaagcccactgtggcccatggtgggagtgcagggggtgtgtgggcggggcctcctccccacccacgtcggcctctgtcagcttctgttgtgtcttcacaaagtctgttttaatattt

SEQ ID NO: 168239 - DNA, 133 bp, Homo sapiens
  Payload ID: 13097
  Gene Symbol: KCNQ2
  Gene Name: potassium channel, voltage gated KQT-like subfamily Q, member 2
  ENST ID: ENST00000630933
  CDS Start-End: 1-133
cggtcacccagcgccgaccagagcctcgaggacagccccagcaaggtgcccaagagctggagcttcggggaccgcagccgggcacgccaggctttccgcatcaagggtgccgcgtcacggcagaactcagaag

SEQ ID NO: 168240 - DNA, 688 bp, Homo sapiens
  Payload ID: 13097
  Gene Symbol: KCNQ2
  Gene Name: potassium channel, voltage gated KQT-like subfamily Q, member 2
  ENST ID: ENST00000627221
  CDS Start-End: 1-688
agacctggaacggcaggctccttgcggcaaccttcaccctcatcggtgtctccttcttcgcgctgcctgcaggcatcttggggtctgggtttgccctgaaggttcaggagcagcacaggcagaagcactttgagaagaggcggaacccggcagcaggcctgatccagtcggcctggagattctacgccaccaacctctcgcgcacagacctgcactccacgtggcagtactacgagcgaacggtcaccgtgcccatgtacagacttatccccccgctgaaccagctggagctgctgaggaacctcaagagtaaatctggactcgctttcaggaaggaccccccgccggagccgtctccaagccagaaggtcagtttgaaagatcgtgtcttctccagcccccgaggcgtggctgccaaggggaaggggtccccgcaggcccagactgtgaggcggtcacccagcgccgaccagagcctcgaggacagccccagcaaggtgcccaagagctggagcttcggggaccgcagccgggcacgccaggctttccgcatcaagggtgccgcgtcacggcagaactcagaagcaagcctccccggagaggacattgtggatgacaagagctgcccctgcgagtttgtgaccgaggacctgaccccgggcctcaaagtcagcatcagagccgtgtg

SEQ ID NO: 168241 - DNA, 1093 bp, Homo sapiens
  Payload ID: 13097
  Gene Symbol: KCNQ2
  Gene Name: potassium channel, voltage gated KQT-like subfamily Q, member 2
  ENST ID: ENST00000629338
  CDS Start-End: 1-1093
atcaaggagtatgagaagagctcggagggggccctctacatcctggaaatcgtgactatcgtggtgtttggcgtggagtacttcgtgcggatctgggccgcaggctgctgctgccggtaccgtggctggagggggcggctcaagtttgcccggaaaccgttctgtgtgattgacatcatggtgctcatcgcctccattgcggtgctggccgccggctcccagggcaacgtctttgccacatctgcgctccggagcctgcgcttcctgcagattctgcggatgatccgcatggaccggcggggaggcacctggaagctgctgggctctgtggtctatgcccacagcaaggagctggtcactgcctggtacatcggcttcctttgtctcatcctggcctcgttcctggtgtacttggcagagaagggggagaacgaccactttgacacctacgcggatgcactctggtggggcctgatcacgctgaccaccattggctacggggacaagtacccccagacctggaacggcaggctccttgcggcaaccttcaccctcatcggtgtctccttcttcgcgctgcctgcaggcatcttggggtctgggtttgccctgaaggttcaggagcagcacaggcagaagcactttgagaagaggcggaacccggcagcaggcctgatccagtcggcctggagattctacgccaccaacctctcgcgcacagacctgcactccacgtggcagtactacgagcgaacggtcaccgtgcccatgtacagttcgcaaactcaaacctacggggcctccagacttatccccccgctgaaccagctggagctgctgaggaacctcaagagtaaatctggactcgctttcaggaaggaccccccgccggagccgtctccaagcccccgaggcgtggctgccaaggggaaggggtccccgcaggcccagactgtgaggcggtcacccagcgccgaccagagcctcgaggacagccccagcaaggtgcccaagagctggagcttcggggaccgcagccgggcacgccaggctttccgcatcaagggtgccgcgtcacggcagaactcagaag

SEQ ID NO: 168242 - DNA, 804 bp, Homo sapiens
  Payload ID: 13097
  Gene Symbol: KCNQ2
  Gene Name: potassium channel, voltage gated KQT-like subfamily Q, member 2
  ENST ID: ENST00000626684
  CDS Start-End: 1-577
ccggcggggaggcacctggaagctgctgggctctgtggtctatgcccacagcaaggagctggtcactgcctggtacatcggcttcctttgtctcatcctggcctcgttcctggtgtacttggcagagaagggggagaacgaccactttgacacctacgcggatgcactctggtggggcctgatcacgctgaccaccattggctacggggacaagtacccccagacctggaacggcaggctccttgcggcaaccttcaccctcatcggtgtctccttcttcgcgctgcctgcaggcatcttggggtctgggtttgccctgaaggttcaggagcagcacaggcagaagcactttgagaagaggcggaacccggcagcaggcctgatccaggtgagtccaggtgtcccccggggaccagcacagcccttgtcctggtcccaccttgttgaggagtggaggccgctggggctttggcattgccctgtctgtggatgggccacagcgctcaccctctgcaggaatctgtggaaggagcgaggatgtgaagtgtgtgtgttgagaaatggctccaacccctgaggctgcacaggggtggctcgtgtgaggacgctggggtggcccttgccttgtgtgggtgctggggcccggccatcaggtcctctctaccgcaccctgggaggtgagcacacccgttctgcagctgcagggccaaggctcctagagcccacacactgcagtgagtcagtgcctgacctcgtctgacccctgatgctggctgtgggcccccatgatgcccgcccggaccc

SEQ ID NO: 168243 - DNA, 11441 bp, Homo sapiens
  Payload ID: 13098
  Gene Symbol: KCNQ3
  Gene Name: potassium channel, voltage gated KQT-like subfamily Q, member 3
  Uniprot ID: O43525
  ENST ID: ENST00000388996
  CDS Start-End: 422-3040
ggctggcaccgggcttgtaaataaactgcgatgctgtcttgggctcgccggcctgggtgccgccgccgccgccgccgccccggagcgccggttccaggctcccgccgccgcgcgccctagcgcctccgcgccagcctcgcgcgccctcccagcttctccgcagcccccggcccgcgaccctcggggtcctgcggctgacccgcgcgggatgtgaccccctgaccccctgcctggcctcccctgccccccagggggcccgcctttgcctgcttttgggggggggtggggaggggcgcgcggatcatggcattggagttcccgggcttgcagccgccgccgccgcctcgttcacgcaccccgagcgccccttcttcccagagcagcagcggagaaggcgaagcggccggcgggggcgaggcagatggggctcaaggcgcgcagggcggcgggggcggctggcggcggcggcgacgggggcggcggaggcggcggggcggctaacccagccggaggggacgcggcggcggccggcgacgaggagcggaaagtggggctggcgcccggcgacgtggagcaagtcaccttggcgctcggggccggagccgacaaagacgggaccctgctgctggagggcggcggccgcgacgaggggcagcggaggaccccgcagggcatcgggctcctggccaagaccccgctgagccgcccagtcaagagaaacaacgccaagtaccggcgcatccaaactttgatctacgacgccctggagagaccgcggggctgggcgctgctttaccacgcgttggtgttcctgattgtcctggggtgcttgattctggctgtcctgaccacattcaaggagtatgagactgtctcgggagactggcttctgttactggagacatttgctattttcatctttggagccgagtttgctttgaggatctgggctgctggatgttgctgccgatacaaaggctggcggggccgactgaagtttgccaggaagcccctgtgcatgttggacatctttgtgctgattgcctctgtgccagtggttgctgtgggaaaccaaggcaatgttctggccacctccctgcgaagcctgcgcttcctgcagatcctgcgcatgctgcggatggaccggagaggtggcacctggaagcttctgggctcagccatctgtgcccacagcaaagaactcatcacggcctggtacatcggtttcctgacactcatcctttcttcatttcttgtctacctggttgagaaagacgtcccagaggtggatgcacaaggagaggagatgaaagaggagtttgagacctatgcagatgccctgtggtggggcctgatcacactggccaccattggctatggagacaagacacccaaaacgtgggaaggccgtctgattgccgccaccttttccttaattggcgtctccttttttgcccttccagcgggcatcctggggtccgggctggccctcaaggtgcaggagcaacaccgtcagaagcactttgagaaaaggaggaagccagctgctgagctcattcaggctgcctggaggtattatgctaccaaccccaacaggattgacctggtggcgacatggagattttatgaatcagtcgtctcttttcctttcttcaggaaagaacagctggaggcagcatccagccaaaagctgggtctcttggatcgggttcgcctttctaatcctcgtggtagcaatactaaaggaaagctatttacccctctgaatgtagatgccatagaagaaagtccttctaaagaaccaaagcctgttggcttaaacaataaagagcgtttccgcacggccttccgcatgaaagcctacgctttctggcagagttctgaagatgccgggacaggtgaccccatggcggaagacaggggctatgggaatgacttccccatcgaagacatgatccccaccctgaaggccgccatccgagccgtcagaattctacaattccgtctctataaaaaaaaattcaaggagactttgaggccttacgatgtgaaggatgtgattgagcagtattctgccgggcatctcgacatgctttccaggataaagtaccttcagacgagaatagatatgattttcacccctggacctccctccacgccaaaacacaagaagtctcagaaagggtcagcattcaccttcccatcccagcaatctcccaggaatgaaccatatgtagccagaccatccacatcagaaatcgaagaccaaagcatgatggggaagtttgtaaaagttgaaagacaggttcaggacatggggaagaagctggacttcctcgtggatatgcacatgcaacacatggaacggttgcaggtgcaggtcacggagtattacccaaccaagggcacctcctcgccagctgaagcagagaagaaggaggacaacaggtattccgatttgaaaaccatcatctgcaactattctgagacaggccccccggaaccaccctacagcttccaccaggtgaccattgacaaagtcagcccctatgggttttttgcacatgaccctgtgaacctgccccgagggggacccagttctggaaaggttcaggcaactcctccttcctcagcaacaacgtatgtggagaggcccacggtcctgcctatcttgactcttctcgactcccgagtgagctgccactcccaggctgacctgcagggcccctactcggaccgaatctccccccggcagagacgtagcatcacgcgagacagtgacacacctctgtccctgatgtcggtcaaccacgaggagctggagaggtctccaagtggcttcagcatctcccaggacagagatgattatgtgttcggccccaatggggggtcgagctggatgagggagaagcggtacctcgccgagggtgagacggacacagacacggaccccttcacgcccagcggctccatgcctctgtcgtccacaggggatgggatttctgattcagtatggaccccttccaataagcccatttaaaagaggtcactggctgacccctccttgtaatgtagacagactttgtatagttcacttactcttacacccgacgcttaccagcggggacaccaatggctgcatcaaatgcatgcgtgtgcgtggtggccccacccaggcaggggcttcccacagcctcttcctccccatgtcaccacaacaaagtgcttccttttcagcatggtttgcatgactttacactatataaatggttccgctaatctcttctaggatacacatttatctgctgttcttacttttaatcacgattggaccagtacagggagaaattactgatgagccatgctatttgtctgtttggttggctggtttgggttttggtttggtaagcagagaaagtagtttaagttatttctaggatcactgccctcttgtgtaaaacgctccagcaattaactgtttttgaaagcaaggaaataattttctcaacaaaaccacattgtgtatcagtggggctgcctactgagctaacattaggaaaggaatgagatagtcattgtgtctctaaaacaaagaatttaaacaaatatttaaggcaaaaccttttaaaagctctccaaaagacctcacttggcctgatgttacttagtatcatgcctcagtttccttatctgtaaaaagtggtggtaatcccaagtgtagcatttctgatgagttatgaattggcagggagaaaacacacacacacacacacacacacacacacacacacacatacacaaagttaaaatagtttccaatttatgtagccaaggacaatggaatttatcagaagtgaagtgcccctctgggcaggagctgagttcagtgcctttaaaatgaatttccaactctcatttcttcccatgatactgaagtacaaaatatccatctaaaatagaaattaaagtcaagaaggcacacagaaattttctagtccaaggacttccttttataaatgaagaatcttaggctcaggtaaagtgacatacccagagtcactcagttgtcccatagagaaccaggactcaaaagtcaggtctgcccactctccctgaccttgtttcccctcaccacaccattcttccatttatataatgcatcctagagattgtgtcaagatatatgactttgtgtcgcgtggaaagcacccagtttatccagcaggagggggatttccacttttattgcaaaacatgcttgcttgatgcaatgcatttcagatctagaaaaaaataatgcaagcaagctacatttacagatgtgtaaacaggcaaaatttccagaaccgtccaattttacttttccaaatttatggaaccaacccagattttttaaatgaaaatactaaaaccatatgtaaccgtaagacaagctaaaatgtaagcagacagcctgggaagcactgccctactgtacaggtgtgatattaagcacaagccatcctctggcctcttatgagatgttgttattctctgaaaaactttgatggaaaaggtttctgttaggcttagactgaattagctaaatgaccatgccacagtattattgtatcactcttctcacacacctaggcactggttgtggatagttgccatggtgacaatcaagataatccagatgacctaaacaaatgtctgtatgcagctgacactgctattctccctcacagtcttgtcaagagccacagtagctatggcagacatttggttgatggtttcatcatttcctaatacgagagtctggcactatgttggagagaggaatcacttcctcagagataggttcctttcaactcacatgtcaacagttactgtacaaaaagctcagaatacagtaatgattagagcttgacccctgactttaggaacttagaaccaaagcccaaagtcccaggccaagggcagacattgtgagcagcagaagggtgttttttatggagagccccataaatggatgggtgtagaccttgaagtctgagatgggaaatataccagaatgctcaatgcatcagacatgaagccccacgggcttccatttgacatgctggcaatctgaaggacaaagggcatgggttatttgggccttttccccactccttcaatatggctgaaagtgccagtggggattacaacctaagaaaccctatgccccttcctgagggcttgattattgaatcctgatcttcctggaatctttcacttgagatgatcacctgcctaacatccaacatgttactatgctcttctttatgtacatgagttactggaaaccaacaataaaggagagtgagtcatactctccacatatgcgccaattaattttttaacttacttattagtattcttgaagaacttactatcttaagtattttaccaatagatgatgcattttccagcaactcaatggagttctaccttaaagtatttaccattgatccaaaattggaggaactaccttagattcttttaataacctagaaaggattggagcttgtattatttcctaaaccataggcaggcagtctagcttccctgctggatcataagaccaggacagcagagattgggtttgtattgatcagtagtagggaagtattgattgtctaacatctagtaagttgtctttatcagtatagacatagacaaaatacatgttttatgaatgaataaataataagaaccttaagagctgtttttttcccatttaagaaaacaaaaaggaaaagagaaaaatgatcttctggaataactctgctttgatattctccttttgttccccaaaaaatatattccagaaaggcaaaccaaacctgctcaagttgcctatgcacagacaatctcaacaatatggctcacagtgagcaagcagaaattcagggtctggaattgaatgtgagttatgggaagaaacagtgtgtgctttcacaaagatccttttgtcagacaagggaacagcatgataatccaatggaactggttaacatgacccaagatgacatgaccacagatatactagtcgttctgaaacttgcccaagaaattgcaatcgtttcagcagaactccatgaaatattgacaaattaattccatcatcaaactaggagtgatattatcaggtaaaactatgatctcatgtatgtatttggtctttctgggtcacaatgtgacatgaaaaattttaaaggtcatattttagcaagatcaaaatgaattagataaatcaacttcacaaatgttaagcgaaacatgatcctattgagctgagaaagaagtacttgagatcgtttgagttttgactatcaaatgtcagcacaaaagcaaatatcaaaagcttaagaaaaaaattatttcaggaaaagaaaaacacatcaaattgagaaagtgttgttgaataactttgtttttagaactggaaatttaggcttattagacatgacattgatattacaaagccctagttttcatgaaaacataactagataaccccaaggtgtataggttaaaatgaactaattaatcaacaattatgcatcctgtgtctattttgtgcaaggtacttcctagacactgtagtttgaaagaataatttcctgtagaaaaacctaatctaataggacctactcataatttggcaaaatcatcctcataattccatgctactgaaatgggggtgtaataaagaaaaaatcatttgtttattcatttaacagggtttattaagcaccaatatatgcccagaactttgcagtgcactggaagttcagagataagaaaaccacagtttctgccatcaaaatgctaggaatctagaggtctcaaacatcagaggtcccttcaaactatgtctaccaggaaaataaaatacctgatttcatccctgcaaacaactctatacagacagaaatgcttcctagcttggaaactatagaaaattgaacatgaaaatgagagcaaaggttctacatcaaaatggcaatgatccaatcagcccagtcaaggctgagtgggttgaatggggacttcgagtttggattcaatgctttgaacttcatagctccagagaagctgtgcaaaaaggggggattctagggaatctgaggaagattgttggagaaaccagctttcttcttgtctcctaatccctgctaagattgataccagtcaaggagctgagttactttcatttcattatgttgaccaagagaagcttatgatacagactatgacacagcacctatttcaagagaaagatgttactctacttatgggaacctgcagatcaaattctcctggggcaagagaagaaatttgttcagcagcctaagaagtcaactgtactttggacagtgctgccaaacacaccccaggattctcccacccctgtgctttcccagaagatgccacatagctggtatttggttttcatgaataaccaaagattcttctttgcttcctgaaccccaggcatccttaggaatttgcttcatgtcctcacttgtccttgaaggcttgtttttcaggatgaacttttaaagtctaagttgtttatattcaaatcaacccaatgctattgttgctgatattaaaccattccaaactgagccaactggcccctaaacaagccagcaggcagcccctcactaatgcccagtttagaacatgttaggaccaggctatctgcatagctttagtggttttagaagccagtaatggcagtgtaaaagaggaatcatacagagatgacctggaagaaaatttgagtttcagcacattcaaaagcatttgactcttctgccgtgttttgattttcaagtgagacaatcaatgtacacacaaagcctctagtacaatgactgatgcatactagggactgttatttatgttatttttttacagtatgcatggacttcattgtctcagtctttggtgttacttataaactctaaatttacaccaaaaaaattttttttcagaaaaagaatcgtggagaaacaatcctaattattaaatcaaatgctttcacaattgctttttaaataagtacatctctgcaaataaaaatgcttgctcttgtctaccacaataaagaacagaaggaatcttggaatgaagagaggcaggaatgttggatctcagtggctgagttgtggcaattccattggacatatagtaccagatgttgcaccatctggatgatgtgtaggagataaagccaaattgcaaaaataaaagactcatgatttcccaaggaaagtcaactgtgcatggtggctatcagacaacaccctagcaatgaatgggggaacttgcagaagaaagagttaatgcttgcttaaaccttccctggggagatttgttcccaggctttcacggctttaacctcagcaaccctgtaagaaaattgtgattcatattttgatttgttatcatagatgcaaagagacataatttcatggattctaagatacacagagcaagaagagattttgatcacccagaacaaccacctgtctttttagatcaagaagcagaagctcagagcaaagaacatcacaccacgtccctcagtgattgaagcagtgattgagtcacagaataaatctggaactcaggtcttctgatctttgctccagatgttagagacaaaactaaaagtaaaataccaagtgaaatcaaagcatcacgattgagcccagaacatgaaaaagaacttcctggcccacttgagaaactgttaaaccggacatacctttggggacttcttcccttctctggaataagattgatgtttccatgctgtgaaagacgatgatgttccttctcccagattcctgctgtcttcaaaaggcctagcaaaaaccactgctgctgggtgcagttgagaaagggaatgaagaacaatcccatggccatgcaggcactcctcccctccacctctctgccctccacccctctgccctctcctaccttgttccttcttggtcctgccatgtttggactggttcacctttttggcccatcacttgggctcattcagcaacagtcatgccttaggttgcatcctcatctataggccaattaaacagggtttcttcttgataaatccctatggttttgattttaggaagtcaggcatgatttcttttgggatctatatgacccaaagtggccagttttaccaaaggtgtccctttgcactgggatctctgggtctcatttgaacacagcttgggtcctcttgccttgtcccagagaatccccatgttgtcaggacataagcagatactctagggccttcaccaaaagctacaaagaagcagacaggactcaacttaggacatcttatggttatgtaactaagagattattttaggaagtaaacaggcctctgttggctcaaatgaacatcttcattgttagtttccacttacattgttctcgggataaatcggccagaatttggcagggctccccagcagtccttgtgaatccctgtggtaggatgtttcagttctcctgagtcaggctgaagtgaaagctcctaagagatattcagaaagaaggatggtcaagttctagaacaacaatagttggcccagtaattttaaagattgtcattctacctaagccttcatcctccagatagcactgttatgggcttaaaataagcttcaagggaaataatgaatttctttgacaccgccaaaaatcggctgtatataagaataacttgagaatggcttacaatgaggtagtcaaaagcccagctcagtgctcaggaatgtatttgtaattcctcttagacttgtcgaatggactgcaatttgatacctaagagtaataaaaaatgagaccatattttatgttaatgttcccttctcttcctctgcccacaaaagtgaggtcagggaaggggagagaaacttatcctaagcactccttatgagttgcttgtgacatgatagctctctctaaagttcatgcaatcctcatcgcaaccccatgagggagatgttattgtctccatcttatagatgaggaaactgaagacaagaccttgtcaaaggtcacacattgtaagaagtagagctgcatattcaaccaaagcccgtgtacctggaaagctcattctctctcccccttcttcctctcaaatcaggccctagctcctccacaatgcttcgggcttctacgttcactcagctttacagtaaaatgatcacagacccatgagttccctggagagtagagtgatgcctgggtcagctgttcctcttgtctgttcagcaggtcctttgagtggcttcacaatccagctgtcagtggcagaaaataatgcctcataaattattcacctggttcacattggaatccattagctctcggggcttggtgtggctgcagatcatccacaagtgccccttgttctctgcccccaaggagctcctgtcattgtttttaaccaaacaagttcaaatatctccacgtctctgctgactctggtcttttgtctctagactgtacctttatttctgagctctgaaattctgcagaaacaggtgagtctataaaaacattctgtgggaggccaaaagctcagaacagttgtgtctctctttctcagtattaaaagatcaaggtttcccatggaagccaacctgatctggtaattgggcccttctatacccctctgaatacttttccaaggagggggcagttcccacccccatagttcccctgagggttaagagtccaggtggtggccaagttgcaagatttggggcagccattttgccaaggatcagagatttgctgttggagaggtgaagtcggctctgtgccatcctgaaaaatcaacttagaaagataggtggacttcatcagatttgtcagtccttccttgttttaaagagaaaaatgatctctgccttgcttcagataggatatggctattttttttccttctttttctaatgtagcagtgatggaaaacaccagtctttgaagaacaaatggaggttcccagtgacatgaatccattatatttgattttggattgtattttttaacccctttttatggcatagaattctggtgccttgctccctgggtttgtctctgtgctacgagtaggctttcttcacattctggcttacaggggaacacaactattccacaagtggcctttagtgctctttataatatgatttcctgtaatttttaaactgtatgtgtaatttatattctggctctgtccaatatttgaacaactttaataggttgatttccatatatattatgcaaataattcttacctgattttttatgttctatcttaaataaatactgcaccacttattaataaatagacatttcagtga

SEQ ID NO: 168244 - DNA, 2801 bp, Homo sapiens
  Payload ID: 13098
  Gene Symbol: KCNQ3
  Gene Name: potassium channel, voltage gated KQT-like subfamily Q, member 3
  ENST ID: ENST00000519445
  CDS Start-End: 47-2629
cagagcagcagcggagaaggcgaagcggccggcgggggcgaggcagatggggctcaaggcgcgcagggcggcgggggcggctggcggcggcggcgacgggggcggcggaggcggcggggcggctaacccagccggaggggacgcggcggcggccggcgacgaggagcggaaagtggggctggcgcccggcgacgtggagcaagtcaccttggcgctcggggccggagccgacaaagacgggaccctgctgctggagggcggcggccgcgacgaggggcagcggaggaccccgcagggcatcgggctcctggccaagaccccgctgagccgcccagtcaagagaaacaacgccaagtaccggcgcatccaaactttgatctacgacgccctggagagaccgcggggctgggcgctgctttaccacgcgttggtgttcctgattgtcctggggtgcttgattctggctgtcctgaccacattcaaggagtatgagactgtctcgggagactggcttctgttactggagacatttgctattttcatctttggagccgagtttgctttgaggatctgggctgctggatgttgctgccgatacaaaggctggcggggccgactgaagtttgccaggaagcccctgtgcatgttggacatctttgtgctgattgcctctgtgccagtggttgctgtgggaaaccaaggcaatgttctggccacctccctgcgaagcctgcgcttcctgcagatcctgcgcatgctgcggatggaccggagaggtggcacctggaagcttctgggctcagccatctgtgcccacagcaaagaactcatcacggcctggtacatcggtttcctgacactcatcctttcttcatttcttgtctacctggttgagaaagacgtcccagaggtggatgcacaaggagaggagatgaaagaggagtttgagacctatgcagatgccctgtggtggggcctgatcacactggccaccattggctatggagacaagacacccaaaacgtgggaaggccgtctgattgccgccaccttttccttaattggcgtctccttttttgcccttccagcgggcatcctggggtccgggctggccctcaaggtgcaggagcaacaccgtcagaagcactttgagaaaaggaggaagccagctgctgagctcattcaggctgcctggaggtattatgctaccaaccccaacaggattgacctggtggcgacatggagattttatgaatcagtcgtctcttttcctttcttcaggaaagaacagctggaggcagcatccagccaaaagctgggtctcttggatcgggttcgcctttctaatcctcgtggtagcaatactaaaggaaagctatttacccctctgaatgtagatgccatagaagaaagtccttctaaagaaccaaagcctgttggcttaaacaataaagagcgtttccgcacggccttccgcatgaaagcctacgctttctggcagagttctgaagatgccgggacaggtgaccccatggcggaagacaggggctatgggaatgacttccccatcgaagacatgatccccaccctgaaggccgccatccgagccgtcagaattctacaattccgtctctataaaaaaaaattcaaggagactttgaggccttacgatgtgaaggatgtgattgagcagtattctgccgggcatctcgacatgctttccaggataaagtaccttcagacgagaatagatatgattttcacccctggacctccctccacgccaaaacacaagaagtctcagaaagggaatgaaccatatgtagccagaccatccacatcagaaatcgaagaccaaagcatgatggggaagtttgtaaaagttgaaagacaggttcaggacatggggaagaagctggacttcctcgtggatatgcacatgcaacacatggaacggttgcaggtgcaggtcacggagtattacccaaccaagggcacctcctcgccagctgaagcagagaagaaggaggacaacaggtattccgatttgaaaaccatcatctgcaactattctgagacaggccccccggaaccaccctacagcttccaccaggtgaccattgacaaagtcagcccctatgggttttttgcacatgaccctgtgaacctgccccgagggggacccagttctggaaaggttcaggcaactcctccttcctcagcaacaacgtatgtggagaggcccacggtcctgcctatcttgactcttctcgactcccgagtgagctgccactcccaggctgacctgcagggcccctactcggaccgaatctccccccggcagagacgtagcatcacgcgagacagtgacacacctctgtccctgatgtcggtcaaccacgaggagctggagaggtctccaagtggcttcagcatctcccaggacagagatgattatgtgttcggccccaatggggggtcgagctggatgagggagaagcggtacctcgccgagggtgagacggacacagacacggaccccttcacgcccagcggctccatgcctctgtcgtccacaggggatgggatttctgattcagtatggaccccttccaataagcccatttaaaagaggtcactggctgacccctccttgtaatgtagacagactttgtatagttcacttactcttacacccgacgcttaccagcggggacaccaatggctgcatcaaatgcatgcgtgtgcgtggtggccccacccaggcaggggcttcccacagcctcttcctccccatgtca

SEQ ID NO: 168245 - DNA, 2576 bp, Homo sapiens
  Payload ID: 13098
  Gene Symbol: KCNQ3
  Gene Name: potassium channel, voltage gated KQT-like subfamily Q, member 3
  Uniprot ID: O43525
  ENST ID: ENST00000521134
  CDS Start-End: 37-2295
acttgttaaaaatcttgttcttgcattcattaccttatgaagcctgcagaacacgccacgatgttcctgattgtcctggggtgcttgattctggctgtcctgaccacattcaaggagtatgagactgtctcgggagactggcttctgttactggagacatttgctattttcatctttggagccgagtttgctttgaggatctgggctgctggatgttgctgccgatacaaaggctggcggggccgactgaagtttgccaggaagcccctgtgcatgttggacatctttgtgctgattgcctctgtgccagtggttgctgtgggaaaccaaggcaatgttctggccacctccctgcgaagcctgcgcttcctgcagatcctgcgcatgctgcggatggaccggagaggtggcacctggaagcttctgggctcagccatctgtgcccacagcaaagaactcatcacggcctggtacatcggtttcctgacactcatcctttcttcatttcttgtctacctggttgagaaagacgtcccagaggtggatgcacaaggagaggagatgaaagaggagtttgagacctatgcagatgccctgtggtggggcctgatcacactggccaccattggctatggagacaagacacccaaaacgtgggaaggccgtctgattgccgccaccttttccttaattggcgtctccttttttgcccttccagcgggcatcctggggtccgggctggccctcaaggtgcaggagcaacaccgtcagaagcactttgagaaaaggaggaagccagctgctgagctcattcaggctgcctggaggtattatgctaccaaccccaacaggattgacctggtggcgacatggagattttatgaatcagtcgtctcttttcctttcttcaggaaagaacagctggaggcagcatccagccaaaagctgggtctcttggatcgggttcgcctttctaatcctcgtggtagcaatactaaaggaaagctatttacccctctgaatgtagatgccatagaagaaagtccttctaaagaaccaaagcctgttggcttaaacaataaagagcgtttccgcacggccttccgcatgaaagcctacgctttctggcagagttctgaagatgccgggacaggtgaccccatggcggaagacaggggctatgggaatgacttccccatcgaagacatgatccccaccctgaaggccgccatccgagccgtcagaattctacaattccgtctctataaaaaaaaattcaaggagactttgaggccttacgatgtgaaggatgtgattgagcagtattctgccgggcatctcgacatgctttccaggataaagtaccttcagacgagaatagatatgattttcacccctggacctccctccacgccaaaacacaagaagtctcagaaagggtcagcattcaccttcccatcccagcaatctcccaggaatgaaccatatgtagccagaccatccacatcagaaatcgaagaccaaagcatgatggggaagtttgtaaaagttgaaagacaggttcaggacatggggaagaagctggacttcctcgtggatatgcacatgcaacacatggaacggttgcaggtgcaggtcacggagtattacccaaccaagggcacctcctcgccagctgaagcagagaagaaggaggacaacaggtattccgatttgaaaaccatcatctgcaactattctgagacaggccccccggaaccaccctacagcttccaccaggtgaccattgacaaagtcagcccctatgggttttttgcacatgaccctgtgaacctgccccgagggggacccagttctggaaaggttcaggcaactcctccttcctcagcaacaacgtatgtggagaggcccacggtcctgcctatcttgactcttctcgactcccgagtgagctgccactcccaggctgacctgcagggcccctactcggaccgaatctccccccggcagagacgtagcatcacgcgagacagtgacacacctctgtccctgatgtcggtcaaccacgaggagctggagaggtctccaagtggcttcagcatctcccaggacagagatgattatgtgttcggccccaatggggggtcgagctggatgagggagaagcggtacctcgccgagggtgagacggacacagacacggaccccttcacgcccagcggctccatgcctctgtcgtccacaggggatgggatttctgattcagtatggaccccttccaataagcccatttaaaagaggtcactggctgacccctccttgtaatgtagacagactttgtatagttcacttactcttacacccgacgcttaccagcggggacaccaatggctgcatcaaatgcatgcgtgtgcgtggtggccccacccaggcaggggcttcccacagcctcttcctccccatgtcaccacaacaaagtgcttccttttcagcatggtttgcatgactttacactatataaatggttccgctaatctcttctaggatacacatttatctgctgttcttacttttaa

SEQ ID NO: 168246 - DNA, 10659 bp, Homo sapiens
  Payload ID: 13098
  Gene Symbol: KCNQ3
  Gene Name: potassium channel, voltage gated KQT-like subfamily Q, member 3
  ENST ID: ENST00000621976
  CDS Start-End: 1-2256
aagccaaaaaagcatggtcctatgttcctgattgtcctggggtgcttgattctggctgtcctgaccacattcaaggagtatgagactgtctcgggagactggcttctgttactggagacatttgctattttcatctttggagccgagtttgctttgaggatctgggctgctggatgttgctgccgatacaaaggctggcggggccgactgaagtttgccaggaagcccctgtgcatgttggacatctttgtgctgattgcctctgtgccagtggttgctgtgggaaaccaaggcaatgttctggccacctccctgcgaagcctgcgcttcctgcagatcctgcgcatgctgcggatggaccggagaggtggcacctggaagcttctgggctcagccatctgtgcccacagcaaagaactcatcacggcctggtacatcggtttcctgacactcatcctttcttcatttcttgtctacctggttgagaaagacgtcccagaggtggatgcacaaggagaggagatgaaagaggagtttgagacctatgcagatgccctgtggtggggcctgatcacactggccaccattggctatggagacaagacacccaaaacgtgggaaggccgtctgattgccgccaccttttccttaattggcgtctccttttttgcccttccagcgggcatcctggggtccgggctggccctcaaggtgcaggagcaacaccgtcagaagcactttgagaaaaggaggaagccagctgctgagctcattcaggctgcctggaggtattatgctaccaaccccaacaggattgacctggtggcgacatggagattttatgaatcagtcgtctcttttcctttcttcaggaaagaacagctggaggcagcatccagccaaaagctgggtctcttggatcgggttcgcctttctaatcctcgtggtagcaatactaaaggaaagctatttacccctctgaatgtagatgccatagaagaaagtccttctaaagaaccaaagcctgttggcttaaacaataaagagcgtttccgcacggccttccgcatgaaagcctacgctttctggcagagttctgaagatgccgggacaggtgaccccatggcggaagacaggggctatgggaatgacttccccatcgaagacatgatccccaccctgaaggccgccatccgagccgtcagaattctacaattccgtctctataaaaaaaaattcaaggagactttgaggccttacgatgtgaaggatgtgattgagcagtattctgccgggcatctcgacatgctttccaggataaagtaccttcagacgagaatagatatgattttcacccctggacctccctccacgccaaaacacaagaagtctcagaaagggtcagcattcaccttcccatcccagcaatctcccaggaatgaaccatatgtagccagaccatccacatcagaaatcgaagaccaaagcatgatggggaagtttgtaaaagttgaaagacaggttcaggacatggggaagaagctggacttcctcgtggatatgcacatgcaacacatggaacggttgcaggtgcaggtcacggagtattacccaaccaagggcacctcctcgccagctgaagcagagaagaaggaggacaacaggtattccgatttgaaaaccatcatctgcaactattctgagacaggccccccggaaccaccctacagcttccaccaggtgaccattgacaaagtcagcccctatgggttttttgcacatgaccctgtgaacctgccccgagggggacccagttctggaaaggttcaggcaactcctccttcctcagcaacaacgtatgtggagaggcccacggtcctgcctatcttgactcttctcgactcccgagtgagctgccactcccaggctgacctgcagggcccctactcggaccgaatctccccccggcagagacgtagcatcacgcgagacagtgacacacctctgtccctgatgtcggtcaaccacgaggagctggagaggtctccaagtggcttcagcatctcccaggacagagatgattatgtgttcggccccaatggggggtcgagctggatgagggagaagcggtacctcgccgagggtgagacggacacagacacggaccccttcacgcccagcggctccatgcctctgtcgtccacaggggatgggatttctgattcagtatggaccccttccaataagcccatttaaaagaggtcactggctgacccctccttgtaatgtagacagactttgtatagttcacttactcttacacccgacgcttaccagcggggacaccaatggctgcatcaaatgcatgcgtgtgcgtggtggccccacccaggcaggggcttcccacagcctcttcctccccatgtcaccacaacaaagtgcttccttttcagcatggtttgcatgactttacactatataaatggttccgctaatctcttctaggatacacatttatctgctgttcttacttttaatcacgattggaccagtacagggagaaattactgatgagccatgctatttgtctgtttggttggctggtttgggttttggtttggtaagcagagaaagtagtttaagttatttctaggatcactgccctcttgtgtaaaacgctccagcaattaactgtttttgaaagcaaggaaataattttctcaacaaaaccacattgtgtatcagtggggctgcctactgagctaacattaggaaaggaatgagatagtcattgtgtctctaaaacaaagaatttaaacaaatatttaaggcaaaaccttttaaaagctctccaaaagacctcacttggcctgatgttacttagtatcatgcctcagtttccttatctgtaaaaagtggtggtaatcccaagtgtagcatttctgatgagttatgaattggcagggagaaaacacacacacacacacacacacacacacacacacacacatacacaaagttaaaatagtttccaatttatgtagccaaggacaatggaatttatcagaagtgaagtgcccctctgggcaggagctgagttcagtgcctttaaaatgaatttccaactctcatttcttcccatgatactgaagtacaaaatatccatctaaaatagaaattaaagtcaagaaggcacacagaaattttctagtccaaggacttccttttataaatgaagaatcttaggctcaggtaaagtgacatacccagagtcactcagttgtcccatagagaaccaggactcaaaagtcaggtctgcccactctccctgaccttgtttcccctcaccacaccattcttccatttatataatgcatcctagagattgtgtcaagatatatgactttgtgtcgcgtggaaagcacccagtttatccagcaggagggggatttccacttttattgcaaaacatgcttgcttgatgcaatgcatttcagatctagaaaaaaataatgcaagcaagctacatttacagatgtgtaaacaggcaaaatttccagaaccgtccaattttacttttccaaatttatggaaccaacccagattttttaaatgaaaatactaaaaccatatgtaaccgtaagacaagctaaaatgtaagcagacagcctgggaagcactgccctactgtacaggtgtgatattaagcacaagccatcctctggcctcttatgagatgttgttattctctgaaaaactttgatggaaaaggtttctgttaggcttagactgaattagctaaatgaccatgccacagtattattgtatcactcttctcacacacctaggcactggttgtggatagttgccatggtgacaatcaagataatccagatgacctaaacaaatgtctgtatgcagctgacactgctattctccctcacagtcttgtcaagagccacagtagctatggcagacatttggttgatggtttcatcatttcctaatacgagagtctggcactatgttggagagaggaatcacttcctcagagataggttcctttcaactcacatgtcaacagttactgtacaaaaagctcagaatacagtaatgattagagcttgacccctgactttaggaacttagaaccaaagcccaaagtcccaggccaagggcagacattgtgagcagcagaagggtgttttttatggagagccccataaatggatgggtgtagaccttgaagtctgagatgggaaatataccagaatgctcaatgcatcagacatgaagccccacgggcttccatttgacatgctggcaatctgaaggacaaagggcatgggttatttgggccttttccccactccttcaatatggctgaaagtgccagtggggattacaacctaagaaaccctatgccccttcctgagggcttgattattgaatcctgatcttcctggaatctttcacttgagatgatcacctgcctaacatccaacatgttactatgctcttctttatgtacatgagttactggaaaccaacaataaaggagagtgagtcatactctccacatatgcgccaattaattttttaacttacttattagtattcttgaagaacttactatcttaagtattttaccaatagatgatgcattttccagcaactcaatggagttctaccttaaagtatttaccattgatccaaaattggaggaactaccttagattcttttaataacctagaaaggattggagcttgtattatttcctaaaccataggcaggcagtctagcttccctgctggatcataagaccaggacagcagagattgggtttgtattgatcagtagtagggaagtattgattgtctaacatctagtaagttgtctttatcagtatagacatagacaaaatacatgttttatgaatgaataaataataagaaccttaagagctgtttttttcccatttaagaaaacaaaaaggaaaagagaaaaatgatcttctggaataactctgctttgatattctccttttgttccccaaaaaatatattccagaaaggcaaaccaaacctgctcaagttgcctatgcacagacaatctcaacaatatggctcacagtgagcaagcagaaattcagggtctggaattgaatgtgagttatgggaagaaacagtgtgtgctttcacaaagatccttttgtcagacaagggaacagcatgataatccaatggaactggttaacatgacccaagatgacatgaccacagatatactagtcgttctgaaacttgcccaagaaattgcaatcgtttcagcagaactccatgaaatattgacaaattaattccatcatcaaactaggagtgatattatcaggtaaaactatgatctcatgtatgtatttggtctttctgggtcacaatgtgacatgaaaaattttaaaggtcatattttagcaagatcaaaatgaattagataaatcaacttcacaaatgttaagcgaaacatgatcctattgagctgagaaagaagtacttgagatcgtttgagttttgactatcaaatgtcagcacaaaagcaaatatcaaaagcttaagaaaaaaattatttcaggaaaagaaaaacacatcaaattgagaaagtgttgttgaataactttgtttttagaactggaaatttaggcttattagacatgacattgatattacaaagccctagttttcatgaaaacataactagataaccccaaggtgtataggttaaaatgaactaattaatcaacaattatgcatcctgtgtctattttgtgcaaggtacttcctagacactgtagtttgaaagaataatttcctgtagaaaaacctaatctaataggacctactcataatttggcaaaatcatcctcataattccatgctactgaaatgggggtgtaataaagaaaaaatcatttgtttattcatttaacagggtttattaagcaccaatatatgcccagaactttgcagtgcactggaagttcagagataagaaaaccacagtttctgccatcaaaatgctaggaatctagaggtctcaaacatcagaggtcccttcaaactatgtctaccaggaaaataaaatacctgatttcatccctgcaaacaactctatacagacagaaatgcttcctagcttggaaactatagaaaattgaacatgaaaatgagagcaaaggttctacatcaaaatggcaatgatccaatcagcccagtcaaggctgagtgggttgaatggggacttcgagtttggattcaatgctttgaacttcatagctccagagaagctgtgcaaaaaggggggattctagggaatctgaggaagattgttggagaaaccagctttcttcttgtctcctaatccctgctaagattgataccagtcaaggagctgagttactttcatttcattatgttgaccaagagaagcttatgatacagactatgacacagcacctatttcaagagaaagatgttactctacttatgggaacctgcagatcaaattctcctggggcaagagaagaaatttgttcagcagcctaagaagtcaactgtactttggacagtgctgccaaacacaccccaggattctcccacccctgtgctttcccagaagatgccacatagctggtatttggttttcatgaataaccaaagattcttctttgcttcctgaaccccaggcatccttaggaatttgcttcatgtcctcacttgtccttgaaggcttgtttttcaggatgaacttttaaagtctaagttgtttatattcaaatcaacccaatgctattgttgctgatattaaaccattccaaactgagccaactggcccctaaacaagccagcaggcagcccctcactaatgcccagtttagaacatgttaggaccaggctatctgcatagctttagtggttttagaagccagtaatggcagtgtaaaagaggaatcatacagagatgacctggaagaaaatttgagtttcagcacattcaaaagcatttgactcttctgccgtgttttgattttcaagtgagacaatcaatgtacacacaaagcctctagtacaatgactgatgcatactagggactgttatttatgttatttttttacagtatgcatggacttcattgtctcagtctttggtgttacttataaactctaaatttacaccaaaaaaattttttttcagaaaaagaatcgtggagaaacaatcctaattattaaatcaaatgctttcacaattgctttttaaataagtacatctctgcaaataaaaatgcttgctcttgtctaccacaataaagaacagaaggaatcttggaatgaagagaggcaggaatgttggatctcagtggctgagttgtggcaattccattggacatatagtaccagatgttgcaccatctggatgatgtgtaggagataaagccaaattgcaaaaataaaagactcatgatttcccaaggaaagtcaactgtgcatggtggctatcagacaacaccctagcaatgaatgggggaacttgcagaagaaagagttaatgcttgcttaaaccttccctggggagatttgttcccaggctttcacggctttaacctcagcaaccctgtaagaaaattgtgattcatattttgatttgttatcatagatgcaaagagacataatttcatggattctaagatacacagagcaagaagagattttgatcacccagaacaaccacctgtctttttagatcaagaagcagaagctcagagcaaagaacatcacaccacgtccctcagtgattgaagcagtgattgagtcacagaataaatctggaactcaggtcttctgatctttgctccagatgttagagacaaaactaaaagtaaaataccaagtgaaatcaaagcatcacgattgagcccagaacatgaaaaagaacttcctggcccacttgagaaactgttaaaccggacatacctttggggacttcttcccttctctggaataagattgatgtttccatgctgtgaaagacgatgatgttccttctcccagattcctgctgtcttcaaaaggcctagcaaaaaccactgctgctgggtgcagttgagaaagggaatgaagaacaatcccatggccatgcaggcactcctcccctccacctctctgccctccacccctctgccctctcctaccttgttccttcttggtcctgccatgtttggactggttcacctttttggcccatcacttgggctcattcagcaacagtcatgccttaggttgcatcctcatctataggccaattaaacagggtttcttcttgataaatccctatggttttgattttaggaagtcaggcatgatttcttttgggatctatatgacccaaagtggccagttttaccaaaggtgtccctttgcactgggatctctgggtctcatttgaacacagcttgggtcctcttgccttgtcccagagaatccccatgttgtcaggacataagcagatactctagggccttcaccaaaagctacaaagaagcagacaggactcaacttaggacatcttatggttatgtaactaagagattattttaggaagtaaacaggcctctgttggctcaaatgaacatcttcattgttagtttccacttacattgttctcgggataaatcggccagaatttggcagggctccccagcagtccttgtgaatccctgtggtaggatgtttcagttctcctgagtcaggctgaagtgaaagctcctaagagatattcagaaagaaggatggtcaagttctagaacaacaatagttggcccagtaattttaaagattgtcattctacctaagccttcatcctccagatagcactgttatgggcttaaaataagcttcaagggaaataatgaatttctttgacaccgccaaaaatcggctgtatataagaataacttgagaatggcttacaatgaggtagtcaaaagcccagctcagtgctcaggaatgtatttgtaattcctcttagacttgtcgaatggactgcaatttgatacctaagagtaataaaaaatgagaccatattttatgttaatgttcccttctcttcctctgcccacaaaagtgaggtcagggaaggggagagaaacttatcctaagcactccttatgagttgcttgtgacatgatagctctctctaaagttcatgcaatcctcatcgcaaccccatgagggagatgttattgtctccatcttatagatgaggaaactgaagacaagaccttgtcaaaggtcacacattgtaagaagtagagctgcatattcaaccaaagcccgtgtacctggaaagctcattctctctcccccttcttcctctcaaatcaggccctagctcctccacaatgcttcgggcttctacgttcactcagctttacagtaaaatgatcacagacccatgagttccctggagagtagagtgatgcctgggtcagctgttcctcttgtctgttcagcaggtcctttgagtggcttcacaatccagctgtcagtggcagaaaataatgcctcataaattattcacctggttcacattggaatccattagctctcggggcttggtgtggctgcagatcatccacaagtgccccttgttctctgcccccaaggagctcctgtcattgtttttaaccaaacaagttcaaatatctccacgtctctgctgactctggtcttttgtctctagactgtacctttatttctgagctctgaaattctgcagaaacaggtgagtctataaaaacattctgtgggaggccaaaagctcagaacagttgtgtctctctttctcagtattaaaagatcaaggtttcccatggaagccaacctgatctggtaattgggcccttctatacccctctgaatacttttccaaggagggggcagttcccacccccatagttcccctgagggttaagagtccaggtggtggccaagttgcaagatttggggcagccattttgccaaggatcagagatttgctgttggagaggtgaagtcggctctgtgccatcctgaaaaatcaacttagaaagataggtggacttcatcagatttgtcagtccttccttgttttaaagagaaaaatgatctctgccttgcttcagataggatatggctattttttttccttctttttctaatgtagcagtgatggaaaacaccagtctttgaagaacaaatggaggttcccagtgacatgaatccattatatttgattttggattgtattttttaacccctttttatggcatagaattctggtgccttgctccctgggtttgtctctgtgctacgagtaggctttcttcacattctggcttacaggggaacacaactattccacaagtggcctttagtgctctttataatatgatttcctgtaatttttaaactgtatgtgtaatttatattctggctctgtccaatatttgaacaactttaataggttgatttccatatatattatgcaaataattcttacctgattttttatgttctatcttaaataaatactgcaccacttattaataaatagacatttcagtgatt

SEQ ID NO: 168247 - DNA, 4099 bp, Homo sapiens
  Payload ID: 13099
  Gene Symbol: KCNQ4
  Gene Name: potassium channel, voltage gated KQT-like subfamily Q, member 4
  Uniprot ID: P56696
  ENST ID: ENST00000347132
  CDS Start-End: 83-2170
agccatgcgtctctgagcgccccgagcgcgcccccgccccggaccgtgcccgggccccggcgcccccagcccggcgccgcccatggccgaggcccccccgcgccgcctcggcctgggtcccccgcccggggacgccccccgcgcggagctagtggcgctcacggccgtgcagagcgaacagggcgaggcgggcgggggcggctccccgcgccgcctcggcctcctgggcagccccctgccgccgggcgcgcccctccctgggccgggctccggctcgggctccgcctgcggccagcgctcctcggccgcgcacaagcgctaccgccgcctgcagaactgggtctacaacgtgctggagcggccccgcggctgggccttcgtctaccacgtcttcatatttttgctggtcttcagctgcctggtgctgtctgtgctgtccactatccaggagcaccaggaacttgccaacgagtgtctcctcatcttggaattcgtgatgatcgtggttttcggcttggagtacatcgtccgggtctggtccgccggatgctgctgccgctaccgaggatggcagggtcgcttccgctttgccagaaagcccttctgtgtcatcgacttcatcgtgttcgtggcctcggtggccgtcatcgccgcgggtacccagggcaacatcttcgccacgtccgcgctgcgcagcatgcgcttcctgcagatcctgcgcatggtgcgcatggaccgccgcggcggcacctggaagctgctgggctcagtggtctacgcgcatagcaaggagctgatcaccgcctggtacatcgggttcctggtgctcatcttcgcctccttcctggtctacctggctgagaaggacgccaactccgacttctcctcctacgccgactcgctctggtgggggacgattacattgacaaccatcggctatggtgacaagacaccgcacacatggctgggcagggtcctggctgctggcttcgccttactgggcatctctttctttgccctgcctgccggcatcctaggctccggctttgccctgaaggtccaggagcagcaccggcagaagcacttcgagaagcggaggatgccggcagccaacctcatccaggctgcctggcgcctgtactccaccgatatgagccgggcctacctgacagccacctggtactactatgacagtatcctcccatccttcagagagctggccctcttgtttgagcacgtgcaacgggcccgcaatgggggcctacggcccctggaggtgcggcgggcgccggtacccgacggagcaccctcccgttacccgcccgttgccacctgccaccggccgggcagcacctccttctgccctggggaaagcagccggatgggcatcaaagaccgcatccgcatgggcagctcccagcggcggacgggtccttccaagcagcatctggcacctccaacaatgcccacctccccaagcagcgagcaggtgggtgaggccaccagccccaccaaggtgcaaaagagctggagcttcaatgaccgcacccgcttccgggcatctctgagactcaaaccccgcacctctgctgaggatgccccctcagaggaagtagcagaggagaagagctaccagtgtgagctcacggtggacgacatcatgcctgctgtgaagacagtcatccgctccatcaggattctcaagttcctggtggccaaaaggaaattcaaggagacactgcgaccgtacgacgtgaaggacgtcattgagcagtactcagcaggccacctggacatgctgggccggatcaagagcctgcaaactcgggtggaccaaattgtgggtcgggggcccggggacaggaaggcccgggagaagggcgacaaggggccctccgacgcggaggtggtggatgaaatcagcatgatgggacgcgtggtcaaggtggagaagcaggtgcagtccatcgagcacaagctggacctgctgttgggcttctattcgcgctgcctgcgctctggcacctcggccagcctgggcgccgtgcaagtgccgctgttcgaccccgacatcacctccgactaccacagccctgtggaccacgaggacatctccgtctccgcacagacgctcagcatctcccgctcggtcagcaccaacatggactgagggacttctcagaggcagggcagcacacggccagccccgcggcctggcgctccgactgccctctgaggcctccggactcctctcgtacttgaactcactccctcacggggagagagaccacacgcagtattgagctgcctgagtgggcgtggtacctgctgtgggtgccagcgccccttccccacctcaggagcgtgagatgccaggtcgcacagagggcagcagcagcggccgtcccgcggcctctgggccccccagtgccctgcccactccatcaaggccctatgtggcccacctggcaggggcacagccccgggagtgggagcgggcgctggggccctgggccctgacccagcttccagctatgcaaggtgaggtctctggcccacccttcggacacagcagggaagccctcccgccaagtccccgccccacttgggggtgggccaaggtgcccccacaggtacccacaaagcacaggaccctgccacaaggcaggtggacaccatatatgcaaaccatgttaaatatgcaactttggggacccccatggggtctctctgtccctcccccattgggagctgggcccccagcagtagctggtctcaggctgcttggccaccaccctgtccctattctttggcttatcactccttcccctcccagcatggggcctgtttctcccctgccctctcctaagggcaatgcctgggcctttcttcccatttgcaagtgtcagctcccaggggctccctcctcctgctgggtggccactcccctccttggccctccagacaccactcatagtcagcacaggtttctgtatcctccccaaaactcccagacagtgcttcgtggacgatcgcacaaacatagccttttagtttctccagacaggaagaaagcctctcacacttaaacatgcaatgacgtgacacacttggagacatgagtgcagagccactcagccgctcctgggcctctgcagcagatgccagtggactggccttgcagggtgacgaccactaagaggaagacccccaactccatctgagcaggagaaggagctttgaagtaacccgagagctctccaggccccacccagacctttacccgctccccttcttcaagaagatctcctcctctctggtccaggagccctaacccactgcctctgcctgtccccaagggcccgcctccgtgtctccacagcacaactcgggcccaggcctgacaccactggagagaccccaggcccacttctagccaggcctgtgccttcctagtcactctaactcccagagagaataagaatgcatgtaatagctataccaaccgcgcatccggctttcacatgcactgtctcccctccctccacaccccacttcttcacttcaattggcagcgccacatccaggcgtcagcccccattcactccaggaacactttcttatccccacccctttgctcctcttctgcaaagccaatgcaggtggcaggaaggtgaggggtagtggaccaatggcaaccctctgtgggaacaaggggccgaggccacgctgcctgcatctcgtgctggggacctgcatgcgccagcaccagggcttggactggatcttactcagtccatggtgcccagcctctgccccaacatgccctctgcatgtgaccgtcatgccctggatggagccactcctggctcaccccacctgcactgcactgtccccagagagccacccctccacccactcagagacagctgtggagagggccaggagaatgggattaccctatgaccaaggagacatgggaagaagccctccttccttccacgatcgaggttccgccatcaactcggttctcggatatgcaagtacctcactttgttaacttattaacttattggtttcattaaagttttcaagagga

SEQ ID NO: 168248 - DNA, 2435 bp, Homo sapiens
  Payload ID: 13099
  Gene Symbol: KCNQ4
  Gene Name: potassium channel, voltage gated KQT-like subfamily Q, member 4
  ENST ID: ENST00000443478
  CDS Start-End: 1-1669
atttttgctggtcttcagctgcctggtgctgtctgtgctgtccactatccaggagcaccaggaacttgccaacgagtgtctcctcatcttggaattcgtgatgatcgtggttttcggcttggagtacatcgtccgggtctggtccgccggatgctgctgccgctaccgaggatggcagggtcgcttccgctttgccagaaagcccttctgtgtcatcgacttcatcgtgttcgtggcctcggtggccgtcatcgccgcgggtacccagggcaacatcttcgccacgtccgcgctgcgcagcatgcgcttcctgcagatcctgcgcatggtgcgcatggaccgccgcggcggcacctggaagctgctgggctcagtggtctacgcgcatagcaaggagctgatcaccgcctggtacatcgggttcctggtgctcatcttcgcctccttcctggtctacctggctgagaaggacgccaactccgacttctcctcctacgccgactcgctctggtgggggacgattacattgacaaccatcggctatggtgacaagacaccgcacacatggctgggcagggtcctggctgctggcttcgccttactgggcatctctttctttgccctgcctgccggcatcctaggctccggctttgccctgaaggtccaggagcagcaccggcagaagcacttcgagaagcggaggatgccggcagccaacctcatccaggctgcctggcgcctgtactccaccgatatgagccgggcctacctgacagccacctggtactactatgacagtatcctcccatccttcagccagatgtttaataataaacggagtttctttcggatccacgccagctggagaccgagcagccggatgggcatcaaagaccgcatccgcatgggcagctcccagcggcggacgggtccttccaagcagcatctggcacctccaacaatgcccacctccccaagcagcgagcaggtgggtgaggccaccagccccaccaaggtgcaaaagagctggagcttcaatgaccgcacccgcttccgggcatctctgagactcaaaccccgcacctctgctgaggatgccccctcagaggaagtagcagaggagaagagctaccagtgtgagctcacggtggacgacatcatgcctgctgtgaagacagtcatccgctccatcaggattctcaagttcctggtggccaaaaggaaattcaaggagacactgcgaccgtacgacgtgaaggacgtcattgagcagtactcagcaggccacctggacatgctgggccggatcaagagcctgcaaactcgggtggaccaaattgtgggtcgggggcccggggacaggaaggcccgggagaagggcgacaaggggccctccgacgcggaggtggtggatgaaatcagcatgatgggacgcgtggtcaaggtggagaagcaggtgcagtccatcgagcacaagctggacctgctgttgggcttctattcgcgctgcctgcgctctggcacctcggccagcctgggcgccgtgcaagtgccgctgttcgaccccgacatcacctccgactaccacagccctgtggaccacgaggacatctccgtctccgcacagacgctcagcatctcccgctcggtcagcaccaacatggactgagggacttctcagaggcagggcagcacacggccagccccgcggcctggcgctccgactgccctctgaggcctccggactcctctcgtacttgaactcactccctcacggggagagagaccacacgcagtattgagctgcctgagtgggcgtggtacctgctgtgggtgccagcgccccttccccacctcaggagcgtgagatgccaggtcgcacagagggcagcagcagcggccgtcccgcggcctctgggccccccagtgccctgcccactccatcaaggccctatgtggcccacctggcaggggcacagccccgggagtgggagcgggcgctggggccctgggccctgacccagcttccagctatgcaaggtgaggtctctggcccacccttcggacacagcagggaagccctcccgccaagtccccgccccacttgggggtgggccaaggtgcccccacaggtacccacaaagcacaggaccctgccacaaggcaggtggacaccatatatgcaaaccatgttaaatatgcaactttggggacccccatggggtctctctgtccctcccccattgggagctgggcccccagcagtagctggtctcaggctgcttggccaccaccctgtccctattctttggcttatcactccttcccctcccagcatggggcctgtttctcccctgccctctcctaagggcaatgcctgggcctttcttcccatttgcaagtgtcagctcccaggggctccctcctcctgctgg

SEQ ID NO: 168249 - DNA, 1926 bp, Homo sapiens
  Payload ID: 13099
  Gene Symbol: KCNQ4
  Gene Name: potassium channel, voltage gated KQT-like subfamily Q, member 4
  Uniprot ID: P56696
  ENST ID: ENST00000509682
  CDS Start-End: 1-1926
atggccgaggcccccccgcgccgcctcggcctgggtcccccgcccggggacgccccccgcgcggagctagtggcgctcacggccgtgcagagcgaacagggcgaggcgggcgggggcggctccccgcgccgcctcggcctcctgggcagccccctgccgccgggcgcgcccctccctgggccgggctccggctcgggctccgcctgcggccagcgctcctcggccgcgcacaagcgctaccgccgcctgcagaactgggtctacaacgtgctggagcggccccgcggctgggccttcgtctaccacgtcttcatatttttgctggtcttcagctgcctggtgctgtctgtgctgtccactatccaggagcaccaggaacttgccaacgagtgtctcctcatcttggaattcgtgatgatcgtggttttcggcttggagtacatcgtccgggtctggtccgccggatgctgctgccgctaccgaggatggcagggtcgcttccgctttgccagaaagcccttctgtgtcatcgacttcatcgtgttcgtggcctcggtggccgtcatcgccgcgggtacccagggcaacatcttcgccacgtccgcgctgcgcagcatgcgcttcctgcagatcctgcgcatggtgcgcatggaccgccgcggcggcacctggaagctgctgggctcagtggtctacgcgcatagcaaggagctgatcaccgcctggtacatcgggttcctggtgctcatcttcgcctccttcctggtctacctggctgagaaggacgccaactccgacttctcctcctacgccgactcgctctggtgggggacgattacattgacaaccatcggctatggtgacaagacaccgcacacatggctgggcagggtcctggctgctggcttcgccttactgggcatctctttctttgccctgcctgccggcatcctaggctccggctttgccctgaaggtccaggagcagcaccggcagaagcacttcgagaagcggaggatgccggcagccaacctcatccaggctgcctggcgcctgtactccaccgatatgagccgggcctacctgacagccacctggtactactatgacagtatcctcccatccttcagcagccggatgggcatcaaagaccgcatccgcatgggcagctcccagcggcggacgggtccttccaagcagcatctggcacctccaacaatgcccacctccccaagcagcgagcaggtgggtgaggccaccagccccaccaaggtgcaaaagagctggagcttcaatgaccgcacccgcttccgggcatctctgagactcaaaccccgcacctctgctgaggatgccccctcagaggaagtagcagaggagaagagctaccagtgtgagctcacggtggacgacatcatgcctgctgtgaagacagtcatccgctccatcaggattctcaagttcctggtggccaaaaggaaattcaaggagacactgcgaccgtacgacgtgaaggacgtcattgagcagtactcagcaggccacctggacatgctgggccggatcaagagcctgcaaactcgggtggaccaaattgtgggtcgggggcccggggacaggaaggcccgggagaagggcgacaaggggccctccgacgcggaggtggtggatgaaatcagcatgatgggacgcgtggtcaaggtggagaagcaggtgcagtccatcgagcacaagctggacctgctgttgggcttctattcgcgctgcctgcgctctggcacctcggccagcctgggcgccgtgcaagtgccgctgttcgaccccgacatcacctccgactaccacagccctgtggaccacgaggacatctccgtctccgcacagacgctcagcatctcccgctcggtcagcaccaacatggactga

SEQ ID NO: 168250 - DNA, 6688 bp, Homo sapiens
  Payload ID: 13100
  Gene Symbol: KCNQ5
  Gene Name: potassium channel, voltage gated KQT-like subfamily Q, member 5
  Uniprot ID: Q9NR82
  ENST ID: ENST00000342056
  CDS Start-End: 399-3254
ggctgggtgtgcgcgcgtgggagcgcgcctcggagcgccccgcactcccccactctatccccgggggcagtttgggaaggagggagtggtagtcgcgggaatgagggagcaagagaaaccctctcaaagtgacgccccaaacaggtccggatttagaattcgaagctaaaggctgttagaaattgggactcctcggcctcctctgcagcccctcctttcccgccccgaagcccgggcggtttgctggctgcctgcttccccgcccccggctcagaggtctctggctggcgggcgccccgtcggccgccggcttcctccttgaaacccgccggcgcacatgaggccgctgcccccgccgcaggcgctggcggccccctcgcggtgcccgtggtgatgccatgccccgccaccacgcgggaggagaggagggcggcgccgccgggctctgggtgaagagcggcgcagcggcggcggcggcgggcggggggcgcttgggcagcggcatgaaggatgtggagtccggccggggcagggtgctgctgaactcggcagccgccaggggcgacggcctgctactgctgggcacccgcgcggccacgctcggtggcggcggcggtggcctgagggagagccgccggggcaagcagggggcccggatgagcctgctggggaagccgctctcttacacgagtagccagagctgccggcgcaacgtcaagtaccggcgggtgcagaactacctgtacaacgtgctggagagaccccgcggctgggcgttcatctaccacgctttcgtttttctccttgtctttggttgcttgattttgtcagtgttttctaccatccctgagcacacaaaattggcctcaagttgcctcttgatcctggagttcgtgatgattgtcgtctttggtttggagttcatcattcgaatctggtctgcgggttgctgttgtcgatatagaggatggcaaggaagactgaggtttgctcgaaagcccttctgtgttatagataccattgttcttatcgcttcaatagcagttgtttctgcaaaaactcagggtaatatttttgccacgtctgcactcagaagtctccgtttcctacagatcctccgcatggtgcgcatggaccgaaggggaggcacttggaaattactgggttcagtggtttatgctcacagcaaggaattaatcacagcttggtacataggatttttggttcttattttttcgtctttccttgtctatctggtggaaaaggatgccaataaagagttttctacatatgcagatgctctctggtggggcacaattacattgacaactattggctatggagacaaaactcccctaacttggctgggaagattgctttctgcaggctttgcactccttggcatttctttctttgcacttcctgccggcattcttggctcaggttttgcattaaaagtacaagaacaacaccgccagaaacactttgagaaaagaaggaacccagctgccaacctcattcagtgtgtttggcgtagttacgcagctgatgagaaatctgtttccattgcaacctggaagccacacttgaaggccttgcacacctgcagccctaccaagaaagaacaaggggaagcatcaagcagtaagttctgtagtaataagcagaagctcttcagaatgtacacctcacggaagcagagtcagaagctaagttttaaggagcgagtgcgcatggctagccccaggggccagagtattaagagccgacaagcctcagtaggtgacaggaggtccccaagcaccgacatcacagccgagggcagtcccaccaaagtgcagaagagctggagcttcaacgaccgaacccgcttccggccctcgctgcgcctcaaaagttctcagccaaaaccagtgatagatgctgacacagcccttggcactgatgatgtatatgatgaaaaaggatgccagtgtgatgtatcagtggaagacctcaccccaccacttaaaactgtcattcgagctatcagaattatgaaatttcatgttgcaaaacggaagtttaaggaaacattacgtccatatgatgtaaaagatgtcattgaacaatattctgctggtcatctggacatgttgtgtagaattaaaagccttcaaacacgtgttgatcaaattcttggaaaagggcaaatcacatcagataagaagagccgagagaaaataacagcagaacatgagaccacagacgatctcagtatgctcggtcgggtggtcaaggttgaaaaacaggtacagtccatagaatccaagctggactgcctactagacatctatcaacaggtccttcggaaaggctctgcctcagccctcgctttggcttcattccagatcccaccttttgaatgtgaacagacatctgactatcaaagccctgtggatagcaaagatctttcgggttccgcacaaaacagtggctgcttatccagatcaactagtgccaacatctcgagaggcctgcagttcattctgacgccaaatgagttcagtgcccagactttctacgcgcttagccctactatgcacagtcaagcaacacaggtgccaattagtcaaagcgatggctcagcagtggcagccaccaacaccattgcaaaccaaataaatacggcacccaagccagcagccccaacaactttacagatcccacctcctctcccagccatcaagcatctgcccaggccagaaactctgcaccctaaccctgcaggcttacaggaaagcatttctgacgtcaccacctgccttgttgcctccaaggaaaatgttcaggttgcacagtcaaatctcaccaaggaccgttctatgaggaaaagctttgacatgggaggagaaactctgttgtctgtctgtcccatggtgccgaaggacttgggcaaatctttgtctgtgcaaaacctgatcaggtcgaccgaggaactgaatatacaactttcagggagtgagtcaagtggctccagaggcagccaagatttttaccccaaatggagggaatccaaattgtttataactgatgaagaggtgggtcccgaagagacagagacagacacttttgatgccgcaccgcagcctgccagggaagctgcctttgcatcagactctctaaggactggaaggtcacgatcatctcagagcatttgtaaggcaggagaaagtacagatgccctcagcttgcctcatgtcaaactgaaataagttcttcattttctttccaggcatagcagttctttagccatacatatcattgcatgaactatttcgaaagcccttctaaaaagttgaaattgcaagaatcgggaagaacatgaaaggcagtttataagcccgttaccttttaattgcatgaaaatgcatgtttagggatggctaaaattccaaggtgcatcgacattaacccactcatttagtaatgtaccttgagttaaaaagcctgagaaaccaaacacagctaatgctatggggtgtatgaatatgtcaagtttaggtcatttagaagatttgacactgtattttgaaattatgggagtaaacaccttcaaatttcaggcatttctgctttgtgactaaatacaaactacattttcaagattaggccataatgtatatttaaacacaatggctatcaacagctgctaataaggtatcaactaaagcagaattggggaataatagaaatggctgcttatttcaagatatatttgccaacccattcctattcagtcattttattattaatgtaatttgaatgtcaatttgtgtgcttttggtgatttagcgctgtggcaagcaattttgcacatcattttcatgttgttctttatgacaagaatgttcttcaattagaaaatgtgcaaataatgaaattcagggccagtgaggcaaatagactatctgacatatttgactttatgaaaacatattgcctgatggcagaatcaactttataagtggtcaacttctacacaagcgtatgaaatactggtcagtagaacagccattgtgattggactggtttctctgcaatggcgccaaccccaggcttgccaatactgcctatgtaaagggcaagtgtgagaagctattctcatttcgctgacatacaggtaggactatgggggatgggacatttgagtgggactgagataggaaaggcttgaaaagaacccagaaacaccaccaggaagttggcaaagtaaaagaaaatgacttccccctcaaagggcaatgagagggagagaaacaaaccaaaatagaagaactagactttttagaaaatgagtattgctagggaattcaactacctaatcttcccttattcttatatataagcagagaatttttgcaaggtatttattttttaatatgccctgaatgtcttttgctattatgtgtacattttgcatatgaaagtctaaaacgaaacttcctttactttttatactgtagtgaaaattttctattcttcccaagaatgttgtcccaaatctgaaattactggttcaatttcctgatataaacatttacaattagaagctagatagtactggcagagtctgcaaatcagaacacttaaatatatcatggcagcaaaaagaccaagggaaacaaaatgacaaatgtatttatcagaaagcaagcaatgctgactgcttgttagaaacccatctagctatcttaggtcaccagaacttcagccaacgtaatgacattcaaaaaaaaaggacataagagatagcatttcaattcaattaaaccctagccacaggaggactcaagaaaggaagttgtttccttggcagacataaatgctgcctccagaagtacttctccagcagccaagcagaatgagcagggttatcaagtggatgttcaaaggaagaaggaggccctgaactccaccaatcctccccagccctccccaacaggctttctccatcattgactctcccctgcttttcttcttcattaactccttattcattccctgccagtattttgcttctgaacttcaccaggccttaaccagcctccatccccaggtcaaccagttctccgctttacctaaaatgtgcttctcaaccttttagaaccttgtcccttttgataaacatggaaatttttaaagcttcctcttcgcatcccacttggattctaagacaattagaatcatttagaatctttttggctgctggaaatgtatagaagatagaggctaaattttacacttcagttaagacattgtcaatccttttaagcaattgttttcattttcaaaatacagaatgttagtaaattatgaaaatcaatttttcatcttcattcaacctgaagttgtgattcccccttgcaagaatgttgcatacacacacacacacacacacacacacacacacacacacacacacacacacacacacacacacccctccactgacctaaagccagacacctgccgtgactgggcaggctctctcccattattaacagaggaagaggagggaggcagcaactttcaggtagcactgattcttggacatactctgtcctgggtcaaaccccactggcagcaggaattctgaatgtattggggacccctccttaggcctcgttaagtctcaaacacagtacagctcacccagcattgctgacgactgaagattcagaaacaaaacctacacacagcactgaggtcttaatcatagcaaaatgtgataaaccatgttgtgaaaaacttttatacattgaagccatgaccattttgtgtctatcttactctagcacaaaaattgggggatgttaaaagatagttgtgtggaagctataaggttctgtctgtcgtgttactctctgtggaaatgagaggggtctcccatttacactaagcaaatttccattggtcaattttaatgatgtcttgaagcacaatttagctgagcactgagtagccatatgctttctgagtacaagtgtgtctgccttcttcaacatgtagggttgatcaagctaatacttaattgcaaatatcccttgtatgaggttaactaaaaaaattttgctatgtctgatctacatgtttgcattttgttcaactaaattaatatttgtagattgcaagttttgtttaaaataactttattgagtttttaagtcctgatctgttctaaggtgcctttctcacctcccattgattcagtgattctgaagttcttaatttgcaagtaaaataagtctactagagaggaggaaatcaggcacaaattgaccaattctcatgccatttgcaaagcaaaactgtaaggatgatgaaacctggctaactaaattaatggatcatttcactaaatcagatagaggaaatatcataaatattaacttgtctccctagaagctgagatttttcgccttaaatgacatggttgtgtttttgtaagagaaacttaatctaatctaataatgtgcatttaagtaagcagttctaagtcatgtatgacaatgcaattgtctgtttcctgaaaacaaataaatcgggaacaccatatccatttcaagctatcattaaagtgtaatttcctttgctctcttttactgggattatttgttttaaagtaaaacattaaaaagatgtctat

SEQ ID NO: 168251 - DNA, 6566 bp, Homo sapiens
  Payload ID: 13100
  Gene Symbol: KCNQ5
  Gene Name: potassium channel, voltage gated KQT-like subfamily Q, member 5
  ENST ID: ENST00000355194
  CDS Start-End: 348-3146
actctatccccgggggcagtttgggaaggagggagtggtagtcgcgggaatgagggagcaagagaaaccctctcaaagtgacgccccaaacaggtccggatttagaattcgaagctaaaggctgttagaaattgggactcctcggcctcctctgcagcccctcctttcccgccccgaagcccgggcggtttgctggctgcctgcttccccgcccccggctcagaggtctctggctggcgggcgccccgtcggccgccggcttcctccttgaaacccgccggcgcacatgaggccgctgcccccgccgcaggcgctggcggccccctcgcggtgcccgtggtgatgccatgccccgccaccacgcgggaggagaggagggcggcgccgccgggctctgggtgaagagcggcgcagcggcggcggcggcgggcggggggcgcttgggcagcggcatgaaggatgtggagtccggccggggcagggtgctgctgaactcggcagccgccaggggcgacggcctgctactgctgggcacccgcgcggccacgctcggtggcggcggcggtggcctgagggagagccgccggggcaagcagggggcccggatgagcctgctggggaagccgctctcttacacgagtagccagagctgccggcgcaacgtcaagtaccggcgggtgcagaactacctgtacaacgtgctggagagaccccgcggctgggcgttcatctaccacgctttcgtttttctccctgtctttggttgcttgattttgtcagtgttttctaccatccctgagcacacaaaattggcctcaagttgcctcttgatcctggagttcgtgatgattgtcgtctttggtttggagttcatcattcgaatctggtctgcgggttgctgttgtcgatatagaggatggcaaggaagactgaggtttgctcgaaagcccttctgtgttatagataccattgttcttatcgcttcaatagcagttgtttctgcaaaaactcagggtaatatttttgccacgtctgcactcagaagtctccgtttcctacagatcctccgcatggtgcgcatggaccgaaggggaggcacttggaaattactgggttcagtggtttatgctcacagcaaggaattaatcacagcttggtacataggatttttggttcttattttttcgtctttccttgtctatctggtggaaaaggatgccaataaagagttttctacatatgcagatgctctctggtggggcacaattacattgacaactattggctatggagacaaaactcccctaacttggctgggaagattgctttctgcaggctttgcactccttggcatttctttctttgcacttcctgccggcattcttggctcaggttttgcattaaaagtacaagaacaacaccgccagaaacactttgagaaaagaaggaacccagctgccaacctcattcagtgtgtttggcgtagttacgcagctgatgagaaatctgtttccattgcaacctggaagccacacttgaaggccttgcacacctgcagccctaccaagaaagaacaaggggaagcatcaagcagtcagaagctaagttttaaggagcgagtgcgcatggctagccccaggggccagagtattaagagccgacaagcctcagtaggtgacaggaggtccccaagcaccgacatcacagccgagggcagtcccaccaaagtgcagaagagctggagcttcaacgaccgaacccgcttccggccctcgctgcgcctcaaaagttctcagccaaaaccagtgatagatgctgacacagcccttggcactgatgatgtatatgatgaaaaaggatgccagtgtgatgtatcagtggaagacctcaccccaccacttaaaactgtcattcgagctatcagaattatgaaatttcatgttgcaaaacggaagtttaaggaaacattacgtccatatgatgtaaaagatgtcattgaacaatattctgctggtcatctggacatgttgtgtagaattaaaagccttcaaacacgtgttgatcaaattcttggaaaagggcaaatcacatcagataagaagagccgagagaaaataacagcagaacatgagaccacagacgatctcagtatgctcggtcgggtggtcaaggttgaaaaacaggtacagtccatagaatccaagctggactgcctactagacatctatcaacaggtccttcggaaaggctctgcctcagccctcgctttggcttcattccagatcccaccttttgaatgtgaacagacatctgactatcaaagccctgtggatagcaaagatctttcgggttccgcacaaaacagtggctgcttatccagatcaactagtgccaacatctcgagaggcctgcagttcattctgacgccaaatgagttcagtgcccagactttctacgcgcttagccctactatgcacagtcaagcaacacaggtgccaattagtcaaagcgatggctcagcagtggcagccaccaacaccattgcaaaccaaataaatacggcacccaagccagcagccccaacaactttacagatcccacctcctctcccagccatcaagcatctgcccaggccagaaactctgcaccctaaccctgcaggcttacaggaaagcatttctgacgtcaccacctgccttgttgcctccaaggaaaatgttcaggttgcacagtcaaatctcaccaaggaccgttctatgaggaaaagctttgacatgggaggagaaactctgttgtctgtctgtcccatggtgccgaaggacttgggcaaatctttgtctgtgcaaaacctgatcaggtcgaccgaggaactgaatatacaactttcagggagtgagtcaagtggctccagaggcagccaagatttttaccccaaatggagggaatccaaattgtttataactgatgaagaggtgggtcccgaagagacagagacagacacttttgatgccgcaccgcagcctgccagggaagctgcctttgcatcagactctctaaggactggaaggtcacgatcatctcagagcatttgtaaggcaggagaaagtacagatgccctcagcttgcctcatgtcaaactgaaataagttcttcattttctttccaggcatagcagttctttagccatacatatcattgcatgaactatttcgaaagcccttctaaaaagttgaaattgcaagaatcgggaagaacatgaaaggcagtttataagcccgttaccttttaattgcatgaaaatgcatgtttagggatggctaaaattccaaggtgcatcgacattaacccactcatttagtaatgtaccttgagttaaaaagcctgagaaaccaaacacagctaatgctatggggtgtatgaatatgtcaagtttaggtcatttagaagatttgacactgtattttgaaattatgggagtaaacaccttcaaatttcaggcatttctgctttgtgactaaatacaaactacattttcaagattaggccataatgtatatttaaacacaatggctatcaacagctgctaataaggtatcaactaaagcagaattggggaataatagaaatggctgcttatttcaagatatatttgccaacccattcctattcagtcattttattattaatgtaatttgaatgtcaatttgtgtgcttttggtgatttagcgctgtggcaagcaattttgcacatcattttcatgttgttctttatgacaagaatgttcttcaattagaaaatgtgcaaataatgaaattcagggccagtgaggcaaatagactatctgacatatttgactttatgaaaacatattgcctgatggcagaatcaactttataagtggtcaacttctacacaagcgtatgaaatactggtcagtagaacagccattgtgattggactggtttctctgcaatggcgccaaccccaggcttgccaatactgcctatgtaaagggcaagtgtgagaagctattctcatttcgctgacatacaggtaggactatgggggatgggacatttgagtgggactgagataggaaaggcttgaaaagaacccagaaacaccaccaggaagttggcaaagtaaaagaaaatgacttccccctcaaagggcaatgagagggagagaaacaaaccaaaatagaagaactagactttttagaaaatgagtattgctagggaattcaactacctaatcttcccttattcttatatataagcagagaatttttgcaaggtatttattttttaatatgccctgaatgtcttttgctattatgtgtacattttgcatatgaaagtctaaaacgaaacttcctttactttttatactgtagtgaaaattttctattcttcccaagaatgttgtcccaaatctgaaattactggttcaatttcctgatataaacatttacaattagaagctagatagtactggcagagtctgcaaatcagaacacttaaatatatcatggcagcaaaaagaccaagggaaacaaaatgacaaatgtatttatcagaaagcaagcaatgctgactgcttgttagaaacccatctagctatcttaggtcaccagaacttcagccaacgtaatgacattcaaaaaaaaaggacataagagatagcatttcaattcaattaaaccctagccacaggaggactcaagaaaggaagttgtttccttggcagacataaatgctgcctccagaagtacttctccagcagccaagcagaatgagcagggttatcaagtggatgttcaaaggaagaaggaggccctgaactccaccaatcctccccagccctccccaacaggctttctccatcattgactctcccctgcttttcttcttcattaactccttattcattccctgccagtattttgcttctgaacttcaccaggccttaaccagcctccatccccaggtcaaccagttctccgctttacctaaaatgtgcttctcaaccttttagaaccttgtcccttttgataaacatggaaatttttaaagcttcctcttcgcatcccacttggattctaagacaattagaatcatttagaatctttttggctgctggaaatgtatagaagatagaggctaaattttacacttcagttaagacattgtcaatccttttaagcaattgttttcattttcaaaatacagaatgttagtaaattatgaaaatcaatttttcatcttcattcaacctgaagttgtgattcccccttgcaagaatgttgcatacacacacacacacacacacacacacacacacacacacacacacacacacacacacacacacccctccactgacctaaagccagacacctgccgtgactgggcaggctctctcccattattaacagaggaagaggagggaggcagcaactttcaggtagcactgattcttggacatactctgtcctgggtcaaaccccactggcagcaggaattctgaatgtattggggacccctccttaggcctcgttaagtctcaaacacagtacagctcacccagcattgctgacgactgaagattcagaaacaaaacctacacacagcactgaggtcttaatcatagcaaaatgtgataaaccatgttgtgaaaaacttttatacattgaagccatgaccattttgtgtctatcttactctagcacaaaaattgggggatgttaaaagatagttgtgtggaagctataaggttctgtctgtcgtgttactctctgtggaaatgagaggggtctcccatttacactaagcaaatttccattggtcaattttaatgatgtcttgaagcacaatttagctgagcactgagtagccatatgctttctgagtacaagtgtgtctgccttcttcaacatgtagggttgatcaagctaatacttaattgcaaatatcccttgtatgaggttaactaaaaaaattttgctatgtctgatctacatgtttgcattttgttcaactaaattaatatttgtagattgcaagttttgtttaaaataactttattgagtttttaagtcctgatctgttctaaggtgcctttctcacctcccattgattcagtgattctgaagttcttaatttgcaagtaaaataagtctactagagaggaggaaatcaggcacaaattgaccaattctcatgccatttgcaaagcaaaactgtaaggatgatgaaacctggctaactaaattaatggatcatttcactaaatcagatagaggaaatatcataaatattaacttgtctccctagaagctgagatttttcgccttaaatgacatggttgtgtttttgtaagagaaacttaatctaatctaataatgtgcatttaagtaagcagttctaagtcatgtatgacaatgcaattgtctgtttcctgaaaacaaataaatcgggaacaccatatccatttcaagctatcattaaagtgtaatttcctttgctctcttttactgggattatttgttttaaagtaaaacatt

SEQ ID NO: 168252 - DNA, 6623 bp, Homo sapiens
  Payload ID: 13100
  Gene Symbol: KCNQ5
  Gene Name: potassium channel, voltage gated KQT-like subfamily Q, member 5
  ENST ID: ENST00000355635
  CDS Start-End: 348-3203
actctatccccgggggcagtttgggaaggagggagtggtagtcgcgggaatgagggagcaagagaaaccctctcaaagtgacgccccaaacaggtccggatttagaattcgaagctaaaggctgttagaaattgggactcctcggcctcctctgcagcccctcctttcccgccccgaagcccgggcggtttgctggctgcctgcttccccgcccccggctcagaggtctctggctggcgggcgccccgtcggccgccggcttcctccttgaaacccgccggcgcacatgaggccgctgcccccgccgcaggcgctggcggccccctcgcggtgcccgtggtgatgccatgccccgccaccacgcgggaggagaggagggcggcgccgccgggctctgggtgaagagcggcgcagcggcggcggcggcgggcggggggcgcttgggcagcggcatgaaggatgtggagtccggccggggcagggtgctgctgaactcggcagccgccaggggcgacggcctgctactgctgggcacccgcgcggccacgctcggtggcggcggcggtggcctgagggagagccgccggggcaagcagggggcccggatgagcctgctggggaagccgctctcttacacgagtagccagagctgccggcgcaacgtcaagtaccggcgggtgcagaactacctgtacaacgtgctggagagaccccgcggctgggcgttcatctaccacgctttcgtttttctccctgtctttggttgcttgattttgtcagtgttttctaccatccctgagcacacaaaattggcctcaagttgcctcttgatcctggagttcgtgatgattgtcgtctttggtttggagttcatcattcgaatctggtctgcgggttgctgttgtcgatatagaggatggcaaggaagactgaggtttgctcgaaagcccttctgtgttatagataccattgttcttatcgcttcaatagcagttgtttctgcaaaaactcagggtaatatttttgccacgtctgcactcagaagtctccgtttcctacagatcctccgcatggtgcgcatggaccgaaggggaggcacttggaaattactgggttcagtggtttatgctcacagcaaggaattaatcacagcttggtacataggatttttggttcttattttttcgtctttccttgtctatctggtggaaaaggatgccaataaagagttttctacatatgcagatgctctctggtggggcacaattacattgacaactattggctatggagacaaaactcccctaacttggctgggaagattgctttctgcaggctttgcactccttggcatttctttctttgcacttcctgccggcattcttggctcaggttttgcattaaaagtacaagaacaacaccgccagaaacactttgagaaaagaaggaacccagctgccaacctcattcagtgtgtttggcgtagttacgcagctgatgagaaatctgtttccattgcaacctggaagccacacttgaaggccttgcacacctgcagccctaccaagaaagaacaaggggaagcatcaagcagtaagttctgtagtaataagcagaagctcttcagaatgtacacctcacggaagcagagtcagaagctaagttttaaggagcgagtgcgcatggctagccccaggggccagagtattaagagccgacaagcctcagtaggtgacaggaggtccccaagcaccgacatcacagccgagggcagtcccaccaaagtgcagaagagctggagcttcaacgaccgaacccgcttccggccctcgctgcgcctcaaaagttctcagccaaaaccagtgatagatgctgacacagcccttggcactgatgatgtatatgatgaaaaaggatgccagtgtgatgtatcagtggaagacctcaccccaccacttaaaactgtcattcgagctatcagaattatgaaatttcatgttgcaaaacggaagtttaaggaaacattacgtccatatgatgtaaaagatgtcattgaacaatattctgctggtcatctggacatgttgtgtagaattaaaagccttcaaacacgtgttgatcaaattcttggaaaagggcaaatcacatcagataagaagagccgagagaaaataacagcagaacatgagaccacagacgatctcagtatgctcggtcgggtggtcaaggttgaaaaacaggtacagtccatagaatccaagctggactgcctactagacatctatcaacaggtccttcggaaaggctctgcctcagccctcgctttggcttcattccagatcccaccttttgaatgtgaacagacatctgactatcaaagccctgtggatagcaaagatctttcgggttccgcacaaaacagtggctgcttatccagatcaactagtgccaacatctcgagaggcctgcagttcattctgacgccaaatgagttcagtgcccagactttctacgcgcttagccctactatgcacagtcaagcaacacaggtgccaattagtcaaagcgatggctcagcagtggcagccaccaacaccattgcaaaccaaataaatacggcacccaagccagcagccccaacaactttacagatcccacctcctctcccagccatcaagcatctgcccaggccagaaactctgcaccctaaccctgcaggcttacaggaaagcatttctgacgtcaccacctgccttgttgcctccaaggaaaatgttcaggttgcacagtcaaatctcaccaaggaccgttctatgaggaaaagctttgacatgggaggagaaactctgttgtctgtctgtcccatggtgccgaaggacttgggcaaatctttgtctgtgcaaaacctgatcaggtcgaccgaggaactgaatatacaactttcagggagtgagtcaagtggctccagaggcagccaagatttttaccccaaatggagggaatccaaattgtttataactgatgaagaggtgggtcccgaagagacagagacagacacttttgatgccgcaccgcagcctgccagggaagctgcctttgcatcagactctctaaggactggaaggtcacgatcatctcagagcatttgtaaggcaggagaaagtacagatgccctcagcttgcctcatgtcaaactgaaataagttcttcattttctttccaggcatagcagttctttagccatacatatcattgcatgaactatttcgaaagcccttctaaaaagttgaaattgcaagaatcgggaagaacatgaaaggcagtttataagcccgttaccttttaattgcatgaaaatgcatgtttagggatggctaaaattccaaggtgcatcgacattaacccactcatttagtaatgtaccttgagttaaaaagcctgagaaaccaaacacagctaatgctatggggtgtatgaatatgtcaagtttaggtcatttagaagatttgacactgtattttgaaattatgggagtaaacaccttcaaatttcaggcatttctgctttgtgactaaatacaaactacattttcaagattaggccataatgtatatttaaacacaatggctatcaacagctgctaataaggtatcaactaaagcagaattggggaataatagaaatggctgcttatttcaagatatatttgccaacccattcctattcagtcattttattattaatgtaatttgaatgtcaatttgtgtgcttttggtgatttagcgctgtggcaagcaattttgcacatcattttcatgttgttctttatgacaagaatgttcttcaattagaaaatgtgcaaataatgaaattcagggccagtgaggcaaatagactatctgacatatttgactttatgaaaacatattgcctgatggcagaatcaactttataagtggtcaacttctacacaagcgtatgaaatactggtcagtagaacagccattgtgattggactggtttctctgcaatggcgccaaccccaggcttgccaatactgcctatgtaaagggcaagtgtgagaagctattctcatttcgctgacatacaggtaggactatgggggatgggacatttgagtgggactgagataggaaaggcttgaaaagaacccagaaacaccaccaggaagttggcaaagtaaaagaaaatgacttccccctcaaagggcaatgagagggagagaaacaaaccaaaatagaagaactagactttttagaaaatgagtattgctagggaattcaactacctaatcttcccttattcttatatataagcagagaatttttgcaaggtatttattttttaatatgccctgaatgtcttttgctattatgtgtacattttgcatatgaaagtctaaaacgaaacttcctttactttttatactgtagtgaaaattttctattcttcccaagaatgttgtcccaaatctgaaattactggttcaatttcctgatataaacatttacaattagaagctagatagtactggcagagtctgcaaatcagaacacttaaatatatcatggcagcaaaaagaccaagggaaacaaaatgacaaatgtatttatcagaaagcaagcaatgctgactgcttgttagaaacccatctagctatcttaggtcaccagaacttcagccaacgtaatgacattcaaaaaaaaaggacataagagatagcatttcaattcaattaaaccctagccacaggaggactcaagaaaggaagttgtttccttggcagacataaatgctgcctccagaagtacttctccagcagccaagcagaatgagcagggttatcaagtggatgttcaaaggaagaaggaggccctgaactccaccaatcctccccagccctccccaacaggctttctccatcattgactctcccctgcttttcttcttcattaactccttattcattccctgccagtattttgcttctgaacttcaccaggccttaaccagcctccatccccaggtcaaccagttctccgctttacctaaaatgtgcttctcaaccttttagaaccttgtcccttttgataaacatggaaatttttaaagcttcctcttcgcatcccacttggattctaagacaattagaatcatttagaatctttttggctgctggaaatgtatagaagatagaggctaaattttacacttcagttaagacattgtcaatccttttaagcaattgttttcattttcaaaatacagaatgttagtaaattatgaaaatcaatttttcatcttcattcaacctgaagttgtgattcccccttgcaagaatgttgcatacacacacacacacacacacacacacacacacacacacacacacacacacacacacacacacccctccactgacctaaagccagacacctgccgtgactgggcaggctctctcccattattaacagaggaagaggagggaggcagcaactttcaggtagcactgattcttggacatactctgtcctgggtcaaaccccactggcagcaggaattctgaatgtattggggacccctccttaggcctcgttaagtctcaaacacagtacagctcacccagcattgctgacgactgaagattcagaaacaaaacctacacacagcactgaggtcttaatcatagcaaaatgtgataaaccatgttgtgaaaaacttttatacattgaagccatgaccattttgtgtctatcttactctagcacaaaaattgggggatgttaaaagatagttgtgtggaagctataaggttctgtctgtcgtgttactctctgtggaaatgagaggggtctcccatttacactaagcaaatttccattggtcaattttaatgatgtcttgaagcacaatttagctgagcactgagtagccatatgctttctgagtacaagtgtgtctgccttcttcaacatgtagggttgatcaagctaatacttaattgcaaatatcccttgtatgaggttaactaaaaaaattttgctatgtctgatctacatgtttgcattttgttcaactaaattaatatttgtagattgcaagttttgtttaaaataactttattgagtttttaagtcctgatctgttctaaggtgcctttctcacctcccattgattcagtgattctgaagttcttaatttgcaagtaaaataagtctactagagaggaggaaatcaggcacaaattgaccaattctcatgccatttgcaaagcaaaactgtaaggatgatgaaacctggctaactaaattaatggatcatttcactaaatcagatagaggaaatatcataaatattaacttgtctccctagaagctgagatttttcgccttaaatgacatggttgtgtttttgtaagagaaacttaatctaatctaataatgtgcatttaagtaagcagttctaagtcatgtatgacaatgcaattgtctgtttcctgaaaacaaataaatcgggaacaccatatccatttcaagctatcattaaagtgtaatttcctttgctctcttttactgggattatttgttttaaagtaaaacatt

SEQ ID NO: 168253 - DNA, 1469 bp, Homo sapiens
  Payload ID: 13100
  Gene Symbol: KCNQ5
  Gene Name: potassium channel, voltage gated KQT-like subfamily Q, member 5
  Uniprot ID: Q9NR82
  ENST ID: ENST00000370392
  CDS Start-End: 85-1368
ctccttgaaacccgccggcgcacatgaggccgctgcccccgccgcaggcgctggcggccccctcgcggtgcccgtggtgatgccatgccccgccaccacgcgggaggagaggagggcggcgccgccgggctctgggtgaagagcggcgcagcggcggcggcggcgggcggggggcgcttgggcagcggcatgaaggatgtggagtccggccggggcagggtgctgctgaactcggcagccgccaggggcgacggcctgctactgctgggcacccgcgcggccacgctcggtggcggcggcggtggcctgagggagagccgccggggcaagcagggggcccggatgagcctgctggggaagccgctctcttacacgagtagccagagctgccggcgcaacgtcaagtaccggcgggtgcagaactacctgtacaacgtgctggagagaccccgcggctgggcgttcatctaccacgctttcgtttttctccttgtctttggttgcttgattttgtcagtgttttctaccatccctgagcacacaaaattggcctcaagttgcctcttgatcctggagttcgtgatgattgtcgtctttggtttggagttcatcattcgaatctggtctgcgggttgctgttgtcgatatagaggatggcaaggaagactgaggtttgctcgaaagcccttctgtgttatagataccattgttcttatcgcttcaatagcagttgtttctgcaaaaactcagggtaatatttttgccacgtctgcactcagaagtctccgtttcctacagatcctccgcatggtgcgcatggaccgaaggggaggcacttggaaattactgggttcagtggtttatgctcacagcaaggaattaatcacagcttggtacataggatttttggttcttattttttcgtctttccttgtctatctggtggaaaaggatgccaataaagagttttctacatatgcagatgctctctggtggggcacaattacattgacaactattggctatggagacaaaactcccctaacttggctgggaagattgctttctgcaggctttgcactccttggcatttctttctttgcacttcctgccggcattcttggctcaggttttgcattaaaagtacaagaacaacaccgccagaaacactttgagaaaagaaggaacccagctgccaacctcattcagtgtgtttggcgtagttacgcagctgatgagaaatctgtttccattgcaacctggaagccacacttgaaggccttgcacacctgcagccctaccaagaaagaacaaggggaagcatcaagcaggtttgtgatttctctcttgctacatgtttgtttataaatctgatacctaccaggtgttttaaatgtgtctcatgtgagtaaaatcgatcaacaaatacaagatgattaaaagtgacctttcacaagattgcctgcaaa

SEQ ID NO: 168254 - DNA, 6345 bp, Homo sapiens
  Payload ID: 13100
  Gene Symbol: KCNQ5
  Gene Name: potassium channel, voltage gated KQT-like subfamily Q, member 5
  Uniprot ID: Q9NR82
  ENST ID: ENST00000370398
  CDS Start-End: 110-2908
gggcgccccgtcggccgccggcttcctccttgaaacccgccggcgcacatgaggccgctgcccccgccgcaggcgctggcggccccctcgcggtgcccgtggtgatgccatgccccgccaccacgcgggaggagaggagggcggcgccgccgggctctgggtgaagagcggcgcagcggcggcggcggcgggcggggggcgcttgggcagcggcatgaaggatgtggagtccggccggggcagggtgctgctgaactcggcagccgccaggggcgacggcctgctactgctgggcacccgcgcggccacgctcggtggcggcggcggtggcctgagggagagccgccggggcaagcagggggcccggatgagcctgctggggaagccgctctcttacacgagtagccagagctgccggcgcaacgtcaagtaccggcgggtgcagaactacctgtacaacgtgctggagagaccccgcggctgggcgttcatctaccacgctttcgtttttctccttgtctttggttgcttgattttgtcagtgttttctaccatccctgagcacacaaaattggcctcaagttgcctcttgatcctggagttcgtgatgattgtcgtctttggtttggagttcatcattcgaatctggtctgcgggttgctgttgtcgatatagaggatggcaaggaagactgaggtttgctcgaaagcccttctgtgttatagataccattgttcttatcgcttcaatagcagttgtttctgcaaaaactcagggtaatatttttgccacgtctgcactcagaagtctccgtttcctacagatcctccgcatggtgcgcatggaccgaaggggaggcacttggaaattactgggttcagtggtttatgctcacagcaaggaattaatcacagcttggtacataggatttttggttcttattttttcgtctttccttgtctatctggtggaaaaggatgccaataaagagttttctacatatgcagatgctctctggtggggcacaattacattgacaactattggctatggagacaaaactcccctaacttggctgggaagattgctttctgcaggctttgcactccttggcatttctttctttgcacttcctgccggcattcttggctcaggttttgcattaaaagtacaagaacaacaccgccagaaacactttgagaaaagaaggaacccagctgccaacctcattcagtgtgtttggcgtagttacgcagctgatgagaaatctgtttccattgcaacctggaagccacacttgaaggccttgcacacctgcagccctaccaagaaagaacaaggggaagcatcaagcagtcagaagctaagttttaaggagcgagtgcgcatggctagccccaggggccagagtattaagagccgacaagcctcagtaggtgacaggaggtccccaagcaccgacatcacagccgagggcagtcccaccaaagtgcagaagagctggagcttcaacgaccgaacccgcttccggccctcgctgcgcctcaaaagttctcagccaaaaccagtgatagatgctgacacagcccttggcactgatgatgtatatgatgaaaaaggatgccagtgtgatgtatcagtggaagacctcaccccaccacttaaaactgtcattcgagctatcagaattatgaaatttcatgttgcaaaacggaagtttaaggaaacattacgtccatatgatgtaaaagatgtcattgaacaatattctgctggtcatctggacatgttgtgtagaattaaaagccttcaaacacgtgttgatcaaattcttggaaaagggcaaatcacatcagataagaagagccgagagaaaataacagcagaacatgagaccacagacgatctcagtatgctcggtcgggtggtcaaggttgaaaaacaggtacagtccatagaatccaagctggactgcctactagacatctatcaacaggtccttcggaaaggctctgcctcagccctcgctttggcttcattccagatcccaccttttgaatgtgaacagacatctgactatcaaagccctgtggatagcaaagatctttcgggttccgcacaaaacagtggctgcttatccagatcaactagtgccaacatctcgagaggcctgcagttcattctgacgccaaatgagttcagtgcccagactttctacgcgcttagccctactatgcacagtcaagcaacacaggtgccaattagtcaaagcgatggctcagcagtggcagccaccaacaccattgcaaaccaaataaatacggcacccaagccagcagccccaacaactttacagatcccacctcctctcccagccatcaagcatctgcccaggccagaaactctgcaccctaaccctgcaggcttacaggaaagcatttctgacgtcaccacctgccttgttgcctccaaggaaaatgttcaggttgcacagtcaaatctcaccaaggaccgttctatgaggaaaagctttgacatgggaggagaaactctgttgtctgtctgtcccatggtgccgaaggacttgggcaaatctttgtctgtgcaaaacctgatcaggtcgaccgaggaactgaatatacaactttcagggagtgagtcaagtggctccagaggcagccaagatttttaccccaaatggagggaatccaaattgtttataactgatgaagaggtgggtcccgaagagacagagacagacacttttgatgccgcaccgcagcctgccagggaagctgcctttgcatcagactctctaaggactggaaggtcacgatcatctcagagcatttgtaaggcaggagaaagtacagatgccctcagcttgcctcatgtcaaactgaaataagttcttcattttctttccaggcatagcagttctttagccatacatatcattgcatgaactatttcgaaagcccttctaaaaagttgaaattgcaagaatcgggaagaacatgaaaggcagtttataagcccgttaccttttaattgcatgaaaatgcatgtttagggatggctaaaattccaaggtgcatcgacattaacccactcatttagtaatgtaccttgagttaaaaagcctgagaaaccaaacacagctaatgctatggggtgtatgaatatgtcaagtttaggtcatttagaagatttgacactgtattttgaaattatgggagtaaacaccttcaaatttcaggcatttctgctttgtgactaaatacaaactacattttcaagattaggccataatgtatatttaaacacaatggctatcaacagctgctaataaggtatcaactaaagcagaattggggaataatagaaatggctgcttatttcaagatatatttgccaacccattcctattcagtcattttattattaatgtaatttgaatgtcaatttgtgtgcttttggtgatttagcgctgtggcaagcaattttgcacatcattttcatgttgttctttatgacaagaatgttcttcaattagaaaatgtgcaaataatgaaattcagggccagtgaggcaaatagactatctgacatatttgactttatgaaaacatattgcctgatggcagaatcaactttataagtggtcaacttctacacaagcgtatgaaatactggtcagtagaacagccattgtgattggactggtttctctgcaatggcgccaaccccaggcttgccaatactgcctatgtaaagggcaagtgtgagaagctattctcatttcgctgacatacaggtaggactatgggggatgggacatttgagtgggactgagataggaaaggcttgaaaagaacccagaaacaccaccaggaagttggcaaagtaaaagaaaatgacttccccctcaaagggcaatgagagggagagaaacaaaccaaaatagaagaactagactttttagaaaatgagtattgctagggaattcaactacctaatcttcccttattcttatatataagcagagaatttttgcaaggtatttattttttaatatgccctgaatgtcttttgctattatgtgtacattttgcatatgaaagtctaaaacgaaacttcctttactttttatactgtagtgaaaattttctattcttcccaagaatgttgtcccaaatctgaaattactggttcaatttcctgatataaacatttacaattagaagctagatagtactggcagagtctgcaaatcagaacacttaaatatatcatggcagcaaaaagaccaagggaaacaaaatgacaaatgtatttatcagaaagcaagcaatgctgactgcttgttagaaacccatctagctatcttaggtcaccagaacttcagccaacgtaatgacattcaaaaaaaaaggacataagagatagcatttcaattcaattaaaccctagccacaggaggactcaagaaaggaagttgtttccttggcagacataaatgctgcctccagaagtacttctccagcagccaagcagaatgagcagggttatcaagtggatgttcaaaggaagaaggaggccctgaactccaccaatcctccccagccctccccaacaggctttctccatcattgactctcccctgcttttcttcttcattaactccttattcattccctgccagtattttgcttctgaacttcaccaggccttaaccagcctccatccccaggtcaaccagttctccgctttacctaaaatgtgcttctcaaccttttagaaccttgtcccttttgataaacatggaaatttttaaagcttcctcttcgcatcccacttggattctaagacaattagaatcatttagaatctttttggctgctggaaatgtatagaagatagaggctaaattttacacttcagttaagacattgtcaatccttttaagcaattgttttcattttcaaaatacagaatgttagtaaattatgaaaatcaatttttcatcttcattcaacctgaagttgtgattcccccttgcaagaatgttgcatacacacacacacacacacacacacacacacacacacacacacacacacacacacacacacacccctccactgacctaaagccagacacctgccgtgactgggcaggctctctcccattattaacagaggaagaggagggaggcagcaactttcaggtagcactgattcttggacatactctgtcctgggtcaaaccccactggcagcaggaattctgaatgtattggggacccctccttaggcctcgttaagtctcaaacacagtacagctcacccagcattgctgacgactgaagattcagaaacaaaacctacacacagcactgaggtcttaatcatagcaaaatgtgataaaccatgttgtgaaaaacttttatacattgaagccatgaccattttgtgtctatcttactctagcacaaaaattgggggatgttaaaagatagttgtgtggaagctataaggttctgtctgtcgtgttactctctgtggaaatgagaggggtctcccatttacactaagcaaatttccattggtcaattttaatgatgtcttgaagcacaatttagctgagcactgagtagccatatgctttctgagtacaagtgtgtctgccttcttcaacatgtagggttgatcaagctaatacttaattgcaaatatcccttgtatgaggttaactaaaaaaattttgctatgtctgatctacatgtttgcattttgttcaactaaattaatatttgtagattgcaagttttgtttaaaataactttattgagtttttaagtcctgatctgttctaaggtgcctttctcacctcccattgattcagtgattctgaagttcttaatttgcaagtaaaataagtctactagagaggaggaaatcaggcacaaattgaccaattctcatgccatttgcaaagcaaaactgtaaggatgatgaaacctggctaactaaattaatggatcatttcactaaatcagatagaggaaatatcataaatattaacttgtctccctagaagctgagatttttcgccttaaatgacatggttgtgtttttgtaagagaaacttaatctaatctaataatgtgcatttaagtaagcagttctaagtcatgtatgacaatgcaattgtctgtttcctgaaaacaaataaatcgggaacaccatatccatttcaagctatcattaaagtgtaatttcctttgctctcttttactgggattatttgttttaaagtaaaacattaaaaagatgtctataaa

SEQ ID NO: 168255 - DNA, 6539 bp, Homo sapiens
  Payload ID: 13100
  Gene Symbol: KCNQ5
  Gene Name: potassium channel, voltage gated KQT-like subfamily Q, member 5
  ENST ID: ENST00000403813
  CDS Start-End: 348-3119
actctatccccgggggcagtttgggaaggagggagtggtagtcgcgggaatgagggagcaagagaaaccctctcaaagtgacgccccaaacaggtccggatttagaattcgaagctaaaggctgttagaaattgggactcctcggcctcctctgcagcccctcctttcccgccccgaagcccgggcggtttgctggctgcctgcttccccgcccccggctcagaggtctctggctggcgggcgccccgtcggccgccggcttcctccttgaaacccgccggcgcacatgaggccgctgcccccgccgcaggcgctggcggccccctcgcggtgcccgtggtgatgccatgccccgccaccacgcgggaggagaggagggcggcgccgccgggctctgggtgaagagcggcgcagcggcggcggcggcgggcggggggcgcttgggcagcggcatgaaggatgtggagtccggccggggcagggtgctgctgaactcggcagccgccaggggcgacggcctgctactgctgggcacccgcgcggccacgctcggtggcggcggcggtggcctgagggagagccgccggggcaagcagggggcccggatgagcctgctggggaagccgctctcttacacgagtagccagagctgccggcgcaacgtcaagtaccggcgggtgcagaactacctgtacaacgtgctggagagaccccgcggctgggcgttcatctaccacgctttcgtttttctccctgtctttggttgcttgattttgtcagtgttttctaccatccctgagcacacaaaattggcctcaagttgcctcttgatcctggagttcgtgatgattgtcgtctttggtttggagttcatcattcgaatctggtctgcgggttgctgttgtcgatatagaggatggcaaggaagactgaggtttgctcgaaagcccttctgtgttatagataccattgttcttatcgcttcaatagcagttgtttctgcaaaaactcagggtaatatttttgccacgtctgcactcagaagtctccgtttcctacagatcctccgcatggtgcgcatggaccgaaggggaggcacttggaaattactgggttcagtggtttatgctcacagcaaggaattaatcacagcttggtacataggatttttggttcttattttttcgtctttccttgtctatctggtggaaaaggatgccaataaagagttttctacatatgcagatgctctctggtggggcacaattacattgacaactattggctatggagacaaaactcccctaacttggctgggaagattgctttctgcaggctttgcactccttggcatttctttctttgcacttcctgccggcattcttggctcaggttttgcattaaaagtacaagaacaacaccgccagaaacactttgagaaaagaaggaacccagctgccaacctcattcagtgtgtttggcgtagttacgcagctgatgagaaatctgtttccattgcaacctggaagccacacttgaaggccttgcacacctgcagccctaccaatcagaagctaagttttaaggagcgagtgcgcatggctagccccaggggccagagtattaagagccgacaagcctcagtaggtgacaggaggtccccaagcaccgacatcacagccgagggcagtcccaccaaagtgcagaagagctggagcttcaacgaccgaacccgcttccggccctcgctgcgcctcaaaagttctcagccaaaaccagtgatagatgctgacacagcccttggcactgatgatgtatatgatgaaaaaggatgccagtgtgatgtatcagtggaagacctcaccccaccacttaaaactgtcattcgagctatcagaattatgaaatttcatgttgcaaaacggaagtttaaggaaacattacgtccatatgatgtaaaagatgtcattgaacaatattctgctggtcatctggacatgttgtgtagaattaaaagccttcaaacacgtgttgatcaaattcttggaaaagggcaaatcacatcagataagaagagccgagagaaaataacagcagaacatgagaccacagacgatctcagtatgctcggtcgggtggtcaaggttgaaaaacaggtacagtccatagaatccaagctggactgcctactagacatctatcaacaggtccttcggaaaggctctgcctcagccctcgctttggcttcattccagatcccaccttttgaatgtgaacagacatctgactatcaaagccctgtggatagcaaagatctttcgggttccgcacaaaacagtggctgcttatccagatcaactagtgccaacatctcgagaggcctgcagttcattctgacgccaaatgagttcagtgcccagactttctacgcgcttagccctactatgcacagtcaagcaacacaggtgccaattagtcaaagcgatggctcagcagtggcagccaccaacaccattgcaaaccaaataaatacggcacccaagccagcagccccaacaactttacagatcccacctcctctcccagccatcaagcatctgcccaggccagaaactctgcaccctaaccctgcaggcttacaggaaagcatttctgacgtcaccacctgccttgttgcctccaaggaaaatgttcaggttgcacagtcaaatctcaccaaggaccgttctatgaggaaaagctttgacatgggaggagaaactctgttgtctgtctgtcccatggtgccgaaggacttgggcaaatctttgtctgtgcaaaacctgatcaggtcgaccgaggaactgaatatacaactttcagggagtgagtcaagtggctccagaggcagccaagatttttaccccaaatggagggaatccaaattgtttataactgatgaagaggtgggtcccgaagagacagagacagacacttttgatgccgcaccgcagcctgccagggaagctgcctttgcatcagactctctaaggactggaaggtcacgatcatctcagagcatttgtaaggcaggagaaagtacagatgccctcagcttgcctcatgtcaaactgaaataagttcttcattttctttccaggcatagcagttctttagccatacatatcattgcatgaactatttcgaaagcccttctaaaaagttgaaattgcaagaatcgggaagaacatgaaaggcagtttataagcccgttaccttttaattgcatgaaaatgcatgtttagggatggctaaaattccaaggtgcatcgacattaacccactcatttagtaatgtaccttgagttaaaaagcctgagaaaccaaacacagctaatgctatggggtgtatgaatatgtcaagtttaggtcatttagaagatttgacactgtattttgaaattatgggagtaaacaccttcaaatttcaggcatttctgctttgtgactaaatacaaactacattttcaagattaggccataatgtatatttaaacacaatggctatcaacagctgctaataaggtatcaactaaagcagaattggggaataatagaaatggctgcttatttcaagatatatttgccaacccattcctattcagtcattttattattaatgtaatttgaatgtcaatttgtgtgcttttggtgatttagcgctgtggcaagcaattttgcacatcattttcatgttgttctttatgacaagaatgttcttcaattagaaaatgtgcaaataatgaaattcagggccagtgaggcaaatagactatctgacatatttgactttatgaaaacatattgcctgatggcagaatcaactttataagtggtcaacttctacacaagcgtatgaaatactggtcagtagaacagccattgtgattggactggtttctctgcaatggcgccaaccccaggcttgccaatactgcctatgtaaagggcaagtgtgagaagctattctcatttcgctgacatacaggtaggactatgggggatgggacatttgagtgggactgagataggaaaggcttgaaaagaacccagaaacaccaccaggaagttggcaaagtaaaagaaaatgacttccccctcaaagggcaatgagagggagagaaacaaaccaaaatagaagaactagactttttagaaaatgagtattgctagggaattcaactacctaatcttcccttattcttatatataagcagagaatttttgcaaggtatttattttttaatatgccctgaatgtcttttgctattatgtgtacattttgcatatgaaagtctaaaacgaaacttcctttactttttatactgtagtgaaaattttctattcttcccaagaatgttgtcccaaatctgaaattactggttcaatttcctgatataaacatttacaattagaagctagatagtactggcagagtctgcaaatcagaacacttaaatatatcatggcagcaaaaagaccaagggaaacaaaatgacaaatgtatttatcagaaagcaagcaatgctgactgcttgttagaaacccatctagctatcttaggtcaccagaacttcagccaacgtaatgacattcaaaaaaaaaggacataagagatagcatttcaattcaattaaaccctagccacaggaggactcaagaaaggaagttgtttccttggcagacataaatgctgcctccagaagtacttctccagcagccaagcagaatgagcagggttatcaagtggatgttcaaaggaagaaggaggccctgaactccaccaatcctccccagccctccccaacaggctttctccatcattgactctcccctgcttttcttcttcattaactccttattcattccctgccagtattttgcttctgaacttcaccaggccttaaccagcctccatccccaggtcaaccagttctccgctttacctaaaatgtgcttctcaaccttttagaaccttgtcccttttgataaacatggaaatttttaaagcttcctcttcgcatcccacttggattctaagacaattagaatcatttagaatctttttggctgctggaaatgtatagaagatagaggctaaattttacacttcagttaagacattgtcaatccttttaagcaattgttttcattttcaaaatacagaatgttagtaaattatgaaaatcaatttttcatcttcattcaacctgaagttgtgattcccccttgcaagaatgttgcatacacacacacacacacacacacacacacacacacacacacacacacacacacacacacacacccctccactgacctaaagccagacacctgccgtgactgggcaggctctctcccattattaacagaggaagaggagggaggcagcaactttcaggtagcactgattcttggacatactctgtcctgggtcaaaccccactggcagcaggaattctgaatgtattggggacccctccttaggcctcgttaagtctcaaacacagtacagctcacccagcattgctgacgactgaagattcagaaacaaaacctacacacagcactgaggtcttaatcatagcaaaatgtgataaaccatgttgtgaaaaacttttatacattgaagccatgaccattttgtgtctatcttactctagcacaaaaattgggggatgttaaaagatagttgtgtggaagctataaggttctgtctgtcgtgttactctctgtggaaatgagaggggtctcccatttacactaagcaaatttccattggtcaattttaatgatgtcttgaagcacaatttagctgagcactgagtagccatatgctttctgagtacaagtgtgtctgccttcttcaacatgtagggttgatcaagctaatacttaattgcaaatatcccttgtatgaggttaactaaaaaaattttgctatgtctgatctacatgtttgcattttgttcaactaaattaatatttgtagattgcaagttttgtttaaaataactttattgagtttttaagtcctgatctgttctaaggtgcctttctcacctcccattgattcagtgattctgaagttcttaatttgcaagtaaaataagtctactagagaggaggaaatcaggcacaaattgaccaattctcatgccatttgcaaagcaaaactgtaaggatgatgaaacctggctaactaaattaatggatcatttcactaaatcagatagaggaaatatcataaatattaacttgtctccctagaagctgagatttttcgccttaaatgacatggttgtgtttttgtaagagaaacttaatctaatctaataatgtgcatttaagtaagcagttctaagtcatgtatgacaatgcaattgtctgtttcctgaaaacaaataaatcgggaacaccatatccatttcaagctatcattaaagtgtaatttcctttgctctcttttactgggattatttgttttaaagtaaaacatt

SEQ ID NO: 168256 - DNA, 6596 bp, Homo sapiens
  Payload ID: 13100
  Gene Symbol: KCNQ5
  Gene Name: potassium channel, voltage gated KQT-like subfamily Q, member 5
  ENST ID: ENST00000402622
  CDS Start-End: 348-3176
actctatccccgggggcagtttgggaaggagggagtggtagtcgcgggaatgagggagcaagagaaaccctctcaaagtgacgccccaaacaggtccggatttagaattcgaagctaaaggctgttagaaattgggactcctcggcctcctctgcagcccctcctttcccgccccgaagcccgggcggtttgctggctgcctgcttccccgcccccggctcagaggtctctggctggcgggcgccccgtcggccgccggcttcctccttgaaacccgccggcgcacatgaggccgctgcccccgccgcaggcgctggcggccccctcgcggtgcccgtggtgatgccatgccccgccaccacgcgggaggagaggagggcggcgccgccgggctctgggtgaagagcggcgcagcggcggcggcggcgggcggggggcgcttgggcagcggcatgaaggatgtggagtccggccggggcagggtgctgctgaactcggcagccgccaggggcgacggcctgctactgctgggcacccgcgcggccacgctcggtggcggcggcggtggcctgagggagagccgccggggcaagcagggggcccggatgagcctgctggggaagccgctctcttacacgagtagccagagctgccggcgcaacgtcaagtaccggcgggtgcagaactacctgtacaacgtgctggagagaccccgcggctgggcgttcatctaccacgctttcgtttttctccctgtctttggttgcttgattttgtcagtgttttctaccatccctgagcacacaaaattggcctcaagttgcctcttgatcctggagttcgtgatgattgtcgtctttggtttggagttcatcattcgaatctggtctgcgggttgctgttgtcgatatagaggatggcaaggaagactgaggtttgctcgaaagcccttctgtgttatagataccattgttcttatcgcttcaatagcagttgtttctgcaaaaactcagggtaatatttttgccacgtctgcactcagaagtctccgtttcctacagatcctccgcatggtgcgcatggaccgaaggggaggcacttggaaattactgggttcagtggtttatgctcacagcaaggaattaatcacagcttggtacataggatttttggttcttattttttcgtctttccttgtctatctggtggaaaaggatgccaataaagagttttctacatatgcagatgctctctggtggggcacaattacattgacaactattggctatggagacaaaactcccctaacttggctgggaagattgctttctgcaggctttgcactccttggcatttctttctttgcacttcctgccggcattcttggctcaggttttgcattaaaagtacaagaacaacaccgccagaaacactttgagaaaagaaggaacccagctgccaacctcattcagtgtgtttggcgtagttacgcagctgatgagaaatctgtttccattgcaacctggaagccacacttgaaggccttgcacacctgcagccctaccaataagttctgtagtaataagcagaagctcttcagaatgtacacctcacggaagcagagtcagaagctaagttttaaggagcgagtgcgcatggctagccccaggggccagagtattaagagccgacaagcctcagtaggtgacaggaggtccccaagcaccgacatcacagccgagggcagtcccaccaaagtgcagaagagctggagcttcaacgaccgaacccgcttccggccctcgctgcgcctcaaaagttctcagccaaaaccagtgatagatgctgacacagcccttggcactgatgatgtatatgatgaaaaaggatgccagtgtgatgtatcagtggaagacctcaccccaccacttaaaactgtcattcgagctatcagaattatgaaatttcatgttgcaaaacggaagtttaaggaaacattacgtccatatgatgtaaaagatgtcattgaacaatattctgctggtcatctggacatgttgtgtagaattaaaagccttcaaacacgtgttgatcaaattcttggaaaagggcaaatcacatcagataagaagagccgagagaaaataacagcagaacatgagaccacagacgatctcagtatgctcggtcgggtggtcaaggttgaaaaacaggtacagtccatagaatccaagctggactgcctactagacatctatcaacaggtccttcggaaaggctctgcctcagccctcgctttggcttcattccagatcccaccttttgaatgtgaacagacatctgactatcaaagccctgtggatagcaaagatctttcgggttccgcacaaaacagtggctgcttatccagatcaactagtgccaacatctcgagaggcctgcagttcattctgacgccaaatgagttcagtgcccagactttctacgcgcttagccctactatgcacagtcaagcaacacaggtgccaattagtcaaagcgatggctcagcagtggcagccaccaacaccattgcaaaccaaataaatacggcacccaagccagcagccccaacaactttacagatcccacctcctctcccagccatcaagcatctgcccaggccagaaactctgcaccctaaccctgcaggcttacaggaaagcatttctgacgtcaccacctgccttgttgcctccaaggaaaatgttcaggttgcacagtcaaatctcaccaaggaccgttctatgaggaaaagctttgacatgggaggagaaactctgttgtctgtctgtcccatggtgccgaaggacttgggcaaatctttgtctgtgcaaaacctgatcaggtcgaccgaggaactgaatatacaactttcagggagtgagtcaagtggctccagaggcagccaagatttttaccccaaatggagggaatccaaattgtttataactgatgaagaggtgggtcccgaagagacagagacagacacttttgatgccgcaccgcagcctgccagggaagctgcctttgcatcagactctctaaggactggaaggtcacgatcatctcagagcatttgtaaggcaggagaaagtacagatgccctcagcttgcctcatgtcaaactgaaataagttcttcattttctttccaggcatagcagttctttagccatacatatcattgcatgaactatttcgaaagcccttctaaaaagttgaaattgcaagaatcgggaagaacatgaaaggcagtttataagcccgttaccttttaattgcatgaaaatgcatgtttagggatggctaaaattccaaggtgcatcgacattaacccactcatttagtaatgtaccttgagttaaaaagcctgagaaaccaaacacagctaatgctatggggtgtatgaatatgtcaagtttaggtcatttagaagatttgacactgtattttgaaattatgggagtaaacaccttcaaatttcaggcatttctgctttgtgactaaatacaaactacattttcaagattaggccataatgtatatttaaacacaatggctatcaacagctgctaataaggtatcaactaaagcagaattggggaataatagaaatggctgcttatttcaagatatatttgccaacccattcctattcagtcattttattattaatgtaatttgaatgtcaatttgtgtgcttttggtgatttagcgctgtggcaagcaattttgcacatcattttcatgttgttctttatgacaagaatgttcttcaattagaaaatgtgcaaataatgaaattcagggccagtgaggcaaatagactatctgacatatttgactttatgaaaacatattgcctgatggcagaatcaactttataagtggtcaacttctacacaagcgtatgaaatactggtcagtagaacagccattgtgattggactggtttctctgcaatggcgccaaccccaggcttgccaatactgcctatgtaaagggcaagtgtgagaagctattctcatttcgctgacatacaggtaggactatgggggatgggacatttgagtgggactgagataggaaaggcttgaaaagaacccagaaacaccaccaggaagttggcaaagtaaaagaaaatgacttccccctcaaagggcaatgagagggagagaaacaaaccaaaatagaagaactagactttttagaaaatgagtattgctagggaattcaactacctaatcttcccttattcttatatataagcagagaatttttgcaaggtatttattttttaatatgccctgaatgtcttttgctattatgtgtacattttgcatatgaaagtctaaaacgaaacttcctttactttttatactgtagtgaaaattttctattcttcccaagaatgttgtcccaaatctgaaattactggttcaatttcctgatataaacatttacaattagaagctagatagtactggcagagtctgcaaatcagaacacttaaatatatcatggcagcaaaaagaccaagggaaacaaaatgacaaatgtatttatcagaaagcaagcaatgctgactgcttgttagaaacccatctagctatcttaggtcaccagaacttcagccaacgtaatgacattcaaaaaaaaaggacataagagatagcatttcaattcaattaaaccctagccacaggaggactcaagaaaggaagttgtttccttggcagacataaatgctgcctccagaagtacttctccagcagccaagcagaatgagcagggttatcaagtggatgttcaaaggaagaaggaggccctgaactccaccaatcctccccagccctccccaacaggctttctccatcattgactctcccctgcttttcttcttcattaactccttattcattccctgccagtattttgcttctgaacttcaccaggccttaaccagcctccatccccaggtcaaccagttctccgctttacctaaaatgtgcttctcaaccttttagaaccttgtcccttttgataaacatggaaatttttaaagcttcctcttcgcatcccacttggattctaagacaattagaatcatttagaatctttttggctgctggaaatgtatagaagatagaggctaaattttacacttcagttaagacattgtcaatccttttaagcaattgttttcattttcaaaatacagaatgttagtaaattatgaaaatcaatttttcatcttcattcaacctgaagttgtgattcccccttgcaagaatgttgcatacacacacacacacacacacacacacacacacacacacacacacacacacacacacacacacccctccactgacctaaagccagacacctgccgtgactgggcaggctctctcccattattaacagaggaagaggagggaggcagcaactttcaggtagcactgattcttggacatactctgtcctgggtcaaaccccactggcagcaggaattctgaatgtattggggacccctccttaggcctcgttaagtctcaaacacagtacagctcacccagcattgctgacgactgaagattcagaaacaaaacctacacacagcactgaggtcttaatcatagcaaaatgtgataaaccatgttgtgaaaaacttttatacattgaagccatgaccattttgtgtctatcttactctagcacaaaaattgggggatgttaaaagatagttgtgtggaagctataaggttctgtctgtcgtgttactctctgtggaaatgagaggggtctcccatttacactaagcaaatttccattggtcaattttaatgatgtcttgaagcacaatttagctgagcactgagtagccatatgctttctgagtacaagtgtgtctgccttcttcaacatgtagggttgatcaagctaatacttaattgcaaatatcccttgtatgaggttaactaaaaaaattttgctatgtctgatctacatgtttgcattttgttcaactaaattaatatttgtagattgcaagttttgtttaaaataactttattgagtttttaagtcctgatctgttctaaggtgcctttctcacctcccattgattcagtgattctgaagttcttaatttgcaagtaaaataagtctactagagaggaggaaatcaggcacaaattgaccaattctcatgccatttgcaaagcaaaactgtaaggatgatgaaacctggctaactaaattaatggatcatttcactaaatcagatagaggaaatatcataaatattaacttgtctccctagaagctgagatttttcgccttaaatgacatggttgtgtttttgtaagagaaacttaatctaatctaataatgtgcatttaagtaagcagttctaagtcatgtatgacaatgcaattgtctgtttcctgaaaacaaataaatcgggaacaccatatccatttcaagctatcattaaagtgtaatttcctttgctctcttttactgggattatttgttttaaagtaaaacatt

SEQ ID NO: 168257 - DNA, 649 bp, Homo sapiens
  Payload ID: 13100
  Gene Symbol: KCNQ5
  Gene Name: potassium channel, voltage gated KQT-like subfamily Q, member 5
  ENST ID: ENST00000427928
  CDS Start-End: 1-292
gcacacctgcagccctaccaatcagaagctaagttttaaggagcgagtgcgcatggctagccccaggggccagagtattaagagccgacaagcctcagtaggtgacaggaggtccccaagcaccgacatcacagccgagggcagtcccaccaaagtgcagaagagctggagcttcaacgaccgaacccgcttccggccctcgctgcgcctcaaaagttctcagccaaaaccagtgatagatgacaagggccacattaagatcaatgggactgtcattctgatgtatttgtgacgtctgaccagcaaaggtccaagacccagggacaaccaggtgcttgctctgtgaatatcttgaaacacagtaaggaggatgatcatttctggtcaacaatgaaggtgctctttccctctctcacacactccatctaccagcaaatcagagaccactgcttatcttccttagagaggttcctgttgaaagttatttcgaagtcttccaatgataagtaaaattcaagttcttctcccaagaggaattaacctattttatttatcatattatgtagcagacattcacttgccaacacattttattgagtgccacataattttcatgtttataaaataaaatattttatttttcatttaa

SEQ ID NO: 168258 - DNA, 321 bp, Homo sapiens
  Payload ID: 13100
  Gene Symbol: KCNQ5
  Gene Name: potassium channel, voltage gated KQT-like subfamily Q, member 5
  ENST ID: ENST00000441538
  CDS Start-End: 1-273
gagttcgtgatgattgtcgtctttggtttggagttcatcattcgaatctggtctgcgggttgctgttgtcgatatagaggatggcaaggaagactgaggtttgctcgaaagcccttctgtgttataggagtcaggaattgttgcgtaatcttctcagtttcctcccttactcctgttccctatggtgggggcagagtggatttaaggaagaaagtgtatcaccatccatgggcactgttaagaagaatcctttattccatacttctttcatagtatgcacatctcaaaagtctccacttattaaaccagaatttatggaaa

SEQ ID NO: 168259 - DNA, 6236 bp, Homo sapiens
  Payload ID: 13100
  Gene Symbol: KCNQ5
  Gene Name: potassium channel, voltage gated KQT-like subfamily Q, member 5
  ENST ID: ENST00000414165
  CDS Start-End: 348-2816
actctatccccgggggcagtttgggaaggagggagtggtagtcgcgggaatgagggagcaagagaaaccctctcaaagtgacgccccaaacaggtccggatttagaattcgaagctaaaggctgttagaaattgggactcctcggcctcctctgcagcccctcctttcccgccccgaagcccgggcggtttgctggctgcctgcttccccgcccccggctcagaggtctctggctggcgggcgccccgtcggccgccggcttcctccttgaaacccgccggcgcacatgaggccgctgcccccgccgcaggcgctggcggccccctcgcggtgcccgtggtgatgccatgccccgccaccacgcgggaggagaggagggcggcgccgccgggctctgggtgaagagcggcgcagcggcggcggcggcgggcggggggcgcttgggcagcggcatgaaggatgtggagtccggccggggcagggtgctgctgaactcggcagccgccaggggcgacggcctgctactgctgggcacccgcgcggccacgctcggtggcggcggcggtggcctgagggagagccgccggggcaagcagggggcccggatgagcctgctggggaagccgctctcttacacgagtagccagagctgccggcgcaacgtcaagtaccggcgggtgcagaactacctgtacaacgtgctggagagaccccgcggctgggcgttcatctaccacgctttcgtttttctccctgtctttggttgcttgattttgtcagtgttttctaccatccctgagcacacaaaattggcctcaagttgcctcttgatcctggagttcgtgatgattgtcgtctttggtttggagttcatcattcgaatctggtctgcgggttgctgttgtcgatatagaggatggcaaggaagactgaggtttgctcgaaagcccttctgtgttatagataccattgttcttatcgcttcaatagcagttgtttctgcaaaaactcagggtaatatttttgccacgtctgcactcagaagtctccgtttcctacagatcctccgcatggtgcgcatggaccgaaggggaggcacttggaaattactgggttcagtggtttatgctcacagcaaggaattaatcacagcttggtacataggatttttggttcttattttttcgtctttccttgtctatctggtggaaaaggatgccaataaagagttttctacatatgcagatgctctctggtggggcacaattacattgacaactattggctatggagacaaaactcccctaacttggctgggaagattgctttctgcaggctttgcactccttggcatttctttctttgcacttcctgccggcattcttggctcaggttttgcattaaaagtacaagaacaacaccgccagaaacactttgagaaaagaaggaacccagctgccaacctcattcagtgtgtttggcgtagttacgcagctgatgagaaatctgtttccattgcaacctggaagccacacttgaaggccttgcacacctgcagccctaccaagaaagaacaaggggaagcatcaagcagaattatgaaatttcatgttgcaaaacggaagtttaaggaaacattacgtccatatgatgtaaaagatgtcattgaacaatattctgctggtcatctggacatgttgtgtagaattaaaagccttcaaacacgtgttgatcaaattcttggaaaagggcaaatcacatcagataagaagagccgagagaaaataacagcagaacatgagaccacagacgatctcagtatgctcggtcgggtggtcaaggttgaaaaacaggtacagtccatagaatccaagctggactgcctactagacatctatcaacaggtccttcggaaaggctctgcctcagccctcgctttggcttcattccagatcccaccttttgaatgtgaacagacatctgactatcaaagccctgtggatagcaaagatctttcgggttccgcacaaaacagtggctgcttatccagatcaactagtgccaacatctcgagaggcctgcagttcattctgacgccaaatgagttcagtgcccagactttctacgcgcttagccctactatgcacagtcaagcaacacaggtgccaattagtcaaagcgatggctcagcagtggcagccaccaacaccattgcaaaccaaataaatacggcacccaagccagcagccccaacaactttacagatcccacctcctctcccagccatcaagcatctgcccaggccagaaactctgcaccctaaccctgcaggcttacaggaaagcatttctgacgtcaccacctgccttgttgcctccaaggaaaatgttcaggttgcacagtcaaatctcaccaaggaccgttctatgaggaaaagctttgacatgggaggagaaactctgttgtctgtctgtcccatggtgccgaaggacttgggcaaatctttgtctgtgcaaaacctgatcaggtcgaccgaggaactgaatatacaactttcagggagtgagtcaagtggctccagaggcagccaagatttttaccccaaatggagggaatccaaattgtttataactgatgaagaggtgggtcccgaagagacagagacagacacttttgatgccgcaccgcagcctgccagggaagctgcctttgcatcagactctctaaggactggaaggtcacgatcatctcagagcatttgtaaggcaggagaaagtacagatgccctcagcttgcctcatgtcaaactgaaataagttcttcattttctttccaggcatagcagttctttagccatacatatcattgcatgaactatttcgaaagcccttctaaaaagttgaaattgcaagaatcgggaagaacatgaaaggcagtttataagcccgttaccttttaattgcatgaaaatgcatgtttagggatggctaaaattccaaggtgcatcgacattaacccactcatttagtaatgtaccttgagttaaaaagcctgagaaaccaaacacagctaatgctatggggtgtatgaatatgtcaagtttaggtcatttagaagatttgacactgtattttgaaattatgggagtaaacaccttcaaatttcaggcatttctgctttgtgactaaatacaaactacattttcaagattaggccataatgtatatttaaacacaatggctatcaacagctgctaataaggtatcaactaaagcagaattggggaataatagaaatggctgcttatttcaagatatatttgccaacccattcctattcagtcattttattattaatgtaatttgaatgtcaatttgtgtgcttttggtgatttagcgctgtggcaagcaattttgcacatcattttcatgttgttctttatgacaagaatgttcttcaattagaaaatgtgcaaataatgaaattcagggccagtgaggcaaatagactatctgacatatttgactttatgaaaacatattgcctgatggcagaatcaactttataagtggtcaacttctacacaagcgtatgaaatactggtcagtagaacagccattgtgattggactggtttctctgcaatggcgccaaccccaggcttgccaatactgcctatgtaaagggcaagtgtgagaagctattctcatttcgctgacatacaggtaggactatgggggatgggacatttgagtgggactgagataggaaaggcttgaaaagaacccagaaacaccaccaggaagttggcaaagtaaaagaaaatgacttccccctcaaagggcaatgagagggagagaaacaaaccaaaatagaagaactagactttttagaaaatgagtattgctagggaattcaactacctaatcttcccttattcttatatataagcagagaatttttgcaaggtatttattttttaatatgccctgaatgtcttttgctattatgtgtacattttgcatatgaaagtctaaaacgaaacttcctttactttttatactgtagtgaaaattttctattcttcccaagaatgttgtcccaaatctgaaattactggttcaatttcctgatataaacatttacaattagaagctagatagtactggcagagtctgcaaatcagaacacttaaatatatcatggcagcaaaaagaccaagggaaacaaaatgacaaatgtatttatcagaaagcaagcaatgctgactgcttgttagaaacccatctagctatcttaggtcaccagaacttcagccaacgtaatgacattcaaaaaaaaaggacataagagatagcatttcaattcaattaaaccctagccacaggaggactcaagaaaggaagttgtttccttggcagacataaatgctgcctccagaagtacttctccagcagccaagcagaatgagcagggttatcaagtggatgttcaaaggaagaaggaggccctgaactccaccaatcctccccagccctccccaacaggctttctccatcattgactctcccctgcttttcttcttcattaactccttattcattccctgccagtattttgcttctgaacttcaccaggccttaaccagcctccatccccaggtcaaccagttctccgctttacctaaaatgtgcttctcaaccttttagaaccttgtcccttttgataaacatggaaatttttaaagcttcctcttcgcatcccacttggattctaagacaattagaatcatttagaatctttttggctgctggaaatgtatagaagatagaggctaaattttacacttcagttaagacattgtcaatccttttaagcaattgttttcattttcaaaatacagaatgttagtaaattatgaaaatcaatttttcatcttcattcaacctgaagttgtgattcccccttgcaagaatgttgcatacacacacacacacacacacacacacacacacacacacacacacacacacacacacacacacccctccactgacctaaagccagacacctgccgtgactgggcaggctctctcccattattaacagaggaagaggagggaggcagcaactttcaggtagcactgattcttggacatactctgtcctgggtcaaaccccactggcagcaggaattctgaatgtattggggacccctccttaggcctcgttaagtctcaaacacagtacagctcacccagcattgctgacgactgaagattcagaaacaaaacctacacacagcactgaggtcttaatcatagcaaaatgtgataaaccatgttgtgaaaaacttttatacattgaagccatgaccattttgtgtctatcttactctagcacaaaaattgggggatgttaaaagatagttgtgtggaagctataaggttctgtctgtcgtgttactctctgtggaaatgagaggggtctcccatttacactaagcaaatttccattggtcaattttaatgatgtcttgaagcacaatttagctgagcactgagtagccatatgctttctgagtacaagtgtgtctgccttcttcaacatgtagggttgatcaagctaatacttaattgcaaatatcccttgtatgaggttaactaaaaaaattttgctatgtctgatctacatgtttgcattttgttcaactaaattaatatttgtagattgcaagttttgtttaaaataactttattgagtttttaagtcctgatctgttctaaggtgcctttctcacctcccattgattcagtgattctgaagttcttaatttgcaagtaaaataagtctactagagaggaggaaatcaggcacaaattgaccaattctcatgccatttgcaaagcaaaactgtaaggatgatgaaacctggctaactaaattaatggatcatttcactaaatcagatagaggaaatatcataaatattaacttgtctccctagaagctgagatttttcgccttaaatgacatggttgtgtttttgtaagagaaacttaatctaatctaataatgtgcatttaagtaagcagttctaagtcatgtatgacaatgcaattgtctgtttcctgaaaacaaataaatcgggaacaccatatccatttcaagctatcattaaagtgtaatttcctttgctctcttttactgggattatttgttttaaagtaaaacatt

SEQ ID NO: 168260 - DNA, 255 bp, Homo sapiens
  Payload ID: 13100
  Gene Symbol: KCNQ5
  Gene Name: potassium channel, voltage gated KQT-like subfamily Q, member 5
  ENST ID: ENST00000443915
  CDS Start-End: 1-207
ctggagttcgtgatgattgtcgtctttggtttggagttcatcattcgaatctggtctgcgggttgctgttgtcgatatagaggatggcaaggaagactgaggtttgctcgaaagcccttctgtgttataggtgaatatcagagtctcagatacctggactatgacaccaacattcttgtcttctatctcctgttttgcaatatttgattaatattaaaagctaacatccatggagtacttatcatggaccgggca

SEQ ID NO: 168261 - DNA, 2830 bp, Homo sapiens
  Payload ID: 13100
  Gene Symbol: KCNQ5
  Gene Name: potassium channel, voltage gated KQT-like subfamily Q, member 5
  Uniprot ID: Q9NR82
  ENST ID: ENST00000629977
  CDS Start-End: 19-2790
ggtgcccgtggtgatgccatgccccgccaccacgcgggaggagaggagggcggcgccgccgggctctgggtgaagagcggcgcagcggcggcggcggcgggcggggggcgcttgggcagcggcatgaaggatgtggagtccggccggggcagggtgctgctgaactcggcagccgccaggggcgacggcctgctactgctgggcacccgcgcggccacgctcggtggcggcggcggtggcctgagggagagccgccggggcaagcagggggcccggatgagcctgctggggaagccgctctcttacacgagtagccagagctgccggcgcaacgtcaagtaccggcgggtgcagaactacctgtacaacgtgctggagagaccccgcggctgggcgttcatctaccacgctttcgtttttctccttgtctttggttgcttgattttgtcagtgttttctaccatccctgagcacacaaaattggcctcaagttgcctcttgatcctggagttcgtgatgattgtcgtctttggtttggagttcatcattcgaatctggtctgcgggttgctgttgtcgatatagaggatggcaaggaagactgaggtttgctcgaaagcccttctgtgttatagataccattgttcttatcgcttcaatagcagttgtttctgcaaaaactcagggtaatatttttgccacgtctgcactcagaagtctccgtttcctacagatcctccgcatggtgcgcatggaccgaaggggaggcacttggaaattactgggttcagtggtttatgctcacagcaaggaattaatcacagcttggtacataggatttttggttcttattttttcgtctttccttgtctatctggtggaaaaggatgccaataaagagttttctacatatgcagatgctctctggtggggcacaattacattgacaactattggctatggagacaaaactcccctaacttggctgggaagattgctttctgcaggctttgcactccttggcatttctttctttgcacttcctgccggcattcttggctcaggttttgcattaaaagtacaagaacaacaccgccagaaacactttgagaaaagaaggaacccagctgccaacctcattcagtgtgtttggcgtagttacgcagctgatgagaaatctgtttccattgcaacctggaagccacacttgaaggccttgcacacctgcagccctaccaatcagaagctaagttttaaggagcgagtgcgcatggctagccccaggggccagagtattaagagccgacaagcctcagtaggtgacaggaggtccccaagcaccgacatcacagccgagggcagtcccaccaaagtgcagaagagctggagcttcaacgaccgaacccgcttccggccctcgctgcgcctcaaaagttctcagccaaaaccagtgatagatgctgacacagcccttggcactgatgatgtatatgatgaaaaaggatgccagtgtgatgtatcagtggaagacctcaccccaccacttaaaactgtcattcgagctatcagaattatgaaatttcatgttgcaaaacggaagtttaaggaaacattacgtccatatgatgtaaaagatgtcattgaacaatattctgctggtcatctggacatgttgtgtagaattaaaagccttcaaacacgtgttgatcaaattcttggaaaagggcaaatcacatcagataagaagagccgagagaaaataacagcagaacatgagaccacagacgatctcagtatgctcggtcgggtggtcaaggttgaaaaacaggtacagtccatagaatccaagctggactgcctactagacatctatcaacaggtccttcggaaaggctctgcctcagccctcgctttggcttcattccagatcccaccttttgaatgtgaacagacatctgactatcaaagccctgtggatagcaaagatctttcgggttccgcacaaaacagtggctgcttatccagatcaactagtgccaacatctcgagaggcctgcagttcattctgacgccaaatgagttcagtgcccagactttctacgcgcttagccctactatgcacagtcaagcaacacaggtgccaattagtcaaagcgatggctcagcagtggcagccaccaacaccattgcaaaccaaataaatacggcacccaagccagcagccccaacaactttacagatcccacctcctctcccagccatcaagcatctgcccaggccagaaactctgcaccctaaccctgcaggcttacaggaaagcatttctgacgtcaccacctgccttgttgcctccaaggaaaatgttcaggttgcacagtcaaatctcaccaaggaccgttctatgaggaaaagctttgacatgggaggagaaactctgttgtctgtctgtcccatggtgccgaaggacttgggcaaatctttgtctgtgcaaaacctgatcaggtcgaccgaggaactgaatatacaactttcagggagtgagtcaagtggctccagaggcagccaagatttttaccccaaatggagggaatccaaattgtttataactgatgaagaggtgggtcccgaagagacagagacagacacttttgatgccgcaccgcagcctgccagggaagctgcctttgcatcagactctctaaggactggaaggtcacgatcatctcagagcatttgtaaggcaggagaaagtacagatgccctcagcttgcctcatgtcaaactgaaataagttcttcattttctttccaggcatagcagttctttagcca

SEQ ID NO: 168262 - DNA, 3527 bp, Homo sapiens
  Payload ID: 13100
  Gene Symbol: KCNQ5
  Gene Name: potassium channel, voltage gated KQT-like subfamily Q, member 5
  Uniprot ID: Q9NR82
  ENST ID: ENST00000628967
  CDS Start-End: 348-2816
actctatccccgggggcagtttgggaaggagggagtggtagtcgcgggaatgagggagcaagagaaaccctctcaaagtgacgccccaaacaggtccggatttagaattcgaagctaaaggctgttagaaattgggactcctcggcctcctctgcagcccctcctttcccgccccgaagcccgggcggtttgctggctgcctgcttccccgcccccggctcagaggtctctggctggcgggcgccccgtcggccgccggcttcctccttgaaacccgccggcgcacatgaggccgctgcccccgccgcaggcgctggcggccccctcgcggtgcccgtggtgatgccatgccccgccaccacgcgggaggagaggagggcggcgccgccgggctctgggtgaagagcggcgcagcggcggcggcggcgggcggggggcgcttgggcagcggcatgaaggatgtggagtccggccggggcagggtgctgctgaactcggcagccgccaggggcgacggcctgctactgctgggcacccgcgcggccacgctcggtggcggcggcggtggcctgagggagagccgccggggcaagcagggggcccggatgagcctgctggggaagccgctctcttacacgagtagccagagctgccggcgcaacgtcaagtaccggcgggtgcagaactacctgtacaacgtgctggagagaccccgcggctgggcgttcatctaccacgctttcgtttttctccttgtctttggttgcttgattttgtcagtgttttctaccatccctgagcacacaaaattggcctcaagttgcctcttgatcctggagttcgtgatgattgtcgtctttggtttggagttcatcattcgaatctggtctgcgggttgctgttgtcgatatagaggatggcaaggaagactgaggtttgctcgaaagcccttctgtgttatagataccattgttcttatcgcttcaatagcagttgtttctgcaaaaactcagggtaatatttttgccacgtctgcactcagaagtctccgtttcctacagatcctccgcatggtgcgcatggaccgaaggggaggcacttggaaattactgggttcagtggtttatgctcacagcaaggaattaatcacagcttggtacataggatttttggttcttattttttcgtctttccttgtctatctggtggaaaaggatgccaataaagagttttctacatatgcagatgctctctggtggggcacaattacattgacaactattggctatggagacaaaactcccctaacttggctgggaagattgctttctgcaggctttgcactccttggcatttctttctttgcacttcctgccggcattcttggctcaggttttgcattaaaagtacaagaacaacaccgccagaaacactttgagaaaagaaggaacccagctgccaacctcattcagtgtgtttggcgtagttacgcagctgatgagaaatctgtttccattgcaacctggaagccacacttgaaggccttgcacacctgcagccctaccaagaaagaacaaggggaagcatcaagcagaattatgaaatttcatgttgcaaaacggaagtttaaggaaacattacgtccatatgatgtaaaagatgtcattgaacaatattctgctggtcatctggacatgttgtgtagaattaaaagccttcaaacacgtgttgatcaaattcttggaaaagggcaaatcacatcagataagaagagccgagagaaaataacagcagaacatgagaccacagacgatctcagtatgctcggtcgggtggtcaaggttgaaaaacaggtacagtccatagaatccaagctggactgcctactagacatctatcaacaggtccttcggaaaggctctgcctcagccctcgctttggcttcattccagatcccaccttttgaatgtgaacagacatctgactatcaaagccctgtggatagcaaagatctttcgggttccgcacaaaacagtggctgcttatccagatcaactagtgccaacatctcgagaggcctgcagttcattctgacgccaaatgagttcagtgcccagactttctacgcgcttagccctactatgcacagtcaagcaacacaggtgccaattagtcaaagcgatggctcagcagtggcagccaccaacaccattgcaaaccaaataaatacggcacccaagccagcagccccaacaactttacagatcccacctcctctcccagccatcaagcatctgcccaggccagaaactctgcaccctaaccctgcaggcttacaggaaagcatttctgacgtcaccacctgccttgttgcctccaaggaaaatgttcaggttgcacagtcaaatctcaccaaggaccgttctatgaggaaaagctttgacatgggaggagaaactctgttgtctgtctgtcccatggtgccgaaggacttgggcaaatctttgtctgtgcaaaacctgatcaggtcgaccgaggaactgaatatacaactttcagggagtgagtcaagtggctccagaggcagccaagatttttaccccaaatggagggaatccaaattgtttataactgatgaagaggtgggtcccgaagagacagagacagacacttttgatgccgcaccgcagcctgccagggaagctgcctttgcatcagactctctaaggactggaaggtcacgatcatctcagagcatttgtaaggcaggagaaagtacagatgccctcagcttgcctcatgtcaaactgaaataagttcttcattttctttccaggcatagcagttctttagccatacatatcattgcatgaactatttcgaaagcccttctaaaaagttgaaattgcaagaatcgggaagaacatgaaaggcagtttataagcccgttaccttttaattgcatgaaaatgcatgtttagggatggctaaaattccaaggtgcatcgacattaacccactcatttagtaatgtaccttgagttaaaaagcctgagaaaccaaacacagctaatgctatggggtgtatgaatatgtcaagtttaggtcatttagaagatttgacactgtattttgaaattatgggagtaaacaccttcaaatttcaggcatttctgctttgtgactaaatacaaactacattttcaagattaggccataatgtatatttaaacacaatggctatcaacagctgctaataaggtatcaactaaagcagaattggggaataatagaaatggctgcttatttcaagatatatttgccaacccattcctattcagtcattttattattaatgtaatttgaatgtcaatttgtgtgcttttggtgatttagcgctgtggcaagcaattttgcacatcattttcatgttgttctttatgacaagaatgttcttcaattagaaaatgtgcaaataatgaaattcagggccagtgaggcaaatagactatctgacatatttgact

SEQ ID NO: 168263 - DNA, 2289 bp, Homo sapiens
  Payload ID: 13101
  Gene Symbol: KCNF1
  Gene Name: potassium channel, voltage gated modifier subfamily F, member 1
  Uniprot ID: Q9H3M0
  ENST ID: ENST00000295082
  CDS Start-End: 491-1975
ttgtgtttagaaaaggctcgggcaaagccagcccaagttcgctctctgcacacctcgagcacctcgcggacggcgtgggtccgccagctccgggacctgccgccgctgcctgcgcgccccggggcggaggacggtgccagccgcccacgaggagaccccgctcccgcaggaggccgagctgaagcggcggagcgcgccgccagccagccggggtgagtgccccgggcgaggccggcggccgccaaagcccccgcgggctcgcccgggcgcccggatgccagccccgagccccgccgccgggtgcatgcctcccccgcggcgcgcccccgcaggctgctgcccgctgtgaccgcccttccccgcaggcgggcgccggccaggctctccccgagatcagcgcacgggtggcacccgccggacccccagcggcagcggcggcggcggctgcagggggcgcggggcggaggctgcgagggcgcgcgcggggaggatggacgggtccggggagcgcagcctcccggagccgggcagccagagctccgctgccagcgacgacatagagatagtcgtcaacgtggggggcgtgcggcaggtgctgtacggggacctcctcagtcagtaccctgagacccggctggcggagctcatcaactgcttggctgggggctacgacaccatcttctccctgtgcgacgactacgaccccggcaagcgcgagttctactttgacagggacccggacgccttcaagtgtgtcatcgaggtgtactatttcggggaggtccacatgaagaagggcatctgccccatctgcttcaagaacgagatggacttctggaaggtggacctcaagttcctggacgactgttgcaagagccacctgagcgagaagcgcgaggagctggaggagatcgcgcgccgcgtgcagctcatcctggacgacctgggcgtggacgcagccgagggccgctggcgccgctgccagaagtgcgtctggaagttcctggagaagcccgagtcgtcgtgcccggcgcgggtggtggccgtgctctccttcctgctcatcctcgtctcgtccgtggtcatgtgcatgggcaccatccccgagctgcaggtgctggacgccgagggcaaccgcgtggagcacccgacgctggagaacgtggagacggcgtgcattggctggttcaccctggagtacctgctgcgcctcttctcgtcacccaacaagctgcacttcgcgctgtccttcatgaacattgtggacgtgctggccatcctccccttctacgtgagcctcacgctcacgcacctgggtgcccgcatgatggagctgaccaacgtgcagcaggccgtgcaggcgctgcggatcatgcgcatcgcgcgcatcttcaagctggcccgccactcctcgggcctgcagaccctcacctatgccctcaagcgcagcttcaaggaactggggctgctgctcatgtacctggcagtgggtatcttcgtcttctctgccctgggctacaccatggagcagagccatccagagaccctgtttaagagcatcccccagtccttctggtgggccatcatcaccatgaccaccgtcggctacggcgacatctaccccaagaccacgctgggcaagctcaacgcggccatcagcttcttgtgtggtgtcatcgccatcgccctgcccatccaccccatcatcaacaactttgtcaggtactacaacaagcagcgcgtcctggagaccgcggccaagcacgagctggagctgatggaactcaactccagcagcgggggcgagggcaagaccgggggctcccgcagtgacctggacaacctccctccagagcctgcggggaaggaggcgccgagctgcagcagccggctgaagctctcccacagcgacaccttcatccccctcctgaccgaggagaagcaccacaggacccggctccagagttgcaagtgacaggagggcccctcaggcagagatggaccaggcggtggacagatgggtagatgtggcaggcatgtcatcgacagcacagaagggctgtcctgtgtccccccaaccctcccctggacagactctgaaggccctcccggcacctctgccaaggctgggtaagactcctctatgttgcctgctgtccaggagcccgggagggaggggtgtgcaggagccgcagggccgtgtgggacgagtggaggccgcggcctggctggcacgagagcccacgcccgcttctgtatctccctcaataaagcctcctgctctgtgca

SEQ ID NO: 168264 - DNA, 2211 bp, Homo sapiens
  Payload ID: 13102
  Gene Symbol: KCNG1
  Gene Name: potassium channel, voltage gated modifier subfamily G, member 1
  Uniprot ID: Q9UIX4
  ENST ID: ENST00000371571
  CDS Start-End: 287-1828
gctgctgcgccgcgctcccggcgcactcggagcccggcggggaccgggaggcagagacggggcggccgtggctccgagggcgggagctgagccgggccccgggaccgaagtttggcggcggctccgggaggcagagcgggctccccgggcgacttccaggcccctctcgcgtcctcgccccggacccgtgggcagccggggggaacggaagccgcggccgggccaactccgaggcggggacgccgcgacgggaacttgaggcccgagagggatgtgaaggcccaaaatgaccctcttaccgggagacaattctgactacgactacagcgcgctgagctgcacctcggacgcctccttccacccggccttcctcccgcagcgccaggccatcaagggcgcgttctaccgccgggcgcagcggctgcggccgcaggatgagccccgccagggctgtcagcccgaggaccgccgccgtcggatcatcatcaacgtaggcggcatcaagtactcgctgccctggaccacgctggacgagttcccgctgacgcgcctgggccagctcaaggcctgcaccaacttcgacgacatcctcaacgtgtgcgatgactacgacgtcacctgcaacgagttcttcttcgaccgcaacccgggggccttcggcactatcctgaccttcctgcgcgcgggcaagctgcggctgctgcgcgagatgtgcgcgctgtccttccaggaggagctgctgtactggggcatcgcggaggaccacctggacggctgctgcaagcgccgctacctgcagaagattgaggagttcgcggagatggtggagcgggaggaagaggacgacgcgctggacagcgagggccgcgacagcgagggcccggccgagggcgagggccgcctggggcgctgcatgcggcgactgcgcgacatggtggagaggccgcactcggggctgcctggcaaggtgttcgcctgcctgtcggtgctcttcgtgaccgtcaccgccgtcaacctctccgtcagcaccttgcccagcctgagggaggaggaggagcagggccactgttcccagatgtgccacaacgtcttcatcgtggagtcggtgtgcgtgggctggttctccctggagttcctcctgcggctcattcaggcgcccagcaagttcgccttcctgcggagcccgctgacgctgatcgacctggtggccatcctgccctactacatcacgctgctggtggacggcgccgccgcaggccgtcgcaagcccggcgcgggcaacagctacctggacaaggtggggctggtgctgcgcgtgctgcgggcgctgcgcatcctgtacgtgatgcgcctggcgcgccactccctggggctgcagacgctggggctcacggcccgccgctgcacccgcgagttcgggctcctgctgctcttcctctgcgtggccatcgccctcttcgcgcccctgctctacgtcatcgagaacgagatggccgacagccccgagttcaccagcatccctgcctgctactggtgggctgtcatcaccatgacgacggtgggctatggcgacatggtccccaggagcaccccgggccaggtagtggccctgagcagcatcctgagcggcatcctgctcatggccttcccagtcacctccatcttccacaccttctcccgctcctacctggagctcaagcaggagcaagagagggtgatgttccggagggcgcagttcctcatcaaaaccaagtcgcagctgagcgtgtcccaggacagtgacatcttgttcggaagtgcctcctcggacaccagagacaataactgagcgcggaggacacgcctgccctgcctgccatctgtggcccgaagccattgccatccactgcagacgcctggagagggacaggccgcttccgagtgcagtcctggcgcagcaccgactcccacgcacccggggaaggacaccctcactcccacaccccgggaagaacactagaacatcagcagaggggccctgcccctccgcctgcagccgtgaaaggaagctgggtcatcagcccagccccgcccaccccagcccctatgtgtgtttccctcaataaggagatgccttgttcttttcaccatgcaaataacatgcccagcaaaaacttgctttatgggtctgcctggagaaaaaaaaaaaaaatacaaacagcagaaacagca

SEQ ID NO: 168265 - DNA, 1096 bp, Homo sapiens
  Payload ID: 13102
  Gene Symbol: KCNG1
  Gene Name: potassium channel, voltage gated modifier subfamily G, member 1
  ENST ID: ENST00000439216
  CDS Start-End: 323-1096
gcactcggagcccggcggggaccgggaggcagagacggggcggccgtggctccgagggcgggagctgagccgggccccgggaccgaagtttggcggcggctccgggaggcagagcgggctccccgggcgacttccaggcccctctcgcgtcctcgccccggacccgtgggcagccggggggaacggaagccgcggccgggccaactccgaggcggggacgccgcgacgggaacttgagggagcaggctgcctaatgaaggagccaggcttgcacacagacaattctagaactggtggcccgagagggatgtgaaggcccaaaatgaccctcttaccgggagacaattctgactacgactacagcgcgctgagctgcacctcggacgcctccttccacccggccttcctcccgcagcgccaggccatcaagggcgcgttctaccgccgggcgcagcggctgcggccgcaggatgagccccgccagggctgtcagcccgaggaccgccgccgtcggatcatcatcaacgtaggcggcatcaagtactcgctgccctggaccacgctggacgagttcccgctgacgcgcctgggccagctcaaggcctgcaccaacttcgacgacatcctcaacgtgtgcgatgactacgacgtcacctgcaacgagttcttcttcgaccgcaacccgggggccttcggcactatcctgaccttcctgcgcgcgggcaagctgcggctgctgcgcgagatgtgcgcgctgtccttccaggaggagctgctgtactggggcatcgcggaggaccacctggacggctgctgcaagcgccgctacctgcagaagattgaggagttcgcggagatggtggagcgggaggaagaggacgacgcgctggacagcgagggccgcgacagcgagggcccggccgagggcgagggccgcctggggcgctgcatgcggcgactgcgcgacatggtggagaggccgcactcggggctgcctggcaaggtgttcgcctgcctgtcggtgctcttcgtgaccgtcaccgccgtcaacctctccgtcagcaccttgcccagcctgagggaggaggaggagcag

SEQ ID NO: 168266 - DNA, 967 bp, Homo sapiens
  Payload ID: 13102
  Gene Symbol: KCNG1
  Gene Name: potassium channel, voltage gated modifier subfamily G, member 1
  ENST ID: ENST00000424171
  CDS Start-End: 426-967
ggcggggaccgggaggcagagacggggcggccgtggctccgagggcgggagctgagccgggccccgggaccgaagtttggcggcggctccgggaggcagagcgggctccccgggcgacttccaggcccctctcgcgtcctcgccccggacccgtgggcagccggggggaacggaagccgcggccgggccaactccgaggcggggacgccgcgacgggaacttgagatgaaacagcagagctgaaaagagagatcaccaaggaaagtgcctgaaagggattattcccacgcctccaaaggatcctggcaggctgtgcctgaggagatgggttccaattttagggagcaggctgcctaatgaaggagccaggcttgcacacagacaattctagaactggtggcccgagagggatgtgaaggcccaaaatgaccctcttaccgggagacaattctgactacgactacagcgcgctgagctgcacctcggacgcctccttccacccggccttcctcccgcagcgccaggccatcaagggcgcgttctaccgccgggcgcagcggctgcggccgcaggatgagccccgccagggctgtcagcccgaggaccgccgccgtcggatcatcatcaacgtaggcggcatcaagtactcgctgccctggaccacgctggacgagttcccgctgacgcgcctgggccagctcaaggcctgcaccaacttcgacgacatcctcaacgtgtgcgatgactacgacgtcacctgcaacgagttcttcttcgaccgcaacccgggggccttcggcactatcctgaccttcctgcgcgcgggcaagctgcggctgctgcgcgagatgtgcgcgctgtccttccaggaggagctgctgtactggggcatcgcggaggaccacctggacggctgctgcaagcgccgctacctgcagaagattgaggagttcgcggagatggtgga

SEQ ID NO: 168267 - DNA, 608 bp, Homo sapiens
  Payload ID: 13102
  Gene Symbol: KCNG1
  Gene Name: potassium channel, voltage gated modifier subfamily G, member 1
  ENST ID: ENST00000447736
  CDS Start-End: 465-608
ctgctgccgagacaggatcactttccacacaggaaactcacgtgggggcagggcgtgaaggaaataaatcactaattgggggagttttctgctggagggaaagctgggagggttgaaagaagaaattcctaaaaagaagaggtgattacagccatggggattcacaagagccctccagggcttgtgtgaggcattttccgtttacctccatcaccattcttgccaaacagaatgtcactttttctcttttctgtggtagcaaagatgaaacagcagagctgaaaagagagatcaccaaggaaagtgcctgaaagggattattcccacgcctccaaaggatcctggcaggctgtgcctgaggagatgggttccaattttagggagcaggctgcctaatgaaggagccaggcttgcacacagacaattctagaactggtggcccgagagggatgtgaaggcccaaaatgaccctcttaccgggagacaattctgactacgactacagcgcgctgagctgcacctcggacgcctccttccacccggccttcctcccgcagcgccaggccatcaagggcgcgttctaccgccgggcgcagcggctgcggccg

SEQ ID NO: 168268 - DNA, 802 bp, Homo sapiens
  Payload ID: 13102
  Gene Symbol: KCNG1
  Gene Name: potassium channel, voltage gated modifier subfamily G, member 1
  ENST ID: ENST00000433903
  CDS Start-End: 513-802
aggcagagacggggcggccgtggctccgagggcgggagctgagccgggccccgggaccgaagtttggcggcggctccgggaggcagagcgggctccccgggcgacttccaggcccctctcgcgtcctcgccccggacccgtgggcagccggggggaacggaagccgcggccgggccaactccgaggcggggacgccgcgacgggaacttgaggtgggaactttgcgcgctgcagcctcgccgggcgccaccgaagcgcgaaccggaccccgagcctgcaaactcgggctcgggggcggctgcacgtggccgtggccctgaactccctgcgggggcctcgaaacccgcctgcggggaggccagggcgacagaggactcgggagtcaccgctggtgcgtggcggcgtggagcgcgcttgttacggccaagggagcaggctgcctaatgaaggagccaggcttgcacacagacaattctagaactggtggcccgagagggatgtgaaggcccaaaatgaccctcttaccgggagacaattctgactacgactacagcgcgctgagctgcacctcggacgcctccttccacccggccttcctcccgcagcgccaggccatcaagggcgcgttctaccgccgggcgcagcggctgcggccgcaggatgagccccgccagggctgtcagcccgaggaccgccgccgtcggatcatcatcaacgtaggcggcatcaagtactcgctgccctggaccacgctggacgagttcccgctgacgcgcctgggccagctcaaggcctgcaccaa

SEQ ID NO: 168269 - DNA, 1401 bp, Homo sapiens
  Payload ID: 13103
  Gene Symbol: KCNG2
  Gene Name: potassium channel, voltage gated modifier subfamily G, member 2
  Uniprot ID: Q9UJ96
  ENST ID: ENST00000316249
  CDS Start-End: 1-1401
atggagccatggccctgctccccgggcggcggcggcgggacccgcgcccggcacgtcatcatcaacgtgggcggctgccgcgtgcgcctggcatgggccgcgctggcgcgatgccccctcgcgcgcctggagcgcctgcgcgcctgccgcggccacgacgacctgctgcgcgtgtgtgacgactacgacgtgagccgcgacgagttcttcttcgaccgcagcccgtgcgccttccgcgccatcgtggcgcttttgcgcgcagggaagctgcgactgctgcggggcccgtgcgcgctggccttccgcgacgagctggcctactggggcatcgacgaggcgcgcctggagcgctgctgcctgcgccgcctgcgccgccgcgaggaggaggcggccgaggcccgcgcggggccgacggagcgcggggcgcaggggagcccggcgcgcgccctgggacctcgggggcggctgcagcgcggccggcggcgcctgcgcgacgtggtggacaacccgcactcggggctggcgggcaagctcttcgcctgcgtgtccgtgtccttcgtggccgtcacggccgtgggcctctgcctgagcaccatgccggacatccgcgccgaggaggagcggggcgagtgctcccccaagtgccgcagcctgttcgtgctggagaccgtgtgcgtggcctggttctccttcgagttcctgctgcgctccctgcaggccgagagcaagtgcgccttcctgcgcgcgccactcaacatcattgacatcctggcgctcctgccgttctacgtgtcgctgctgctggggctggcggcaggcccgggcgggaccaagctcctggagcgcgcggggctggtgctgcggctgctgcgtgcgctgcgcgtgctctacgtgatgcgcctggcgcgccactcgctggggctgcgttcgctgggcctgaccatgcgccgctgcgcgcgcgagttcgggctgctgctgctgttcctctgcgtggccatggcgctcttcgcgccactggtgcacctggccgagcgcgagctgggcgcgcgccgcgacttctccagcgtgcccgccagctattggtgggccgtcatctccatgaccaccgtgggctacggcgacatggtcccgcgcagcctgcccgggcaggtggtggcgctcagcagcatcctcagcggcatcctgctcatggccttcccggtcacctccatcttccacaccttttcgcgctcctactccgagctcaaggagcagcagcagcgcgcggccagccccgagccggccctgcaggaggacagcacgcactcggccacagccaccgaggacagctcgcagggccccgacagcgcgggcctggccgacgactccgcggatgcgctgtgggtgcgggcagggcgctga

SEQ ID NO: 168270 - DNA, 3824 bp, Homo sapiens
  Payload ID: 13104
  Gene Symbol: KCNG3
  Gene Name: potassium channel, voltage gated modifier subfamily G, member 3
  Uniprot ID: Q8TAE7
  ENST ID: ENST00000306078
  CDS Start-End: 597-1907
gcggcgcggagggaggtgagcggcgcgcgcggagccggcgggcgaggaggaggactgcacagaggccccgcccccgccgccgcgagccggctcttcgccgcctccgaacccgctcactttgcctctcgcctctggacggcggcggggcggccgccggattcgcggccgcagggagcgccggagacggggagctattccgccccggcggctccattcggcgcccgcagccctcagggggtcggccccgcggcttgggagagggcaccgcggcctcggtgtgcgcagccctcgggcgcgagggtcggcggcgcggacacagccgcgttcccagccggtggggctcagcgctggcgccggcgaggactccccggccacccgcaggtaccgccgggcggagggcgcgctactagcagcgccggagatactcgagcccagggacccccgggccagcggagggcaggagcggagccccgagggagcgcgggccccgacggcgcgctcccccgtcagccacgggcaggcaggccccgcgtggcggcttggggtggggggctgcagcggggccctcgggccgaaagtcccccgggcggccagccatgaccttcgggcgcagcggggcggcctcggtggtgctgaacgtgggcggcgcccggtattcgctgtcccgggagctgctgaaggacttcccgctgcgccgcgtgagccggctgcacggctgccgctccgagcgcgacgtgctcgaggtgtgcgacgactacgaccgcgagcgcaacgagtacttcttcgaccggcactcggaggccttcggcttcatcctgctctacgtgcgcggccacggcaagctgcgcttcgcgccgcggatgtgcgagctctccttctacaacgagatgatctactggggcctggagggcgcgcacctcgagtactgctgccagcgccgcctcgacgaccgcatgtccgacacctacaccttctactcggccgacgagccgggcgtgctgggccgcgacgaggcgcgccccggcggggccgaggcggctccctccaggcgctggctggagcgcatgcggcggaccttcgaggagcccacgtcgtcgctggccgcgcagatcctggctagcgtgtcggtggtgttcgtgatcgtgtccatggtggtgctgtgcgccagcacgttgcccgactggcgcaacgcagccgccgacaaccgcagcctggatgaccggagcaggtactccgccggccctgggagggagccctccgggataattgaagctatctgcataggttggttcactgccgagtgcatcgtgaggttcattgtctccaaaaacaagtgtgagtttgtcaagagacccctgaacatcattgatttactggcaatcacgccgtattacatctctgtgttgatgacagtgtttacaggcgagaactctcaactccagagggctggagtcaccttgagggtacttagaatgatgaggattttttgggtgattaagcttgcccgtcacttcattggtcttcagacactcggtttgactctcaaacgttgctaccgagagatggttatgttacttgtcttcatttgtgttgccatggcaatctttagtgcactttctcagcttcttgaacatgggctggacctggaaacatccaacaaggactttaccagcattcctgctgcctgctggtgggtgattatctctatgactacagttggctatggagatatgtatcctatcacagtgcctggaagaattcttggaggagtttgtgttgtcagtggaattgttctattggcattacctatcacttttatctaccatagctttgtgcagtgttatcatgagctcaagtttagatctgctaggtatagtaggagcctctccactgaattcctgaattaatgcattgcaaatcaattcttgcatacacttcatagaaagactttgatgctgcttcatatttatgtgtttcttgctgggtgagcactgcagtggcattgtcatcatcttggtagggtaaaaattatccttcccagccgaagggataaaacagtttacttgttatggagtaaatagaattgagactgcaaaggaagaataatgactcctagagtaaactttaggacccggttttatttagacttgttttcccgtttccttgaatgattacacatttttaaaaaatacattatttgaacattttaaaacagaaaggtactattttccaaatgtttttccatcttatgaattcagaagaagcttggaacttatagtgttttttgtttgagagtaacattttcatttctaaatgttttataatttctcatatcaatgtcagaagtatcctggaaacatatgtcacatgcgggaactgtttaacaaatactttaaaaatttggccaaaatttaaactgtataatggagctagatacaagcaagaatagtatttgaaagacttttccagcatacttctcaattctttgctttatttttgtgccaattattcaccttatcgtgccgcttcatggaagcttgagtatgttctcccttttccattttggatttatctctttactgtaatgactcaaaaggtatttaagaattgacgagagcttgtgttgtttagcatcttactggataatatttgaattcattgctgttcctaggtgataactgtcctaatatttagatgtccaaacaagaatacttccaacataaaaattataataggaataatttgagatgactcaatattacaacctcttcttctcttaacctcctcccccaaacactagaggtttaataagacttatcagatgaaaggatatttatatagccttttagtagcaaagtcatacttacgtgttgtcactggattatcataaaagggagaaattaaatattactgtactcttagttgctgtgtagctaagtcaattttaagccagtaaaagcgatggatacataatgatttgatctgatctttaactattgtgaatcacagctacaccaaaactcttcttgtaagaatactgactaatatgccatgttaatctggctagattattaggactagataatgtaaaagtgatgattgtttagtaactaaattttagcaacagaaattagaattttgctttttcaaccagttaccataaagaagttagtgtatatataaacacaaataattagtgacagattcataaaaaattgaatgttgtacacagtaattttgtcagaggtagagaagacagggattgggaagtggtgggtgatggaggacctggatatatttatcaaataaagggttaccagaagtgttcattaaaggaattttagccatcatctagttcaaacctcaactattacaggtagaaaatcagggcaggagagaatataattgtgaaggagtcagggctaacacctggatctccagaaacctagcccagcaggttaatcttcacacatctctgggttctgagaaaagcctggaaaaatcacacttctttgtcattgtcatgctgaggtaataatagcaaaactgttttctttcccttaatttcctttcctaagcttatgtaatagtttggccattaaatatcttgccctattttccctattactgctagtatgctacttcttacatacccaaaagaaattcagttatttattgtatatttattgtattctaatataattgaaataaatggcatggatttattttttcttaactatttggattaaagctttgtggttcatgcaaacaatgtgcagatgatagcacctccatattactaataaaaatatgataaccatcaa

SEQ ID NO: 168271 - DNA, 3656 bp, Homo sapiens
  Payload ID: 13104
  Gene Symbol: KCNG3
  Gene Name: potassium channel, voltage gated modifier subfamily G, member 3
  Uniprot ID: Q8TAE7
  ENST ID: ENST00000394973
  CDS Start-End: 477-1754
gcctctcgcctctggacggcggcggggcggccgccggattcgcggccgcagggagcgccggagacggggagctattccgccccggcggctccattcggcgcccgcagccctcagggggtcggccccgcggcttgggagagggcaccgcggcctcggtgtgcgcagccctcgggcgcgagggtcggcggcgcggacacagccgcgttcccagccggtggggctcagcgctggcgccggcgaggactccccggccacccgcaggtaccgccgggcggagggcgcgctactagcagcgccggagatactcgagcccagggacccccgggccagcggagggcaggagcggagccccgagggagcgcgggccccgacggcgcgctcccccgtcagccacgggcaggcaggccccgcgtggcggcttggggtggggggctgcagcggggccctcgggccgaaagtcccccgggcggccagccatgaccttcgggcgcagcggggcggcctcggtggtgctgaacgtgggcggcgcccggtattcgctgtcccgggagctgctgaaggacttcccgctgcgccgcgtgagccggctgcacggctgccgctccgagcgcgacgtgctcgaggtgtgcgacgactacgaccgcgagcgcaacgagtacttcttcgaccggcactcggaggccttcggcttcatcctgctctacgtgcgcggccacggcaagctgcgcttcgcgccgcggatgtgcgagctctccttctacaacgagatgatctactggggcctggagggcgcgcacctcgagtactgctgccagcgccgcctcgacgaccgcatgtccgacacctacaccttctactcggccgacgagccgggcgtgctgggccgcgacgaggcgcgccccggcggggccgaggcggctccctccaggcgctggctggagcgcatgcggcggaccttcgaggagcccacgtcgtcgctggccgcgcagatcctggctagcgtgtcggtggtgttcgtgatcgtgtccatggtggtgctgtgcgccagcacgttgcccgactggcgcaacgcagccgccgacaaccgcagcctggatgaccggagcaggataattgaagctatctgcataggttggttcactgccgagtgcatcgtgaggttcattgtctccaaaaacaagtgtgagtttgtcaagagacccctgaacatcattgatttactggcaatcacgccgtattacatctctgtgttgatgacagtgtttacaggcgagaactctcaactccagagggctggagtcaccttgagggtacttagaatgatgaggattttttgggtgattaagcttgcccgtcacttcattggtcttcagacactcggtttgactctcaaacgttgctaccgagagatggttatgttacttgtcttcatttgtgttgccatggcaatctttagtgcactttctcagcttcttgaacatgggctggacctggaaacatccaacaaggactttaccagcattcctgctgcctgctggtgggtgattatctctatgactacagttggctatggagatatgtatcctatcacagtgcctggaagaattcttggaggagtttgtgttgtcagtggaattgttctattggcattacctatcacttttatctaccatagctttgtgcagtgttatcatgagctcaagtttagatctgctaggtatagtaggagcctctccactgaattcctgaattaatgcattgcaaatcaattcttgcatacacttcatagaaagactttgatgctgcttcatatttatgtgtttcttgctgggtgagcactgcagtggcattgtcatcatcttggtagggtaaaaattatccttcccagccgaagggataaaacagtttacttgttatggagtaaatagaattgagactgcaaaggaagaataatgactcctagagtaaactttaggacccggttttatttagacttgttttcccgtttccttgaatgattacacatttttaaaaaatacattatttgaacattttaaaacagaaaggtactattttccaaatgtttttccatcttatgaattcagaagaagcttggaacttatagtgttttttgtttgagagtaacattttcatttctaaatgttttataatttctcatatcaatgtcagaagtatcctggaaacatatgtcacatgcgggaactgtttaacaaatactttaaaaatttggccaaaatttaaactgtataatggagctagatacaagcaagaatagtatttgaaagacttttccagcatacttctcaattctttgctttatttttgtgccaattattcaccttatcgtgccgcttcatggaagcttgagtatgttctcccttttccattttggatttatctctttactgtaatgactcaaaaggtatttaagaattgacgagagcttgtgttgtttagcatcttactggataatatttgaattcattgctgttcctaggtgataactgtcctaatatttagatgtccaaacaagaatacttccaacataaaaattataataggaataatttgagatgactcaatattacaacctcttcttctcttaacctcctcccccaaacactagaggtttaataagacttatcagatgaaaggatatttatatagccttttagtagcaaagtcatacttacgtgttgtcactggattatcataaaagggagaaattaaatattactgtactcttagttgctgtgtagctaagtcaattttaagccagtaaaagcgatggatacataatgatttgatctgatctttaactattgtgaatcacagctacaccaaaactcttcttgtaagaatactgactaatatgccatgttaatctggctagattattaggactagataatgtaaaagtgatgattgtttagtaactaaattttagcaacagaaattagaattttgctttttcaaccagttaccataaagaagttagtgtatatataaacacaaataattagtgacagattcataaaaaattgaatgttgtacacagtaattttgtcagaggtagagaagacagggattgggaagtggtgggtgatggaggacctggatatatttatcaaataaagggttaccagaagtgttcattaaaggaattttagccatcatctagttcaaacctcaactattacaggtagaaaatcagggcaggagagaatataattgtgaaggagtcagggctaacacctggatctccagaaacctagcccagcaggttaatcttcacacatctctgggttctgagaaaagcctggaaaaatcacacttctttgtcattgtcatgctgaggtaataatagcaaaactgttttctttcccttaatttcctttcctaagcttatgtaatagtttggccattaaatatcttgccctattttccctattactgctagtatgctacttcttacatacccaaaagaaattcagttatttattgtatatttattgtattctaatataattgaaataaatggcatggatttattttttcttaactatttggattaaagctttgtggttcatgcaaacaatgtgcagatgatagcacctccatattactaataaaaa

SEQ ID NO: 168272 - DNA, 5179 bp, Homo sapiens
  Payload ID: 13105
  Gene Symbol: KCNG4
  Gene Name: potassium channel, voltage gated modifier subfamily G, member 4
  Uniprot ID: Q8TDN1
  ENST ID: ENST00000308251
  CDS Start-End: 70-1629
gctggaaactggctccctgagacaagaagactggtaaacccagcgcttcctacctggtggtcttcagcaatgcccatgccttccagagacgggggcctgcatcccagacaccaccactatggttcccacagcccttggagtcagctcctgtccagccccatggagacgccgtccatcaagggcctttactaccggagggtgcggaaggtgggtgccctggacgcctccccagtggacctgaagaaggagatcctgatcaacgtggggggcaggaggtatctcctcccctggagcacactggaccggttcccgctgagccgcctgagcaaactcaggctctgtcggagctacgaggagatcgtgcagctctgcgatgattacgacgaggacagccaggagttcttcttcgacaggagccccagcgccttcggggtgatcgtgagcttcctggcggccgggaagctggtgcttctgcaggagatgtgcgcgctgtccttccaggaggagctggcctactggggcatcgaggaggcccacctggagaggtgctgcctgcggaagctgctgaggaagctggaggagctggaggagctggccaagctgcacagggaggacgtactgaggcagcagagggagacccgccgccccgcctcgcactcctcgcgctggggcctgtgcatgaaccggctgcgcgagatggtggaaaacccgcagtccgggctgcccgggaaggtcttcgcttgcctctccatcctcttcgtggccaccacagccgtcagcctgtgtgtcagcaccatgcccgacctcagggcagaggaggaccagggcgaatgctctcggaagtgctactatattttcatcgtggagaccatctgcgtggcctggttctccctggagttctgcctgcggtttgtccaggcccaagacaagtgtcagttcttccaggggcccctgaacatcatcgacatcctggccatctccccatactacgtgtcgctggcggtgtctgaggagcccccggaggacggcgagaggccgagcgggagctcctacctggagaaggtggggctggtcctgcgtgtgctgcgagcgctgcgcatcctctacgtgatgcgcctggctcgccactcgctggggctgcagacgctggggctcaccgtgcgccgttgcacacgtgagttcggcctgctccttctcttcctggccgtggccatcaccctcttctcccctttggtctacgtggccgagaaggagtccgggcgggtgctggagttcaccagcatccccgcctcctattggtgggccatcatctccatgacaacggtgggctacggggacatggtgccccgcagtgtgccaggccagatggtggccctcagcagcatcctgagcgggatcctcatcatggccttcccggccacgtctatcttccacaccttctcccactcctacctggagctcaagaaggagcaggagcagcttcaggcccgcctccgccacctccaaaacaccggtccagccagtgaatgtgaactcctggacccccatgtggccagtgaacatgagctcatgaacgatgtcaatgacctaatcctggagggcccagccttgcctatcatgcacatgtaactcagcaccccccatgactacatggtaacctcaacccatcaccctgcctgaaacacactcaagggtaccccgcatagaccacctggtggtgtttctagagcccagggaagactttcaaagctggaggggcataaggccacagaggctgtgtgtctgtgatccttgtccctcggggccccgatgtcccaggctgactgtgtccagcctgcttgccttttcctctctctgcccatctactgagcatgtccaatcttgctggagtagctcagtctcctttcattctcttttccttcccagcagaggctttaacatcccaggctgggttctggatgcccatagaactggtaaccattggtatttgcatactgagcctatgtaatttcatgatttccctaagaccctccttcctgggccatgccaccactggaaatcaaaggtccagtcactgcaaacccctctaatcagatctccccacccaacctttccacgggttccagagggatcaatatgttctccttctgctcaccaccaccagtgatatttccctaatgctgctacctcccgccagctctgaacacttgtagctaagaaggcagaatcagcctttttgcagtaaatctcatgttgaggctgatgcccccaagcctgccatcctttacctggagctcaagaaggagcaggcatccccaggcatgcctgggatctgtgacctgggacctgggacctgggacctgggcagaaactccactttccagcacagccaggccctccctggccgcctggactcttggtgtggtgttctccagttatccagtccttagccttgacagagacaaactctttcagggtccatgttgtcccttgagaggatcgttcctgctgctggttgctcccacactgcaggggccttagcttttcatccacagctgagcccccatggactcaatgtagctttggcacagaaacaaggggaattgtaggtgctgtcccttgctggcttcccagactagtcatctccatgctggaggatagacattcttagctcacatttcaatgtattcatttctgcattcatctgtgaacagagtctgtcctttgcatccaggggaggaggcagatggaggtctgagtcactggagataaaccagcatattctgagagcaggcaggaaggagcaatgacttccaagcagtgggctcccaaaggcctcacagagacatgggcagggctggagagtagaggtgtattttaggagatgaagctgaacagctgggttgggttgagaaggcgtgggccttgaatgctttatggagggcagagtgatgtgcacaggctgtgggttagggagatgatgaggctggattgggcatgagaagcccagtttgggatgaggagccattgagccattcaggcaagacagccctccctccttcacgggcttaatcctgcaagattctgtcaaatcctggcttctcccagcaggacacaccttggagacatcctgatggcacttccccagagtggcatggcccacataggagtttgctgttggctctaggactcttgaagaaagtgcacaagatcaaaacaggtgacagtgaagtggtttcggccctgccaatctgatatcgtgtacgtatgagagtggtcagcattttaccactggtaacaagttccttgctgttcattcattctgctagttttttgcgatttcccgctgtgtgccaggcatagtcctccactgatggcaatgccagacagcagcgtggcagagggctctggcccaggaagcaccctgcaccagcacctagcgtccagggagccttggcctcctggcgagcctgcctttccttggagtcctccaggtgtccccccaactatacaggcacatgtccccattcttttagaccccaatctttcccaagctgacatgtcaccaggtgacatagtggttcagtggccatgacacaaggaaagccccttcaccctataaaatccccagcctggatggccactccactccacaaagtgacaggcagattcccataagcgttgcgtagaaattccatgtcacaggcaccttggacagtagccatagaagtgtttctgttccagagtaacattttatttattacttatttatttatttatttattgacagagtctctctctgtccgccaggctggagtgcagtggcttgatcccagctcactgcaacctccgcctcctgggttcaagcaattctcctgcctcagcctcccaaatagcggggattacaggcacccaccacctgtaatcccagctatttggagatcaaatgctcagctaatttgatatttttagtagagacaaggtttcaccatgtggacaggctggtcttgaactcctgatgtcaggtgatccgcctgcctcggcctcccaaagtgctggaattacaggcacgagccaccgcacccggcccagactaacattttttttttttttttttttgagacagagtctccctctgtcacccaggctggagtgcagtggctcaatctcggctcactgcaagctccgcctcccaggttcacgccattctcctgcctcagcctcctgagtagctgtgactacaggtgccaccaccacgcctggataattttttgtatttttaggagagacggggtttcaccatgttagccaggatggtctccatctcctgacctcgtgatccgcccgcctcggcctcccaaagtgctgggattacaggcgtgagccaccgtgcccaagcctgactaacattttaataactacgcttaggcaaaatagtaaaaggacaaagtctcccacttactctctttctggggactgactggcttgggcgctggctgaaacccagtgtcttcactccctgtgtgacctcgggcaggccccttccccctcagttagctgcaggcaggtgttggactagatctgtggttttctgacctgggttccacaaagcaagctcagggactgtcctgcggatgaagaagaccagcagcaaagcaggcagagctctgcctcctggggcaaaacatttgcaattaatgacactgaaaagaatgtgcaaatccccagtctcctctccttcccgtcagtgtccagcccagccctttgaactgagtggtaagctcattctggaaccagagacaaagcctaaacagccactggaaggtctgggacccacatcagcccccacatctgccctgccttctcatcgaagacatattttgtgcgcatgcctggtgaaaacttcttaatgacagctctgcccatccctgtaactggcttctacccaggcatatcccttctcctctgcttcacctaccagacctcttcaccaaagtgtgccagcactaaaagaaacatttaaaatcaaaattaggtgaagcaccaccaccattatgagattctatagtgtcttaatgttcacccagttgagattctctgctaaattagacatggaaaattggaattgattgctcgcatgtggggcttaattaaacgctctattttttctccctggtaa

SEQ ID NO: 168273 - DNA, 2199 bp, Homo sapiens
  Payload ID: 13105
  Gene Symbol: KCNG4
  Gene Name: potassium channel, voltage gated modifier subfamily G, member 4
  Uniprot ID: Q8TDN1
  ENST ID: ENST00000568181
  CDS Start-End: 122-892
gtcccttccctgggcaccaagagatgggctccccttgcctggcagagaaacagctggaaactggctccctgagacaagaagactggtaaacccagcgcttcctacctggtggtcttcagcaatgcccatgccttccagagacgggggcctgcatcccagacaccaccactatggttcccacagcccttggagtcagctcctgtccagccccatggagacgccgtccatcaagggcctttactaccggagggtgcggaaggtgggtgccctggacgcctccccagtggacctgaagaaggagatcctgatcaacgtggggggcaggaggtatctcctcccctggagcacactggaccggttcccgctgagccgcctgagcaaactcaggctctgtcggagctacgaggagatcgtgcagctctgcgatgattacgacgaggacagccaggagttcttcttcgacaggagccccagcgccttcggggtgatcgtgagcttcctggcggccgggaagctggtgcttctgcaggagatgtgcgcgctgtccttccaggaggagctggcctactggggcatcgaggaggcccacctggagaggtgctgcctgcggaagctgctgaggaagctggaggagctggaggagctggccaagctgcacagggaggacgtactgaggcagcagagggagacccgccgccccgcctcgcactcctcgcgctggggcctgtgcatgaaccggctgcgcgagatggtggaaaacccgcagtccgggctgcccgggaaggtcttcgcttgcctctccatcctcttcgtggccaccacagccgtcagcctgtgtgtcagcaccatgcccgacctcagggcagaggaggaccaggtgagcggcctctgatggcattcacggctccatcccgcagggtgcctgggcggagatgtcttttaggggcccaagaaaatgtcttcagatcttaaaataagaagaaaaaaatgaatattatccaacatgggttatattcattattaggccatcagtcataaaagataattttccatcttttttttttttattggagtcctgcaaaggcaaaagtgcctaaggctcaccgtgaaaatcattacgtggccctcagccatgcgtggactcagtgggccacacagacacagtgtcacctctcccagctctcccgagtctgtgactacaggcaaatcacgccacctcctctctgagcctgtctcccactccgtgaaatgggtaacatcacctcgaaggtttactcacccagtgaactcaacatgtgtttactgaacaccactctgtgctaagccctagagcaggtcaaaaacataaaatccctgccttcttgagctaacattctcctgggcatccccactccattttcagatgaggaaactgaggcatgggccatttattttcctcggagctccacagtaaggatgccaatgatgcaaaggtccccggcctcagtttccctgcagtgctcagtgtctgggccagtctcactggatgggaaactcacagatgagctgatctgtaagtcactctgccccaggaggccagagtaaaaagtgctgcttgcccacaccttcgtcccctttgcagggagttacaggagaccccgagacaccctccctccactcgggagccagatggtctgagaagtgaaataagaacctagcatttggttgagagggttattggaaagcttcaaacagagaattagattgtttcctgatttaaaaaatcactcctctccagcaccgagctcccccagggctgcccatcatcttaatgtttggagcttgccttgtaatcaacagagagagaaactaaacacatacgtaagatggtgcttgctctatttggctcctaacagttgccagcccacctaagttctcttcgcttaaagatatgtcccagggcaagacaacaggatcagagaacttgccagatagaaaagacttaaatggagaaccagcccatgcctcacagacagtaggatcccagtaaatatgggttgaataaaatgtgtcttgtccaacctacaaaagtttggccctaaaaaaacccacaaaatatttggacctttaaacagcttgttttcccatggagaagatgacaatgccaatcataggcattttttcattctacagcataaaaacatgagatttaagagcctg

SEQ ID NO: 168274 - DNA, 2927 bp, Homo sapiens
  Payload ID: 13106
  Gene Symbol: KCNV1
  Gene Name: potassium channel, voltage gated modifier subfamily V, member 1
  Uniprot ID: Q6PIU1
  ENST ID: ENST00000297404
  CDS Start-End: 343-1845
ggtgacaacgtttgggaagggccagggcgaccggcagtgtgcacagggactgtgtcgggcttggacctcacctgatcctctctcttagcgcgacccttcctctgctccctgtctcctctttctgccacttgtgcgctgcttccgcgcactcccggctccctagcggcaggaggaggaaggcgcacagcgggtggagagggtgcgccaaggagaggtaaccccttcgggagcccggggaatcccggccgccaccaggggccgtgccaccgccctcgcgggaccaaagcttccggcgtgtccccaactttgtggcgccctcaggccgcggcgactgggttagagatgccttccagcggcagagcgctgctggactcgccgctggacagcggctccctgacctccctggactctagtgtcttctgcagcgagggtgaaggggagcccttggcgctcggggactgcttcacggtcaacgtgggcggcagccgcttcgtgctctcgcagcaggcgctgtcctgcttcccgcacacgcgccttggcaagctggccgtggtggtggcttcctaccgccgccccggggccctggccgccgtgcccagccctctggagctttgcgacgatgccaaccccgtggacaacgagtacttcttcgaccgcagctcgcaggcgttccgatatgtcctgcactactaccgcaccggccgcctgcatgtcatggagcagctgtgcgcgctctccttcctgcaggagatccagtactggggcatcgatgagctcagcatcgattcctgctgcagggacagatacttcagaaggaaagagctgagtgaaactttagacttcaagaaggacacagaagaccaggaaagtcaacatgagagtgaacaggacttctcccaaggaccttgtcccactgttcgccagaagctctggaatatcctggagaaacctggatcttccacagctgcccgtatctttggcgtcatctccattatcttcgtggtggtgtccatcattaacatggccctgatgtcagctgagttaagctggctggacctgcagctgctggaaatcctggagtatgtgtgcattagctggttcaccggggagtttgtcctccgcttcctgtgtgtgcgggacaggtgtcgcttcctaagaaaggtgccaaacatcatagacctccttgccatcttgcccttctacatcactcttctggtagagagcctaagtgggagccagaccacgcaggagctggagaacgtggggcgcattgtccaggtgttgaggctgctcagggctctgcgcatgctaaagctgggcagacattccacaggattacgctcccttgggatgacaatcacccagtgttacgaagaagtcggcctactgctcctatttctatccgtgggaatctctatattttcaactgtagaatactttgctgagcaaagcattcctgacacaaccttcacaagtgtcccttgtgcatggtggtgggccaccacctctatgactactgtgggatatggggacattagaccagacaccaccacaggcaaaatcgtggccttcatgtgtatattatcgggaattcttgtcttggccttgcctattgctattattaacgatcgcttctctgcttgctacttcaccttgaaactcaaggaagcagctgttagacagcgtgaagccctaaagaagcttaccaagaatatagccactgactcatatatcagtgttaacttgagagatgtctatgcccggagtatcatggagatgctgcgactgaaaggcagagaaagagcaagtactaggagcagcgggggagatgatttctggttttgaattaattttcaatttatttacaaaagctatgtacaattaactaaaatgataaagcagtgatgtggatttctgtattctgatgatgagtctcttcagagtactgctcatcttaattaatttttgctgatatattgcttcatctactagaatatttcacatcacctataacaactgcacagtgttctgacacatttgagtgtccaaaatagccaattaacacaaccaaatacaactgggccaatataaacatgtttgaattgtcaaatataaaataatgttattgcaatacatacaaaaaagttaaagattttatgtatcactaacattagaagttttttgcaccactaattttttaaaaatggaaggtaaactgcatagcccagagaaagataagtaaatatttaagaacatattgaacaactttgctatttaaagatattatccaagtacataaattactccgttctctatcagttaaagctattgaatataatacttagctttacaagagaaaacccatatttgatgggcagagattatatccctatcttctttttcatgtaaaccactggtcacaaatgaactgatctctgtatcccattattactataagaggtgggaatcccaaaactgcttagattgcagtacatgagtctacacaaagacttcaacaattgcacatcttcattctcccaactgagtgtagtatgtggagcataaaacagcatatttcttagtatttcatgaatatcagatggtctttaaatgtctctttatggatgtattgttcacattatggctttaaaataatgaatatgtaaaagtgaggtagtgaacatcctaaatttctacactggaattactaaataatcttatttcataaaatgggaaatatatgttaaatgacatcactggatgaacttgaagatcttttacttgttaacaaaaaaatactatggacagctttctgattgttggggtaaatagcaaatgttcaaactttgcaggcattttgacattcatcataacaacacaattcctagacattgtattatataattaaagccaaaacctctaaagct

SEQ ID NO: 168275 - DNA, 6979 bp, Homo sapiens
  Payload ID: 13106
  Gene Symbol: KCNV1
  Gene Name: potassium channel, voltage gated modifier subfamily V, member 1
  Uniprot ID: Q6PIU1
  ENST ID: ENST00000524391
  CDS Start-End: 1034-2536
agagcgggcggggcggacacgcttagcgtaagcgcaggggccaggagcccggagggaggtggaggcggggcaaggcaaggcagcaggcgctgggtagagctcagctggaacacagtttccctcctggaccggtcgagtcagacctcacgtgtagactaagaggatcaaaagaagagtacgttacctgcggcgccggttgtgcgcagaccagatgtgccgggagctgcaggaggtcagaacctaagggagacggcggaagaaaatggagcgtcagtgatcatcagactagaatgagagtgaattgggagaaaatggtgcggccccctcacccagagaaccctcccccacctgctcacacccccagcgaacaccccgggggaggcctatgaagcagcagtaaaagaaaagggaggaatataaattctcaagttggaagggacccggttaccacttcctttgctttctgaactttttgttttggtctcctgcgggcaggagtgagtctcgccatcccccttgcttgcttgcttgcttgcgttcagctaagagtcatcttctctcctcttcctcctcctccgccccacatctccctccttcctcccttccccaacccctccacccaccaagtagcgagtcattcaatctgtacacctcctgggctgggaatcgcaattgcgaagttgggaggcggggtgacaacgtttgggaagggccagggcgaccggcagtgtgcacagggactgtgtcgggcttggacctcacctgatcctctctcttagcgcgacccttcctctgctccctgtctcctctttctgccacttgtgcgctgcttccgcgcactcccggctccctagcggcaggaggaggaaggcgcacagcgggtggagagggtgcgccaaggagaggtaaccccttcgggagcccggggaatcccggccgccaccaggggccgtgccaccgccctcgcgggaccaaagcttccggcgtgtccccaactttgtggcgccctcaggccgcggcgactgggttagagatgccttccagcggcagagcgctgctggactcgccgctggacagcggctccctgacctccctggactctagtgtcttctgcagcgagggtgaaggggagcccttggcgctcggggactgcttcacggtcaacgtgggcggcagccgcttcgtgctctcgcagcaggcgctgtcctgcttcccgcacacgcgccttggcaagctggccgtggtggtggcttcctaccgccgccccggggccctggccgccgtgcccagccctctggagctttgcgacgatgccaaccccgtggacaacgagtacttcttcgaccgcagctcgcaggcgttccgatatgtcctgcactactaccgcaccggccgcctgcatgtcatggagcagctgtgcgcgctctccttcctgcaggagatccagtactggggcatcgatgagctcagcatcgattcctgctgcagggacagatacttcagaaggaaagagctgagtgaaactttagacttcaagaaggacacagaagaccaggaaagtcaacatgagagtgaacaggacttctcccaaggaccttgtcccactgttcgccagaagctctggaatatcctggagaaacctggatcttccacagctgcccgtatctttggcgtcatctccattatcttcgtggtggtgtccatcattaacatggccctgatgtcagctgagttaagctggctggacctgcagctgctggaaatcctggagtatgtgtgcattagctggttcaccggggagtttgtcctccgcttcctgtgtgtgcgggacaggtgtcgcttcctaagaaaggtgccaaacatcatagacctccttgccatcttgcccttctacatcactcttctggtagagagcctaagtgggagccagaccacgcaggagctggagaacgtggggcgcattgtccaggtgttgaggctgctcagggctctgcgcatgctaaagctgggcagacattccacaggattacgctcccttgggatgacaatcacccagtgttacgaagaagtcggcctactgctcctatttctatccgtgggaatctctatattttcaactgtagaatactttgctgagcaaagcattcctgacacaaccttcacaagtgtcccttgtgcatggtggtgggccaccacctctatgactactgtgggatatggggacattagaccagacaccaccacaggcaaaatcgtggccttcatgtgtatattatcgggaattcttgtcttggccttgcctattgctattattaacgatcgcttctctgcttgctacttcaccttgaaactcaaggaagcagctgttagacagcgtgaagccctaaagaagcttaccaagaatatagccactgactcatatatcagtgttaacttgagagatgtctatgcccggagtatcatggagatgctgcgactgaaaggcagagaaagagcaagtactaggagcagcgggggagatgatttctggttttgaattaattttcaatttatttacaaaagctatgtacaattaactaaaatgataaagcagtgatgtggatttctgtattctgatgatgagtctcttcagagtactgctcatcttaattaatttttgctgatatattgcttcatctactagaatatttcacatcacctataacaactgcacagtgttctgacacatttgagtgtccaaaatagccaattaacacaaccaaatacaactgggccaatataaacatgtttgaattgtcaaatataaaataatgttattgcaatacatacaaaaaagttaaagattttatgtatcactaacattagaagttttttgcaccactaattttttaaaaatggaaggtaaactgcatagcccagagaaagataagtaaatatttaagaacatattgaacaactttgctatttaaagatattatccaagtacataaattactccgttctctatcagttaaagctattgaatataatacttagctttacaagagaaaacccatatttgatgggcagagattatatccctatcttctttttcatgtaaaccactggtcacaaatgaactgatctctgtatcccattattactataagaggtgggaatcccaaaactgcttagattgcagtacatgagtctacacaaagacttcaacaattgcacatcttcattctcccaactgagtgtagtatgtggagcataaaacagcatatttcttagtatttcatgaatatcagatggtctttaaatgtctctttatggatgtattgttcacattatggctttaaaataatgaatatgtaaaagtgaggtagtgaacatcctaaatttctacactggaattactaaataatcttatttcataaaatgggaaatatatgttaaatgacatcactggatgaacttgaagatcttttacttgttaacaaaaaaatactatggacagctttctgattgttggggtaaatagcaaatgttcaaactttgcaggcattttgacattcatcataacaacacaattcctagacattgtattatataattaaagccaaaacctctaaagctaagaactagctcatgattcccattattttagtaaatgagattctacaacctaagaataacaaggaatgcatcactttaatacctacatttccaatataatagagcccccaaggggaagaaaattggttcttgaggaaaaaaaaatcttatcacttcatttacaaaacacagataagcatattgagtatatctgtggtattaacatttcatgggggtgagatgttagggaaaaaagcctagaaggctctttgccaggggtgaatggtgataagaaataaacattgaggactgctttaatatatagctataaggtatttcataaactctatttaagacatcatattatgctatgcactaccaagaaagaaagatgccagtcaattgtaagatgccattaactgtaaaatgcatccggatttcagatatgtaaaaatttaaaataagcaccttaaaatcaatgaaatatcgcatgtactacctcctgttttctggtatgcatggttaagctctgaaaacattttcactgatggcatgagttttagattgtgtgctaaagtactttaattcatttaacttgtttccacttctcctaaatattataaaaggttcaggagatatgaatattagtaagataaatattttacttcttacacacatacatgggtgctagattgtggcacagggccactagtcatagtataaatcccttccacaatctgaagggaaagtagaagttagacacagaaggtaaacttactccagcttttctagaactttccctaataagaatagttactctgatccaggactatgctctgtattcatcatgtattatgccattttatcctcaaaatatccctattatataattactattcttatactcttcaaaatacatattttatatatttattaactcaacaaatatttattaaggatctttggtgttctggggactagggagtctttcttaaacaagactaggtcctgttttcttgtagttaatattctgttcaaaggtgtgtgaggaaaagacagcgaaactgaaacattaaaaggtataaacttgcctaaattcacacaggctatagatggcagagccagcgctgaataccaatctgcctgacccggaaaacgacactcctaaaagtcaaattgcagatttcattcttcctacacaagctctgcatagaaatttattttttaggcaggcaagccaacttcttgtgcatggagaagttcaatatgccttaagtaaaatatcagcttattctcagaggtggaatggtgcttttaagaaaaggctgtggtgacaccttatagtcattattagattaaaaatatattatctttagagtaaatagtagttggaaataaaaaaaattaaaaactatgtgtatacatatgtatatatgtttttatcatggaggatcctaaacatcttctctacaaatgtgctgttagctatataaatgttgtcaagatgtaggtcttcagaaagaagttttaaaatatcattgcttactcaattttgctgttaaataaaatatcattttatttattcaatgaatgtatatataagcaaaccaaatttcatttaggtaaaaaaatcaaggcaggaactctgccaattttataacccattattttaaaacagtaaacactttttaaacatctaagaattattgttataaaacaatatttaattttttaaaatataaaataattgaattattgtctttctctaagctatttagagaacactactttctttgttttgttttggtttggttttttgagacggagtgtccgtctgtcgcccaggctggagtgccagtggcgcgatctcggctcactgcaagctccacctcttgggttcacaccattctcctgcgtcaacctcgcgagtagctgggactagaggcgcccgccaccacgcctggctaattttttgtatttttagcagagacggggtttcaccgtgttagccactttctttgttaatttaactgttattttaagttcagggatacatgtgcgggtttgttatacaggtaatcttgtgtcatgagagtttttttgcacggattatttcatcacccaggtattaaacctagcaccagttatttttcctgattctctccctcctcctacccagcaccctctgataggccccaatgtgtgttgtttccctctatgtgttcatgtgctctcatcatttagctcccacttataagtgagaacatgtggtatttggttttctcttcctgcattagtttgctaaggataatagcctccagctccatccatgtccctgcaaatgacatgatctcattctttcatatggctggatagtacttcatggtgtatacatacattttctttatccagtctacagttgatgggcatttaggtttattccatgtctttgctactgtgaataatgctgcattgaacatacgtgtgcatgtatctttataataaaacaatttatatttcttgggtatatacccattaatgggattgctggatccagtggtatttctgtttttaggtctttgaggaattgccacactctcacatggctgaactaatttacactcccagtatcagtgtatatgcgttccaattgctccataacttcgccagcatctgcttttttttttttgctttttaataatagccattctgactagtgtgagatggtatctcattatggttttgatttgcgtttctctaatgatcagtgatattgaggctttttttcatatcattgttggctgcatgtatgttttcttttgaaaagtgtctgttcatatcctttgcccactttttaatgggatttttttttcttgtaaatttgtttaagtttcttatagatgctggaatattagacttttgtagatgtatagtttgcaaatattttcccccaatctgtaggttgtctgttcactctgttgataggttcctttgctctgacaaagctctagagtttaattagatcccatttgccaatttttgctttcgttgcaaccaccttttgtgtcttcatcatgaaatctttgcctgttagaaaacactactttcagacatttaaatgcatataggcaatgcttaagtacctaaaaaagcaattttaagaaattactgaggtatctctattaagagtgacatattcatattttattttatgtatatattatttctataacatacaagaaattgttgcatttatcattttaatgcaaagtagtatcaagtataatggattagatgcaaaaataactgaggtaggaatctcagttctgtgttttaatgtggaattcttatgcttattaaaatattttgattagctgttgca

SEQ ID NO: 168276 - DNA, 2186 bp, Homo sapiens
  Payload ID: 13107
  Gene Symbol: KCNV2
  Gene Name: potassium channel, voltage gated modifier subfamily V, member 2
  Uniprot ID: Q8TDN2
  ENST ID: ENST00000382082
  CDS Start-End: 239-1876
gcaagattagagcagtcaacagctgactgcgttcagaccctgcaggctgggctggcctgcccaggacctgagaaggggcagctccggtggcaatgtctgagcccctagctgtgctggtccgggctggcctctctaagacagtgcaggccacgtgatccatcctcctagaggcagtgagcaggtgagggacccctaccacagccaggaggaaaaagctaggcgtccactttccgcagccatgctcaaacagagtgagaggagacggtcctggagctacaggccctggaacacgacggagaatgagggcagccaacaccgcaggagcatttgctccctgggtgcccgttccggctcccaggccagcatccacggctggacagagggcaactataactactacatcgaggaagacgaagacggcgaggaggaggaccagtggaaggacgacctggcagaagaggaccagcaggcaggggaggtcaccaccgccaagcccgagggccccagcgaccctccggccctgctgtccacgctgaatgtgaacgtgggtggccacagctaccagctggactactgcgagctggccggcttccccaagacgcgcctaggtcgcctggccacctccaccagccgcagccgccagctaagcctgtgcgacgactacgaggagcagacagacgaatacttcttcgaccgcgacccggccgtcttccagctggtctacaatttctacctgtccggggtgctgctggtgctcgacgggctgtgtccgcgccgcttcctggaggagctgggctactggggcgtgcggctcaagtacacgccacgctgctgccgcatctgcttcgaggagcggcgcgacgagctgagcgaacggctcaagatccagcacgagctgcgcgcgcaggcgcaggtcgaggaggcggaggaactcttccgcgacatgcgcttctacggcccgcagcggcgccgcctctggaacctcatggagaagccattctcctcggtggccgccaaggccatcggggtggcctccagcaccttcgtgctcgtctccgtggtggcgctggcgctcaacaccgtggaggagatgcagcagcactcggggcagggcgagggcggcccagacctgcggcccatcctggagcacgtggagatgctgtgcatgggcttcttcacgctcgagtacctgctgcgcctagcctccacgcccgacctgaggcgcttcgcgcgcagcgccctcaacctggtggacctggtggccatcctgccgctctaccttcagctgctgctcgagtgcttcacgggcgagggccaccaacgcggccagacggtgggcagcgtgggtaaggtgggtcaggtgttgcgcgtcatgcgcctcatgcgcatcttccgcatcctcaagctggcgcgccactccaccggactgcgtgccttcggcttcacgctgcgccagtgctaccagcaggtgggctgcctgctgctcttcatcgccatgggcatcttcactttctctgcggctgtctactctgtggagcacgatgtgcccagcaccaacttcactaccatcccccactcctggtggtgggccgcggtgagcatctccaccgtgggctacggagacatgtacccagagacccacctgggcaggttttttgccttcctctgcattgcttttgggatcattctcaacgggatgcccatttccatcctctacaacaagttttctgattactacagcaagctgaaggcttatgagtataccaccatacgcagggagaggggagaggtgaacttcatgcagagagccagaaagaagatagctgagtgtttgcttggaagcaacccacagctcaccccaagacaagagaattagtattttataggacatgtggctggtagattccatgaacttcaaggcttcattgctctttttttaatcattatgattggcagcaaaaggaaatgtgaagcagacatacacaaaggccatttcgttcacaaagtactgcctctagaaatactcattttggcccaaactcagaatgtctcatagttgctctgtgttgtgtgaaacatctgaccttctcaatgacgttgatattgaaaacctgaggggagcaacagcttagatttttcttgtagcttctcgtggcatctagctcaataaatatttttggacttga

SEQ ID NO: 168277 - DNA, 11879 bp, Homo sapiens
  Payload ID: 13108
  Gene Symbol: KCNB1
  Gene Name: potassium channel, voltage gated Shab related subfamily B, member 1
  Uniprot ID: Q14721
  ENST ID: ENST00000371741
  CDS Start-End: 197-2773
ccgcgtccgctttcgctttctgcctcgcagccgtcgggatggaggtgagaagacggccgtgacgcgcgcccgcggggccccctgcacccccagcagcccacagcgctccctgcccccctcccccgcagcagcgggccttgccgtcgagtgacagcggcctgggggggcagggggggcgggggcggccggatcagcgatgccggcgggcatgacgaagcatggctcccgctccaccagctcgctgccgcccgagcccatggagatcgtgcgcagcaaggcgtgctctcggcgggtccgcctcaacgtcggggggctggcgcacgaggtactctggcgtaccctggaccgcctgccccgcacgcggctgggcaagctccgcgactgcaacacgcacgactcgctgctcgaggtgtgcgatgactacagcctcgacgacaacgagtacttctttgaccgccacccgggcgccttcacctccatcctcaacttctaccgcactgggcgactgcacatgatggaggagatgtgcgcgctcagcttcagccaagagctcgactactggggcatcgacgagatctacctggagtcctgctgccaggcccgctaccaccagaagaaagagcagatgaacgaggagctcaagcgtgaggccgagaccctacgggagcgggaaggcgaggagttcgataacacgtgctgcgcagagaagaggaaaaaactctgggacctactggagaagcccaattcctctgtggctgccaagatccttgccataatttccatcatgttcatcgtcctctccaccattgccctgtccctcaacacgctgcctgagctacagagcctcgatgagttcggccagtccacagacaacccccagctggcccacgtggaggccgtgtgcatcgcatggttcaccatggagtacctgctgaggttcctctcctcgcccaagaagtggaagttcttcaagggcccactcaatgccattgacttgttggccattctgccatactatgtcaccattttcctcaccgaatccaacaagagcgtgctgcaattccagaatgtccgccgcgtggtccagatcttccgcatcatgcgaattctccgcatccttaagcttgcacgccactccactggcctccagtctctgggcttcactttgcggaggagctacaatgagttgggcttgctcatcctcttccttgccatgggcattatgatcttctccagccttgtcttctttgctgagaaggatgaggacgacaccaagttcaaaagcatcccagcctctttctggtgggccaccatcaccatgactactgttgggtatggagacatctaccccaagactctcctggggaaaattgttgggggactctgctgcattgcaggagtcctggtgattgctcttcccatccccatcatcgtcaataacttctctgagttctataaggagcagaagagacaggagaaagcaatcaaacggcgagaggctctggagagagccaagaggaatggcagcatcgtatccatgaacatgaaggatgcttttgcccggagcattgagatgatggacattgtggttgagaaaaatggggagaatatgggtaagaaagacaaagtacaagataaccacttgtctcctaacaaatggaaatggacaaagaggacactgtctgaaaccagctcaagtaagtcctttgaaaccaaggaacagggatcccctgaaaaagccagatcgtcttctagtcctcagcacctgaacgttcagcagttggaagacatgtacaataagatggccaagacccaatcccaacccatcctcaataccaaggagtcagcagcacagagcaaaccaaaggaagaacttgaaatggagagtatccccagccccgtagcccctctgcccactcgcacagaaggggtcattgacatgcgaagtatgtcaagcattgatagtttcattagctgtgccacagacttccctgaggccaccagattctcccacagccctttgacatcactccccagcaagactgggggcagcacagccccagaagtgggctggcggggagctctgggtgccagtggtggtaggtttgtggaggccaaccccagccctgatgccagccagcactctagtttcttcatcgagagccccaagagttccatgaaaactaacaaccctttgaagctccgagcacttaaagtcaacttcatggagggtgaccccagtccactcctccccgttctagggatgtaccatgaccctctcaggaaccgggggagtgctgcggctgctgtcgctggactggagtgtgccacgcttttggacaaggctgtgctgagcccagagtcctccatctacaccacagcaagtgctaagacacccccccggtctcctgagaaacacacagcaatagcgttcaactttgaggcgggtgtccaccagtacattgacgcagacacagatgatgagggacagctgctctacagtgtggactccagcccccccaaaagcctccctgggagcaccagtccgaagttcagcacggggacaagatcggagaaaaaccactttgaaagctcccctttacccacctcccctaagttcttaaggcagaactgtatttactccacagaagcattgactggaaaaggccccagtggtcaggaaaagtgcaaacttgagaaccacatctcccctgacgtccgtgtgttgccagggggaggagcccatggaagcacacgagatcagagcatctgaactgccctgccttggaggagagacttttgggtgaggtccaaagaggagagctgttcagcttacctgccacagagcttttctgcatgaactctggaacagaaaggccctgtaaagccctcagagagaagagagactccagagaaggctccctaagaccttgagagccatgacaggtccatcagcatgaagttggccaagccatagggcacagcacctccttgtaacaactctatagccctctttgggagatgacatgagtggaactcacagccaccactaccaccactttagacaggaccgaggccacatactccccattctctcgtggctttccatctcagcctcggagggcaacattgacagtcctcctggcttcagctagagaaggatgctggaacaagcggctggtgttgaaagagtgggttgaccaatttggtattgaatgttgcccagccacccctaggaacacctgtccatcacctcctggatggattccactgttagacagctacagggaatgattggtcatggggaagtctctgcgccataagccacgatcccagcgcaaaacccttactcaaatgtcttcattgacttcggtatttcatagtacctgagattttattttgagataccatcagggtgagttgcaccacttgtactcaattctaattgccccctggcaatctgggaagggttcagaaggtgggcacccagccaacagcatgaactcagagcattgttttagggttggaggaggaacacgctttctttacatcactagtgtagactcaaaagatatgcaagtgtcaaatatgcaaaagaaatagtttattcaaagagactgtgtgttactgaagaacagcataaaaatatgatttttttacttgcaaaaatgaaaggaaaaaaataccacgcattgaaatgcccagttcagactgaataattcctgctgcagcaaggaaagtacctactataatagaaattctgttttgttttctgtggttttcaagttaaaaaaaaaaaagttaaaataaaaagcactttatgtttttcaaaaataggttctgccagggacagtgtcaacatcttgcactttaaaataagcactatttcccatagcccaattgttgggactgtagttggattgttgctacctgcccatttctggccagcatgggtaatattgtgctggtattactgtctgccatatcaaagtctgtgggctccttccctgcccctctgaaaccttcccttaaccctcatgggtcaggaggggttcttgccccttgggtggggcctctcatgaagtcaagtatacaggagacatgcacatctcaaaaggacacagtgacagttggacattgggtgttttactctgttctctttcttgtcaaccagctattggtttttcagtgtcactgtctgtactaaaagctcaactctccttcctgcagccatcgatgcagccagtacagacaaaagcaataagtatttgtgtgcatcctgagtggttctggtgtatttcttggtgttggttttcctgtcctcgtttgatgacctggcattgtcctgcctgcttttagtccaacagcatggtgttgttggccattcctcagtacagtggcattaggttgaaccactgatgaatacaatgctatagtgttggctcacctgtcagtaaagatgacatgttattggtctgcctgtctgtagtacaatggaacaatgttgttctcttaatgtaatgttgatggatgatgtcccaagtacaatagtgtagttctgtctatcctcaatacagtaacaggcatatgtcttcccagtggaagaaagatatggtattggttcacctagtcttaagtctcaatatcatctgttgctggtctgcctgttagtacaatggcatgatccacctctcagtacacaaatatcatggagctgttctgcctgctcttcatacataaggcataaggttgagccacctgccacacatatgatgagatgggatcattccaccacccttaaaaatatgtcttctctgctgtatacaaacccaattcataacacttctcagcatctccagagactgtagatccccccaagagggtgcagtcctgttctttgccgcattaacagagaaaacgagaacgtcactcttcctaggtatcttcagagtattcgcgcagcaactgcaaagggacttaggggcagggagagtgtgaggtcatcccgtgccaggcagaggaagcagcactcccaaaacactttgctgaacacgcagtctgagctgggggcctcttgaggaatgactgtgggacagttctccgccgaccatctcacatgtctcttctttgttttcatcaccattaatgtccaccatcagcacaaatgtgaaaattcagggaaaaaaacaaatgctttttgataaaagtaaatagttgtgatttccaattcagatatttttagagctgatgctatctgtaaaaaataataataataataatatagtctattttacatatcaggaaagtgaacatgtttcaatatagccatatatattgagaaggaacttaccaccccttcttccaatcgaggcatttcatttgttggttgaagcagatgagaactgtacagattgaaaatgatttgtttttttttttttttaaaaaaaacgaaaaccaattggtgcaactctccttgtaaccaaaggccctttctgccttctgtggtcatgtaggacctggcccttccttccttgtgtattttgtccaaccgtaaagtagcattttattgagtcacttttgaaggacgaattcagaagtatcattaagaacctaccttttcaggcttcatagccagagtcctatagagttcttatagaaacagaataattgaaattcagcatatactatgcttagaaagtattttgtttgggtttgattgggtttttttttcttttacttgtgtgtgtatgtactgggggagtatagcttttattctgtgctcaattcgaaagagagtattataagttttcccagcccatccacccgctaaaaaagaacatatccaaattttaatatgtatacacccaacctgtacctatgtacgtgaatatacatgcactgggaaatctacttaagagtcttcactgagaagttcactcgatagaaaggtcttgatagagaagagaagaggaaagcaatggtctgaaggcaaatcctgctttaacttggtggtccatttcccattcattcctgaaccaatgagagcagaaagaaacaagtcaacccaaacaagcaaactaggggctggacgcggcgaatggatgctggtcagtttggcaaattcactgaaactcatcaagaacccagctgaacttgcattccaacttccacaattatctgaaagggctagggaccaggtagccatgtgtcccaatcacacgggggagagtctgccaccggcggtgagagaggtggggaagctttggaggagacagtatattcacctttttatctttgggtaaaagaaaccaacaggactttggtgcagtagatttctcagtgccttctttaggaattctatcttaagcacacttcaaggggaaagaaaaaaggaggagagaacatttgttcccgtgaagtccctttctccaaaggactggggatcaagaaggaagaagagtaagaaggaaaaacaacaaaatcctgaggaggccatttcttttaacccacccagcttgcccctgaaaactgctggtgatacaaactttttcaaactgacttccagcttctccatgtgtcttggtaactgtagcctcgtctctgccctttctcctaataagatccatgtttctaaggagaaaaacaaaacagtattctcttctgtaaaactgtaatgtattgttgatatttgtaactattgtatatttctgtcttgctccagtcccagctggagtgtctagttccatggacaaggggatatttaaaattcaccacggacaagagccactaaagccaggtctctatcgctaatctctctcctattcttatttctctaccaactaatctcaagtaacaataccccaggctttttttcagcctcaattcaagtaactttgaatcaaaagagagcaaggcaaaaagcctccggacatgcttctttgggaaaggactttttctgtagctgcagagtgggcaggagggagaaggggctcccctgagaccccggcaggacaatggaaagcttccagccccgagctgatgtttcctcacctatcactgcttataggacagcatccaaatgctttcatgtcactcagcccaggcaacccaaaccagtcctggctacacccagaaataagagttacctctgcattttctgttgccatttttctggctctagaagtatctgatgcgcgactatgtcatagaatgtccacgcatctcagagtagtctatttttctgttcagataaaatatatatatatatgtatttttagcaaatttataatagggcaattgagtctaatttcttcttttgtaatacagaacaatatcttaggagtttcattgttggtcattatcgtagctgatgttttctggtcttttgcagttcctaccattgtcccttgggctgtttgggttttcttccttttgattctgatttcttgagggtggggaaagactttggggtttgacttccttgtgtaggcatttcttgacactaggcctggactctgtcaatgctgtgactttcctcattcatttctgtgtgtttctcccattcgttgttcttaagaatccagggcatgaatgcaggaatgagacccagggaagcagagctacagatggccctcaaaatcaggatgggatgtgggctggtttcacttatatcccacacccctttagggatctgaagggactgagttttctcatccccagagatcttggaaccaaaaatctcatgcaagcaaactcatcactggcatttctgagatccagaacacatgtgagtccctcctggctgggctgctcccacatgtccagcaccctgtcggcctgtaacatcaatcagagctgaaggtcagaggtttttcaggttctcgtgaacctcacaagaacatgctgggcctccgatctcaccaacttgtttatcagttccttgtttcgatctgtttatttatttatttttttgttattattattttgagacaaagtcttgctctgttgcccaggctgcagtgcaatggcgcaatctcggctcactgcaacctcctccacccaggttcaagtgattctcatgtctcagcctcctgagtaactgggattacaagagcgcaccatcacgcccagctaatttttgtatttttagtagaggcagagtttctccatgttggccaggctggtcttgaactcctgacctcaggtgatctgcctgcctcggcctcccagtgctaggattacaggtgtgagccaccactgcacccagtccatttcaatccatttctaacagcttcaccaaaaaacagtggccagacacccttgcagccaaaccctgagaagagatgtccccgaatctgctagctcatctccccttcccttgccagctgcctggctccatagagcaggaggtgtgtggcaaggacaggggcagttttccagcttccacctatccacgcctgggggagtttttggactgtcctgataattaattccagaggcagttttcagtcctgggtgggcggaggacatctcactaggcaggatcttcagcagaaagtgattctccatccgtcaactcatgcaggaagatgaagaaagcccagataatctccaacttgcattcgtttaggttttggtataccacccacctcactgtcagctgcagggcttggggctctgcctagaatcagaaatttgagccaaactgggaccctcagatggcagtgagccatcccatcagataactcccaagaggaagccaactcaaatatgaattttattattctggactatgaccctgatcagagttctcccaccccgaaaacctctgatagtctggtttgaaccagagtcaaataaaacagacaagatttttttttcctctgcacaaaagcaaaaaaacaaaacaaaaaaaagtctgccagtagtttcctgggtttgatgcccagataagcaaacactgttgcctatggctgttgctgttttcatcaagaaagaggttatatagtttgcatttccatccactctccctgattttatcttaacctagaatttctcctgaactaccccaaatgccaacttgaatttgggtagggctctgttaatcgagggaaccctcatcttcacttataaacctaattctctgttcctccctccaaagatcctgaaaagatctcctaaaggctggccaggatggggtggagtggggcagtgcacctgaagaaaaaaacttagctgccagctggctgtatgcaagttctccgaaaatttctattgtatgaaagggatggggtcaattgcagctcaaattaaggaagccctcctaacaggctgggttgtctgaccatggagctcaatgccatggtggacagtgagctcccttatatcacaggtgtttaaagagaggctggctagatggtgtaaaaaatgggcattgcagaggggccctagcattgcatggaaactgggctgaacaaccacagaaattcctctttgtttcttggagtgtgtgtgtgtgtgtgtgtgtgtgtgtgtgtgtgtgtgtgtgtaggtggtttcaacactctggatataagctcaagccactgaggcaaaggcatgcagcacaattagcaggaatgcaacttctgggctttggagctctcagagggggtgtccaagagacaagtctgcttccttccggctccgtcttggaacattttaatgactgtcagtcaccaatccaacccatccccagtggcctaccaggcaccacattgggatgagactcatgctacccttccccaggccagccaaggagcaatccacgctgtcccccatccctggctggctgtcttatggtgcttcagcccctccgcccagctcctgtgccctcatgagcctggggctttctgtataaaagatgcaatgatatctgttccccactagccatccccacaatgaacaacttcccaggcaatagcaaatggctccattccaaaagggcttgtttttttggtaaatcaaataagagaccccactcaagacctttgaaagtccccgtcaatgaaaaaaatccagaagggtcaaaagagaaaggcagcttttaatccagtttcacagcaaaaccaggctcttggctgcctccaagcagaatgccactctcctgcagctgtggcctccatcccaaatcatcctgcatactgcattctctaaggaaagcatttgacaagagagggtttatgtatggtggattgggagaaagtgagacttcaacctcagggtgaaccgaagactggtttgtctttggttgttttagtatgaggttgggcaggatgatatgtttggatgggtagaatgagcagccgccttcctctgaaaccaaaataaaataaaaaccagttttcaagattcctcccaactcctcactggaggctctgccctgcagaatcactcaagttgcaacaacacaaggagacaaaaataggatatttcatgaaaatataagaaactcccaattccgtcccattaggatgccctcaaggggccatgcagggatcttcccatacttcctgcttccctgatctgaaccaagattggaaagaggcaggcagcagagaagatgcccaagaaactctgacatatccacagcttggctctgccccttgggcttcactggggtttgggcctccctcttggttgagctgagtgtgcctgagtgggtggggacagggaggattctccaggtctatcttgatttcataggtccttctcaatccaaggtcaaaaactgagaatcttattttctgcaccaggaactcagggttatccccaacctatgccgctggcacatgatggtcatccaacctgtgtttttgtgagtgagtgaatgtgtgactggttggcctctgagtggatgactggatgcgtgaatgtgtgagtgaatgggggagttaatgaatccctacctaactgtgaagagaagaaaaatgaggagcccctctcccactgaaacccataactgccccatcaaggtcatctttctttgactcaagatgacatctcaatttgatgcttgtaggccccaagctgataagggccacagccctctcagagccacacttcctgggggcccacagagcagctctgccctccttcctcttcccctaccctgcatttctcagcctcatgttctattttagctcacacacgacccatgggggggaccaccaagtggttttccaatggactaagccaagggttcgaagttgggacttcctttggtctgggacttcctggggcagaaacataggagccaacatctggaaactggattgcattccctgagccatgggagtccagctggatattaaggccagcctgccctccagcttttagagccgaagatctttttttctgagccccaaagccgtcatgatagtatgcccccagatcccatcagctaagaccctgtctctcccaggaacccgtcgtgtgaggttggggcttttctgccagtaaagccattctgatcacctcacccttgacaggggccaagccaatcacattagccataaatgaccaatgtcctcagccactcttttctcgggggtgcattcgtgggtcctattcatctctcgtcagttaatgtctctagtccttcctgtaaaggtgaaaataagcattgcgcatgtgcgcaacacacacgcacacacacacacacacacacacacacaaatcccagtgtctttttatgcatgtggtgagatgaaattgtgatctttgtgtgacctccagctgctgtcttgtcttgtaaaatatgtccaaatgtttaagaatttctaagcaaatggtcccttaatgaagtctgcagagttcaataaaaggtatggaaaaaacaa

SEQ ID NO: 168278 - DNA, 4114 bp, Homo sapiens
  Payload ID: 13108
  Gene Symbol: KCNB1
  Gene Name: potassium channel, voltage gated Shab related subfamily B, member 1
  ENST ID: ENST00000635465
  CDS Start-End: 523-3099
gcgctccgaagtgcgggacagaatagcagcgagcgcggagccgaagctcagccccgacttgttgatctcgcccaggcagccgccgccgccgccgccgcgggagcaggaggaggaggaggtggaggaggtgccgcgcggccgcggtcctgcccccgcgcccccggcgcccgccggcgccccccgcctcggagagcgcgccccggccccgcggcgcctgcagcccgggcgagttgcctgcccggccggggtaggcccggctcagcccggccccgggaccgccgctgcccacgggcgggggcgcccgggcggccgggacgatgcgcggtccctggccccaggaggcggccgccctggggccgtcgggatggaggtgagaagacggccgtgacgcgcgcccgcggggccccctgcacccccagcagcccacagcgctccctgcccccctcccccgcagcagcgggccttgccgtcgagtgacagcggcctgggggggcagggggggcgggggcggccggatcagcgatgccggcgggcatgacgaagcatggctcccgctccaccagctcgctgccgcccgagcccatggagatcgtgcgcagcaaggcgtgctctcggcgggtccgcctcaacgtcggggggctggcgcacgaggtactctggcgtaccctggaccgcctgccccgcacgcggctgggcaagctccgcgactgcaacacgcacgactcgctgctcgaggtgtgcgatgactacagcctcgacgacaacgagtacttctttgaccgccacccgggcgccttcacctccatcctcaacttctaccgcactgggcgactgcacatgatggaggagatgtgcgcgctcagcttcagccaagagctcgactactggggcatcgacgagatctacctggagtcctgctgccaggcccgctaccaccagaagaaagagcagatgaacgaggagctcaagcgtgaggccgagaccctacgggagcgggaaggcgaggagttcgataacacgtgctgcgcagagaagaggaaaaaactctgggacctactggagaagcccaattcctctgtggctgccaagatccttgccataatttccatcatgttcatcgtcctctccaccattgccctgtccctcaacacgctgcctgagctacagagcctcgatgagttcggccagtccacagacaacccccagctggcccacgtggaggccgtgtgcatcgcatggttcaccatggagtacctgctgaggttcctctcctcgcccaagaagtggaagttcttcaagggcccactcaatgccattgacttgttggccattctgccatactatgtcaccattttcctcaccgaatccaacaagagcgtgctgcaattccagaatgtccgccgcgtggtccagatcttccgcatcatgcgaattctccgcatccttaagcttgcacgccactccactggcctccagtctctgggcttcactttgcggaggagctacaatgagttgggcttgctcatcctcttccttgccatgggcattatgatcttctccagccttgtcttctttgctgagaaggatgaggacgacaccaagttcaaaagcatcccagcctctttctggtgggccaccatcaccatgactactgttgggtatggagacatctaccccaagactctcctggggaaaattgttgggggactctgctgcattgcaggagtcctggtgattgctcttcccatccccatcatcgtcaataacttctctgagttctataaggagcagaagagacaggagaaagcaatcaaacggcgagaggctctggagagagccaagaggaatggcagcatcgtatccatgaacatgaaggatgcttttgcccggagcattgagatgatggacattgtggttgagaaaaatggggagaatatgggtaagaaagacaaagtacaagataaccacttgtctcctaacaaatggaaatggacaaagaggacactgtctgaaaccagctcaagtaagtcctttgaaaccaaggaacagggatcccctgaaaaagccagatcgtcttctagtcctcagcacctgaacgttcagcagttggaagacatgtacaataagatggccaagacccaatcccaacccatcctcaataccaaggagtcagcagcacagagcaaaccaaaggaagaacttgaaatggagagtatccccagccccgtagcccctctgcccactcgcacagaaggggtcattgacatgcgaagtatgtcaagcattgatagtttcattagctgtgccacagacttccctgaggccaccagattctcccacagccctttgacatcactccccagcaagactgggggcagcacagccccagaagtgggctggcggggagctctgggtgccagtggtggtaggtttgtggaggccaaccccagccctgatgccagccagcactctagtttcttcatcgagagccccaagagttccatgaaaactaacaaccctttgaagctccgagcacttaaagtcaacttcatggagggtgaccccagtccactcctccccgttctagggatgtaccatgaccctctcaggaaccgggggagtgctgcggctgctgtcgctggactggagtgtgccacgcttttggacaaggctgtgctgagcccagagtcctccatctacaccacagcaagtgctaagacacccccccggtctcctgagaaacacacagcaatagcgttcaactttgaggcgggtgtccaccagtacattgacgcagacacagatgatgagggacagctgctctacagtgtggactccagcccccccaaaagcctccctgggagcaccagtccgaagttcagcacggggacaagatcggagaaaaaccactttgaaagctcccctttacccacctcccctaagttcttaaggcagaactgtatttactccacagaagcattgactggaaaaggccccagtggtcaggaaaagtgcaaacttgagaaccacatctcccctgacgtccgtgtgttgccagggggaggagcccatggaagcacacgagatcagagcatctgaactgccctgccttggaggagagacttttgggtgaggtccaaagaggagagctgttcagcttacctgccacagagcttttctgcatgaactctggaacagaaaggccctgtaaagccctcagagagaagagagactccagagaaggctccctaagaccttgagagccatgacaggtccatcagcatgaagttggccaagccatagggcacagcacctccttgtaacaactctatagccctctttgggagatgacatgagtggaactcacagccaccactaccaccactttagacaggaccgaggccacatactccccattctctcgtggctttccatctcagcctcggagggcaacattgacagtcctcctggcttcagctagagaaggatgctggaacaagcggctggtgttgaaagagtgggttgaccaatttggtattgaatgttgcccagccacccctaggaacacctgtccatcacctcctggatggattccactgttagacagctacagggaatgattggtcatggggaagtctctgcgccataagccacgatcccagcgcaaaacccttactcaaatgtcttcattgacttcggtatttcatagtacctgagattttattttgagataccatcagggtgagttgcaccacttgtactcaattctaattgccccctggcaatctgggaagggttcagaaggtgggcacccagccaacagcatgaactcagagcattgttttagggttggaggaggaacacgctttctttacatcactagtgtagactcaaaagatatgcaagtgtcaaatatgcaaaagaaatagtttattcaaagagactgtgtgttactgaagaacagcataaaaatatgatttttttacttgcaaaaatgaaaggaaaaaaataccacgcattgaaatgcccagttcagactgaataattcctgctgcagcaaggaaagtacctactataatagaaattctgttttgttttctgtggttttcaagtt

SEQ ID NO: 168279 - DNA, 3582 bp, Homo sapiens
  Payload ID: 13109
  Gene Symbol: KCNB2
  Gene Name: potassium channel, voltage gated Shab related subfamily B, member 2
  Uniprot ID: Q92953
  ENST ID: ENST00000523207
  CDS Start-End: 589-3324
cgccgccgctgcgcctcgggcagccccagcgagcggcaactcccgggctggcgcggctcgctttctggctccttccgcgcggcgagctcagccccgctcgatttttcctcttctgttccagccctctcttgtctgggtggctgtggcggcggcagggggatggggaccccgtgtggggaaggggttgaagatcgatgaagattattgttcttttaaaggatgccttagcttcctcccgccgcctttcctctgagccttcctactagagaccgtgaaccagagtcagggatgtaaagacagggggaaagcacgccgggagctccagccagccggggagaccctcctctctgtggaggggagggggatttccagcgacaggtcattggcgaaggggatcgtcgcggggagaggctccccggagggagcggggaatcccacagccctttgtggtgcccgagcccgtgccgcctgctgagcggggtctgtgggagctagctttgtcagtggaaatgcctgccccagagggatattgcttcagttgacctcattttttaaggaccctggctctgcggctttgtccagttcaaaatggcagaaaaggctcccccgggcttaaacaggaagacttcaaggtcgacactttcccttcctccagagcctgtggacattatccggagcaaaacatgctccaggagagttaagatcaatgtggggggcctcaaccacgaagtcctgtggagaacgctggacaggctgcccaggacgcgcctggggaagcttcgagactgcaacacacacgagagcctcctggaagtgtgcgacgactataatctgaacgagaacgagtatttctttgatcggcatccaggagccttcacttccattttaaatttctaccggaccgggaaactccatatgatggaagaaatgtgtgcactttcgtttggccaagaacttgattactgggggattgatgagatctacttggagtcctgctgccaggccagatatcatcaaaaaaaagaacaaatgaacgaagaactgaggcgagaggcagagactatgcgagagcgagaaggagaagagtttgataatacctgctgccctgataaaaggaagaaactgtgggacttgctggagaaacctaactcatcagtggctgcaaagatcctggccatcgtgtctatcctgttcattgtgctttccaccattgctttgtctctcaatacgctgccggagctgcaggaaacggacgaatttggacaactcaatgacaaccgccaattagcacacgtggaggctgtgtgtattgcatggtttaccatggagtaccttttgcgattcttatcctcaccaaataaatggaagttcttcaaaggcccactgaatgtcattgatttgctggccatcttgccgtactatgtcaccatttttctgacggagtccaacaagagcgtgctgcagttccaaaacgtgaggcgcgtggtccagatcttccgaatcatgcgcatcctcaggatcctgaaactcgccaggcattcgacaggcctgcagtctctgggtttcacccttaggcggagttacaatgaattgggcttgttgatattgtttctggccatggggataatgatattttccagcctggtattttttgctgagaaggatgaagatgctaccaagttcaccagtatccctgcatcattttggtgggccaccatcaccatgaccactgttggctatggtgacatttaccctaaaacattactagggaaaattgtgggaggtctgtgctgtattgctggggttctggttattgcccttcctatcccaattattgtgaacaatttttctgagttttacaaggagcagaaacgccaagagaaagcaattaaaaggagggaggctcttgagcgggccaaaaggaacggaagcatcgtttctatgaacttaaaagatgccttcgctcgaagtatggaactgatagatgtggctgttgagaaggccggagagtccgccaacacaaaggactccgccgacgataatcacctgtcgccaagccggtggaagtgggccaggaaggctctgtcggaaacaagctccaacaagtctttcgagaataagtaccaggaggttagccaaaaagactcccacgagcagctgaacaacacgtcttcctccagcccacagcatctgagtgcccagaaactggagatgctatacaatgaaatcaccaagacacagcctcattctcacccaaacccagactgccaagaaaagcctgagaggccatctgcatatgaagaagagattgaaatggaagaagtggtgtgtccacaggagcagctggccgtggcacagaccgaggtcattgtggacatgaagagcacctccagcatcgacagcttcaccagctgtgccaccgacttcacagagacagagagatcgccgctgccgccgccctccgcctctcacttgcagatgaagttcccaaccgacctcccagggacagaagagcaccaaagagctaggggccccccgtttctaactctatccagagagaaaggacctgctgccagggatggcacgctggagtatgccccagttgacataactgtgaacctcgatgccagtggctcccagtgtgggctacatagtcctttgcagtctgacaatgccaccgacagtcctaagagctctctaaaaggcagcaacccactaaagtccagatccctcaaagtgaactttaaggaaaatagaggcagtgcaccacagaccccgcccagcacagccaggccactgccagtcaccacagctgacttttcgctcactaccccgcagcacatcagtaccatcctcttagaagaaaccccctcccagggagacagacccttgctgggcactgaggtttcagcgccttgtcagggaccttccaaagggctgtcccccaggtttcccaagcagaaactgttccctttctcttcaagagagaggaggagcttcactgaaatagatactggtgacgacgaagacttcttagagctcccaggggcaagggaggagaagcaggtggactccagcccaaattgctttgcagataagcctagtgatgggagagaccctttaagagaagagggcagtgtgggctcttcctccccgcaggacacaggtcacaactgtaggcaagacatttaccatgctgtgagtgaagtcaaaaaggacagtagtcaagaagggtgcaagatggaaaatcacttgtttgccccagaaattcattccaacccaggagacacaggttattgtcccacacgtgaaaccagcatgtgactagttacaaaagcaataaattgaaacaaaacaaaacaaaacaaaacttgtttcttaaaaatgcggttaataatgcctgtgaactaaaaaaatgggaagccctccccaaaaaaagtgcataaaatgttatttttgcatggcatgaacagtttagcttaagtactgtttaaataatgagtcaagactgcattttgtaacaaaccaacaaaaatgactgaagaacagtgaacaaataaaaagagctctattaggaaccaa

SEQ ID NO: 168280 - DNA, 7976 bp, Homo sapiens
  Payload ID: 13110
  Gene Symbol: KCNA1
  Gene Name: potassium channel, voltage gated shaker related subfamily A, member 1
  Uniprot ID: Q09470
  ENST ID: ENST00000382545
  CDS Start-End: 1108-2595
agaaatggaccgagcggacccgccgccgcacgcaccctgctccactccaagctcctaagggctcctggcgcgccgcgtagccttggcgaggtccgcgctggggtgcggagagcgaagggaactggagagccatgtagatccaggctctcgcccgcccgcctccttcgggatcgaatcaagggctcccatagtgttaggagggggcgagagtgctgtttatcgtcatttgcctcggagcttcgagagagggtggtattttgcttttccgccccgcatcctccggaactccctgcaccggagagaggacggcgtctccaggttgctggcaaccggtgagaatgggggtagggaaggaacattttcgccgtagctgctccgtaaagcgattgtccaactgagaggggcgtcggacgagtggaccagggcggcgagtttgcccggcgcgtctcggatgctgctgcggcggccgccgcggctcccgccagggcactgcaaagacgacctgccgcattcccactcgggctctccgctgactcagcaccgcccctgcgccaagccagccggccagcgtgcatcgatcgccctggtgggagcttagaaggcggcaggcgaagaggggtaggaggggggagagccgaggagaagcagagagggtggcaggcgtggggatctgccgagccggcactgcaccgggtcctaggaaggctctcggaggggaggggaggccagggcgacccccgaagcaatggcccagtccgctagaacggcactgcgttaaggcacctgggatcaggaagaaatatctaaacaacaacaacagaaaaccaacaaacccccaaacccaaacccaaccctctgcaaaaagctgcacccggcccgcaggcgagggggattccaaactgagtgaaaggcagggtggaggggaaggcagcgagaggcaaagtcgcagatctcccgacctgctcgtgttgaagcacctccccctgggcgtgagggagacgcgcgctccggtgggggggccgcttgggtcccccccacccctggtccctggctgcttcccaccccgggctctctcctggcctcccacccccgcgcccggcttccaccatgacggtgatgtctggggagaacgtggacgaggcttcggccgccccgggccacccccaggatggcagctacccccggcaggccgaccacgacgaccacgagtgctgcgagcgcgtggtgatcaacatctccgggctgcgcttcgagacgcagctcaagaccctggcgcagttccccaacacgctgctgggcaaccctaagaaacgcatgcgctacttcgaccccctgaggaacgagtacttcttcgaccgcaaccggcccagcttcgacgccatcctctactactaccagtccggcggccgcctgcggaggccggtcaacgtgcccctggacatgttctccgaggagatcaagttttacgagttgggcgaggaggccatggagaagttccgggaggacgagggcttcatcaaggaggaggagcgccctctgcccgagaaggagtaccagcgccaggtgtggctgctcttcgagtaccccgagagctcggggcccgccagggtcatcgccatcgtctccgtcatggtcatcctcatctccatcgtcatcttttgcctggagacgctccccgagctgaaggatgacaaggacttcacgggcaccgtccaccgcatcgacaacaccacggtcatctacaattccaacatcttcacagaccccttcttcatcgtggaaacgctgtgtatcatctggttctccttcgagctggtggtgcgcttcttcgcctgccccagcaagacggacttcttcaaaaacatcatgaacttcatagacattgtggccatcattccttatttcatcacgctgggcaccgagatagctgagcaggaaggaaaccagaagggcgagcaggccacctccctggccatcctcagggtcatccgcttggtaagggtttttagaatcttcaagctctcccgccactctaagggcctccagatcctgggccagaccctcaaagctagtatgagagagctagggctgctcatctttttcctcttcatcggggtcatcctgttttctagtgcagtgtactttgccgaggcggaagaagctgagtcgcacttctccagtatccccgatgctttctggtgggcggtggtgtccatgaccactgtaggatacggtgacatgtaccctgtgacaattggaggcaagatcgtgggctccttgtgtgccatcgctggtgtgctaacaattgccctgcccgtacctgtcattgtgtccaatttcaactatttctaccaccgagaaactgagggggaagagcaggctcagttgctccacgtcagttcccctaacttagcctctgacagtgacctcagtcgccgcagttcctctactatgagcaagtctgagtacatggagatcgaagaggatatgaataatagcatagcccattatagacaggtcaatatcagaactgccaattgcaccactgctaaccaaaactgcgttaataagagcaagctactgaccgatgtttaaaaaacaaaggcaagcaaacaaaaaagccccacttagcagctcaaaagacttaaaaaacaaaacagaaaacctagtgactcatgtcacgctttgtagatactttactaagtagacttggaatgctctatttaactgtcaatgcgttgttgcattgaggattttgggggtggtgaaccagaagctttcaagatccatgacaaaataaactattttccttttattaaaaaatgggaaaagagagagtattttctaaaactggcttaaaaagattcagtccacgaactagtctaggtaaaataataatcatatgcttccccaaactgaaacatttttaatgctttggtttctttaacttttttaaaaactcagaacaagatgatcacttagaaatatgaaattgaaattcgcatgggactccagtaaaacatctttgcaaactgcgtagcacattgaagacagtgcatcagatgtattatatgtaacatgatagaccagccaaaatggacaatgaatagatatttttatttcgatcaactgaactgcatattacaaggtgaaaaaagaaaactccgattacttaagactggttcacaaagcaccttataaattggatactggtcctgatctgtagggatttccccctgggcccattctctttctaatccagattattctctaagaaaaagttaactgaattaaattaattgattcttctgcagtgccgctaaatggtctcaactgcagatgagccaaatacaggtcttttctcaccaggcctgcactccgacccctggctttcagaactggatgtaaaaccttagcctccttattgcaagagagcacaaatgaagttaaatgtaagcatgtttgaatctgatacaatttattttataatcgcatgctgagaagttaacccagacaataggggataagcttaagttgaaatcgattcttctaaaaatagatcctttttcatttgcattcaccaaaagtgcactcctccatttattaactattttattagtaaataaagtactgtatttaagtgcatatgttagtcagatgggaacaataactttttggagctcaaagcatgttctcttattcagcattatggcctatttgactaagatgtaccttgaattaattaatgcatgatttcagtaataaaaattttaaaagtaataaaaattacaagtctgtggggtgaaaggcccaatagaaattatggggggtgggggtgggggcactcagtcaattttcctgcctttgctcagggaaataccaggtttttgtgcaggtataggcggagagaggaccaatatgcccatcccttaaagggaagccatgtgaaaaactcaataagtcatcaaagtacatatagcaacacctaagaacaagtattctttctagctgaagacaaacacaagcaacacaaacaagcaaacaaacaaacaaacaaaaaggtgcaatactgcatgttttttggtgcattcttaggatgtaaatgaaaatgtttctctattatatgcatccgaagcagagctgatttttttttctttgcagtcattctttgaagtctgtagagacttcagccctccccttgaggctccctgaagaaactaaaccaattgatttaatagttgcttagtgcctttatcctgtacccacagtgaactgtagaaagtgcctccttaacacagctgagaagttaggtagcaaaagtggggaagggttggggcacagaccttttgctttttctttttccattctcgctctctcatttcaccactgtgagaagaccacaccaccctaaaccctggagaggagagacccaggagggtgctgtctctctggccatctactagcattggtccctttgacagcctgacgctggatgtgaactgagacccatctttgaactggacatgaactgtgaacttgttttttcctctctccaccaaagccaagataaactttttgggaatttgtttcctatcgagggccactttggacacacaaggcttcctcaggtccagtgtagtgctcctggcacctttccttatttttttctctgtcggtaacagcactttgcaaatctctctgacggtccagtcttttcaggcattgttgtggatgtgggaacactcagttcataataacctttcctaggccttccctcctggtctacccctttcagatatttcctgatgcccctatgatcttcccacctggcagtcacttcacaggttgaacatctaacttctgctgcccccccgttacccagcccagagaatggtggggaccctgttcctggctgaaagagagccacggaacacaggcctctggagctcggcagctgcccaccggtggagaggtactcacagcctttcaaaggaccctgaggtggggaatcttcattctgcacttagcatgtggctgcctgttacctgacattctggcccagcttcttctgaaaatctgtcctgcttctcccacccctttcccccatcctgtcctagaactagcagtgaggcaatcaccctagaaactcgagttacacccattctggctaactcgattaaaagaaagaacatggatatcttattttcctatgtgacttttgtgaatctgtgagatgaacacaacacacatcgtggaagatgaggggccaagaactgcgcagcatccgactacagggcattaaaccctcccatgtgatgtctccttctcgtctgaaccttaactcattctggcgattcctttcctacttgcttaaaaatccccaattaggaaaaaaatgccaacctcctcccaggcttggggttatcttgatctttcatttcaacgttgaggtctagtgcacacagaacttgaaacaccgcactctgtcaacagcaataatccactcagtactgtgggatggatgggttaatggatgagaaaacggcaccaagactgactttgggtatttggtatatttaccgtggttacactctggactggttgattcttctgcatgtgatatagaaaaaagtgctgcatgcggtgaacctgtcagtctgggactgggggtgagttgttgttatgagtttggggtggtgtgaggaaagtgaatgctgcttagctcatctgtagctcattgcaatgaattcagtaagaatggagtacagggattatctgtgtagcataggcatgcaatgtttgaccaagctcttaccctcgcactgtaatgtgttgaaatgtctttgtagacctgaaggtgcacttaacaaaactgcctattaagggatgactattttttggtttacttattcatatttattttagcagcctttttaccttttcttccccttcctaggcatggagctgtaacagctcatgtcctgactatgtgttttctccagaaggagaagacttctgatgtgctgatagctataattcctctcttccagtctattggggccctagttcaatagggtggcaatagaagagttggtcacaccagggctgttagccatcccagaatctctgaagtggttaactcacctgaagtgatctgaatcagagagaccaaagacattcatttcctctgtcctcagatttctagaagacaaattctagccaggaaaactttctgtttttgcatctcccttttcccatttgtgcccaactccccttgcactccctggagacttgagttctgattttcagttatatcagctcattgggagtgtgttcgtgggtgagccttgcagaatcagataaaccaatagcaagtccttctccaggattctggccagtgggcagtcatttccctgaaatgaattgtagggcaggtttagattccactatggtggacgtgaagcacaggtggtgtcacaatcttgatttgcttgagaattaaaaaaatacatgtaaatggtaaatgaggaatacatttttttaaagtagaaatttggtttagcctataaaaggccttcttcacattgtgtatagttacacgtttttcaaattaggtaccatctaaaagtcaataaaaatagtttcctagccctctcatttaatataggagacctcaaaacacatgctttttaacaattttacattttaattcttagtttggtagattggattgaaagaaaggagaaagaacattagcagaaggcactttcccattttcttccaggaatgacttattcctggggtggtgagaattggtgggtggtaaccatccatagtataaaattgttagaaagaatataaactgccaaacaagcatgttatcttcaggcttttccaagcaagaatgaagtcttttgatgtttatgttcattttaagaagacaaacaaactaaaattttaagaccagacacaacccaagttgaattgtgatctcaggaggtgaactctcattcaccatgtggcatattactacctgtatttatatcatggaatttcagggtatatgtgaacatgtctagtatgactcaggtaaacctttaaagaatgtatgttacttaccatttttgtaaagaagcaaacaggagctgaattgttaaccaaaactgttccattaccttgggtcactgtgcaaactaattcagggtacagatataaagtttagaagccttgggattaaatgccagcctctttgctcaggcaaaatgaccctgggctttcttgggaagtccagcatgtatgtaaggggtgaggccctgctgacctcagggcttttcgctttaaggagattaaccctagtcacagtgattttcatttaggagctaactaggagtttactctttatgacgtgaaacttcaaagagtatagaaaacttttgtaccacaatcaaagaagaagaaatggtgtatggaaagaaaacaaaacaaaacaagaaatctcttgtaaaatattccaggtcaaagttgtctcctctccaaaccttgcagaagcacctttcttctcttcagcgcactgttttgggactgtttatgcagcagatgtaagtagacaacatggactccatgtgacatgcctctaatagtaaagataaagtattactgaggttaaaaataaaaattgagtagtattaatttaaagtgcaccatcaggacaacaaaccatttaagctgaaaaaacgctattttatttcttgagtttgccagttgcttccaccttgagttaaggacgtgtctcatcttcacctactgcgcattctcccttctctaactgtgtaatatgtcaggtcaaggacattgaatgttatgaattgagaacctaattgatgcgcatagttttcatctatgcaattttacttgcttctgtcactttacgatctgttcatatttggcatcaattaaagatactttttaaggatctt

SEQ ID NO: 168281 - DNA, 1588 bp, Homo sapiens
  Payload ID: 13111
  Gene Symbol: KCNA10
  Gene Name: potassium channel, voltage gated shaker related subfamily A, member 10
  Uniprot ID: Q16322
  ENST ID: ENST00000369771
  CDS Start-End: 52-1587
gcaggcagtgaaggctgaggatcttcatgcttcttccctggctcccctagaatggatgtgtgtggctggaaagaaatggaggttgcgctggtcaattttgataattcagatgaaatccaagaagagccaggctatgccacagacttcgactcaaccagcccaaaaggccggcctgggggcagctccttctccaacgggaagatcctcatcagcgaaagcaccaaccatgagacggccttctccaagcttccgggagactatgctgaccccccagggcctgagccagtggtcctaaatgaaggaaaccagcgggtgatcatcaacattgctgggctgagatttgagacccagctcagaacccttagtcagttcccagagactctcctgggagaccgggaaaaaaggatgcagttctttgactccatgagaaatgagtatttctttgatcggaaccggcccagttttgatggaatcctatattattaccaatctggtgggaaaattcggcgcccagccaatgttcccattgatatctttgctgatgaaatctccttctatgagctgggtagtgaggccatggaccagttccgggaggatgaaggcttcatcaaagaccctgaaacactgctacccaccaatgacatccaccgtcagttctggctcctctttgagtaccctgaaagttccagcgctgcccgtgctgtggccgtggtctcggtgttggttgtggtcatctccatcaccatcttctgcctggagacactgccagagttccgggaggatagggagctaaaggtggtcagagaccccaatctcaacatgagcaagacagtcctctcccagaccatgttcaccgaccctttcttcatggtggagtctacctgcatcgtgtggttcaccttcgagctggtgctccggttcgtggtctgccccagcaagactgacttcttcaggaacatcatgaacatcattgacatcatctccattatcccctactttgcaactctcatcacagagctagtccaggagacagagccgagtgcccaacagaacatgtccctggccatcctgaggatcatccgcctggtgagggtcttccgcatcttcaagctctcgcgccactccaaggggctgcagatcctcgggcaaacactgaaggcgtccatgcgggagttggggttgctcatcttctttctcttcattggagtcatcctcttctccagtgcagtctactttgctgaggtggatgagccagagtcccatttctctagcattcctgatggcttctggtgggcagtggtcaccatgacaactgtaggctatggggacatgtgcccgaccaccccaggggggaagattgtgggcactctgtgtgccattgcaggggtcctcaccattgccctccctgtgcctgtcattgtctccaacttcaattacttctaccaccgggagactgagaatgaagaaaagcagaacatcccaggagaaattgaaagaatcctcaacagtgtaggctcaagaatgggcagcacagactctcttaataagaccaatggtggctgttccacagagaagtctaggaaatgat

SEQ ID NO: 168282 - DNA, 2150 bp, Homo sapiens
  Payload ID: 13112
  Gene Symbol: KCNA2
  Gene Name: potassium channel, voltage gated shaker related subfamily A, member 2
  Uniprot ID: P16389
  ENST ID: ENST00000316361
  CDS Start-End: 622-2121
gtgctccctgccgaggagatgtgagggattttctcttgggggagaaatcagtggtcgagcgcctgcccagctcaaatgccacccggctcagagggaggcctgcggcccagggatcccggagggagagcaacgtcacacctcctgaggacagccaggactccagcttttgctgagctttgcatcttgcctccttccttcaaaaggctccaggcccatgctcggctgtcttcaagtcccgcatgcccctggccaggcacctcaccgcccctccagcccagcccaatcctagagctcacctccaggacccagagtctgcccttctgcccagaatgactcaccattatttctagctcgagtgagaagacgtgatgaggagttgggctgcctgttggtgcatctcagattcctgcagcatctgatcagctctgcaaggaagagagcttcacgtctctggtcagccaagcgaggctgtctctccagctctcagagagctctcggggctctcctgcaggagaccaggccaatgctcctgtgcttcctggggccagtagcagcaccctgagctccctgccaccaggcagctgaaaggcatagcgtgaggtgcttctctcagtcccaattatgacagtggccaccggagacccagcagacgaggctgctgccctccctgggcacccacaggacacctatgacccagaggcagaccacgagtgctgtgagagggtggtgatcaacatctcagggctgcggtttgagacccagctaaagaccttagcccagtttccagagaccctcttaggggacccaaagaaacgaatgaggtactttgaccccctccgaaatgagtactttttcgatcggaaccgccctagctttgatgccattttgtactactaccagtcagggggccgattgaggcgacctgtgaatgtgcccttagatatattctctgaagaaattcggttttatgagctgggagaagaagcgatggagatgtttcgggaagatgaaggctacatcaaggaggaagagcgtcctctgcctgaaaatgagtttcagagacaagtgtggcttctctttgaatacccagagagctcagggcctgccaggattatagctattgtgtctgtcatggtgattctgatctcaattgtcagcttctgtctggaaacattgcccatcttccgggatgagaatgaagacatgcatggtagtggggtgaccttccacacctattccaacagcaccatcgggtaccagcagtccacttccttcacagaccctttcttcattgtagagacactctgcatcatctggttctcctttgaattcttggtgaggttctttgcctgtcccagcaaagccggcttcttcaccaacatcatgaacatcattgacattgtggccatcatcccctacttcatcaccctggggacagagttggctgagaagccagaggacgctcagcaaggccagcaggccatgtcactggccatcctccgtgtcatccggttggtaagagtctttaggattttcaagttgtccagacactccaaaggtctccagattctaggtcagaccctcaaagccagcatgagagaattgggcctcctgatattctttctcttcataggggtcatccttttctctagtgctgtgtattttgcagaggccgatgagcgagagtcccagttccccagcatcccagatgccttctggtgggcagtcgtctccatgacaactgtaggctatggagacatggttccgactaccattgggggaaagatagtgggttccctatgtgcgattgcaggtgtgttaactattgccttaccggtccctgtcattgtgtccaatttcaactacttctaccaccgggagacagagggagaggaacaggcccaatacttgcaagtgacaagctgtccaaagatcccatcctcccctgacctaaagaaaagtagaagtgcctctaccattagtaagtctgattacatggagatccaggagggtgtaaataacagtaatgaggactttagagaggaaaacttgaaaacagccaactgtaccttggctaacacaaactatgtgaatattaccaaaatgttaactgatgtctgattgaaacctattaccgtactcacagctca

SEQ ID NO: 168283 - DNA, 1959 bp, Homo sapiens
  Payload ID: 13112
  Gene Symbol: KCNA2
  Gene Name: potassium channel, voltage gated shaker related subfamily A, member 2
  Uniprot ID: P16389
  ENST ID: ENST00000369770
  CDS Start-End: 576-1646
ggcacatagaagagtgagccatcatctggtttccagcgccaagacttctgcaggagagcctccgctgggctttcaagttggcaacgtcacacctcctgaggacagccaggactccagcttttgctgagctttgcatcttgcctccttccttcaaaaggctccaggcccatgctcggctgtcttcaagtcccgcatgcccctggccaggcacctcaccgcccctccagcccagcccaatcctagagctcacctccaggacccagagtctgcccttctgcccagaatgactcaccattatttctagctcgagtgagaagacgtgatgaggagttgggctgcctgttggtgcatctcagattcctgcagcatctgatcagctctgcaaggaagagagcttcacgtctctggtcagccaagcgaggctgtctctccagctctcagagagctctcggggctctcctgcaggagaccaggccaatgctcctgtgcttcctggggccagtagcagcaccctgagctccctgccaccaggcagctgaaaggcatagcgtgaggtgcttctctcagtcccaattatgacagtggccaccggagacccagcagacgaggctgctgccctccctgggcacccacaggacacctatgacccagaggcagaccacgagtgctgtgagagggtggtgatcaacatctcagggctgcggtttgagacccagctaaagaccttagcccagtttccagagaccctcttaggggacccaaagaaacgaatgaggtactttgaccccctccgaaatgagtactttttcgatcggaaccgccctagctttgatgccattttgtactactaccagtcagggggccgattgaggcgacctgtgaatgtgcccttagatatattctctgaagaaattcggttttatgagctgggagaagaagcgatggagatgtttcgggaagatgaaggctacatcaaggaggaagagcgtcctctgcctgaaaatgagtttcagagacaagtgtggcttctctttgaatacccagagagctcagggcctgccaggattatagctattgtgtctgtcatggtgattctgatctcaattgtcagcttctgtctggaaacattgcccatcttccgggatgagaatgaagacatgcatggtagtggggtgaccttccacacctattccaacagcaccatcgggtaccagcagtccacttccttcacagaccctttcttcattgtagagacactctgcatcatctggttctcctttgaattcttggtgaggttctttgcctgtcccagcaaagccggcttcttcaccaacatcatgaacatcattgacattgtggccatcatcccctacttcatcaccctggggacagagttggctgagaagccagaggacgctcagcaaggccagcaggccatgtcactggccatcctccgtgtcatccggttggaacgcagacctctgcaaagccagaagagtaagcggggaaggcagcatctgaacacctcacatgactgcaccttaggaattaacctagtcgcgggcatgactgtacagtggaccagggcatctggtcctgatgacaggcagacaccagctgtaactacattgcacaggatgtattgatattatcattcttgctgacatattctggaagctttcagccccaccaacactgccccacccaggacttctgcagctgagagttcctgtgtcagtagggtctgatatttgtacataggttatacatatatgtgtacatatgtgcctcaatgaacattgcctgtccacctgatcatgggtgtacatagacttcatagagctccacagtcttttgtaaatattgacacaagtaaataagtatataaatatatattactggggatttattttaacatcattctgtgtgatatgaaaaaaataaaatttttgacagaca

SEQ ID NO: 168284 - DNA, 2530 bp, Homo sapiens
  Payload ID: 13112
  Gene Symbol: KCNA2
  Gene Name: potassium channel, voltage gated shaker related subfamily A, member 2
  Uniprot ID: P16389
  ENST ID: ENST00000485317
  CDS Start-End: 746-2245
aaggggtcgcgctggcgggagaaagggcaagaaaggggtctgcagatcctgtctggaggcaccacaataatagcaacacgtctctcccggggctggatcccgctgtgggcctggggtagctgctattgattatctcctccttgcctacttcattacgttggcaggagcctctcaccagtgcccctcaacttctgccctcccccatctccccggcccggcagcacccagctgagctctcctggaggttctggcaacgtcacacctcctgaggacagccaggactccagcttttgctgagctttgcatcttgcctccttccttcaaaaggctccaggcccatgctcggctgtcttcaagtcccgcatgcccctggccaggcacctcaccgcccctccagcccagcccaatcctagagctcacctccaggacccagagtctgcccttctgcccagaatgactcaccattatttctagctcgagtgagaagacgtgatgaggagttgggctgcctgttggtgcatctcagattcctgcagcatctgatcagctctgcaaggaagagagcttcacgtctctggtcagccaagcgaggctgtctctccagctctcagagagctctcggggctctcctgcaggagaccaggccaatgctcctgtgcttcctggggccagtagcagcaccctgagctccctgccaccaggcagctgaaaggcatagcgtgaggtgcttctctcagtcccaattatgacagtggccaccggagacccagcagacgaggctgctgccctccctgggcacccacaggacacctatgacccagaggcagaccacgagtgctgtgagagggtggtgatcaacatctcagggctgcggtttgagacccagctaaagaccttagcccagtttccagagaccctcttaggggacccaaagaaacgaatgaggtactttgaccccctccgaaatgagtactttttcgatcggaaccgccctagctttgatgccattttgtactactaccagtcagggggccgattgaggcgacctgtgaatgtgcccttagatatattctctgaagaaattcggttttatgagctgggagaagaagcgatggagatgtttcgggaagatgaaggctacatcaaggaggaagagcgtcctctgcctgaaaatgagtttcagagacaagtgtggcttctctttgaatacccagagagctcagggcctgccaggattatagctattgtgtctgtcatggtgattctgatctcaattgtcagcttctgtctggaaacattgcccatcttccgggatgagaatgaagacatgcatggtagtggggtgaccttccacacctattccaacagcaccatcgggtaccagcagtccacttccttcacagaccctttcttcattgtagagacactctgcatcatctggttctcctttgaattcttggtgaggttctttgcctgtcccagcaaagccggcttcttcaccaacatcatgaacatcattgacattgtggccatcatcccctacttcatcaccctggggacagagttggctgagaagccagaggacgctcagcaaggccagcaggccatgtcactggccatcctccgtgtcatccggttggtaagagtctttaggattttcaagttgtccagacactccaaaggtctccagattctaggtcagaccctcaaagccagcatgagagaattgggcctcctgatattctttctcttcataggggtcatccttttctctagtgctgtgtattttgcagaggccgatgagcgagagtcccagttccccagcatcccagatgccttctggtgggcagtcgtctccatgacaactgtaggctatggagacatggttccgactaccattgggggaaagatagtgggttccctatgtgcgattgcaggtgtgttaactattgccttaccggtccctgtcattgtgtccaatttcaactacttctaccaccgggagacagagggagaggaacaggcccaatacttgcaagtgacaagctgtccaaagatcccatcctcccctgacctaaagaaaagtagaagtgcctctaccattagtaagtctgattacatggagatccaggagggtgtaaataacagtaatgaggactttagagaggaaaacttgaaaacagccaactgtaccttggctaacacaaactatgtgaatattaccaaaatgttaactgatgtctgattgaaacctattaccgtactcacagctcaatggaactaatgcagatgttgcataatagcctgcattgtagtcagtgtgttctacagtgtgtatctggttctgcatggaaagcaatagttgtgcaagtgacttttgatcttttgacttttgatttagaacacagaatatctatcatggctttcatgcacatcctcatcaccggcttatgaacttccaaagacgggagtcacctatcaagctaggatttcagatagacacgttgaggccacctcatatcccatacac

SEQ ID NO: 168285 - DNA, 11877 bp, Homo sapiens
  Payload ID: 13112
  Gene Symbol: KCNA2
  Gene Name: potassium channel, voltage gated shaker related subfamily A, member 2
  Uniprot ID: P16389
  ENST ID: ENST00000633222
  CDS Start-End: 675-2174
ggcgctgcgtggcgcggtgcggctgcgggcggcggccgggagctccgtacgcgccgcccgcgggactgcagagccggctcccggctggccgcccgcaccccgccgccgcccgctgccggggttctgccggcgctggccgtaacctaggaacatggaggccccggtgcccatccggaagggcaacgtcacacctcctgaggacagccaggactccagcttttgctgagctttgcatcttgcctccttccttcaaaaggctccaggcccatgctcggctgtcttcaagtcccgcatgcccctggccaggcacctcaccgcccctccagcccagcccaatcctagagctcacctccaggacccagagtctgcccttctgcccagaatgactcaccattatttctagctcgagtgagaagacgtgatgaggagttgggctgcctgttggtgcatctcagattcctgcagcatctgatcagctctgcaaggaagagagcttcacgtctctggtcagccaagcgaggctgtctctccagctctcagagagctctcggggctctcctgcaggagaccaggccaatgctcctgtgcttcctggggccagtagcagcaccctgagctccctgccaccaggcagctgaaaggcatagcgtgaggtgcttctctcagtcccaattatgacagtggccaccggagacccagcagacgaggctgctgccctccctgggcacccacaggacacctatgacccagaggcagaccacgagtgctgtgagagggtggtgatcaacatctcagggctgcggtttgagacccagctaaagaccttagcccagtttccagagaccctcttaggggacccaaagaaacgaatgaggtactttgaccccctccgaaatgagtactttttcgatcggaaccgccctagctttgatgccattttgtactactaccagtcagggggccgattgaggcgacctgtgaatgtgcccttagatatattctctgaagaaattcggttttatgagctgggagaagaagcgatggagatgtttcgggaagatgaaggctacatcaaggaggaagagcgtcctctgcctgaaaatgagtttcagagacaagtgtggcttctctttgaatacccagagagctcagggcctgccaggattatagctattgtgtctgtcatggtgattctgatctcaattgtcagcttctgtctggaaacattgcccatcttccgggatgagaatgaagacatgcatggtagtggggtgaccttccacacctattccaacagcaccatcgggtaccagcagtccacttccttcacagaccctttcttcattgtagagacactctgcatcatctggttctcctttgaattcttggtgaggttctttgcctgtcccagcaaagccggcttcttcaccaacatcatgaacatcattgacattgtggccatcatcccctacttcatcaccctggggacagagttggctgagaagccagaggacgctcagcaaggccagcaggccatgtcactggccatcctccgtgtcatccggttggtaagagtctttaggattttcaagttgtccagacactccaaaggtctccagattctaggtcagaccctcaaagccagcatgagagaattgggcctcctgatattctttctcttcataggggtcatccttttctctagtgctgtgtattttgcagaggccgatgagcgagagtcccagttccccagcatcccagatgccttctggtgggcagtcgtctccatgacaactgtaggctatggagacatggttccgactaccattgggggaaagatagtgggttccctatgtgcgattgcaggtgtgttaactattgccttaccggtccctgtcattgtgtccaatttcaactacttctaccaccgggagacagagggagaggaacaggcccaatacttgcaagtgacaagctgtccaaagatcccatcctcccctgacctaaagaaaagtagaagtgcctctaccattagtaagtctgattacatggagatccaggagggtgtaaataacagtaatgaggactttagagaggaaaacttgaaaacagccaactgtaccttggctaacacaaactatgtgaatattaccaaaatgttaactgatgtctgattgaaacctattaccgtactcacagctcaatggaactaatgcagatgttgcataatagcctgcattgtagtcagtgtgttctacagtgtgtatctggttctgcatggaaagcaatagttgtgcaagtgacttttgatcttttgacttttgatttagaacacagaatatctatcatggctttcatgcacatcctcatcaccggcttatgaacttccaaagacgggagtcacctatcaagctaggatttcagatagacacgttgaggccacctcatatcccatacacagtgcaccatatcagtgccatcattccttcctaatgaaatgcacacaacatccaagagatgcactcccctccccaccatcccaccaccttatttgagcccacctgccctttcacagaggaacacaatcatggcttagctttaaatagctggtgtttgttcaaaaggtcatactcatttttgcattgaaaagaacacacagtcctgtgtgttggaattactttctgtgtcacaggctggagtttgtgaattgcagttgccaagtagatgctctggaggcttgtgtttcataacggaaaatgctgcattctgctttttctctgcagtgtcgatgtgagggaagcccgggggagggacagttagtatgaccgaatatgagttgtcaagtttcacatttgttcccttaggcctatggggagaagctaacaaaccaacagacctctaagcctctgatttcaccatttttgcaggctccagggtcacaaaaacatgtctggtttcttactggagtttgcagacatctgctttcccactgatgtggcccagctacactgacactgcagtgaaatttaccagtgatgcaatagagctgcatgggtgtttgttgcatgaatctcaatatttaaaacacaggagataacctattttcctagtagcctacacagtgttaatatttagagtattaataggcttggaatggtcttgaactaggggtttttttcccatcagaaggcaaaaatccctccatcaggggaaaaaaaatagactatttggaatggaactaaaacttctggccccccagcctacctatccctgttcttctaaacaggaacgcagacctctgcaaagccagaagagtaagcggggaaggcagcatctgaacacctcacatgactgcaccttaggaattaacctagtcgcgggcatgactgtacagtggaccagggcatctggtcctgatgacaggcaggtctgtggatccagtgtatataaatatatatcgagtatctctctttcacgcgttcctctacctagctagtgatagaaaagaaattgcatttgaacattgtacaagcttatgcaatatttttgacaaagggcaatttatgcatgtgtttgactatgtgcactagggtgtatatatatacatacatatgtgtgtatatgtatacacacacacacacacacacacacacacacacacatatatatatatatatattcattttctggagttcaggttcaggagcaaatccactgcttggtgggttggctgtctaagaggcctaatgggttaatttgtctcattggtaaccccactgggcctgggtttgctgccattgcctcagacactccggtatccatggattcctagacgttagaattgtctttctgccctccatgtgctgcagcttcagttcccatggctgaagcttgtcttactgagtgcacaagggccctgtggccctcacagttccagctgtcctgggccagacccaccccgggcctcctctctacagttcatcctgttcatcatctccattttcacctcttcccttgccacttggatcttattatcatttggctctgcatccgtcactttcacaaacctttcgctaaagagccagaatggatcccctgctttgaaaccaaggacaccaaggagtaggactccctgggaccaaattccactgatctggacctaaagggagcctcctctatgtggaaatgtctgaagtccgggactaagtgatggagtccctagatgatccaaaggcatcattttgatctccagacccaaactctctccccattaaactggcaaccagagctgctttttaaaaagaaccaaaggatgggtaaagaatcatttcccaccccccagaagaagtagagtgcaaatgagcactgcacagcctaaaggtagacagtaggttgaccctgaaatggcttcaggtagggggcttttaactcaccagactgggcgtctttgccttttgacggagtagcttaattttcccaaacagtgaattgcaggggtcgggctatgcaggggtggctccagcccaggcctcactgctgcctagttagcacctacagttgtcttggggcatggggcaccagctcagggtgctaggcccagggtgctcattagtgcctggtcacccacatccccaggtatctgcagggcatcccatgcccagcacaaagcctctgtgcttctcttcctctccttcatgggaggtggtgctgaatttccaaggcatggggtgggagggacacagatctttggaaaatagaaggtaaagcaacccatatctgaggcctaggtcagggatagatatcttatcacagtgtccttggcccaggactctaaaatgttcacatacagtcatgcacattcaccacaaaataggtacactgttgtcacacacaaacataaaacatgtaacgtgcaaaatacagacagaccaggttaacataaaagcaaacacagaagatatatggttataattgtatataaaatgcacactctgcacagatatagaatttacacagaacatacacaaaagacaaacatacaccacatacaaatatacaacctgaaactcagatgcaaaatacataaaaaactacatggacaaaatgcatatgcatataagatacacaaaggctactttaccattgtttctacacataaaatacacacaaactcagtatatacacacgatgcattaacttataataggcatacaagatacatagcacacatgcccaaaaatatcgcacaatacacatgaaatgcagacatatactcagacccattgccctgcccccagagctatgaattaacaggcacaaacaaaagatcagatgtaatcacctttgcctggcctgtgtctatatcccccaggatctttcaaggaatctctttctctattcttttctctcactaccagatttcactcctgagaagtaactcctaggtttcaagcaggaggatgggccaccacatcaagcagatatctgactaagaccaggaattgcatggggtctctaccaattcaccttcctcccaccagaaacctgggtgcagggtgtgaaagtacctgggacagctggtagcctaatataggcctccttgccatgacccttccttccttccagcaaatccgcacagacaacccaatagcccaggctccccttctcccagcacctgggatctccagattcagccctattctcttaaaagcagtaatggctcaagaaactgcaggatcttgagcccaggaccagggtaaagatgtccccaacattctctaagcccacagattttattgcccttccatcctttgcagctttgttgggggcacggtcaggaagttgagaccctatagagacctgtctcttaaaatgagccacctttacttgcttgtggcatttcacttgctcttgtgcataagcccaaaggggccaactcctgattcccctctgggtgtgttcaatcccgggcacgctcttccttttcctcttgttgggctcccctggatgccctgcctcccatccaattgctatgcaacccagttcagcttaagtaaaaagtgattaagaacatacatctaaggctaagcaagctaacactttttagagggcctgactttatcctatattctaaggccatatttaaatactttctaagattacccaccattttggattactcttggagctggttcttcccctaagtaggactagctgagagctgagtgcattttagcaaaggcttcacctacatcggaagtaaagagttgcagtcaggctttggatcaggcctcactcctgatttctgctcctgcagccatcccgttgtgtctcactctcccttccagtgatggtcgcagctcccagtctctacagaaaaggtaacaacagtagggagtggacatatgggtccaaaacgtgtgctttgctggaaacttgtgtttccaggtcaaggtaccattcctgttggcttcatcaagtgcctctgtggattcattttcaagaaacttggagttttcaggagaccgaaaaggaataggcccaggaaaggtggagagattgtcaggaagagagagtggctgagtgggtcaaatttcagagtaaactttttaggagccaacatttaattaagaaaataattaaggctctgtgctttctgaaacttcagtaatatttgacatgctctcttccttcttctctgcttgcctctgtccctctcacctgtgtttctgaggctagtgttggcatgtcaccatgaggttagccttttaaaaggggccccacgggagtgtgcctctagattgcgttagcctagtatggaaagggctcccatggaagctatgatggcctgagaccccagcctgggtgttcatgttgctgctccgtgttgggagggcccaggactagcttgttctacctattcttcctggatctctcactatattatagtgaggactctatcagtatcaacccatgtggagagaggacagcaccctctgaagctcctcaggctggggattcagcactgcccacagtagtagagtcacagaggctgactcccccctaaggaaactatagaacagtgtgcaaattgcatatgaaggtggcaccactacccctatgtcaggcaggggagcacagtgctttgacttgtttactcaagagaggggatgatggtgctgagctctgctccccagagctttcctggggcccattgtcataataacttgtatgtgggtgatggccgcctcatctgcgagggctataatatccatggtgctccttggttgcacaatggaggttcccctagccttggcaaggtatccattgccgggtttgaactcatgaccttaacctcattaacatcatcagtcacctgagccaacgcgcagagagggggatgctgggagctctctcagtagctattgtgaccatcatctatatcttcagacttagcccttgttgagtccaaccctgttcccctatcaaagcaaccagcagggacagatggaggtaggggctcccctacatgcaggaaggttctcttcctcaaactaacctagtttacttttcctttttttctgcttcccttcccaccaaatctcagcttcatctctcatagtttgtgtttgaatatttttaaagaggaaaagtgcaataaaataaatagtgactgttttctttagcaatagctctttcaaaatcttgctctcaggactgaaaagtgatagatagtacctggattatcagataatgcccttgacttctgggggctcattcacagtctctgtagtttcttcttcttcccacgtgttcacatgactcctgtcctcttgagatctgacctccttctggaatggacacatatgctaagatgcagtgtatgcacaaggaaggcctgtgagagggctttgtcactttgtctccttcctgtgtgcacctctctgtctccatgtgtgtctctgtcccctctccctctgtctccccatttctgcctgctgtcatacagcatccttacaacctctaggcatgaaaatcctaagtttgtgtgaccttttcagcccattttgttgactttccctcagtctggcagatgtaatggaagcctacacgaaagcacttcccaatagataagaataaagcatcctgagccattacagaagatcatttccatgcactaaaagccattacttgatccttttgcttccccttctcccttccccagggagacggatgctgagggaatgtggcctggaggtttgcacttgggatcagtagcctgggcagatttgggaattgccctctgactctctttcaaaataagctgacttgctcaaccaaagggactccgtgagagctgcagaaggaagcaggttcttgtgggtttcagtagaagtctacagggatagaagtttgggtggttagggcatgacattagtgaaataaagactctaccacccgctagagtgtgcagctgcacaaatatttgcacacatagccaggggcttcagaagagtcccctttcctaacatctgtgagcttaaatgttcagactggacaatcagggaaggctggcaaccccagggtcccattccatccttttttgatctaccttgctctatacacatatgtacagcaaaacctcagttaactgatggggaaacctcagggacaggaacatcctgattgctttgcaattttggttatttgagtgggaatgggaaagcatgtctggttcaacctttgttattgagaaaaatatttcctaagtaggttagcataactttcctgccttagttaagtagagtgtttgaagataacagggaccttgccttgctcagggtcaacattgtaaacctcaatgcttattgtacagtagtggacataggtagagaagaccaaagagacaggctgaatggctgctggctacaagacaggcctggaaatgggccactggggcacatcctggctcatcggagcccttgctgtcatttgcctctttctactgaaaggatagtaagaaaacataattcttgtcaatcgaggttttggttaattggtcctgagtttttagaggttttccatatatacatatatttatgtgtgtatatatatatatatagtatatgtatatatgtatactatttttaaattatagaattatacattgaccaatctccttagtttcacttatgtggaataaatttggcaatccaaggaataaactgcatttatgtgcattttttgaatgacctcctttgcattcttttcacctctccagttctactctttttttttctgcttagggacctctctagaaggcagatctttcataaaaaaagaacaggctacaggatcacctctttcctttccctcccaggtggctgcctgactcagggataaaagggaagtctgatctaacagccaggtgctttagcctttcttctgtctgccctggttggctataacctcatcactgaggatcagaaaagttattccaaactttgtactcgaggggagtggaaagcttgaagacctggcaaaggatttatctatttagcattctctttgtcattggtggtgccctaggtttgaggtttgtgagatctgaaagtaacattccaatgaagaactaaagcacatctctgccacacagaaggtgaggtttgtggcaatcaatggaactaacaaatccattctgttttttattatgactaaacctaagttgagggtgtgggtattagagcagctgaaattcagttgcctctttgggggtaagctgtacacatcactcaagaaacagctggatgcaagctaaaacctgctctcattctccctcttgcctgctagtgtgttagatccatggaagacagtttctctcagcctcacctcttgcatttgactgttgctttctacctagatgggagtgggagggatttttcactgtatctggagcaattgaagtggtgcaggggtgtctgccatctccccacacccacagaagccctccagtctggctatgttagttgtgatcaggcagcagaagcccataacccagacttgacatgaccagctggtgcactgaggcagttgaggtggcctgtctggatggctacttcttgtacttcatgaacctcagcatggaaatggatataactttctgtgctcctctgcactcctaaaatagtctaatatgttccagatgagtttgcagctgagaactccctgcatcattccactgatggatgcacagggcatgattatgtaataatgtggacagctactgcaacatctagatcattgagggcagtgtagatgtggctgtgtgctaggacccttggtagctatccagaggactcagtctggtgtctttctgagtctctgtgagaggcctctaagccctgcttctccttgaaaatgattccctagacaccgaatgccttgtttgtatgagtgaataaatgctctgggctgctagagaaagcaataggaggagctgggaggaagagaatattcaggggcgcactttgctaccaaacaatttccatgtcagctgctaacattactgcctttttagcctatgaagtgtagggcaaggactttgacctgccaggtggggctggaaaggagcacatcagctccaggctaagaaatgggatagaaaagcaagaagagaggcctggctggctttggcgggggtgagtctcagctcctgagggtttgaacatgctctgtgcttgccccagttctgccttcacgtgggatccagcgacccagtttccttttgttgtcgtgcttggatggttccttcatttgaagggccccaggaagctggaaagtcccatgatcaagctctagcctgctgagcaaacaataccccagccaaattggcctcttcctggttttctgcatccctgcacccctctctccactaaggataatcttggaacagttgcgattaatggtgccagcaatcaaggaagattctctagttttcatcagggacatagctgtaaagctcatgagtggaggatgctatttccttttccagacctgtgtgcttatgtgcttatataggctgcctctggagactttatattgtgtgtgatgtgtgtgtatatatatatacacacacatatatatatatatgtatatatatatatagagagagagagagagaggaaatggccgccactcacttaggctcatgcagcacagactccagttagggtttgcactggcttccttgctgcttgtgcatgaatcttcagctgccctcccatgtcctgtctctaataattgctgaaaactcaaagaggtagataaataagcctccttgggatcaatagcagaaggaactccaaggctgatggtaaagcttcgtaaggatgatgccgaaagggaactggggtctccatggtgataagaggctggggaccaatgagagctgaaggcggagcaggacttgcggggaagactcatgggagttgggagtcatttaactatttgtttgcttcttgaaaatttagacaccagctgtaactacattgcacaggatgtattgatattatcattcttgctgacatattctggaagctttcagccccaccaacactgccccacccaggacttctgcagctgagagttcctgtgtcagtagggtctgatatttgtacataggttatacatatatgtgtacatatgtgcctcaatgaacattgcctgtccacctgatcatgggtgtacatagacttcatagagctccacagtcttttgtaaatattgacacaagtaaataagtatataaatatatattactggggatttattttaacatcattctgtgtgatatgaaaaaaataaaatttttgacagaca

SEQ ID NO: 168286 - DNA, 2569 bp, Homo sapiens
  Payload ID: 13113
  Gene Symbol: KCNA3
  Gene Name: potassium channel, voltage gated shaker related subfamily A, member 3
  Uniprot ID: P22001
  ENST ID: ENST00000369769
  CDS Start-End: 225-1952
gcggaggcgggcgcgcgccccgcaggggagggggcggagagcgcgagaaggagggaggaggcgtccccgtgcgggagcccggctgaccgcgccagacccagacagagcatcgcggctttggctgcaacaggcggtgggctcggctcgggggcggaggcggcgaaagggcggggagcgcgaggaggagcgacctggcctcaccgctgccgcctcttccccgccgcatggacgagcgcctcagccttctgcgctcgccgccgccgccctcagcccgccaccgcgcccaccctcctcagcgcccagcgagcagcggcggtgcccacacgctggtgaaccacggctacgcggagcccgccgcaggccgcgagctgccgcccgacatgaccgtggtgcccggggaccacctgctggagccggaggtggccgatggtggaggggccccgcctcaaggcggctgtggcggcggcggctgcgaccgctacgagccgctgccgccctcactgccggccgcgggcgagcaggactgctgcggggagcgcgtggtcatcaacatctccgggctgcgcttcgagacgcagctgaagaccctttgccagttccccgagacgctgctgggcgaccccaagcggcgcatgaggtacttcgacccgctccgcaacgagtacttcttcgaccgcaaccggcccagcttcgacgccatcctctactactatcagtccgggggccgcatccgccggccggtcaacgtgcccatcgacattttctccgaggagatccgcttctaccagctgggcgaggaggccatggagaagttccgcgaggacgagggcttcctgcgggaggaggagcggcccttgccccgccgcgacttccagcgccaggtgtggctgctcttcgagtaccccgagagctccgggccggcccggggcatcgccatcgtgtccgtgctggtcatcctcatctccattgtcatcttctgcctggagacgctgccggagttccgcgacgagaaggactaccccgcctcgacgtcgcaggactcattcgaagcagccggcaacagcacgtcggggtcccgcgcaggagcctccagcttctccgatcccttcttcgtggtggagacgctgtgcatcatctggttctccttcgaactgctggtgcggttcttcgcttgtcctagcaaagccaccttctcgcgaaacatcatgaacctgatcgacattgtggccatcattccttattttatcactctgggtaccgagctggccgaacgacagggcaatggacagcaggccatgtctctggccatcctgagggtcatccgcctggtaagggtcttccgcatcttcaagctgtcgcgccactccaaggggctgcagatcctcgggcaaacgctgaaggcgtccatgcgggagctgggattgctcatcttcttcctctttattggggtcatccttttctccagcgcggtctactttgccgaggcagacgaccccacttcaggtttcagcagcatcccggatgccttctggtgggcagtggtaaccatgacaacagtgggttacggcgatatgcacccagtgaccatagggggcaagattgtgggatctctctgtgccatcgccggtgtcttgaccatcgcattgccagttcccgtgattgtttccaacttcaattacttctaccaccgggagacagaaggggaagagcaatcccagtacatgcacgtgggaagttgccagcacctctcctcttcagccgaggagctccgaaaagcaaggagtaactcgactctgagtaagtcggagtatatggtgatcgaagaggggggtatgaaccatagcgctttcccccagacccctttcaaaacgggcaattccactgccacctgcaccacgaacaataatcccaactcttgtgtcaacatcaaaaagatattcaccgatgtttaatatgtgatacaagtgacatgctgtgctcagtattgtgtggaacgtgcccccttggtctgcctatgcccttgttttatacatttccagaccattcatcaaggaaaggacctgaagaagtggaaagcacacttcattctccctctccctgctgcttcatactgaaacaggtgcctgttttgcaagtgggctgcattctctcagctctccttttccctcttaccctctctctcttaacattgtaaacaacagacttacgttaaacttcatttctagtacacgccctatttaaaaaagagcagtacatcctgggaggaaatgaaactaaagaacagttagagtaactgtttaacctcagaattttaaaggcagttgtttctttcctaagcacatcaattcgtagtaaatgatgcttcggtttgatggacctttcaacgttatttattgaatatgtatttcggttgcctaccctgtagatatgtggatgaagagtctaactagaataatgacttgtaaacccaccatgagttatttggtttttgacttaaattcctatttgaatcccctttcccggaattttaagtgtctctacaactttgaataaagggaaatgcccaaga

SEQ ID NO: 168287 - DNA, 4172 bp, Homo sapiens
  Payload ID: 13114
  Gene Symbol: KCNA4
  Gene Name: potassium channel, voltage gated shaker related subfamily A, member 4
  Uniprot ID: P22459
  ENST ID: ENST00000328224
  CDS Start-End: 1235-3196
gttcgcggccaggggaggcgtgtgctgctcccgcagccagcgagagcgagagagggatggatgttggaggaggaattcgggcttaacaagtgatcgctgctgtctaggattttgtttcttttcgggggaaccttgacttcctttcccaggcaatccctcctgtgctgaactccagaggaaccaggagtcttggggtcttctctggggcagccccaacccccacccccaggctccagccgcgaggactctgtgcacccctcgggccaggcaacagaacttgttccgtggatatttggagcctccacctgccaaacccgagtgattccttttaccaccccccgccccccacccaggatcattcttcccctcctccagctgttgcagcttgagggggaaaaacaagccagccggtggattttctttatttttatttttcgccccgccggggaacggtgaagtgcttcttctgcatgattttggctgaagaatgctctgcatttccttgatttctatggagacctcagagctggttttgcttctgctgacacctcatctagcaccttctctacctcccagggtctttgcctctatctgtggtttggcattgtacctgggtacaggaagcctttgatgaacttaaaaggagagcctggagaatcatcctgatagactttgagtagaaatggctggacatacttcaaaccacatcttaacatggttcgagccatcactagaaggcaagtgctaacagtaaaggcttatttgcattttatttacatttaatggactgagcattggccaatttccatggcagaaaaatatatttcattttctaggcacaacttctggctgtcagacacttgctgcctttgaatcttgcagcaacatcactaaccacatcccagacatatttccaaatttcaacatctacccccaaaacataggtgtctgagagactccagcattttcggacttcttagtcttgagagtgccaggctatttatctcgaccagccaagctctggagagcaatgttgaatccctgagaagagagagcatggggcgtgctgatttaaaaacagaaaatgcaaagttggactgaaaatatccttagtcttccaagcaatctgcttaagggttccaaacttaccttaatttggtgagaaaagaagctgccctatttttctttcttcttcttctacaactggaaccagccatttccgaaaaccaccaccatggaggttgcaatggtgagtgcggagagctcagggtgcaacagtcacatgccttatggttatgctgcccaggcccgggcccgggagcgggagaggcttgctcactccagggcagctgcagcagctgctgttgcagcggccacagctgctgtcgaaggtagcgggggttctggtgggggctcccaccaccaccaccagtcacgcggggcctgtacctcccatgaccctcagagcagccggggtagtcggaggaggaggcgacagcggtctgagaagaagaaagcccactaccggcagagcagcttccctcattgctctgacctgatgcccagtggctctgaggagaagatcctgagggagctgagtgaggaggaggaagatgaggaggaggaggaagaggaggaagaggagggaaggttttactatagtgaagatgaccatggtgatgagtgttcctacacggatctgctgcctcaggatgagggcggtggcggctacagttcagtccgctacagtgactgttgtgaacgtgtggtgataaatgtgtcaggcctacgctttgagacccaaatgaaaactctggcccagtttccagagactttgttgggagaccctgaaaagaggactcagtactttgaccctttgcgcaatgagtatttttttgacaggaaccgccccagctttgatgccatcttgtattattatcaatcaggaggccgcctgaagaggccagtcaatgtcccctttgatatcttcactgaggaggtgaagttctatcagttgggggaggaggccctgttgaagtttcgggaggacgagggctttgtgagagaagaggaagacagggccctccccgagaatgaatttaaaaagcagatttggctcctctttgaatatccagagagctccagtcctgcaaggggcatagccattgtgtccgtcctggtcatcttaatctccattgtcatcttttgcctggaaaccttgcctgagtttagggacgacagggatctcgtcatggcactgagtgctggcgggcatggtgggttgttgaatgatacttcagcaccccatctggagaactcagggcacacaatattcaatgaccccttcttcatcgtggaaacagtctgtattgtatggttttcctttgagtttgtggttcgctgctttgcttgtcccagccaagcactcttcttcaaaaacatcatgaacatcattgacattgtctccattttgccttacttcatcacactgggcactgacctggcccagcaacaggggggtggcaatggtcagcagcagcaggccatgtcctttgccatcctcagaatcattcgtctggtccgagtattccggatcttcaaactctccaggcactccaaaggcctgcagatcctgggccacaccctcagagccagcatgcgggaactgggccttctgatcttcttcctcttcattggggtcatcctcttttctagtgctgtgtattttgcagaggcggatgaacctactacccatttccaaagcatcccagatgcattttggtgggctgtggtgaccatgacaactgtgggctatggggacatgaagcccatcactgtagggggcaagattgtcgggtccctgtgtgccattgcgggtgtcttaaccattgctttgccagtgccagtgattgtctctaactttaactatttctaccacagagagactgaaaatgaggaacagacacagctaacgcagaatgcagtcagttgtccatacctcccctctaatttgctcaagaaatttcggagctctacttcttcttccctgggggacaagtcagagtatctagagatggaagaaggagttaaggaatctctgtgtgcaaaggaggagaagtgtcagggaaagggggatgacagtgagacagataaaaacaactgttctaatgcaaaggctgtggagactgatgtgtgaatctttttccacctgccactgctcccccctcagcatctccaaatatatttatgcatagagagtgcagttatgaaaatgaaatatgcaaatgatccaatgcatacagtagtacactatttaatggttatacatggcataattgttactaaacttgtattacatatcaaataaatgatacatcttggagaagagggaggaataggagcaaatctatctttatatttttattagaatgcaagaattttgcacattaactggaaaagatgttaacagtaaagatggagagagagagtgtgtgcgtgtgtgtgtatatgtgtgtgtgtgtgaagtaaattgtcaatgttagtaattgtgcagtgaagggaaaagttggcattttgaagtatttactatgtaagaactaatgaatctgagcagtcatttatcagtgctttaacagcatatcgtatgtctttggattctgtagttgttttttaaaaattgtaagaaatactgtgtagagaaaaaagaaagtaaattatttaatagactataggtcacaattttatcttggatttaattaaaatttatttttaactggaaattaacttttaaaaaggctgcaagggcctttagaaattgattatattttgttattaattttgggaagacttaacagcaaatgtctaacattatagaataagtgaaattggagaatatgtaataagttttgtttgcaggtaacaggactggatttttttttctttgcactactttatatgctggagattgagagagacttcaaactgtgaatgtttactaatgtaacagttcaatgacaatcattggaagaatgatttctttagtcttattttattgttttcttttcattgtgtgagactaatgatcatgcagataacatcacaggattctctcctcttttaaaatctaaataactgattgacaaaggaattatgaagtaaaatttagcaactga

SEQ ID NO: 168288 - DNA, 2800 bp, Homo sapiens
  Payload ID: 13115
  Gene Symbol: KCNA5
  Gene Name: potassium channel, voltage gated shaker related subfamily A, member 5
  Uniprot ID: P22460
  ENST ID: ENST00000252321
  CDS Start-End: 160-2001
cagggccaagcgaggggatcgcgccagcaaccccagctctccccagagaggggccggccgaccgctggagcggagcctgacgccaggcgcccgcggagcgtgagtagggggcgcgggagccggtcagctggggcgcagcatgccctctgctcccgcgccatggagatcgccctggtgcccctggagaacggcggtgccatgaccgtcagaggaggcgatgaggcccgggcaggctgcggccaggccacagggggagagctccagtgtcccccgacggctgggctcagcgatgggcccaaggagccggcgccaaaggggcgcggcgcgcagagagacgcggactcgggagtgcggcccttgcctccgctgccggacccgggagtgcggcccttgcctccgctgccagaggagctgccacggcctcgacggccgcctcccgaggacgaggaggaagaaggcgatcccggcctgggcacggtggaggaccaggctctgggcacggcgtccctgcaccaccagcgcgtccacatcaacatctccgggctgcgctttgagacgcagctgggcaccctggcgcagttccccaacacactcctgggggaccccgccaagcgcctgcgctacttcgaccccctgaggaacgagtacttcttcgaccgcaaccggcccagcttcgacggtatcctctactactaccagtccgggggccgcctgcggaggccggtcaacgtctccctggacgtgttcgcggacgagatacgcttctaccagctgggggacgaggccatggagcgcttccgcgaggatgagggcttcattaaagaagaggagaagcccctgccccgcaacgagttccagcgccaggtgtggcttatcttcgagtatccggagagctctgggtccgcgcgggccatcgccatcgtctcggtcttggttatcctcatctccatcatcaccttctgcttggagaccctgcctgagttcagggatgaacgtgagctgctccgccaccctccggcgccccaccagcctcccgcgcccgcccctggggccaacggcagcggggtcatggccccgccctctggccctacggtggcaccgctcctgcccaggaccctggccgaccccttcttcatcgtggagaccacgtgcgtcatctggttcaccttcgagctgctcgtgcgcttcttcgcctgccccagcaaggcagggttctcccggaacatcatgaacatcatcgatgtggtggccatcttcccctacttcatcaccctgggcaccgaactggcagagcagcagccagggggtggaggaggcggccagaatgggcagcaggccatgtccctggccatcctccgagtcatccgcctggtccgggtgttccgcatcttcaagctctcccgccactccaaggggctgcagatcctgggcaagaccttgcaggcctccatgagggagctggggctgctcatcttcttcctcttcatcggggtcatcctcttctccagtgccgtctacttcgcagaggctgacaaccagggaacccatttctctagcatccctgacgccttctggtgggcagtggtcaccatgaccactgtgggctacggggacatgaggcccatcactgttgggggcaagatcgtgggctcgctgtgtgccatcgccggggtcctcaccattgccctgcctgtgcccgtcatcgtctccaacttcaactacttctaccaccgggaaacggatcacgaggagccggcagtccttaaggaagagcagggcactcagagccaggggccggggctggacagaggagtccagcggaaggtcagcgggagcaggggatccttctgcaaggctggggggaccctggagaatgcagacagtgcccgaaggggcagctgccccctagagaagtgtaacgtcaaggccaagagcaacgtggacttgcggaggtccctttatgccctctgcctggacaccagccgggaaacagatttgtgaaaggagattcaggcagactggtggcagtggagtagggaatgggaggcttgctgaacatggatatctacattataccgcagagtatttgaagtcacactgtaacctcagtctacccctctcctttcactcctttcctccctccctcgatccccccattttctctattctttccatgacacccaagggtcgcctatttttaaaaagtaccacattccatgacgcaggagctgtggaaatggtgagcgctgtgagatggatgtatttgtagccagtctcctatacccagcagagggataacccaaacaaaaatgactctaaatagcccagatcccaagagattatgtaactcctccatccatgtgttccaaatttgctttacatatgattgtatttgtgtataggggaaaatattatttttatgcctggtaagtggctttttgtactgtagttcagatagagatattttgggtatattttcaagatacatgttgtatttatggaagaaagagttgtcctgatgtttttctgtgttacttatattagagtcagagatcttggtatgggctgttctgtttcctgtgtctccaagcctctgtcttttctgggatgtggtattggtgctttgtgtctagggcagagtatgttcttgaagaaaggcaaatctgactttttctgtgcgccttaaacaattcttgtaactttcttcaaaaagcattttaatgatattggaggaatacttctgataatttattgtctttatttttatcccaggaaataaaaggttaccttgttgaggcaa

SEQ ID NO: 168289 - DNA, 4372 bp, Homo sapiens
  Payload ID: 13116
  Gene Symbol: KCNA7
  Gene Name: potassium channel, voltage gated shaker related subfamily A, member 7
  Uniprot ID: Q96RP8
  ENST ID: ENST00000221444
  CDS Start-End: 357-1727
aaacttggagagacgcaggacaggatcccggcggcagaaggacggagagaaaggggaccccgggacgggaaaggcgcagagcaggcgcgggcggcggcggcggcggggcagggcagggcgggcgtcccggcagagggcgcgcggtcgccctgtcgccctccgccccgccggggtcacagtgccccctccctcgcgccctagccgccctgccgggctatttttacgcgcggacaccggacaccggacaccgggctggggcggcggcggcggcggccgaggcggccgaggcggggccgcaccggggccgggcgtcggggccacacgtcggttcgcgggtcgccggggctgcgcgcgccatggagccgcggtgcccgccgccgtgcggctgctgcgagcggctggtgctcaacgtggccgggctgcgcttcgagacgcgggcgcgcacgctgggccgcttcccggacactctgctaggggacccagcgcgccgcggccgcttctacgacgacgcgcgccgcgagtatttcttcgaccggcaccggcccagcttcgacgccgtgctctactactaccagtccggtgggcggctgcggcggccggcgcacgtgccgctcgacgtcttcctggaagaggtggccttctacgggctgggcgcggcggccctggcacgcctgcgcgaggacgagggctgcccggtgccgcccgagcgccccctgccccgccgcgccttcgcccgccagctgtggctgcttttcgagtttcccgagagctctcaggccgcgcgcgtgctcgccgtagtctccgtgctggtcatcctcgtctccatcgtcgtcttctgcctcgagacgctgcctgacttccgcgacgaccgcgacggcacggggcttgctgctgcagccgcagccggcccgttccccgctccgctgaatggctccagccaaatgcctggaaatccaccccgcctgcccttcaatgacccgttcttcgtggtggagacgctgtgtatttgttggttctcctttgagctgctggtacgcctcctggtctgtccaagcaaggctatcttcttcaagaacgtgatgaacctcatcgattttgtggctatccttccctactttgtggcactgggcaccgagctggcccggcagcgaggggtgggccagcaggccatgtcactggccatcctgagagtcatccgattggtgcgtgtcttccgcatcttcaagctgtcccggcactcaaagggcctgcaaatcttgggccagacgcttcgggcctccatgcgtgagctgggcctcctcatctttttcctcttcatcggtgtggtcctcttttccagcgccgtctactttgccgaagttgaccgggtggactcccatttcactagcatccctgagtccttctggtgggcggtagtcaccatgactacagttggctatggagacatggcacccgtcactgtgggtggcaagatagtgggctctctgtgtgccattgcgggcgtgctgactatttccctgccagtgcccgtcattgtctccaatttcagctacttttatcaccgggagacagagggcgaagaggctgggatgttcagccatgtggacatgcagccttgtggcccactggagggcaaggccaatggggggctggtggacggggaggtacctgagctaccacctccactctgggcacccccagggaaacacctggtcaccgaagtgtgaggaacagttgaggtctgcaggacctcacacctccctagagggagggagggagggcagggtggagggcaaggctggggggaggggattgggtttaggaagagctaggttaagtcgtaacgagtggggaaacactgagtcttgttgggtcttgggttgtgtggtttggtagctcctgtgggtacctcctgaagcagcagcgaatggcaatgggttgtgttgtgttaatgaagactcaattggttcatattactctgagttgtgcaaagctcatggagccttttggggtagtgttgagataggtttggtcgtatcattttgtgagtttcctaggtcagtgttgggtttggttgggttgtgagtctgggatagtgtggtccagctgcattgtgtaggattctgtggtttggtgggtcccctagggccatgttgggtcaagttagatggtcccccatggcattgttgagatcgaatgtgtgtggtgttaagtttcgttgagacatggtggaaattgtgtagctctgtgattcttccaggggcatgttattttaggttctgtgaacttgcgagtcatgtagaaatgtgaagagtccagtggtagaatttgagctttctaggtcacattgggttaagtttgtatgaccaaatgaatcttgtagggttctgttgggcttaactgtgtagaggtgtgtggctggacatttttcgtggccacagcgagttgagttgtgttgaattgtacaaccatatgagccttgtaaggccagttcagttgggtcatgccactgtttgagtctcatagggccatgctgaattgagttccattgagttgtgtcactatgtgagtcctacaggaagttgggttgagttggactgtgcgaacgagttccatagggccacatcgggctgttttgcatttagtggtagcaccaggacccaaaggaaatagcagtggggaagcatcatgtatctgggagcatgcagtggcgagggctctgggaggtgtgccgagctggctccccagctcgctgtagggggcgggactggattctgtatccatgggattgggtgttcatccagaggcgactgggtaaattaggaagaggtggatgctcctcctgtttaccccacatccacttcattgtgctgttcactcccattctcccctacagttttatgctcagacatggaggtcagagccacaagggaaaggggagagggggagaaaactgtactctgtccagacatgatagagggacagagccaaaaggatagagaaagagacccagaaaaaggaagaggtggaaacccagagagacagagacccaaagggagagaaacagagactcagggagagggagacaatgacctggagggtggggtatggcagagacgcagaagagaggaacagaaatccagagtggggagacagagaccaagagcaggggatagaagccgggcgaagtggcccatgcctgtaatctcagcactctgggagaccgaggaagggggattgattgaggccaggagttcaagaccagcctgggcaacatggtgagaccccatctctacaaaaaatacaaaaattagctgagtgtggtggcacatgcctgtgatcccagctactcaggaagctgaggcagaaagatcccttgaccctgagaggtagaggctgcattgagccatgattgcaccactgcactccagcctgggcaacagagggagcccccgtctcaacaaacaaacaaaaagagccagtgggggagggagggacagagacccagagggcagcgtcagacacccagagttggagacagaacaacagagtctcagggaaagagaaccacaatagaaaaaggcagaaaaggccgggcgcggtggctcatgcctgtaaccccagcactttgggaggccgaggtgggcaaattacgaggtcaggagatccagaccatcctggctaacacggtgaaaccccgtctctactaaaaatacaaaaaaattagccgggtgcggtggcgggcacctgtagtcccagctactcgggaggctgaggcaggagaatggcatgaacctgggaggcggagcttgcagtgagccgagattgcgccactgcactccagcctgggcagcagagcaacactctgtctcaaaaaaaaaaagaaaagaaaagaaaaagccagaaaaagttggtgcccctgaacccaagagtgatgtacagtctattccatagaatcacagaacaatcctgaaccaggcctgtcacctaccctccctgcagctcaggaaggctgtcagacaggctgggggcctcactctgttttccaggggagaaacctgagtctcagagcaggggagtggcttcccaaggtctcacagcttgtccccaggggccaggcaggctgtctgtctgcttcacatgtccccatcagcctgctgggacacacgggtcctcctgagtcccgtagcctcatttcttacagacggggaaactgaggctcagagcagcaggtgttacccaaggtcacaaggccgaacattttcagaaatctttcagaactcaaagggcatttagaggaagaaggctgaaatcactaacacatatagggcttcctttggtatcaaagtactttacttgggttaatttatta

SEQ ID NO: 168290 - DNA, 4437 bp, Homo sapiens
  Payload ID: 13117
  Gene Symbol: KCND1
  Gene Name: potassium channel, voltage gated Shal related subfamily D, member 1
  Uniprot ID: Q9NSA2
  ENST ID: ENST00000218176
  CDS Start-End: 1299-3242
tgccaccttctctcctatgcctggctgtggttgcttctcttcctcctgctgccgctgctgctactgccactgcccagtacacaccgccagcccctcggggtgtggtttccccagacctgcccccaacggtgggacccagccttctcccggcgtctcctgccagcttcctgcaaagcccaggagcccccctccctggagacacacccaactccctttcaacaccccacccccctcttaatcccattttggggttaacccccttcctcttatttagtcttcatagatcccctgggtgctctgggattgtgcccaacttcctaacatttgagtcccggcccttggaattccccaggcccctttttcctccctgtagaactcctgagagtgtcgaccaggctttgttggcccgtctagatacccacctcccccagataactctcagcctctcaaaaaataacccagccccctgtctacccctttagataaccccttcccctctccagccctactaggaggctctggcctctcctttcttccccagaactcctgtagagtatagacacccccccgggctattcttggcaactctaggcagtcccaagacacctttcagcctctttacaacctcctggatccacagccacccctcaagatgcaccagctccctttccagatccatgaggggggtctaaccctcttatgcttcccctagaagtcttgagggtgtggacaaccctcctcacctgtctcagcccctctagaacccccacttccaggcactctcagtctctttcaagcacctctggtcccatttctacccctctggatgccccagtctcctctccaccactgcaaaggaattccaggctcttctgccttccctgagactcttgagagtgcagagaattccccacgtgtttcttggcccctctagacgcccccagacacctctcaggcacaggctgactcctttagaatcatctcagtctctctaaaccctccctcagctccttcttggccccatccccacaccccttttctgctcttctccatgtccccaaggcccttctcagtccctcagaacattgcccaggcccctcctaggttctgtaaatgtcccccagactccttcccatctctttagttcttcctcctggttcctcttggcctctctagacacccccagtttccttgtttgggtggctcaaggtgtctccaagcccccaccatcctggagacagccacattctcctaaacgccaccctcactaagtctccctgggcttggggagtggcacgatggcggcaggcctggccacgtggctgccttttgctcgggcagcagcagtgggctggctgcccctggcccagcaacccctgcccccggcaccgggggtgaaggcatctcgaggagatgaggttctggtggtgaacgtgagcggacggcgctttgagacttggaagaatacgctggaccgctacccagacaccttgctgggcagctcggagaaggaattcttctacgatgctgactcaggcgagtacttcttcgatcgcgaccctgacatgttccgccatgtgctgaacttctaccgaacggggcggctgcattgcccacggcaggagtgcatccaggccttcgacgaagagctggctttctacggcctggttcccgagctagtcggtgactgctgccttgaagagtatcgggaccgaaagaaggagaatgccgagcgcctggcagaggatgaggaggcagagcaggccggggacggcccagccctgccagcaggcagctccctgcggcagcggctctggcgggccttcgagaatccacacacgagcaccgcagccctcgttttctactatgtgaccggcttcttcatcgccgtgtcggtcatcgccaatgtggtggagaccatcccatgccgcggctctgcacgcaggtcctcaagggagcagccctgtggcgaacgcttcccacaggcctttttctgcatggacacagcctgtgtactcatattcacaggtgaatacctcctgcggctgtttgccgcccccagccgttgccgcttcctgcggagtgtcatgagcctcatcgacgtggtggccatcctgccctactacattgggcttttggtgcccaagaacgacgatgtctctggcgcctttgtcaccctgcgtgtgttccgggtgtttcgcatcttcaagttctccaggcactcacagggcttgaggattctgggctacacactcaagagctgtgcctctgagctgggctttctcctcttttccctaaccatggccatcatcatctttgccactgtcatgttttatgctgagaagggcacaaacaagaccaactttacaagcatccctgcggccttctggtataccattgtcaccatgaccacgcttggctacggagacatggtgcccagcaccattgctggcaagattttcgggtccatctgctcactcagtggcgtcttggtcattgccctgcctgtgccagtcattgtgtccaactttagccgcatctaccaccagaaccagcgggctgacaagcgccgagcacagcagaaggtgcgcttggcaaggatccgattggcaaagagtggtaccaccaatgccttcctgcagtacaagcagaatgggggccttgaggacagcggcagtggcgaggaacaggctctttgtgtcaggaaccgttctgcctttgaacagcaacatcaccacttgctgcactgtctagagaagacaacgtgccatgagttcacagatgagctcaccttcagtgaagccctgggagccgtctcgccgggtggccgcaccagccgtagcacctctgtgtcttcccagccagtgggacccggaagcctgctgtcttcttgctgccctcgcagggccaagcgccgcgccatccgccttgccaactccactgcctcagtcagccgtggcagcatgcaggagctggacatgctggcagggctgcgcaggagccatgcccctcagagccgttccagcctcaatgccaagccccatgacagccttgacctgaactgcgacagccgggacttcgtggctgccattatcagcatccctacccctcctgccaacaccccagatgagagccaaccttcctcccctggcggcggtggcagggccggcagcaccctcaggaactccagcctgggtaccccttgcctcttccccgagactgtcaagatctcatccctgtgaggggtaggcctgctgattcagagggtcctcttcatttttgggaactcctttccaaagccatatttttgggaggcagagaggggcaggcttgggcaccccttctgccccccccactgagaactatgcaatggagtttcatgaaatggtccacatagtggggaagtagccaggaaatgagaaacttcctcccaccccagacatttttcctggtgggagctgaagcactgggcttccacaggcccctggcctccttgccctagcacactgggactggccccactctcccagctggactcctgcatgctcctccccttgggctctcagatgaaggcaaagctttgatccgacatctgagctctagcctaagaaggagagttgagatttcctcctccctctggctgggatatggagctttggaggttcagagaagagaaccctcacctctgatctggcctctacgagaggtcctcatctccatctggcccaacaattcccagattctgaagcttggaatgcaaacacaggcttcatgggctgtggcctctgcagcgacctgccatccccaggccttgcctgaggggtcaggctgcctctcccaacacacactcagatagcacaaattctaccatccccttccctggctgctggaaatggaccccgcaaccctgtcctctgctgggcccccagcaaactctagcaatagcagctgctgccgtgtcattatgcaaagcctctgaccagtttgctgcagcatttacatctgccctaatcagaggggccacctctaactcctcctcctcctctcttctcctctggtttgcgtccttcctgggttgggctggagtctggactggctgagataagagcctggcaaccagcaagagctgggctgtatttggagatcatgggctgattccatgttcttgggcaacagtccagaagcatcaggggctccggcctgggatgtttctgaactttgggagttataggagacaggaggaacttctcctcctcctcctcccctacaattccttttcacatattcctttcttctccctcttgggtgaccttccaaaactctgctctcaggctgaaatctggcatcatctcaggttccctgtccccagcactgtccccatggagctggtggctgacaaagatgtagtttccatcagtcaataaaacctgagaggag

SEQ ID NO: 168291 - DNA, 3306 bp, Homo sapiens
  Payload ID: 13117
  Gene Symbol: KCND1
  Gene Name: potassium channel, voltage gated Shal related subfamily D, member 1
  Uniprot ID: Q9NSA2
  ENST ID: ENST00000376477
  CDS Start-End: 1291-2103
ccttgatgtttcccagaacaagatgttttcagcatttttattattattatttttttgtcgatccctgcagaagaaacagagttgggataaaagtatcaaatggaatcatcgaactcatgagctttccaaagatactgtctagggcagatgctgtgatccttctctaagtttccatcactgggattgggtatacagttggtgctcagtatctgttgaaggaatgactgaatgaattgggtttgctcagtttcttcatagaggtacaaaaaaaagttgatttggggtttctaaagcgtagaaaccccaattctggttggaggtccaggatcagactgacaaacaaatactgagcgctgacagtgggctggaactgagtattttgatggcttttactctattcaagtcctcacaacaactctgtgatggtggatggctgcccatgtctcacagttgaggacacgctctgagatgacacatcacagagccagcaatggccaagttggaaagacttttgagcagagtcctgaatgcttaaaatgagtgaaaataccgaaataaggaacagccatcctagggcacagcctgagaaaaggcttagaggctgaagactgcagaggctgtgtttctctggaggagttctgattggttctgcggtcagaacaagagtatgcagtgtgatcttgggcgagtcagttacagaatctccctgatcttcaggggagctctctgtgaacaagttagtaaggttggctctgctctgtctctgtgggaggtgggtggcatggagaaaggcaggagggtttcaaggctcctccctgttttgtcatatgtggacagttttcaaggattcccctataggggaatgaaaaggggtcctacctagagcaggtaagacagaggcagccaaaaccaacaaaacactcctcccgggacttgaagcccttcggctggcctgtggtgctgggactctctccccaggaggctgtgttcactgcctgtgacttcctcatgctcccctctgcttggttttcatagatttctagctgactcaggtgcttggtatgtagcttggacaggggcagcagatggtaggggttgagggccaggcccatttctcacttggccacccagcattttacagagcaagaaactgagggactcagaaggtttgagtgcctggccagggtcacagagctagtccggattagatgggatggagtgggggactgaaaggtaggtgggcacttttcctgaccttggcctacctcccctcgctccagctacggagacatggtgcccagcaccattgctggcaagattttcgggtccatctgctcactcagtggcgtcttggtcattgccctgcctgtgccagtcattgtgtccaactttagccgcatctaccaccagaaccagcgggctgacaagcgccgagcacagcagaaggtgcgcttggcaaggatccgattggcaaagagtggtaccaccaatgccttcctgcagtacaagcagaatgggggccttgaggacagcggcagtggcgaggaacaggctctttgtgtcaggaaccgttctgcctttgaacagcaacatcaccacttgctgcactgtctagagaagacaacgtgccatgagttcacagatgagctcaccttcagtgaagccctgggagccgtctcgccgggtggccgcaccagccgtagcacctctgtgtcttcccagccagtgggacccggaagcctgctgtcttcttgctgccctcgcagggccaagcgccgcgccatccgccttgccaactccactgcctcagtcagccgtggcagcatgcaggagctggacatgctggcagggctgcgcaggagccatgcccctcagagccgttccagcctcaatgccaagccccatgacagccttgacctgaactgcgacagccgggacttcgtggctgccattatcagcatccctacccctcctgccaacaccccagatgagagccaaccttcctcccctggcggcggtggcagggccggcagcaccctcaggaactccagcctgggtaccccttgcctcttccccgagactgtcaagatctcatccctgtgaggggtaggcctgctgattcagagggtcctcttcatttttgggaactcctttccaaagccatatttttgggaggcagagaggggcaggcttgggcaccccttctgccccccccactgagaactatgcaatggagtttcatgaaatggtccacatagtggggaagtagccaggaaatgagaaacttcctcccaccccagacatttttcctggtgggagctgaagcactgggcttccacaggcccctggcctccttgccctagcacactgggactggccccactctcccagctggactcctgcatgctcctccccttgggctctcagatgaaggcaaagctttgatccgacatctgagctctagcctaagaaggagagttgagatttcctcctccctctggctgggatatggagctttggaggttcagagaagagaaccctcacctctgatctggcctctacgagaggtcctcatctccatctggcccaacaattcccagattctgaagcttggaatgcaaacacaggcttcatgggctgtggcctctgcagcgacctgccatccccaggccttgcctgaggggtcaggctgcctctcccaacacacactcagatagcacaaattctaccatccccttccctggctgctggaaatggaccccgcaaccctgtcctctgctgggcccccagcaaactctagcaatagcagctgctgccgtgtcattatgcaaagcctctgaccagtttgctgcagcatttacatctgccctaatcagaggggccacctctaactcctcctcctcctctcttctcctctggtttgcgtccttcctgggttgggctggagtctggactggctgagataagagcctggcaaccagcaagagctgggctgtatttggagatcatgggctgattccatgttcttgggcaacagtccagaagcatcaggggctccggcctgggatgtttctgaactttgggagttataggagacaggaggaacttctcctcctcctcctcccctacaattccttttcacatattcctttcttctccctcttgggtgaccttccaaaactctgctctcaggctgaaatctggcatcatctcaggttccctgtccccagcactgtccccatggagctggtggctgacaaagatgtagtttccatcagtcaataaaacctgagaggagagatgagg

SEQ ID NO: 168292 - DNA, 397 bp, Homo sapiens
  Payload ID: 13117
  Gene Symbol: KCND1
  Gene Name: potassium channel, voltage gated Shal related subfamily D, member 1
  ENST ID: ENST00000419374
  CDS Start-End: 1-397
gggtcggggcctggatagggttggggtgagccataacggggaggaaggtgctgcccttatcgctctgctccatctactccaggacagcggcagtggcgaggaacaggctctttgtgtcaggaaccgttctgcctttgaacagcaacatcaccacttgctgcactgtctagagaagacaacgtgccatgagttcacagatgagctcaccttcagtgaagccctgggagccgtctcgccgggtggccgcaccagccgtagcacctctgtgtcttcccagccagtgggacccggaagcctgctgtcttcttgctgccctcgcagggccaagcgccgcgccatccgccttgccaactccactgcctcagtcagccgtggcagcatgcaggagctggacatg

SEQ ID NO: 168293 - DNA, 5331 bp, Homo sapiens
  Payload ID: 13118
  Gene Symbol: KCND2
  Gene Name: potassium channel, voltage gated Shal related subfamily D, member 2
  Uniprot ID: Q9NZV8
  ENST ID: ENST00000331113
  CDS Start-End: 966-2858
cggctgctcgcgagctgctttctctcctcttccctttccgggtgcacggcgaggagaaagtctctatgcaactaagccccggcgcgcacttggccaggtatgtaccgcgggagcggcgcgttctgcgcggaagcagatgctgctgccgccacggcggcggcggctgccagctcctgagctctgtaactgtcacactgcacctgagctgaacttgaaaagagagtgaaggggcgattgggcgaacgcttttggcagacacagagggtgtttgtagacgtgggggaggagaatctctattaacgccccccaccgtaaccactgcacatcacctccatctctgcaaatacagcccgaggagtagaggcagcagcagctggacccccaaagagagacgtggggcagcggctgtgaccgcatctcctgagctacaacaacaggtcgcctttttgagactcctttggcgggaagggctacttggaaaggaaggtttgaaagagtgagaagggtaggtgtaagggttccctaattcgtcgaaagaattctattgggtgactctcgttcgtcttctctatcctacactccacatactgaccctatattatccagactgtgccggggagaaatcaaaaacacctgtttgaagaaacggctgcacctgtgtgcttatttgtgccagagggtggcctagcccacctgcaggaagagatttggctgggttctgttgagggtgattgttaggacgttgtattttgttgccattattccaaatacctgtcttggagggaaagttgcccttctgagaactgtgactttaccaggagccctatcttggaataagagttacacctctggaccacgtttctcactagtactttgcttgactggaggaagtgggtgacttttggctgcttcggtgacccattgtagacgcctcgttacccttcttccttccgcttcaagtaatcatggcggcgggggtggcagcgtggctgccttttgcaagggcagcggctatcgggtggatgcctgtggcctcggggcctatgccggctcccccgaggcaggagaggaaaaggacccaagatgctctcattgtgctgaatgtgagtggcacccgcttccagacgtggcaggacaccctggaacgttacccagacactctactgggcagttctgagagggactttttctaccacccagaaactcagcagtatttctttgaccgtgacccagacatcttccgccacatcctgaatttctaccgcactgggaagctccactatcctcgccacgagtgcatctctgcttacgatgaagaactggccttctttggcctcatcccggaaatcatcggcgactgctgttatgaggagtacaaggatcgcaggcgagagaacgccgagcgcctgcaggacgacgcggataccgacaccgctggggagagcgccttgcccaccatgactgcaaggcagagggtctggagggccttcgagaacccccacaccagcacgatggccctggtgttctactatgtcacggggtttttcattgccgtctctgtcatcgcgaatgtggtggaaacagtgccgtgcggatcaagcccaggtcacattaaagaactgccctgtggagagcggtatgctgtggccttcttctgcttggacacggcctgcgtcatgatcttcacagttgagtatttgcttcgcctggctgcagcgcctagtcgttaccgttttgtgcgtagtgtcatgagtatcatcgacgtggtggccatcctgccttattacattgggctggtgatgacagacaatgaggacgtcagcggagcctttgtcacactccgagtcttccgggtcttcaggatctttaagttttcccgccactctcaaggcctgcgcatcctggggtacacactgaagagttgtgcctcagaattgggcttcttgcttttctcgctcaccatggctatcatcatcttcgctacagttatgttctacgcagagaaggggtcttcggctagcaagttcaccagcatccctgcagccttctggtataccatcgtcaccatgacaacactagggtatggtgacatggtgccaaaaaccatagcagggaagatttttggttctatctgttcgctgagtggggtcttggtcattgctctacctgttccggtgattgtatccaacttcagtcgcatctaccaccagaatcaacgagcagacaaacgaagggcacaaaagaaagctagactggccaggatccgggcagccaaaagcggaagcgcaaatgcttacatgcagagcaaacggaatggtttactcagtaatcagctgcagtcctcagaggatgagcaggcttttgttagcaaatccggctccagctttgaaacccagcaccaccacctgcttcactgcctggaaaaaaccacgaatcacgagtttgtggacgaacaagtctttgaagaaagctgcatggaagttgcaactgttaatcgtccttcaagtcacagtccttcactgtcttcacaacaaggagtcaccagcacctgctgttcacgacgacacaaaaaaacttttcgcatcccaaatgccaatgtatcaggaagccatcaaggtagtatacaagaactcagcacgattcagatcagatgtgtggagagaacacctctgtctaacagccgatccagtttaaatgccaaaatggaagagtgtgttaaactaaactgtgaacaaccttatgtgactacagcaataataagcatcccaacacctccagtaaccacaccagaaggagacgataggccagaatcccctgagtactcaggaggaaatattgtcagagtttctgctttgtaagacaattggaataaggtctaagagaattcgagccctggctgtgaaaagaatctcaacatagaagaaagaagaaacaataaatattctgcagattaatgcagcaaagaaagaaggttggtagtgaaacacaaagcttccaatcttaaggatgtgaataaaaccaccaaatggcatttctagacagtttgacctgttatacagagtaatattctgtggccctttgactttgtgaatgagcacaatgaaatgccgcctactgatgcttcttatgatcagaactcttttttaataaaataaataacataaatcgttgaacataatgttccagttgaatgcaaaacaaaaaaaatatggaaaacattttgataaaattttttcctgttaaaaccatgaacattggctatgatgaagattattacatatgaaaaaaaaactcacacaacatatttgtattgactgaaggaaaccatcataatgcatgctagaattctttgaagcagtgatctcagtttccttatgttgtcttcagaataggcatgataaactataattgtagaaaggggtaatttctgtgcacttacaacaagctgagtgttcatgttccatggtgggctgtgcaaataaactccttttagacctgcagtatttctcatggggatgctcattagtaaatctaaagtgttcagatagttcagtattcattatcgtttaactttgcacctagatactgttacaactgcaataatttgttgtacaactgttgtatcaggaatcaggatttttttgttgttgtactttccagatccttatagatacggtaagagccacattcgtagaaaaacttctggtgtggccaggttttaggtaactttttaatccaaaactattgtgccataaatgtttttcagtaatattttttggtccactgtattcctgtgacacagtgcattatctgttcttgtatttctatagcacctctctattgggtttatcatcatcaacaagactactgtttactgtagttcaagtgactttcctacttttgtatttccaaaaaaaattatcttgtaagtagcttgtcatcaatccccttgtcgaaaactagaaaaaaaggagttgacccatataaattatctctaacgtctttgttgtttatggaaaagcccagatactggatatatcactatgtattttatgaacagaattgactgggactaatatcacaggatcaatcatctcagaatcttacttgatgcattatttattttgctttagatcttgaatacattttgagaataactaatgtggattgaaatgtagagatacactggagtgctttatttagcaatatttgatgaaagcatgctttctacgccattcaggaaggcagcacaaatttatctcagaaaggttcctgtgtattgcaaggtacaattttctccaataaatcaggagaacaggagtttgatgatgcaaagttgatctctgtacatttaagtgaaaagtctttataacttttcacccttaaaatatttcagcagacatgtctgcacatgacagtgtaaaaaagtttaatgtcaaatgcaaagtttttattcattccaagccaccactgtaaggaataaagcttagcttctgtacatggaaagagctaataattatccctctgtcagagatgagatttttaaatgcttatgatatttaatcataaaaagggattaatccaaccattttctagtaaagccagaaattcttgcttcccatttctagaatagtttctagaacagtgctatgcacatattagatcttaataaacatttgctgagtgaaagtaagataaactcaactatctcttgggaagaactggcttcattcctagtacatcttttaaaaagttactaattttccagcagtacaaatattaacaattatattaacacctgcctcatgtcagtttatgcttctagagcaatgtctagtgaaacttatctgatggcatttattgaaaaccttctaaaaagtagactaaggaaaccataatcagaattactatgtcttttgattcccaatgagaagttctattttcatgttcttaatattacatacaagaaaatgcagttaggttatttcaattgacaattctgcctcctcttttgatttatcacttacccaaaattattaattttattaggcttttggaaaagaaaaaaaactttttgatgttttaggtgatttaaaaatataccgtgttggtggtgaatgactattgatgactgtgttaagtgcatctgtattgtaagtgaaatgtaattatttctgtgtaccatatggagtaactaaggtcattgtttttgacaattttgtttgaaattcatatatcttatttcaaaggatagcataatatctgcattatgctggaaaaaaatagacctttggagaatacttaaataaaacatgtgcatgcttgaacagg

SEQ ID NO: 168294 - DNA, 530 bp, Homo sapiens
  Payload ID: 13118
  Gene Symbol: KCND2
  Gene Name: potassium channel, voltage gated Shal related subfamily D, member 2
  ENST ID: ENST00000425288
  CDS Start-End: 1-530
acatacagtcgtgcggacccgtgccggtagacaaaaaagctagactggccaggatccgggcagccaaaagcggaagcgcaaatgcttacatgcagagcaaacggaatggtttactcagtaatcagctgcagtcctcagaggatgagcaggcttttgttagcaaatccggctccagctttgaaacccagcaccaccacctgcttcactgcctggaaaaaaccacgaatcacgagtttgtggacgaacaagtctttgaagaaagctgcatggaagttgcaactgttaatcgtccttcaagtcacagtccttcactgtcttcacaacaaggagtcaccagcacctgctgttcacgacgacacaaaaaaacttttcgcatcccaaatgccaatgtatcaggaagccatcaaggtagtatacaagaactcagcacgattcagatcagatgtgtggagagaacacctctgtctaacagccgatccagtttaaatgccaaaatggaagagtgtgttaaactaaactgtgaacaacct

SEQ ID NO: 168295 - DNA, 2659 bp, Homo sapiens
  Payload ID: 13119
  Gene Symbol: KCND3
  Gene Name: potassium channel, voltage gated Shal related subfamily D, member 3
  Uniprot ID: Q9UK17
  ENST ID: ENST00000302127
  CDS Start-End: 481-2391
ggagagaaatggctgaaagtggaaacccggagcggtttggggcgcttcgcaaagttctccagctcggcgagccggcggtgtgtctaccagaggctgggggccagtccatctggtcctgcccgacgccacttccaccccgcgagctctgggaaaggtctctacgtgacgccaagggccgtcgcggccccggggagagggatcgaaagactcactctgcgaggtgtttacactggaggtgggggacgggaagggactgggcaaagttacctggactcaactaaattcctgcgcttgcttagtgttgacatttgaataggatccgagatgttctgcttttatcccgggcagccctgatatgtcagcaacaggctgaggttccagacctgaaatcgcactgcaagaaaaaggggtttgctgaactaactccaagctggtgtgcctagcgtccgcgcggctgccggcccaagagctggagtcaccatggcggccggagttgcggcctggctgccttttgcccgggctgcggccatcgggtggatgccggtggccaactgccccatgcccctggccccggccgacaagaacaagcggcaggatgagctgattgtcctcaacgtgagtgggcggaggttccagacctggaggaccacgctggagcgctacccggacaccctgctgggcagcacggagaaggagttcttcttcaacgaggacaccaaggagtacttcttcgaccgggaccccgaggtgttccgctgcgtgctcaacttctaccgcacggggaagctgcactacccgcgctacgagtgcatctctgcctacgacgacgagctggccttctacggcatcctcccggagatcatcggggactgctgctacgaggagtacaaggaccgcaagagggagaacgccgagcggctcatggacgacaacgactcggagaacaaccaggagtccatgccctcgctcagcttccgccagaccatgtggcgggccttcgagaacccccacaccagcacgctggccctggtcttctactacgtgactggcttcttcatcgctgtctcggtcatcaccaacgtggtggagacggtgccgtgcggcacggtcccgggcagcaaggagctgccgtgcggggagcgctactcggtggccttcttctgcctggacacggcgtgcgtcatgatcttcaccgtggagtacctcctgcggctcttcgcggctcccagccgctaccgcttcatccgcagcgtcatgagcatcatcgacgtggtggccatcatgccctactacatcggtctggtcatgaccaacaacgaggacgtgtccggcgccttcgtcacgctccgggtcttccgcgtcttcaggatcttcaagttttcccgccactcccagggcctgcggatcctgggctacacactgaagagctgtgcctccgaactgggctttcttctcttctccctcaccatggccatcatcatctttgccactgtgatgttttatgccgagaagggctcctcggccagcaagttcacaagcatccctgcctcgttttggtacaccattgtcaccatgaccacactgggatacggagacatggtgcctaagacgattgcagggaagatcttcggctccatctgctccttgagtggcgtcctggtcattgccctgccagtccctgtgattgtttccaactttagccggatttaccaccagaatcagagagctgataaacgcagggcacaaaagaaggcccgccttgccaggatccgtgtggccaaaacaggcagttcgaatgcatacctgcacagcaagcgcaacgggctcctcaacgaggcgctggagctgacgggcaccccagaagaggagcacatgggcaagaccacctcactcatcgagagccagcatcatcacctgctgcactgcctggaaaaaaccactaaccacgagtttattgatgagcagatgtttgagcagaactgcatggagagttcaatgcagaactacccatccacaagaagtccctcactgtccagccacccaggcctcactaccacctgctgctcccgtcgtagtaagaagaccacacacctgcccaattctaacctgccagctactcgcctgcgcagcatgcaagagctcagcacgatccacatccagggcagtgagcagccctccctcacaaccagtcgctccagccttaatttgaaagcagacgacggactgagaccaaactgcaaaacatcccagatcaccacagccatcatcagcatccccactcccccagcgctaaccccagagggggaaagtcggccaccccctgccagcccaggccccaacacgaacattccttccatagccagcaatgttgtcaaggtctccgccttgtaaaaccactggacagagggccagagtgggtagtggggaatgaaggggactggcatgttggtgggtggtcactgagaccactccctcccccctttccccactatttctgcctgccccattgtacccctagcactgagacttgtgcctggaaggaaaaagaggtagcaaaggggcacctgaggttcacgctgctagcgtggacatagccctgtgatactgcatctcactggggccagaggaagggagggagggtgggggggtcggggatagg

SEQ ID NO: 168296 - DNA, 2716 bp, Homo sapiens
  Payload ID: 13119
  Gene Symbol: KCND3
  Gene Name: potassium channel, voltage gated Shal related subfamily D, member 3
  Uniprot ID: Q9UK17
  ENST ID: ENST00000315987
  CDS Start-End: 481-2448
ggagagaaatggctgaaagtggaaacccggagcggtttggggcgcttcgcaaagttctccagctcggcgagccggcggtgtgtctaccagaggctgggggccagtccatctggtcctgcccgacgccacttccaccccgcgagctctgggaaaggtctctacgtgacgccaagggccgtcgcggccccggggagagggatcgaaagactcactctgcgaggtgtttacactggaggtgggggacgggaagggactgggcaaagttacctggactcaactaaattcctgcgcttgcttagtgttgacatttgaataggatccgagatgttctgcttttatcccgggcagccctgatatgtcagcaacaggctgaggttccagacctgaaatcgcactgcaagaaaaaggggtttgctgaactaactccaagctggtgtgcctagcgtccgcgcggctgccggcccaagagctggagtcaccatggcggccggagttgcggcctggctgccttttgcccgggctgcggccatcgggtggatgccggtggccaactgccccatgcccctggccccggccgacaagaacaagcggcaggatgagctgattgtcctcaacgtgagtgggcggaggttccagacctggaggaccacgctggagcgctacccggacaccctgctgggcagcacggagaaggagttcttcttcaacgaggacaccaaggagtacttcttcgaccgggaccccgaggtgttccgctgcgtgctcaacttctaccgcacggggaagctgcactacccgcgctacgagtgcatctctgcctacgacgacgagctggccttctacggcatcctcccggagatcatcggggactgctgctacgaggagtacaaggaccgcaagagggagaacgccgagcggctcatggacgacaacgactcggagaacaaccaggagtccatgccctcgctcagcttccgccagaccatgtggcgggccttcgagaacccccacaccagcacgctggccctggtcttctactacgtgactggcttcttcatcgctgtctcggtcatcaccaacgtggtggagacggtgccgtgcggcacggtcccgggcagcaaggagctgccgtgcggggagcgctactcggtggccttcttctgcctggacacggcgtgcgtcatgatcttcaccgtggagtacctcctgcggctcttcgcggctcccagccgctaccgcttcatccgcagcgtcatgagcatcatcgacgtggtggccatcatgccctactacatcggtctggtcatgaccaacaacgaggacgtgtccggcgccttcgtcacgctccgggtcttccgcgtcttcaggatcttcaagttttcccgccactcccagggcctgcggatcctgggctacacactgaagagctgtgcctccgaactgggctttcttctcttctccctcaccatggccatcatcatctttgccactgtgatgttttatgccgagaagggctcctcggccagcaagttcacaagcatccctgcctcgttttggtacaccattgtcaccatgaccacactgggatacggagacatggtgcctaagacgattgcagggaagatcttcggctccatctgctccttgagtggcgtcctggtcattgccctgccagtccctgtgattgtttccaactttagccggatttaccaccagaatcagagagctgataaacgcagggcacaaaagaaggcccgccttgccaggatccgtgtggccaaaacaggcagttcgaatgcatacctgcacagcaagcgcaacgggctcctcaacgaggcgctggagctgacgggcaccccagaagaggagcacatgggcaagaccacctcactcatcgagagccagcatcatcacctgctgcactgcctggaaaaaaccactgggttgtcctatcttgtggatgatcccctgttatctgtacgaacctccaccatcaagaaccacgagtttattgatgagcagatgtttgagcagaactgcatggagagttcaatgcagaactacccatccacaagaagtccctcactgtccagccacccaggcctcactaccacctgctgctcccgtcgtagtaagaagaccacacacctgcccaattctaacctgccagctactcgcctgcgcagcatgcaagagctcagcacgatccacatccagggcagtgagcagccctccctcacaaccagtcgctccagccttaatttgaaagcagacgacggactgagaccaaactgcaaaacatcccagatcaccacagccatcatcagcatccccactcccccagcgctaaccccagagggggaaagtcggccaccccctgccagcccaggccccaacacgaacattccttccatagccagcaatgttgtcaaggtctccgccttgtaaaaccactggacagagggccagagtgggtagtggggaatgaaggggactggcatgttggtgggtggtcactgagaccactccctcccccctttccccactatttctgcctgccccattgtacccctagcactgagacttgtgcctggaaggaaaaagaggtagcaaaggggcacctgaggttcacgctgctagcgtggacatagccctgtgatactgcatctcactggggccagaggaagggagggagggtgggggggtcggggatagg

SEQ ID NO: 168297 - DNA, 7396 bp, Homo sapiens
  Payload ID: 13119
  Gene Symbol: KCND3
  Gene Name: potassium channel, voltage gated Shal related subfamily D, member 3
  Uniprot ID: Q9UK17
  ENST ID: ENST00000369697
  CDS Start-End: 71-1981
tttgctgaactaactccaagctggtgtgcctagcgtccgcgcggctgccggcccaagagctggagtcaccatggcggccggagttgcggcctggctgccttttgcccgggctgcggccatcgggtggatgccggtggccaactgccccatgcccctggccccggccgacaagaacaagcggcaggatgagctgattgtcctcaacgtgagtgggcggaggttccagacctggaggaccacgctggagcgctacccggacaccctgctgggcagcacggagaaggagttcttcttcaacgaggacaccaaggagtacttcttcgaccgggaccccgaggtgttccgctgcgtgctcaacttctaccgcacggggaagctgcactacccgcgctacgagtgcatctctgcctacgacgacgagctggccttctacggcatcctcccggagatcatcggggactgctgctacgaggagtacaaggaccgcaagagggagaacgccgagcggctcatggacgacaacgactcggagaacaaccaggagtccatgccctcgctcagcttccgccagaccatgtggcgggccttcgagaacccccacaccagcacgctggccctggtcttctactacgtgactggcttcttcatcgctgtctcggtcatcaccaacgtggtggagacggtgccgtgcggcacggtcccgggcagcaaggagctgccgtgcggggagcgctactcggtggccttcttctgcctggacacggcgtgcgtcatgatcttcaccgtggagtacctcctgcggctcttcgcggctcccagccgctaccgcttcatccgcagcgtcatgagcatcatcgacgtggtggccatcatgccctactacatcggtctggtcatgaccaacaacgaggacgtgtccggcgccttcgtcacgctccgggtcttccgcgtcttcaggatcttcaagttttcccgccactcccagggcctgcggatcctgggctacacactgaagagctgtgcctccgaactgggctttcttctcttctccctcaccatggccatcatcatctttgccactgtgatgttttatgccgagaagggctcctcggccagcaagttcacaagcatccctgcctcgttttggtacaccattgtcaccatgaccacactgggatacggagacatggtgcctaagacgattgcagggaagatcttcggctccatctgctccttgagtggcgtcctggtcattgccctgccagtccctgtgattgtttccaactttagccggatttaccaccagaatcagagagctgataaacgcagggcacaaaagaaggcccgccttgccaggatccgtgtggccaaaacaggcagttcgaatgcatacctgcacagcaagcgcaacgggctcctcaacgaggcgctggagctgacgggcaccccagaagaggagcacatgggcaagaccacctcactcatcgagagccagcatcatcacctgctgcactgcctggaaaaaaccactaaccacgagtttattgatgagcagatgtttgagcagaactgcatggagagttcaatgcagaactacccatccacaagaagtccctcactgtccagccacccaggcctcactaccacctgctgctcccgtcgtagtaagaagaccacacacctgcccaattctaacctgccagctactcgcctgcgcagcatgcaagagctcagcacgatccacatccagggcagtgagcagccctccctcacaaccagtcgctccagccttaatttgaaagcagacgacggactgagaccaaactgcaaaacatcccagatcaccacagccatcatcagcatccccactcccccagcgctaaccccagagggggaaagtcggccaccccctgccagcccaggccccaacacgaacattccttccatagccagcaatgttgtcaaggtctccgccttgtaaaaccactggacagagggccagagtgggtagtggggaatgaaggggactggcatgttggtgggtggtcactgagaccactccctcccccctttccccactatttctgcctgccccattgtacccctagcactgagacttgtgcctggaaggaaaaagaggtagcaaaggggcacctgaggttcacgctgctagcgtggacatagccctgtgatactgcatctcactggggccagaggaagggagggagggtgggggggtcggggataggccgggggatataggctatgtgccaggacagggcctggatggaggagcctcagactcagaccaaataacagtcgtttctggagaccccagtgaggaaaatacaagaccaagagcagcaaagaggccaagttgtcacaagcaaaacaggaagaaaatataacactgtgtatttaagcacctttttcaaggctcttaatggataatatttattcatgggaaaaggtggaaaacaaaaacaccaacggatttttgtgaaatgtttttctccatggacccaacacctttgaaccaaaacaatgcattttgtgagggatttttttttctccttttatagcaaaagcttttaggctaagaagtcagttattgctgagttctctctccattcccccaggtgggtgaggtcaactgagcctgggcccccactgcccagctgacctgtgcagagctgccaagtgaccacacggcaatccttaccctttgtctgtccctgtctcccttgtctctgtacctctctgcttacccctagctgtttctgtgtccagccatctgtctctacctggatcccaatgatcctgaaacacatcagtaaagccttcttcatcactgccacgcacaacagacttgtgcctgggagttctatctgtgtgaatgcaactgcagaggaggaaagagtgaagcaaaaattgggagagtttaggggtaagggaagtctacctcacagaacagaggtacttcccttggggttggaaccactcgtgtttgcagtttcagtttctgggaaagaaagggaatgaacagatttatcacactggaatcttgaaaaggcaaatcgccaacacctgagacgcggtcaactctggtatgtgccagtgaggggagaacggaaggacccagggctcgcagcctcagccggtcattagggcaccttgctatggacccttccttcaagacccaccataaagcccatccagagcccttccaagaggccccgggagtagttttctccagagagggcagtggtacggggaccaagattcctctgacttatatcaaaccagaggcaactcccacacagaggctgtggaagggtaagcctgtgtgcctcaagaaaaatgcttcaaagcaaaagcaagtaagagattctagatgattcttacctgctatgaaagatgccttgatgtctgaagaggcttcggcctgatctccctgaagatgctgaaatgggggagaagcctcatcacctctgtgcaagcaaaggagtgaagattatttcttgaacacctggacaacatatctattcaactagcttgcaccctggtggagctgggggcagcatttctggaatcctcctaaccattgttcactgcttgtagcagagtaggtgggcctcagggttagtgacaagtcctttcctgcccttcccaacacccagccaccttgctgcagtctctgtagcctgggctctgaaatacatgagctcctcgggagctgcctatccatcctacagcttagtggttagctgtttaattgtaggccaagaatttctctccccaccacagccatctaaatgagttttactagccaggaacctaaaaacacccttcgtgggcttccctatgaccccagctcgattgaccctgtaggttcaaaaggtttcgaggtggcacctaaccagaatgtgggcagaaggcagaggagagggagccttctttctgtctttatctctttatgcttatcctcattgaccatgggctgagttctttctctgggtcccctaatgtgggaatggagtggttcttgccctctgagcttacagactaagaaggcagaaaagctttacaactacagagtacatgtgtatacacacaaccaacctaaacacatcagagaatacatacttaaatcaattcacttcatatacacatctcattagaagaccaagctaaacttcacttagagggcgggcaaaggactagaaaagaatttttctcttaaaaaaaatgagtactagagcaaaattatgagtgtctaagtatcttagttatgcttcataagatctgactggggtaagagataaagaggtaaatagggctgggcgcggtggctcacatctgtaatcccagcactttgggaagccgaggtgaacagatcacctgaagtcaggagttgaagaccaacttggccaacatggtgaaaccccatctctactaaaaatacaaaaattagccaggcatggtggtggacccctgtaatcccagctacttggaaggctgagggggaggattgcttaaacccaggaggcagaggttgcagtgagccgtgattgcaccactgcactccagcccaggtgacacagcaagactccgtctcaaaaaaaaaaaaaagaaaagaaaaaaaaaaaggaggtaaattagaactggttgcacacacatacaaacttcctgtgatgaatttaagaacagatcattacagggttagaatagtgacagattcaacaaaggatctgtttgatagggcaccaagggaacattttactggttcccacaaaaattaataaatgttaaatatcatgtcccaagcaatttcccatgtttttttattggtcctaatcaacagaatgttttgtgttccttccacttcacgttcagagcccacgtcatgccacttcctaaaagaccattagaccatccccttttcctccatcctccactgtagccttagccagagaaaagatccagctcacttctggtccaaaaaatgtcaacgtttggaaaatggctcatctacactacagaacacagccagatgacactgctaaagggtactgtaagaaaacacaaggtccaaagtatgctgaattggtttcataagtctaactcattggccagtgactgaaaaaccaggatatcaggattttctgggggccaatagccatgacccttgagctttcatagttcatgaaccactttgacataataaaatattcccaaaaccacctattccattcagtcccactcagcattaagagggggagggaaaaacaaaccaaccaaccaacctaacagttacattcaaatgtcaaatgaatgtgaacctagaaaatgtagtattaagagcatatcagaactagaaaagatttaagaatatctaattcattttacagtatagaaaactgagacccagagaaattaaatgacttgttcaaggtcatgcagttatttaatgacagatctgagaccagaacacgagtcttttggctattagtctaatgcattttctaccacacccactgcctctgagagcagtgatgctttggagaagatccatcaaagaatccatactgtaattggagacatagtcttatatgtcaatacgtatatgtcaatactacttggacacagcccttggaaatcacctgactgtaccaatacaaaccatactttggaaaccaccattctctgggtagaaacatctatggactatcaattttgtcagaaatcagtgaacaagtgaagagtcaattttttttagtcaaatattttctcttctcaatgaagagaagactaggacagtgacattttgaagcataccttttatactccttgtggttcttatgacagtctgtgatggtagtaggtaaagtagctaaatccttgattcagagaggggaaaacatgtggaaagaaactgaacgacttatccaagttcacatgacaagttagtggcagaaccattattgcaatccaggacttaagacatcttgtcctaggatttttcctccacattatattgcactgctctgaggcttgcttatatttttcatacctggatttccagggtggtgacgtgggggagggaagtattcaattcagaaccaccgtgaaccaagatctctggaaacaaactctgtactatttctccttcatctcctattttcataactagtgccaagctcaggactaactgcatagactccctttcaaaagaccaatagatattctcagtgacagttgaacacattagtttacaatcacacagaatttgaacagaacttaaagttgacagttaatgccgatctataattaacaaaaatgtcaacttgtggatatgctgatgattttatccagttttcaaaatatgattcctacagttcaggatatcacttattagattgtagacaaggaaaatgtacattgggacattatgtacttaagagtttttccttaagttttgcagaggaagtggttgaaaattgagctaacactagatttcgaggttactaaagaattccagttttccagtctcccacttcaattaccaggtaactataaggcaaaaatatcccaatgctgtgaacttaaggcaatattcatttcctttctacactacttggcatggtaaccatgacaaacttttattttctctttctgatttcctaatgaaatctcattatttgcaaagctttaaaatgactagatgaaggaaaaacattgttatgacccatgaccctcggagcccaaacagcaccatgaagagcatcattaaaactaagagaaagtggctatcagaaaatgaaacagctttaaaggggttccttttaagtcttgttttctattcagaatgttctgtgttttttctcaagtgtgggaatgacatttatcttagcaggttactcaactacactggatgatgtcactctaaccagtgtacggcactgacccaagtcctggggggctccttggaccaatggactattttacaaacctgggaggtgggagggatggtatatttttgataatcagacattccaatgtaatgttttccttagaggtcacacccttccccccattaatgtcatcgtgagatacatcaagtgtgttcttttctattttcgtataataaatgggctttgcttatcaacatcacaatggcaaagaagaaatatactgtacaaaactgcaggaagataaaacatgaaaactttctatgaaaaaaaaaaaacacccttgagtttcctgtcgtcttcttttgaaactgtagtgcatatgttaaaacatgtatatcatttacagtattgagtcgtgtgccactgctgtacctgatgtatccaatctggattaaacaaattatgtgccacaaaccctaaaa

SEQ ID NO: 168298 - DNA, 3887 bp, Homo sapiens
  Payload ID: 13120
  Gene Symbol: KCNC1
  Gene Name: potassium channel, voltage gated Shaw related subfamily C, member 1
  Uniprot ID: P48547
  ENST ID: ENST00000265969
  CDS Start-End: 1192-2949
agcaagcggagcagcagcccgggcggcagcagcgtcgcggcggcggcggcagcggccgctccgcgcctcgcctcaccggcctcgctggcctcacctcgccgcgcccggacccgccacccccgcctccccgcccgacctccgcagcccccgtctcggccggcagcgcccaccgcctgcccgaagcgaggagcggagtgcggggcgcagaggcaccggagccagtgcccgccggccccgcaaatcaaacccagccaggagaacccccgcctggccccgtgcagctccgcgaccgccgggagctgtcccttcagcaccgccgcgggagcccaagtccgagcgcagcccagcggaaccccagctcgagcccgggctcacggagagcagcgctcggcgttagccgcacgagcaacaccccgggtgcccctgcccagggggcccgccatctcctccaggaggcggggagaaggaacgaggagggcgggcgggcaggcgggcccgccgccggggggagcaggcagccaagcaaggagagagggagggggccggagcccgccctgcgtcccgagctgcagcccggccacgcagggaggaaggcaggcggcatccatctcccccgcgccgagagcgcgccgcggcgaccacctcacagaggagcgcgaatttcccggccctgtctcctcccctccccctcctgggggctggcctctagtccggccccgggagcggctgacctttcccccaaaagctttgtgccgatttctccattttcccgcggagatggggacgggagcccggccccccaacccattttccccacctcccggggctcgctgctgagcccgcccccctccctctttccccctcactccctccctccctccctttctccctccctttctccctcccttctttcctcctctgcctcctccgctgccggaccagctccctcccacatctggctcctagagacccctgggatcccgcgcacattcccctggaccggcacccgacaaagcgcccggagaggcttggctcgctcgttggggtggccagagccgcaggcctctgttccccccgacggctggggggaggggggaagagggcgcgcgcccccctccccggcgccaactccccctggcggccgctcccatgggtgtcgctgggccgcgccatgcctaagggggcgccgcgatgggccaaggggacgagagcgagcgcatcgtgatcaacgtgggcggcacgcgccaccagacgtaccgctcgaccctgcgcacgctgcccggcacgcggctcgcctggctggcggagcccgacgcccacagccacttcgactatgacccgcgtgctgacgagttcttcttcgaccgccaccccggcgtcttcgcgcacatcctgaactactaccgcacgggcaagctgcactgcccagccgacgtgtgcgggccgctctacgaggaggagctggccttctggggcatcgacgagaccgacgtggagccctgctgctggatgacgtaccgccagcaccgcgacgccgaggaggctctggacagcttcggcggcgctcctctggacaacagcgccgacgacgcggacgccgacggccctggcgactcgggcgacggcgaggacgagctggagatgaccaagcgcctggcgctcagtgactccccggatggccggcctggcggcttttggcgccgctggcagccgcgcatctgggcgctcttcgaggacccgtactcgtcccgctacgcgcggtatgtggccttcgcttccctcttcttcatcctggtctccatcaccaccttctgcctggagacccacgagcgcttcaaccccatcgtgaacaagacggagatcgagaacgttcgcaatggcacgcaagtgcgctactaccgggaggccgagacggaggccttccttacctacatcgagggcgtctgtgtggtctggttcaccttcgagttcctcatgcgtgtcatcttctgccccaacaaggtagagttcatcaagaactcgctcaacatcattgactttgtggccatcctgcccttctacctggaggtggggctgagcggcctgtcctccaaggcagccaaggacgtgctgggcttcctgcgcgtcgtccgcttcgtgcgcatcttgcgcatctttaagctgacccgccactttgtgggcctgcgggtcctgggccacacgctccgagccagcaccaacgagttcctgctgctcatcatcttcctggccttgggcgtgctgatcttcgccaccatgatctactacgccgagaggataggggcacagcccaatgaccccagcgccagtgagcacacgcactttaagaacatccccatcggcttctggtgggccgtggtcaccatgacgaccctgggctatggagacatgtacccgcagacgtggtccggcatgctggtgggggctctgtgtgcgctggcgggcgtgctcaccatcgccatgcccgtgcccgtcatcgtgaacaatttcgggatgtattactccttagccatggctaagcagaaactaccaaagaaaaaaaagaagcatattccgcggccaccgcagctgggatctcccaattattgtaaatctgtcgtaaactctccacaccacagtactcagagtgacacatgtccgctggcccaggaagaaattttagaaattaacagagcagattccaaactgaatggggaggtggcgaaggccgcgctggcgaacgaagactgcccccacatagaccaggccctcactcccgatgagggcctgccctttacgcgctcgggcacccgcgagagatacggaccctgcttcctcttatcaaccggggagtacgcgtgcccacctggtggaggaatgagaaaggatctttgcaaagaaagccctgtcattgctaagtatatgccgacagaggctgtgagagtgacttgaccaggcggcttggccgaggacactggtggctattaagcatctgggtggacctgcagcccctcctcaccctcggacagagtaaattcacgccatgcaggtttgccggacgagtccgagtggcccaggcattgtactaggacggacgtagctttttctacggccaaatggtaactgaccgtagaggatttcttttccttcttttcattttttaaaattttattttatttggggagggggggtggaggggctccttagcatgacttgcatgaagttaaacagaaaacccagcaaaccaaacccaccaaccccctgcaactgtatgattaccctgaacaacaataatgaaaagaaaaacatcaaagccctctattttctttcaaagctcttgactttcacacacgttgttggagccaaactgtaacggcgttcagtagaaacctgtacatttctgggggtgaggggcgaggggaggagggacagagatggggaatggattgcttcctttttgtacacaagatcaagaggaaagcttccaaaaagggcagtcggtcagtcatcggtcatattgacctcaccttcatagttcatctctcacgtggaaactgagaactttgctccaaatagaattgtggaaactcgcacggctgccttcttccccgtttggcatgcttgtgacccagcggatgtctccccaagacccctgacagcagctagtctaggttgattctctcatcttatcggtgtgtagatccagtgtgaccaactttcataacaaattgttcatagtaaataatcaccaccgtatggattttccaagtgttccattaaaaccaggatgtagagcaccaaaagatcaggaccacgggaggagcagcctcctccacctttactaaggcacaacctggcattgtatgcaatttagtacttcagagtaaaaa

SEQ ID NO: 168299 - DNA, 6766 bp, Homo sapiens
  Payload ID: 13120
  Gene Symbol: KCNC1
  Gene Name: potassium channel, voltage gated Shaw related subfamily C, member 1
  Uniprot ID: P48547
  ENST ID: ENST00000379472
  CDS Start-End: 31-1566
gggccgcgccatgcctaagggggcgccgcgatgggccaaggggacgagagcgagcgcatcgtgatcaacgtgggcggcacgcgccaccagacgtaccgctcgaccctgcgcacgctgcccggcacgcggctcgcctggctggcggagcccgacgcccacagccacttcgactatgacccgcgtgctgacgagttcttcttcgaccgccaccccggcgtcttcgcgcacatcctgaactactaccgcacgggcaagctgcactgcccagccgacgtgtgcgggccgctctacgaggaggagctggccttctggggcatcgacgagaccgacgtggagccctgctgctggatgacgtaccgccagcaccgcgacgccgaggaggctctggacagcttcggcggcgctcctctggacaacagcgccgacgacgcggacgccgacggccctggcgactcgggcgacggcgaggacgagctggagatgaccaagcgcctggcgctcagtgactccccggatggccggcctggcggcttttggcgccgctggcagccgcgcatctgggcgctcttcgaggacccgtactcgtcccgctacgcgcggtatgtggccttcgcttccctcttcttcatcctggtctccatcaccaccttctgcctggagacccacgagcgcttcaaccccatcgtgaacaagacggagatcgagaacgttcgcaatggcacgcaagtgcgctactaccgggaggccgagacggaggccttccttacctacatcgagggcgtctgtgtggtctggttcaccttcgagttcctcatgcgtgtcatcttctgccccaacaaggtagagttcatcaagaactcgctcaacatcattgactttgtggccatcctgcccttctacctggaggtggggctgagcggcctgtcctccaaggcagccaaggacgtgctgggcttcctgcgcgtcgtccgcttcgtgcgcatcttgcgcatctttaagctgacccgccactttgtgggcctgcgggtcctgggccacacgctccgagccagcaccaacgagttcctgctgctcatcatcttcctggccttgggcgtgctgatcttcgccaccatgatctactacgccgagaggataggggcacagcccaatgaccccagcgccagtgagcacacgcactttaagaacatccccatcggcttctggtgggccgtggtcaccatgacgaccctgggctatggagacatgtacccgcagacgtggtccggcatgctggtgggggctctgtgtgcgctggcgggcgtgctcaccatcgccatgcccgtgcccgtcatcgtgaacaatttcgggatgtattactccttagccatggctaagcagaaactaccaaagaaaaaaaagaagcatattccgcggccaccgcagctgggatctcccaattattgtaaatctgtcgtaaactctccacaccacagtactcagagtgacacatgtccgctggcccaggaagaaattttagaaattaacagagcaggtaggaaacctcttagaggcatgtcgatctgacctttcacctctgccccctgtagcgatgattccagatccagtcagactgcttccttagttccgtgggtgaccccggaccccgcactcagtctggaggtgtggagcctgggggcccagggagatgctgggcggccaaattcagcaggcaagagcctgctagaggaacctcactggtgcccctgggtaaggaggttgacgcggttggtctcgtgatgttctgaagagacaacgcggcccgccaggttgctgaggactaacttagcaggagccaggggggctctgcttggtggggcaggagtccggtgtgagtctctgactcaggctactgacccggtgttgggacagagtgggggcgggtgtgatttggaaacgctagacagcctttgatctggtccttaccatggctcccttcaggctgtgtagatggcagagatggtgcatgggatctgggcaggagggtcccttgcaaaggcaggtgcaagggttctcacccccggcagagcctgtctccatagctgagtagaattcctgccctgatttcgggctgcccagctcgaggtccttcccaggagacgcctgtagccctccgtgacaagcttacttaccccatagcatgctgaaccaactcatcttctaccaccactctagagtttagcctttatctttaggaacctgttgaagtgactctagctttcacgttgtctgtttgggttgatggtcgagtgggagtttccggtgacccgatggaagcggctgccgagcaaaagactagagggggccaccaccctgggcagcttagatgaaagcgctacagaccagcaacagcctcccaccgagggttctccccgtttccagcggtagggactgcagcagcaatatagacatcccaaccagtgtacaaccactttcccgtgaattcactgggggccgggaggggggaggggggcatgaaacaatactagtcaccgtgggatatattctaatattccatggctagtggtttgttatgggactatctcagttttatgagaacctgcacatagcacataaagttgatcatggggctctggtccgaagatataaagcccatagtctacctctacccatggaataccatcgacttattctgtggacacagggatttcaaaggaacagatgacccagagaagaatgacagcactgagtaagaaggagtgccaggtgagcaggaggttgacgtgacaggtggcatttagtctatgaaggacctccccatgcccaggtctggcaggaggctgctggctagctcagccccaggtggggaagtttccccctggtttgggtggcctcccccagtggatgattgattttcttccctgctatcgcgctctctgacccaccaccccatcccaatcctcttctggctttaccccacagctatgctggcccgagcactaccctcaaggcccatttctttgcccatgggggtttcccggtcctttcaccctgccgcatacccttcccttcctgggatttctgtaggtgcctgagaggaacatggccaggggtctccgaggctgaaacagctccgagctctctgctttggattagctagttacttgatttcaggagctaccaacagggctctgggcctctaggaggaacgcgtgggctggcccaggccccagcttccatgtgggcctggcaagaagagctcagcctgagtggcatcactgtggcactacctggcccttcccctgcatcctccccgacactggatctttcaggagtgttgccccaagcacaggtgccctgggccagccagtcaagaatccccagtgctctccaggcaggcccagattcctctgtactcttggacaatgacagtattatcctgtgcggagtccccctgccccccagggagtgcagatgtgtttgttcagacatgcacaccagctaatcccaggacacaaaacctgtaaaacccatgcactcctgtgggattgcccctgagctccacagtctctccccagccctgcttttgagagccactttgccctggtcccaggtttcaggggcccagacagttctggcttggacagtctctgtggctgaggaagtatttggggccctcacaagcttgccctctggagcttggatgcctggatccctcctgcctcccccgtcaccaactgtgctcccaagcccttcccaagcactcacttcccggtggtgttggtgctgtcctgatatcctgacccccgaggctccagcctcatccctcaccagaacacttctccctccaaaagctggcgtgtgagaccccggctatccgccaccaagaggagttgcggtctttaggggcgttgtccccacctctgcaccccagagttcttcccattcaccttttttcctgcttgcagccatgcacctagatgggcatagggttggggtgagtttgtgggagagtgagggggaggccaggggcaaggaaggtaaatgtggtggccccacaggaattgtgagagatgagatgcagccccccaaggcctttccagtctcactgtacccccaaggcagtctagtggcctcgccaaaacctgagcttctccaattccacttttaaaaccagagttaggggctgtgtgtggcacgctgggttctgagggcatccctcccgcccccccaggccagcccccagtggtgccagcagcacctgcccctcacctccacctcttggtctcgtctgaagcctcagtctgtgtgtctgtcccagggacaatctggtctcctcctgtgtgctgtggctggcatggcctcagtgtctgagggcttgtcctgggaggggtatcaagaatccaattctcacctggttgtaggacctcttgggggatgctaggagggcgccctggcacagccagggattgcctagggctgaggggcccaggagaagctacttctctcccagaaaggggctccctcctgcatctgcagtcggatgcccagaccgcccactctggacagcccacaatgcctcctccgtcctgccatgcccattcgcatgtgtcttgtccatctccgctcctgtgatgtgggtcagtcctttgtggtgccgcgtccagggctgcagggtcccacgtcagtgagcagtgggtggccggtggagggggtggtggtggccgggctcccttcctgcccatggcacctagaacagcagtgaggtctcagagaagcccccgcctgggctccctgggagctaaccttgcagcctctgggttatctttggcaaaggggtctaaagtcccctatccccagcccctctacttcccctgctgggcagcagtggctgcccagtgagtggtgctatccatggaggggggagggagctgggcagcgctgactaggcggcgggtggggctaagagagtttctgcagggacccagctgcagggtcagcagcctgtgggccctgagtggggtctttgttgtcctcaggtgggctgtgggggaagtagcggagaaatgaagtgacgccaggggccaggcatgggtgttcttttccgtgttgttcacattttctctctttctctctctctccactaatcatgtttctctctctctcctcgttttgttgcatgacttgtgccggttctcgtgattgttccctgctcgtgtctcacagactgtccccatttagcctgagacttttttcctgagtccccagctgggcagatccctcagggctaaacccaaggaaatgcccagcaacccccaacccaccccagccccgcgtgcgcccctccggtgcccgcagctggtgtgaacagtaagtactttggcggtgcctggagaccagggcagaaaagccagctgtgctgactgagggcccagcctcgggttctccttgctccaaagtttaaaaaaaaatgaccctctcgcagatgctcatctcagcccatttcaagcctggaaaccatctctgagacgctgcccatgctgccatttcatcactgcaggcctgtgggtctagtgggggcctgggggccctgggctgggggaggcagggcccccagcctctggaaagcaggtgggaatggaggctcctagccactatctcatccaaaggatggggcaggggcgggggctcacacctttgaccctattcatgggttccccagatttatacagttggcccctcgttggtttctctttcttcaagccacccctctggagttggggagggagaatgccccagtttctgaaagcatcttaaaccatagatagacgaacagcccaggggcctgggccccttcacagagcaagacttaagcttccccacccaatcattagtccctcctcaaaggttagggttgagagaagcagtaggccctaggggtgtcccgggaatcccccaggagggaaaggtgccaggctatcatccctccagggatccctgatggatgttccttgtcccctgcccaaaaccatcccgaactttgggccctttagtgattgtgagagctgggagcccccagggcctgggggcttgtggacagaaccagtgggcgggggcccagcattcagagccagagaagggtctcaggcggcaccatctccacagaggcagaggcagagagaaggcacccccctctgacccacccctccccaggcaagaactgcaggctgtggacacctcccctggcagaggatggccaacagagactcagcaagtcctcactcccctcccagaaggagacgctgcctgggaggacccactgttctccccttgaggaaaatccatgcagggtgctatgggcctcaacccccacatcgtcatccgcgtcctctccatactgtttccctcccctctcccaacaccctcctccctcagcccggagacccttggatggaagactgggccagccagagtgggaggcaggaccagcgtgtctgcgagcacacgtgtgtgcctgcagacatgccccaagaccccagagacgccccggccccagtcacatggtgtcagagttaccttggcaactggcctttttggttcagagtaaattgggaagtgaagcccctgggatttgtcgagaaacgcactgtacgtgaaatgctttgccatcttgtacgaaagactttttttttaagttccaaaattatgatgggatttttttggatttgctttacgaataaatctgattggtccatttctcttttga

SEQ ID NO: 168300 - DNA, 3563 bp, Homo sapiens
  Payload ID: 13121
  Gene Symbol: KCNC2
  Gene Name: potassium channel, voltage gated Shaw related subfamily C, member 2
  Uniprot ID: Q96PR1
  ENST ID: ENST00000298972
  CDS Start-End: 562-2403
actctttcctgagccctgtgcttcggatggcggcgggaggttgatggcgagtggtgctgaagggacagctccagcagtggctgatttgggggagaaacaaaatctgcagatggaatccgagcagggcgacttcaccttcaagtggtgagctctcctgacctgcggccagtctccactccattcacggccagccgatctgcccgctcccggaggggtcgggcagtgccggctggacccgccccgagctccatggtttgcccaaccctgcgcgatggtgactctgggcgcggaggttggcgactggcaaatccgcagatcacagaatgaaggcggggagcgcggccggcggccggcgggggctttctcccccaccccagcgcccagggaagcggctcaaccacctgaatccggaaaacgccaacaagtagtttctcgtcggagaagggcggctcacctgggcgccaagactcagtcccgctgcccagagaacctcgtccactcggaaaccaaagcagaaccacttttctctcggtctcgttaagtcatgtctgagtcacagagatgggcaagatcgagaacaacgagagggtgatcctcaatgtcgggggcacccggcacgaaacctaccgcagcaccctcaagaccctgcctggaacacgcctggcccttcttgcctcctccgagcccccaggcgactgcttgaccacggcgggcgacaagctgcagccgtcgccgcctccactgtcgccgccgccgagagcgcccccgctgtcccccgggccaggcggctgcttcgagggcggcgcgggcaactgcagttcccgcggcggcagggccagcgaccatcccggtggcggccgcgagttcttcttcgaccggcacccgggcgtcttcgcctatgtgctcaattactaccgcaccggcaagctgcactgccccgcagacgtgtgcgggccgctcttcgaggaggagctggccttctggggcatcgacgagaccgacgtggagccctgctgctggatgacctaccggcagcaccgcgacgccgaggaggcgctggacatcttcgagacccccgacctcattggcggcgaccccggcgacgacgaggacctggcggccaagaggctgggcatcgaggacgcggcggggctcgggggccccgacggcaaatctggccgctggaggaggctgcagccccgcatgtgggccctcttcgaagacccctactcgtccagagccgccaggtttattgcttttgcttctttattcttcatcctggtttcaattacaactttttgcctggaaacacatgaagctttcaatattgttaaaaacaagacagaaccagtcatcaatggcacaagtgttgttctacagtatgaaattgaaacggatcctgccttgacgtatgtagaaggagtgtgtgtggtgtggtttacttttgaatttttagtccgtattgttttttcacccaataaacttgaattcatcaaaaatctcttgaatatcattgactttgtggccatcctacctttctacttagaggtgggactcagtgggctgtcatccaaagctgctaaagatgtgcttggcttcctcagggtggtaaggtttgtgaggatcctgagaattttcaagctcacccgccattttgtaggtctgagggtgcttggacatactcttcgagctagtactaatgaatttttgctgctgataattttcctggctctaggagttttgatatttgctaccatgatctactatgccgagagagtgggagctcaacctaacgacccttcagctagtgagcacacacagttcaaaaacattcccattgggttctggtgggctgtagtgaccatgactaccctgggttatggggatatgtacccccaaacatggtcaggcatgctggtgggagccctgtgtgctctggctggagtgctgacaatagccatgccagtgcctgtcattgtcaataattttggaatgtactactccttggcaatggcaaagcagaaacttccaaggaaaagaaagaagcacatccctcctgctcctcaggcaagctcacctactttttgcaagacagaattaaatatggcctgcaatagtacacagagtgacacatgtctgggcaaagacaatcgacttctggaacataacagatcagtgttatcaggtgacgacagtacaggaagtgagccgccactatcacccccagaaaggctccccatcagacgctctagtaccagagacaaaaacagaagaggggaaacatgtttcctactgacgacaggtgattacacgtgtgcttctgatggagggatcaggaaagataactgcaaagaggttgtcattactggttacacgcaagccgaggccagatctcttacttaatgacttggggaaggcacaaaacatgagagaaagtgttgtacagaatttatcatggattattgactgctgagaaagggacagtggaatttagccataccaaggactatactggaaacagacttctgctgctgaatgtgccctgatgtgaccaggttgcacttggaagagatcctcgcgtcttcatgaggcacttaaagcttataaaagaactgcggctggaactcatctggtgctccccatgagagtgctctgcttgtagactggccagtgtccatgaaacaactgtaaataccaacatgtgtgcatgggtcaacagtcttggccatttctcatcaaaagaagccaaattcatgatcaacatctctgaagtttcaagtaaggcccacacttctttgaattactcttcatgggcccacattaggttgtgctgtgaattacttaaggcagtgatactgatgtagtatagttttgtcttaatttcccttatttctacttctttggttgaatctatgaacttgattgtataattttcttataaattactgatgtaatcagcttgtcaattatgttgtgaaattgttagtattcatttatcaaaaatgacctatgtttagtcacatatttgtttagttctgggaaattgttatagcttaaatggaactcaccaacattattcatagtttaagtcttttatcattattacctcaattataaatattacaaaaacataattctggcaatgagagtatttttttattcaatgatcaaggagcaatgtcagtatatagtagaatatcaattaaattatatcctaaaatgtatattttgcataaaagagatattctttaatcaattacttttttgtgagttttgtggcaaatgaagcttgtacgtgtctttaaaactgttgtagatgaaactgtataagatttttacatcttgcttaatcaatattttcagagtctattagttcccctgggattctgaatataacatatagcctattataaatccctgtatcgtggaccttttgtgaacatttcaaggcgcatgcacaaccttgatgataaccagtggaaatgtaactaactgaaatgaagaataaaaggcaaatgagctggggataaacttgaatgttatctgattaaattactcaaatt

SEQ ID NO: 168301 - DNA, 3344 bp, Homo sapiens
  Payload ID: 13121
  Gene Symbol: KCNC2
  Gene Name: potassium channel, voltage gated Shaw related subfamily C, member 2
  Uniprot ID: Q96PR1
  ENST ID: ENST00000350228
  CDS Start-End: 545-2221
gtgcttcggatggcggcgggaggttgatggcgagtggtgctgaagggacagctccagcagtggctgatttgggggagaaacaaaatctgcagatggaatccgagcagggcgacttcaccttcaagtggtgagctctcctgacctgcggccagtctccactccattcacggccagccgatctgcccgctcccggaggggtcgggcagtgccggctggacccgccccgagctccatggtttgcccaaccctgcgcgatggtgactctgggcgcggaggttggcgactggcaaatccgcagatcacagaatgaaggcggggagcgcggccggcggccggcgggggctttctcccccaccccagcgcccagggaagcggctcaaccacctgaatccggaaaacgccaacaagtagtttctcgtcggagaagggcggctcacctgggcgccaagactcagtcccgctgcccagagaacctcgtccactcggaaaccaaagcagaaccacttttctctcggtctcgttaagtcatgtctgagtcacagagatgggcaagatcgagaacaacgagagggtgatcctcaatgtcgggggcacccggcacgaaacctaccgcagcaccctcaagaccctgcctggaacacgcctggcccttcttgcctcctccgagcccccaggcgactgcttgaccacggcgggcgacaagctgcagccgtcgccgcctccactgtcgccgccgccgagagcgcccccgctgtcccccgggccaggcggctgcttcgagggcggcgcgggcaactgcagttcccgcggcggcagggccagcgaccatcccggtggcggccgcgagttcttcttcgaccggcacccgggcgtcttcgcctatgtgctcaattactaccgcaccggcaagctgcactgccccgcagacgtgtgcgggccgctcttcgaggaggagctggccttctggggcatcgacgagaccgacgtggagccctgctgctggatgacctaccggcagcaccgcgacgccgaggaggcgctggacatcttcgagacccccgacctcattggcggcgaccccggcgacgacgaggacctggcggccaagaggctgggcatcgaggacgcggcggggctcgggggccccgacggcaaatctggccgctggaggaggctgcagccccgcatgtgggccctcttcgaagacccctactcgtccagagccgccaggtttattgcttttgcttctttattcttcatcctggtttcaattacaactttttgcctggaaacacatgaagctttcaatattgttaaaaacaagacagaaccagtcatcaatggcacaagtgttgttctacagtatgaaattgaaacggatcctgccttgacgtatgtagaaggagtgtgtgtggtgtggtttacttttgaatttttagtccgtattgttttttcacccaataaacttgaattcatcaaaaatctcttgaatatcattgactttgtggccatcctacctttctacttagaggtgggactcagtgggctgtcatccaaagctgctaaagatgtgcttggcttcctcagggtggtaaggtttgtgaggatcctgagaattttcaagctcacccgccattttgtaggtctgagggtgcttggacatactcttcgagctagtactaatgaatttttgctgctgataattttcctggctctaggagttttgatatttgctaccatgatctactatgccgagagagtgggagctcaacctaacgacccttcagctagtgagcacacacagttcaaaaacattcccattgggttctggtgggctgtagtgaccatgactaccctgggttatggggatatgtacccccaaacatggtcaggcatgctggtgggagccctgtgtgctctggctggagtgctgacaatagccatgccagtgcctgtcattgtcaataattttggaatgtactactccttggcaatggcaaagcagaaacttccaaggaaaagaaagaagcacatccctcctgctcctcaggcaagctcacctactttttgcaagacagaattaaatatggcctgcaatagtacacagagtgacacatgtctgggcaaagacaatcgacttctggaacataacagatcagataactgcaaagaggttgtcattactggttacacgcaagccgaggccagatctcttacttaatgacttggggaaggcacaaaacatgagagaaagtgttgtacagaatttatcatggattattgactgctgagaaagggacagtggaatttagccataccaaggactatactggaaacagacttctgctgctgaatgtgccctgatgtgaccaggttgcacttggaagagatcctcgcgtcttcatgaggcacttaaagcttataaaagaactgcggctggaactcatctggtgctccccatgagagtgctctgcttgtagactggccagtgtccatgaaacaactgtaaataccaacatgtgtgcatgggtcaacagtcttggccatttctcatcaaaagaagccaaattcatgatcaacatctctgaagtttcaagtaaggcccacacttctttgaattactcttcatgggcccacattaggttgtgctgtgaattacttaaggcagtgatactgatgtagtatagttttgtcttaatttcccttatttctacttctttggttgaatctatgaacttgattgtataattttcttataaattactgatgtaatcagcttgtcaattatgttgtgaaattgttagtattcatttatcaaaaatgacctatgtttagtcacatatttgtttagttctgggaaattgttatagcttaaatggaactcaccaacattattcatagtttaagtcttttatcattattacctcaattataaatattacaaaaacataattctggcaatgagagtatttttttattcaatgatcaaggagcaatgtcagtatatagtagaatatcaattaaattatatcctaaaatgtatattttgcataaaagagatattctttaatcaattacttttttgtgagttttgtggcaaatgaagcttgtacgtgtctttaaaactgttgtagatgaaactgtataagatttttacatcttgcttaatcaatattttcagagtctattagttcccctgggattctgaatataacatatagcctattataaatccctgtatcgtggaccttttgtgaacatttcaaggcgcatgcacaaccttgatgataaccagtggaaatgtaactaactgaaatgaagaataaaaggcaaatgagctgggg

SEQ ID NO: 168302 - DNA, 2485 bp, Homo sapiens
  Payload ID: 13121
  Gene Symbol: KCNC2
  Gene Name: potassium channel, voltage gated Shaw related subfamily C, member 2
  Uniprot ID: Q96PR1
  ENST ID: ENST00000393288
  CDS Start-End: 249-2105
agatcacagaatgaaggcggggagcgcggccggcggccggcgggggctttctcccccaccccagcgcccagggaagcggctcaaccacctgaatccggaaaacgccaacaagtagtttctcgtcggagaagggcggctcacctgggcgccaagactcagtcccgctgcccagagaacctcgtccactcggaaaccaaagcagaaccacttttctctcggtctcgttaagtcatgtctgagtcacagagatgggcaagatcgagaacaacgagagggtgatcctcaatgtcgggggcacccggcacgaaacctaccgcagcaccctcaagaccctgcctggaacacgcctggcccttcttgcctcctccgagcccccaggcgactgcttgaccacggcgggcgacaagctgcagccgtcgccgcctccactgtcgccgccgccgagagcgcccccgctgtcccccgggccaggcggctgcttcgagggcggcgcgggcaactgcagttcccgcggcggcagggccagcgaccatcccggtggcggccgcgagttcttcttcgaccggcacccgggcgtcttcgcctatgtgctcaattactaccgcaccggcaagctgcactgccccgcagacgtgtgcgggccgctcttcgaggaggagctggccttctggggcatcgacgagaccgacgtggagccctgctgctggatgacctaccggcagcaccgcgacgccgaggaggcgctggacatcttcgagacccccgacctcattggcggcgaccccggcgacgacgaggacctggcggccaagaggctgggcatcgaggacgcggcggggctcgggggccccgacggcaaatctggccgctggaggaggctgcagccccgcatgtgggccctcttcgaagacccctactcgtccagagccgccaggtttattgcttttgcttctttattcttcatcctggtttcaattacaactttttgcctggaaacacatgaagctttcaatattgttaaaaacaagacagaaccagtcatcaatggcacaagtgttgttctacagtatgaaattgaaacggatcctgccttgacgtatgtagaaggagtgtgtgtggtgtggtttacttttgaatttttagtccgtattgttttttcacccaataaacttgaattcatcaaaaatctcttgaatatcattgactttgtggccatcctacctttctacttagaggtgggactcagtgggctgtcatccaaagctgctaaagatgtgcttggcttcctcagggtggtaaggtttgtgaggatcctgagaattttcaagctcacccgccattttgtaggtctgagggtgcttggacatactcttcgagctagtactaatgaatttttgctgctgataattttcctggctctaggagttttgatatttgctaccatgatctactatgccgagagagtgggagctcaacctaacgacccttcagctagtgagcacacacagttcaaaaacattcccattgggttctggtgggctgtagtgaccatgactaccctgggttatggggatatgtacccccaaacatggtcaggcatgctggtgggagccctgtgtgctctggctggagtgctgacaatagccatgccagtgcctgtcattgtcaataattttggaatgtactactccttggcaatggcaaagcagaaacttccaaggaaaagaaagaagcacatccctcctgctcctcaggcaagctcacctactttttgcaagacagaattaaatatggcctgcaatagtacacagagtgacacatgtctgggcaaagacaatcgacttctggaacataacagatcagtgttatcaggtgacgacagtacaggaagtgagccgccactatcacccccagaaaggctccccatcagacgctctagtaccagagacaaaaacagaagaggggaaacatgtttcctactgacgacaggtgattacacgtgtgcttctgatggagggatcaggaaaggaattagaaatgggcattccatcctacatcacctggataatggcaccaaatgccattatttaagaatcatcttttaaccctataaagctggaagattaaatatgctggaaaaagagttgtccatttaaacttaagtatgctttattggcttaggaaataaaaaatgaaaagagaaaaagtagcctacttatttctctttttttcaagaatacattctgaaatttaaaaatattagtcaagcttatatcttacttaagttgctttgcctaatttttaaatgagttctagtattctatatgccaaaattatattaatgctaactataatctgggaaaaaatatattttgaagtattgtaacaataatttgtgatggctggtttaatcttttcaaaatggcaactacagtgagcttcatttttttagagttataaattgtctcaatattaaattctttgt

SEQ ID NO: 168303 - DNA, 2168 bp, Homo sapiens
  Payload ID: 13121
  Gene Symbol: KCNC2
  Gene Name: potassium channel, voltage gated Shaw related subfamily C, member 2
  Uniprot ID: Q96PR1
  ENST ID: ENST00000540018
  CDS Start-End: 273-2024
gaggttggcgactggcaaatccgcagatcacagaatgaaggcggggagcgcggccggcggccggcgggggctttctcccccaccccagcgcccagggaagcggctcaaccacctgaatccggaaaacgccaacaagtagtttctcgtcggagaagggcggctcacctgggcgccaagactcagtcccgctgcccagagaacctcgtccactcggaaaccaaagcagaaccacttttctctcggtctcgttaagtcatgtctgagtcacagagatgggcaagatcgagaacaacgagagggtgatcctcaatgtcgggggcacccggcacgaaacctaccgcagcaccctcaagaccctgcctggaacacgcctggcccttcttgcctcctccgagcccccaggcgactgcttgaccacggcgggcgacaagctgcagccgtcgccgcctccactgtcgccgccgccgagagcgcccccgctgtcccccgggccaggcggctgcttcgagggcggcgcgggcaactgcagttcccgcggcggcagggccagcgaccatcccggtggcggccgcgagttcttcttcgaccggcacccgggcgtcttcgcctatgtgctcaattactaccgcaccggcaagctgcactgccccgcagacgtgtgcgggccgctcttcgaggaggagctggccttctggggcatcgacgagaccgacgtggagccctgctgctggatgacctaccggcagcaccgcgacgccgaggaggcgctggacatcttcgagacccccgacctcattggcggcgaccccggcgacgacgaggacctggcggccaagaggctgggcatcgaggacgcggcggggctcgggggccccgacggcaaatctggccgctggaggaggctgcagccccgcatgtgggccctcttcgaagacccctactcgtccagagccgccaggtttattgcttttgcttctttattcttcatcctggtttcaattacaactttttgcctggaaacacatgaagctttcaatattgttaaaaacaagacagaaccagtcatcaatggcacaagtgttgttctacagtatgaaattgaaacggatcctgccttgacgtatgtagaaggagtgtgtgtggtgtggtttacttttgaatttttagtccgtattgttttttcacccaataaacttgaattcatcaaaaatctcttgaatatcattgactttgtggccatcctacctttctacttagaggtgggactcagtgggctgtcatccaaagctgctaaagatgtgcttggcttcctcagggtggtaaggtttgtgaggatcctgagaattttcaagctcacccgccattttgtaggtctgagggtgcttggacatactcttcgagctagtactaatgaatttttgctgctgataattttcctggctctaggagttttgatatttgctaccatgatctactatgccgagagagtgggagctcaacctaacgacccttcagctagtgagcacacacagttcaaaaacattcccattgggttctggtgggctgtagtgaccatgactaccctgggttatggggatatgtacccccaaacatggtcaggcatgctggtgggagccctgtgtgctctggctggagtgctgacaatagccatgccagtgcctgtcattgtcaataattttggaatgtactactccttggcaatggcaaagcagaaacttccaaggaaaagaaagaagcacatccctcctgctcctcaggcaagctcacctactttttgcaagacagaattaaatatggcctgcaatagtacacagagtgacacatgtctgggcaaagacaatcgacttctggaacataacagatcaggatatgaaaaatcccgaagcttaaacaacatagcgggcttggcaggcaatgctctgaggctctctccagtaacatcaccctacaactctccttgtcctctgaggcgctctcgatctcccatcccatctatcttgtaaaccaaacaaccaaactgcatcagtcggctaaattgtattaattcaagtgctgtttaccccataatggaaataattaaatgtagagttactccaggctccattaatacagtataaatcttgcatgatactacaatttgaagtcag

SEQ ID NO: 168304 - DNA, 2931 bp, Homo sapiens
  Payload ID: 13121
  Gene Symbol: KCNC2
  Gene Name: potassium channel, voltage gated Shaw related subfamily C, member 2
  Uniprot ID: Q96PR1
  ENST ID: ENST00000550433
  CDS Start-End: 22-1911
agtcatgtctgagtcacagagatgggcaagatcgagaacaacgagagggtgatcctcaatgtcgggggcacccggcacgaaacctaccgcagcaccctcaagaccctgcctggaacacgcctggcccttcttgcctcctccgagcccccaggcgactgcttgaccacggcgggcgacaagctgcagccgtcgccgcctccactgtcgccgccgccgagagcgcccccgctgtcccccgggccaggcggctgcttcgagggcggcgcgggcaactgcagttcccgcggcggcagggccagcgaccatcccggtggcggccgcgagttcttcttcgaccggcacccgggcgtcttcgcctatgtgctcaattactaccgcaccggcaagctgcactgccccgcagacgtgtgcgggccgctcttcgaggaggagctggccttctggggcatcgacgagaccgacgtggagccctgctgctggatgacctaccggcagcaccgcgacgccgaggaggcgctggacatcttcgagacccccgacctcattggcggcgaccccggcgacgacgaggacctggcggccaagaggctgggcatcgaggacgcggcggggctcgggggccccgacggcaaatctggccgctggaggaggctgcagccccgcatgtgggccctcttcgaagacccctactcgtccagagccgccaggtttattgcttttgcttctttattcttcatcctggtttcaattacaactttttgcctggaaacacatgaagctttcaatattgttaaaaacaagacagaaccagtcatcaatggcacaagtgttgttctacagtatgaaattgaaacggatcctgccttgacgtatgtagaaggagtgtgtgtggtgtggtttacttttgaatttttagtccgtattgttttttcacccaataaacttgaattcatcaaaaatctcttgaatatcattgactttgtggccatcctacctttctacttagaggtgggactcagtgggctgtcatccaaagctgctaaagatgtgcttggcttcctcagggtggtaaggtttgtgaggatcctgagaattttcaagctcacccgccattttgtaggtctgagggtgcttggacatactcttcgagctagtactaatgaatttttgctgctgataattttcctggctctaggagttttgatatttgctaccatgatctactatgccgagagagtgggagctcaacctaacgacccttcagctagtgagcacacacagttcaaaaacattcccattgggttctggtgggctgtagtgaccatgactaccctgggttatggggatatgtacccccaaacatggtcaggcatgctggtgggagccctgtgtgctctggctggagtgctgacaatagccatgccagtgcctgtcattgtcaataattttggaatgtactactccttggcaatggcaaagcagaaacttccaaggaaaagaaagaagcacatccctcctgctcctcaggcaagctcacctactttttgcaagacagaattaaatatggcctgcaatagtacacagagtgacacatgtctgggcaaagacaatcgacttctggaacataacagatcagtgttatcaggtgacgacagtacaggaagtgagccgccactatcacccccagaaaggctccccatcagacgctctagtaccagagacaaaaacagaagaggggaaacatgtttcctactgacgacaggtgattacacgtgtgcttctgatggagggatcaggaaagtgttgtacagaatttatcatggattattgactgctgagaaagggacagtggaatttagccataccaaggactatactggaaacagacttctgctgctgaatgtgccctgatgtgaccaggttgcacttggaagagatcctcgcgtcttcatgaggcacttaaagcttataaaagaactgcggctggaactcatctggtgctccccatgagagtgctctgcttgtagactggccagtgtccatgaaacaactgtaaataccaacatgtgtgcatgggtcaacagtcttggccatttctcatcaaaagaagccaaattcatgatcaacatctctgaagtttcaagtaaggcccacacttctttgaattactcttcatgggcccacattaggttgtgctgtgaattacttaaggcagtgatactgatgtagtatagttttgtcttaatttcccttatttctacttctttggttgaatctatgaacttgattgtataattttcttataaattactgatgtaatcagcttgtcaattatgttgtgaaattgttagtattcatttatcaaaaatgacctatgtttagtcacatatttgtttagttctgggaaattgttatagcttaaatggaactcaccaacattattcatagtttaagtcttttatcattattacctcaattataaatattacaaaaacataattctggcaatgagagtatttttttattcaatgatcaaggagcaatgtcagtatatagtagaatatcaattaaattatatcctaaaatgtatattttgcataaaagagatattctttaatcaattacttttttgtgagttttgtggcaaatgaagcttgtacgtgtctttaaaactgttgtagatgaaactgtataagatttttacatcttgcttaatcaatattttcagagtctattagttcccctgggattctgaatataacatatagcctattataaatccctgtatcgtggaccttttgtgaacatttcaaggcgcatgcacaaccttgatgataaccagtggaaatgtaactaactgaaatgaagaataaaaggcaaatgagctggggataaacttgaatgttatctgattaaattactcaaattatt

SEQ ID NO: 168305 - DNA, 5625 bp, Homo sapiens
  Payload ID: 13121
  Gene Symbol: KCNC2
  Gene Name: potassium channel, voltage gated Shaw related subfamily C, member 2
  Uniprot ID: Q96PR1
  ENST ID: ENST00000549446
  CDS Start-End: 682-2598
gtggagagtggggtgtaaataaggcaggcagaagctccagagagggtggagacagagcttcacggaagaaaaatatgtgaacctggttggtacacatagcttctccagacccacccacccactctttcctgagccctgtgcttcggatggcggcgggaggttgatggcgagtggtgctgaagggacagctccagcagtggctgatttgggggagaaacaaaatctgcagatggaatccgagcagggcgacttcaccttcaagtggtgagctctcctgacctgcggccagtctccactccattcacggccagccgatctgcccgctcccggaggggtcgggcagtgccggctggacccgccccgagctccatggtttgcccaaccctgcgcgatggtgactctgggcgcggaggttggcgactggcaaatccgcagatcacagaatgaaggcggggagcgcggccggcggccggcgggggctttctcccccaccccagcgcccagggaagcggctcaaccacctgaatccggaaaacgccaacaagtagtttctcgtcggagaagggcggctcacctgggcgccaagactcagtcccgctgcccagagaacctcgtccactcggaaaccaaagcagaaccacttttctctcggtctcgttaagtcatgtctgagtcacagagatgggcaagatcgagaacaacgagagggtgatcctcaatgtcgggggcacccggcacgaaacctaccgcagcaccctcaagaccctgcctggaacacgcctggcccttcttgcctcctccgagcccccaggcgactgcttgaccacggcgggcgacaagctgcagccgtcgccgcctccactgtcgccgccgccgagagcgcccccgctgtcccccgggccaggcggctgcttcgagggcggcgcgggcaactgcagttcccgcggcggcagggccagcgaccatcccggtggcggccgcgagttcttcttcgaccggcacccgggcgtcttcgcctatgtgctcaattactaccgcaccggcaagctgcactgccccgcagacgtgtgcgggccgctcttcgaggaggagctggccttctggggcatcgacgagaccgacgtggagccctgctgctggatgacctaccggcagcaccgcgacgccgaggaggcgctggacatcttcgagacccccgacctcattggcggcgaccccggcgacgacgaggacctggcggccaagaggctgggcatcgaggacgcggcggggctcgggggccccgacggcaaatctggccgctggaggaggctgcagccccgcatgtgggccctcttcgaagacccctactcgtccagagccgccaggtttattgcttttgcttctttattcttcatcctggtttcaattacaactttttgcctggaaacacatgaagctttcaatattgttaaaaacaagacagaaccagtcatcaatggcacaagtgttgttctacagtatgaaattgaaacggatcctgccttgacgtatgtagaaggagtgtgtgtggtgtggtttacttttgaatttttagtccgtattgttttttcacccaataaacttgaattcatcaaaaatctcttgaatatcattgactttgtggccatcctacctttctacttagaggtgggactcagtgggctgtcatccaaagctgctaaagatgtgcttggcttcctcagggtggtaaggtttgtgaggatcctgagaattttcaagctcacccgccattttgtaggtctgagggtgcttggacatactcttcgagctagtactaatgaatttttgctgctgataattttcctggctctaggagttttgatatttgctaccatgatctactatgccgagagagtgggagctcaacctaacgacccttcagctagtgagcacacacagttcaaaaacattcccattgggttctggtgggctgtagtgaccatgactaccctgggttatggggatatgtacccccaaacatggtcaggcatgctggtgggagccctgtgtgctctggctggagtgctgacaatagccatgccagtgcctgtcattgtcaataattttggaatgtactactccttggcaatggcaaagcagaaacttccaaggaaaagaaagaagcacatccctcctgctcctcaggcaagctcacctactttttgcaagacagaattaaatatggcctgcaatagtacacagagtgacacatgtctgggcaaagacaatcgacttctggaacataacagatcagtgttatcaggtgacgacagtacaggaagtgagccgccactatcacccccagaaaggctccccatcagacgctctagtaccagagacaaaaacagaagaggggaaacatgtttcctactgacgacaggtgattacacgtgtgcttctgatggagggatcaggaaaggatatgaaaaatcccgaagcttaaacaacatagcgggcttggcaggcaatgctctgaggctctctccagtaacatcaccctacaactctccttgtcctctgaggcgctctcgatctcccatcccatctatcttgtaaaccaaacaaccaaactgcatcagtcggctaaattgtattaattcaagtgctgtttaccccataatggaaataattaaatgtagagttactccaggctccattaatacagtataaatcttgcatgatactacaatttgaagtcagaaatgccacttgggtagctaatgaatcttacccaggctttaaagattgtctaaagtagtgctaagatccctcctattaattgccctgatatccttttgcaataaaatgacagatagtgtcagatattgaccagtgcactaatatataaacataccttcagggagatatatttaaaacagtgtgcttccaaatgccaaccacttcattggaactttatttcttgtgactgtaaaccattctgaagatgtctgggatcctatcttgattgcacacgacatgacttgtgtcagctcatttgcatggaccatcttgtctctatcacctgaaagcaatgttgcagagttcggggactgtggatagctcaggatatgtgtacttgcatcgaaccatcctgctgatatgaaagcattggtcgactgttctgcatgttgaattgtggggcagggagggcacttttctccttgacatttttttcttattatttgaaagaaatatatgttttaaatagtttaatttcttgattgatttacttttcttcaaaaatgctgtattggagttctgaatgtctctggttgtttgcacacagataactgcaaagaggttgtcattactggttacacgcaagccgaggccagatctcttacttaatgacttggggaaggcacaaaacatgagagaaaggtaactgccagccaggcttgcattgtttagccagaaattgctgcttggttctagactctttaaaaaaaaaaaatacccagggtttgtcatcattttcagaggcagagtgccaaatatcacccaaagctcttgtgtcttttttttacccccttattttatttttatttattaattttttgtgcaaacatcaaatgtcactggtgttcacagaaggcttttttgactagccttaaattcctgagtcaaaagattaatcagattttcaggcagtgtttaatcaggtgctttgtcctgtatgttgttcttgtctgtcttagctccctgtctttcctgtatatgccatctgtctccatgaagcacagaaatgcctctgtaagatgtttatgattttaatatttactccctccaaacccgactccataccattttttgctatttggagcagcctctctgctttgtgtataaattaatgatgctctgtagactacctaagttaatcggcactgtgaatctttttgataagcagggtttaagcagcaatttcaccattgcacttggttgcctgctgcagtgtcagtttctactacctagcaaccagcattcattactacactccaacaaaatccttagggagtcatattcagtctgagtggaagaaagtctatttatgcattcctatgaattcaacagcaatagcgtgtctcatgtattgagcatgtgagggaagaaaaagaccgtaatataaatagagggataaataatatcactaaggcatttgggagccttgagactgctgattaattcctatttctcatgtttattttttgttaggaagacaattgtcacttttattattggccacgaaacatgtattactctatatccccaagtcctagagcatgacctgcatgttggagatgttgtacagcaatgtatttatccagacatacatatatgatatttagagacacagtgattcttttgataacaccacacatagaacattataattacacacaaatttatggtaaaagaattaatatgctgtctggtgctgctgttattgactacagtgttgtacagaatttatcatggattattgactgctgagaaagggacagtggaatttagccataccaaggactatactggaaacagacttctgctgctgaatgtgccctgatgtgaccaggttgcacttggaagagatcctcgcgtcttcatgaggcacttaaagcttataaaagaactgcggctggaactcatctggtgctccccatgagagtgctctgcttgtagactggccagtgtccatgaaacaactgtaaataccaacatgtgtgcatgggtcaacagtcttggccatttctcatcaaaagaagccaaattcatgatcaacatctctgaagtttcaagtaaggcccacacttctttgaattactcttcatgggcccacattaggttgtgctgtgaattacttaaggcagtgatactgatgtagtatagttttgtcttaatttcccttatttctacttctttggttgaatctatgaacttgattgtataattttcttataaattactgatgtaatcagcttgtcaattatgttgtgaaattgttagtattcatttatcaaaaatgacctatgtttagtcacatatttgtttagttctgggaaattgttatagcttaaatggaactcaccaacattattcatagtttaagtcttttatcattattacctcaattataaatattacaaaaacataattctggcaatgagagtatttttttattcaatgatcaaggagcaatgtcagtatatagtagaatatcaattaaattatatcctaaaatgtatattttgcataaaagagatattctttaatcaattacttttttgtgagttttgtggcaaatgaagcttgtacgtgtctttaaaactgttgtagatgaaactgtataagatttttacatcttgcttaatcaatattttcagagtctattagttcccctgggattctgaatataacatatagcctattataaatccctgtatcgtggaccttttgtgaacatttcaaggcgcatgcacaaccttgatgataaccagtggaaatgtaactaactgaaatgaagaataaaaggcaaatgagctggggataaacttgaatgttatctgattaaattactcaaattat

SEQ ID NO: 168306 - DNA, 3026 bp, Homo sapiens
  Payload ID: 13121
  Gene Symbol: KCNC2
  Gene Name: potassium channel, voltage gated Shaw related subfamily C, member 2
  Uniprot ID: Q96PR1
  ENST ID: ENST00000548513
  CDS Start-End: 22-1863
agtcatgtctgagtcacagagatgggcaagatcgagaacaacgagagggtgatcctcaatgtcgggggcacccggcacgaaacctaccgcagcaccctcaagaccctgcctggaacacgcctggcccttcttgcctcctccgagcccccaggcgactgcttgaccacggcgggcgacaagctgcagccgtcgccgcctccactgtcgccgccgccgagagcgcccccgctgtcccccgggccaggcggctgcttcgagggcggcgcgggcaactgcagttcccgcggcggcagggccagcgaccatcccggtggcggccgcgagttcttcttcgaccggcacccgggcgtcttcgcctatgtgctcaattactaccgcaccggcaagctgcactgccccgcagacgtgtgcgggccgctcttcgaggaggagctggccttctggggcatcgacgagaccgacgtggagccctgctgctggatgacctaccggcagcaccgcgacgccgaggaggcgctggacatcttcgagacccccgacctcattggcggcgaccccggcgacgacgaggacctggcggccaagaggctgggcatcgaggacgcggcggggctcgggggccccgacggcaaatctggccgctggaggaggctgcagccccgcatgtgggccctcttcgaagacccctactcgtccagagccgccaggtttattgcttttgcttctttattcttcatcctggtttcaattacaactttttgcctggaaacacatgaagctttcaatattgttaaaaacaagacagaaccagtcatcaatggcacaagtgttgttctacagtatgaaattgaaacggatcctgccttgacgtatgtagaaggagtgtgtgtggtgtggtttacttttgaatttttagtccgtattgttttttcacccaataaacttgaattcatcaaaaatctcttgaatatcattgactttgtggccatcctacctttctacttagaggtgggactcagtgggctgtcatccaaagctgctaaagatgtgcttggcttcctcagggtggtaaggtttgtgaggatcctgagaattttcaagctcacccgccattttgtaggtctgagggtgcttggacatactcttcgagctagtactaatgaatttttgctgctgataattttcctggctctaggagttttgatatttgctaccatgatctactatgccgagagagtgggagctcaacctaacgacccttcagctagtgagcacacacagttcaaaaacattcccattgggttctggtgggctgtagtgaccatgactaccctgggttatggggatatgtacccccaaacatggtcaggcatgctggtgggagccctgtgtgctctggctggagtgctgacaatagccatgccagtgcctgtcattgtcaataattttggaatgtactactccttggcaatggcaaagcagaaacttccaaggaaaagaaagaagcacatccctcctgctcctcaggcaagctcacctactttttgcaagacagaattaaatatggcctgcaatagtacacagagtgacacatgtctgggcaaagacaatcgacttctggaacataacagatcagtgttatcaggtgacgacagtacaggaagtgagccgccactatcacccccagaaaggctccccatcagacgctctagtaccagagacaaaaacagaagaggggaaacatgtttcctactgacgacaggtgattacacgtgtgcttctgatggagggatcaggaaagataactgcaaagaggttgtcattactggttacacgcaagccgaggccagatctcttacttaatgacttggggaaggcacaaaacatgagagaaagtgttgtacagaatttatcatggattattgactgctgagaaagggacagtggaatttagccataccaaggactatactggaaacagacttctgctgctgaatgtgccctgatgtgaccaggttgcacttggaagagatcctcgcgtcttcatgaggcacttaaagcttataaaagaactgcggctggaactcatctggtgctccccatgagagtgctctgcttgtagactggccagtgtccatgaaacaactgtaaataccaacatgtgtgcatgggtcaacagtcttggccatttctcatcaaaagaagccaaattcatgatcaacatctctgaagtttcaagtaaggcccacacttctttgaattactcttcatgggcccacattaggttgtgctgtgaattacttaaggcagtgatactgatgtagtatagttttgtcttaatttcccttatttctacttctttggttgaatctatgaacttgattgtataattttcttataaattactgatgtaatcagcttgtcaattatgttgtgaaattgttagtattcatttatcaaaaatgacctatgtttagtcacatatttgtttagttctgggaaattgttatagcttaaatggaactcaccaacattattcatagtttaagtcttttatcattattacctcaattataaatattacaaaaacataattctggcaatgagagtatttttttattcaatgatcaaggagcaatgtcagtatatagtagaatatcaattaaattatatcctaaaatgtatattttgcataaaagagatattctttaatcaattacttttttgtgagttttgtggcaaatgaagcttgtacgtgtctttaaaactgttgtagatgaaactgtataagatttttacatcttgcttaatcaatattttcagagtctattagttcccctgggattctgaatataacatatagcctattataaatccctgtatcgtggaccttttgtgaacatttcaaggcgcatgcacaaccttgatgataaccagtggaaatgtaactaactgaaatgaagaataaaaggcaaatgagctggggataaacttgaatgttatctgattaaattactcaaattatt

SEQ ID NO: 168307 - DNA, 5447 bp, Homo sapiens
  Payload ID: 13122
  Gene Symbol: KCNC3
  Gene Name: potassium channel, voltage gated Shaw related subfamily C, member 3
  ENST ID: ENST00000376959
  CDS Start-End: 165-2351
cccagccacagccccgccccacctcccccaggccaatcagtttggttcctctcccctaagccacgcccccgctacctcgctcctcctcccacccaatcccgtcggtctctccccccgtgtccccgcccctgcgtccccgcccctcccgccccgccccccgtccaatgctgagctcagtctgcgtctcgtccttccgcgggcgccagggggccagcaagcagcagccggcgccaccgccgcagccgcccgagtccccgccgccgccaccgctgccgccgcagcagcagcagcctgcgcagcccggccccgccgcgtccccggcgggccccccggcaccccgcgggcccggggaccggcgcgccgagccatgccccgggctgccggcggcggccatggggcggcacggcggcggcggtggcgacagcggcaagatcgtgatcaacgtgggcggcgtgcgccatgagacgtaccgctcgacgctgcgcaccctgccggggacgcggctggccggcctgacggagcccgaggcggcggcacgcttcgactacgacccgggcgccgacgagttcttctttgaccggcacccgggagtcttcgcgtacgtgctcaactactaccgcaccggcaagctgcactgcccagccgacgtgtgcgggcccctgtttgaggaggagctcggcttctggggcatcgacgagaccgacgtggaggcctgctgctggatgacctaccggcagcatcgcgacgctgaggaggcgctcgactccttcgaggcgcccgaccccgcgggcgccgccaacgccgccaacgccgcaggcgcccacgacggaggcctggacgacgaggcgggcgcgggcggcggcggcctggacggagcgggcggcgagctcaagcgcctctgcttccaggacgcgggcggcggcgccggggggccgccagggggcgcgggcggcgcgggcggcacatggtggcgccgctggcagccccgcgtgtgggcgctcttcgaggacccctactcgtcgcgggctgccaggtatgtggccttcgcctccctcttcttcatcctcatctccatcaccaccttctgcctggaaacccatgagggcttcatccatattagcaacaagacggtgacccaggcctccccgatccccggggcacctccggagaacatcaccaacgtggaggtggagacggagcccttcctgacctacgtggagggggtgtgcgtggtctggttcaccttcgagttcctcatgcgcatcaccttctgcccagacaaggtggagtttcttaaaagcagcctcaacatcatcgactgtgtggccatcctgcccttctatctcgaggtgggcctctcgggcctcagctccaaggccgccaaagacgtgctgggcttcctgcgggtggtccgcttcgtccgcatcctgcgcatcttcaagctgacccggcacttcgtggggctgcgcgtgctgggacacacgctccgcgccagcaccaacgagttcctgctgctcatcatcttcctggccctgggggtgctcatcttcgccaccatgatttactacgctgagcgcattggcgccgaccccgatgacatcctgggctccaaccacacctacttcaagaacatccccattggcttctggtgggctgtggtcaccatgacgaccctgggctatggagacatgtaccccaagacgtggtcggggatgctggtcggggcgctgtgtgccctggcgggggtgctgaccatcgccatgcctgtgcccgtcattgtcaacaactttggcatgtactattcgctggccatggccaagcagaagctgcccaagaagaagaacaaacacatcccccggcccccgcaaccgggctcgcccaactactgcaagcctgacccacccccgccacccccgccccacccgcaccacggcagcgggggcatcagcccgccgccacccatcaccccaccctccatgggggtgactgtggccggggcctacccagcggggccccacacgcaccccgggctgctcagggggggagcgggtgggctggggatcatggggctgcctcctctgccagcccccggcgagccttgcccgttggctcaggaggaggtgattgagatcaaccgggcagatcctcgccccaatggggatccggcagcagctgcgcttgcccacgaggactgcccagccattgaccagcctgccatgtccccggaagacaagagccccatcacgcctggaagccgtggccgctatagccgggaccgagcctgcttcctcctcaccgactatgccccttcccctgatggctccatccgaaaagctcttgtcaccgcctgagacctcgcgagactttcggtcccccccgccccttccccccaggttacgagaaatcccgcagcctcagcagcatcgcgggcctgagcggggtgtccctgcgcctcgcgccccttgccaccccccctggctctccccgggccgcccgccgcgctcccccgaccctgccctccatcctttagcgctcccctcccccctgtggggggactcgggggtgaccgggaagaaggtcaaaggagctgggggtggggggtggggaaaagggtttttttaaaaaaaatcaaaaagtcattaataatatgcaaccgagatgacgatgccagcagacacccccgggcccctcacccccaacctgggcccccaggatggagagaggggccacagcccgtccccccaactcttccctccccaaaaaaagccttctcaggtctccacgagccataggacatccccctgccatcaacttgtgtaaataagtccaaattatgccagttacatcttggggcacctccccccacacactgcatgccttccctaacctggagcccccactccaagtccacctcagcaataagccgccaggggccgcatgcgcgggtttgaggggcaggcactctgggaagggggtggcacctcccgggggtcgggctggcctttaaggtctccagccttcccatccttcaccccaggaggacaaccaaccctgtgcgttgattaggagaaaacaaaccagaaactagaaacagtgtaggggaaggaggaacagttacccaagccccagatcggagttgagctcaggtggcgggagggcggggccgagttgagctcaggtggtgggagggcggggcgggctttggacctgctccctcagcctttaggagaattcctctggtgaatttcaccctctcatccgccccttcccccagggacctgctcgcctctattcttgctgcatggactcagacctcctatcccagaattcctgggatgatctggccctagcacacgaaattccccgactatctccctccattcccaggacatgagacctgcacccagaattctgagactgaccctggcacgccacatctcccaatccccacacactcctgcgacttaacctctgcacacagaggctccctgaaccaccctccctccccactcctgccaccccaaacacccccaccaaattccctgaactgcgtcccagcacttctcaaacctccaagacttgacccagctcttttcagctcaaattcagcctttgggatgctccaaatccttcccacaactgacatttcttggacacccccaaagcctcaggcctgttccgcacccatatccccaaagccctaacagacttgtccagcccaggttcccttgatgctagaacttccaagataggcgcaacctgtctgcaattccagggaaccagaccctccccaagcaccctctttgtcttacgcctaaccctgagtctcttccctgagatggtgccccaaaggtaccctcttcacagacaccagtgtttcccagagggttgtatttgtacctttggtggtgtgctaaggtttgaggcagtatgaggacaaacacttgttttaaaagttttgtctctaatacgcattttgtacagaagccgataagtgcaggcatcgctgcttggctaggacacggtttatttaggttaagagtgtttccatttaaagtagtccacagatgatcacagaggctgttcccgaagggaggaacactggagtatcagaagattgggaaccgacaacacccagctcggctgggatcccagccccccttccccagcggtcctcaccgcgtcacgctcgcgggtggaaaatcatttcccacctcctatcctggctcaaggatgcgctacctcccccaagcccagagaccacaccggtcccagactctttagcggaccccccttttggagccggggtcccacggaattagccacctccctccctctgctcccacggcctcaggaaccccccacccgagggtggatggggggcgtcactgagcacgattctcgatgcaacgattcctatgcaaggggcattttgagtcccccccatccttccctcggaccctaaaccctggtgaagcaggggtgaggggtggggcgggttttggtgggggcggggcaaagggctaggggctccagacaccagggtacggggtggggactgattatattgccaaagggttcaacttctttaacaagcccccccgtttcccctgaccttcacgaaagccgaaggaggcggggaaagggggtgagggtcttttccaaagggtactgacctcttcccaacgtctccccctgctcgccagtccgccacacgtacccagcttttgagttcagcttttcaaaataaccacaatcatgataaacttctacaaaacgtgattctcctcccctcccaccccatcccccaagtcaatagtgtgggattcggggagggagagagcgagctaaagggactctttccaagtccggctcccccttttccccccggccgccagggtgcctgcacctacacgcatgcgctgcatgacgcgccccccacacgcatgtcgcacccctcctgcgctccgggaacgcacggacacgggccagggggcggggcgattggggaggaatgaatggcggggggtcttcctgagctccgcggctcaccctccccaacacacacacacacacacacagagcaataagtttctctcactcaaatgtgggcggggcgggcctagcctgtcgctggtggggggagtggtgagggggcgctctcagggatgggggcggggttcggagacagtgtggggaggggaggtctgcaaatcgtccaactctggtgctaatggcgggtcttctcagcccacccgcagggcagggagggaggggtcggcgtggccccttccccaagcctcccccacgcccaccctgggtgcatgaaccgcccaatgcagaagctgccgcatgtcacccccctctccccaaagaaaaagtgtcatgcccccttcccacccaccctcactccccaccaaaataaacgtttccttttcatttaaaaa

SEQ ID NO: 168308 - DNA, 3347 bp, Homo sapiens
  Payload ID: 13122
  Gene Symbol: KCNC3
  Gene Name: potassium channel, voltage gated Shaw related subfamily C, member 3
  ENST ID: ENST00000474951
  CDS Start-End: 122-256
aggtcgcgacggcagccacaggtggcagtcgggggtggctgtaattgatcctcgccccaatggggatccggcagcagctgcgcttgcccacgaggactgcccagccattgaccagcctgccatgtccccggaagacaagagccccatcacgcctggaagccgtggccgctatagccgggaccgagcctgcttcctcctcaccgactatgccccttcccctgatggctccatccgaaaagctcttgtcaccgcctgagacctcgcgagactttcggtcccccccgccccttccccccaggttacgagaaatcccgcagcctcagcagcatcgcgggcctgagcggggtgtccctgcgcctcgcgccccttgccaccccccctggctctccccgggccgcccgccgcgctcccccgaccctgccctccatcctttagcgctcccctcccccctgtggggggactcgggggtgaccgggaagaaggtcaaaggagctgggggtggggggtggggaaaagggtttttttaaaaaaaatcaaaaagtcattaataatatgcaaccgagatgacgatgccagcagacacccccgggcccctcacccccaacctgggcccccaggatggagagaggggccacagcccgtccccccaactcttccctccccaaaaaaagccttctcaggtctccacgagccataggacatccccctgccatcaacttgtgtaaataagtccaaattatgccagttacatcttggggcacctccccccacacactgcatgccttccctaacctggagcccccactccaagtccacctcagcaataagccgccaggggccgcatgcgcgggtttgaggggcaggcactctgggaagggggtggcacctcccgggggtcgggctggcctttaaggtctccagccttcccatccttcaccccaggaggacaaccaaccctgtgcgttgattaggagaaaacaaaccagaaactagaaacagtgtaggggaaggaggaacagttacccaagccccagatcggagttgagctcaggtggcgggagggcggggccgagttgagctcaggtggtgggagggcggggcgggctttggacctgctccctcagcctttaggagaattcctctggtgaatttcaccctctcatccgccccttcccccagggacctgctcgcctctattcttgctgcatggactcagacctcctatcccagaattcctgggatgatctggccctagcacacgaaattccccgactatctccctccattcccaggacatgagacctgcacccagaattctgagactgaccctggcacgccacatctcccaatccccacacactcctgcgacttaacctctgcacacagaggctccctgaaccaccctccctccccactcctgccaccccaaacacccccaccaaattccctgaactgcgtcccagcacttctcaaacctccaagacttgacccagctcttttcagctcaaattcagcctttgggatgctccaaatccttcccacaactgacatttcttggacacccccaaagcctcaggcctgttccgcacccatatccccaaagccctaacagacttgtccagcccaggttcccttgatgctagaacttccaagataggcgcaacctgtctgcaattccagggaaccagaccctccccaagcaccctctttgtcttacgcctaaccctgagtctcttccctgagatggtgccccaaaggtaccctcttcacagacaccagtgtttcccagagggttgtatttgtacctttggtggtgtgctaaggtttgaggcagtatgaggacaaacacttgttttaaaagttttgtctctaatacgcattttgtacagaagccgataagtgcaggcatcgctgcttggctaggacacggtttatttaggttaagagtgtttccatttaaagtagtccacagatgatcacagaggctgttcccgaagggaggaacactggagtatcagaagattgggaaccgacaacacccagctcggctgggatcccagccccccttccccagcggtcctcaccgcgtcacgctcgcgggtggaaaatcatttcccacctcctatcctggctcaaggatgcgctacctcccccaagcccagagaccacaccggtcccagactctttagcggaccccccttttggagccggggtcccacggaattagccacctccctccctctgctcccacggcctcaggaaccccccacccgagggtggatggggggcgtcactgagcacgattctcgatgcaacgattcctatgcaaggggcattttgagtcccccccatccttccctcggaccctaaaccctggtgaagcaggggtgaggggtggggcgggttttggtgggggcggggcaaagggctaggggctccagacaccagggtacggggtggggactgattatattgccaaagggttcaacttctttaacaagcccccccgtttcccctgaccttcacgaaagccgaaggaggcggggaaagggggtgagggtcttttccaaagggtactgacctcttcccaacgtctccccctgctcgccagtccgccacacgtacccagcttttgagttcagcttttcaaaataaccacaatcatgataaacttctacaaaacgtgattctcctcccctcccaccccatcccccaagtcaatagtgtgggattcggggagggagagagcgagctaaagggactctttccaagtccggctcccccttttccccccggccgccagggtgcctgcacctacacgcatgcgctgcatgacgcgccccccacacgcatgtcgcacccctcctgcgctccgggaacgcacggacacgggccagggggcggggcgattggggaggaatgaatggcggggggtcttcctgagctccgcggctcaccctccccaacacacacacacacacacacagagcaataagtttctctcactcaaatgtgggcggggcgggcctagcctgtcgctggtggggggagtggtgagggggcgctctcagggatgggggcggggttcggagacagtgtggggaggggaggtctgcaaatcgtccaactctggtgctaatggcgggtcttctcagcccacccgcagggcagggagggaggggtcggcgtggccccttccccaagcctcccccacgcccaccctgggtgcatgaaccgcccaatgcagaagctgccgcatgtcacccccctctccccaaagaaaaagtgtcatgcccccttcccacccaccctcactccccaccaaaataaacgtttccttttcattt

SEQ ID NO: 168309 - DNA, 3176 bp, Homo sapiens
  Payload ID: 13122
  Gene Symbol: KCNC3
  Gene Name: potassium channel, voltage gated Shaw related subfamily C, member 3
  Uniprot ID: Q14003
  ENST ID: ENST00000477616
  CDS Start-End: 296-2569
accggtcccgcctcccttgacgccccgccccgcccctcctccctgctctcttagaaagagccaatcgctccgtctcattggcggccccgactcgtccagctgggtcgcgttagagtgcccgccccactcctcccagccacagccccgccccacctcccccaggccaatcagtttggttcctctcccctaagccacgcccccgctacctcgctcctcctcccacccaatcccgtcggtctctccccccgtgtccccgcccctgcgtccccgcccctcccgccccgccccccgtccaatgctgagctcagtctgcgtctcgtccttccgcgggcgccagggggccagcaagcagcagccggcgccaccgccgcagccgcccgagtccccgccgccgccaccgctgccgccgcagcagcagcagcctgcgcagcccggccccgccgcgtccccggcgggccccccggcaccccgcgggcccggggaccggcgcgccgagccatgccccgggctgccggcggcggccatggggcggcacggcggcggcggtggcgacagcggcaagatcgtgatcaacgtgggcggcgtgcgccatgagacgtaccgctcgacgctgcgcaccctgccggggacgcggctggccggcctgacggagcccgaggcggcggcacgcttcgactacgacccgggcgccgacgagttcttctttgaccggcacccgggagtcttcgcgtacgtgctcaactactaccgcaccggcaagctgcactgcccagccgacgtgtgcgggcccctgtttgaggaggagctcggcttctggggcatcgacgagaccgacgtggaggcctgctgctggatgacctaccggcagcatcgcgacgctgaggaggcgctcgactccttcgaggcgcccgaccccgcgggcgccgccaacgccgccaacgccgcaggcgcccacgacggaggcctggacgacgaggcgggcgcgggcggcggcggcctggacggagcgggcggcgagctcaagcgcctctgcttccaggacgcgggcggcggcgccggggggccgccagggggcgcgggcggcgcgggcggcacatggtggcgccgctggcagccccgcgtgtgggcgctcttcgaggacccctactcgtcgcgggctgccaggtatgtggccttcgcctccctcttcttcatcctcatctccatcaccaccttctgcctggaaacccatgagggcttcatccatattagcaacaagacggtgacccaggcctccccgatccccggggcacctccggagaacatcaccaacgtggaggtggagacggagcccttcctgacctacgtggagggggtgtgcgtggtctggttcaccttcgagttcctcatgcgcatcaccttctgcccagacaaggtggagtttcttaaaagcagcctcaacatcatcgactgtgtggccatcctgcccttctatctcgaggtgggcctctcgggcctcagctccaaggccgccaaagacgtgctgggcttcctgcgggtggtccgcttcgtccgcatcctgcgcatcttcaagctgacccggcacttcgtggggctgcgcgtgctgggacacacgctccgcgccagcaccaacgagttcctgctgctcatcatcttcctggccctgggggtgctcatcttcgccaccatgatttactacgctgagcgcattggcgccgaccccgatgacatcctgggctccaaccacacctacttcaagaacatccccattggcttctggtgggctgtggtcaccatgacgaccctgggctatggagacatgtaccccaagacgtggtcggggatgctggtcggggcgctgtgtgccctggcgggggtgctgaccatcgccatgcctgtgcccgtcattgtcaacaactttggcatgtactattcgctggccatggccaagcagaagctgcccaagaagaagaacaaacacatcccccggcccccgcaaccgggctcgcccaactactgcaagcctgacccacccccgccacccccgccccacccgcaccacggcagcgggggcatcagcccgccgccacccatcaccccaccctccatgggggtgactgtggccggggcctacccagcggggccccacacgcaccccgggctgctcagggggggagcgggtgggctggggatcatggggctgcctcctctgccagcccccggcgagccttgcccgttggctcaggaggaggtgattgagatcaaccgggcagatcctcgccccaatggggatccggcagcagctgcgcttgcccacgaggactgcccagccattgaccagcctgccatgtccccggaagacaagagccccatcacgcctggaagccgtggccgctatagccgggaccgagcctgcttcctcctcaccgactatgccccttcccctgatggctccatccgaaaagccactggtgctcccccactgcccccccaagactggcgtaagccaggccccccaagcttcttgcccgacctcaacgccaacgccgcggcctggatatccccctagtggacgaaccccctccccccgggctcttgtcaccgcctgagacctcgcgagactttcggtcccccccgccccttccccccaggttagcaattgggaatggctgggagggggtgtccccaagacactgggcttcaaatctccccccaagccctccctcctacgatcaagacaccttttgtccagacagctcccttagcgttgcctggaaaagccacagagctccctgcgggggtgcagaaccctgcaggcagccccaggctttgcagaaaccacacacactgttgctggatcttgagtcccattagctgtgagatgcctgtgagagccttcccgcacccgtcagaagctcagagccttcttggaccctttaaagatgtccctctccccagccctccgcctcaccgccccccacccccgaccccgtccttagaatcttctggaggagcctccctccccccccacccccccccactgctcctggagttctcatcggattccccaagggcactgccagcttcgctccactcagcccccttgcagaccccaccccctgcctgctctctttccctacaactaggtcagcccccagccccgctacggcggccgc

SEQ ID NO: 168310 - DNA, 18750 bp, Homo sapiens
  Payload ID: 13123
  Gene Symbol: KCNC4
  Gene Name: potassium channel, voltage gated Shaw related subfamily C, member 4
  Uniprot ID: Q03721
  ENST ID: ENST00000369787
  CDS Start-End: 28-1935
ccaagccggagccccgcagcgcttcttatgatcagctcggtgtgtgtctcctcctaccgcgggcgcaagtcggggaacaagcctccgtccaaaacatgtctgaaggaggagatggccaagggcgaggcgtcggagaagatcatcatcaacgtgggcggcacgcgacatgagacctaccgcagcaccctgcgcaccctaccgggaacccgcctcgcctggctggccgaccccgacggcgggggccggcccgagaccgatggcggcggtgtgggtagcagcggcagcagcggcggcgggggctgcgagttcttcttcgacaggcacccgggcgtcttcgcctacgtgctcaactactaccgcaccggcaagctgcactgccccgcggacgtgtgcgggccgctcttcgaagaggagctcaccttctggggcatcgacgagaccgacgtggaaccctgctgctggatgacctaccggcagcaccgcgacgccgaggaggcgctcgacatcttcgagagcccggacggaggcggcagcggcgcggggcccagcgacgaggccggcgacgatgagcgggagctggccctgcagcgactgggcccccacgagggaggcgcgggccatggcgccgggtctgggggctgccgcggctggcagccccgcatgtgggcgctcttcgaggatccctactcctcccgggccgctagggtagtggcctttgcctctctcttcttcatcctggtctccatcaccactttctgcctggagacccatgaggcctttaatatcgaccgcaacgtgacagagatcctccgcgtagggaacatcaccagcgtgcacttccggcgggaggtagagacagagcccatcctgacctacatcgagggcgtatgtgtgctgtggttcacactggagttcctggtgcgcatcgtgtgctgccccgacacgctggacttcgtcaagaacctgctcaacatcatcgactttgtggccatcctgcccttctacctggaggtggggctgagcggcctgtcatccaaggcggcccgcgacgtgctgggcttcctgcgcgtggtgcgcttcgtgcgcatcctgcgtatcttcaagctcacacgccacttcgtggggctacgcgtgctgggccacaccctgagggccagcaccaatgagttcctgctgcttatcatcttcctggccctgggtgtgctcatctttgccaccatgatctactacgctgagcgcattggggccaggccctccgaccctcggggtaatgaccacaccgacttcaagaacatccccattggcttctggtgggctgtggtcaccatgacgacactgggctacggagacatgtaccccaagacgtggtcaggcatgctggtaggggcactgtgtgcactggctggcgtgctcaccatcgccatgccggtgcctgtcatcgtcaacaacttcggcatgtactactccctggccatggccaagcagaagctgcccaagaaacggaagaagcacgtgccacggccggcgcagctggagtcacccatgtactgcaagtctgaggagacttccccccgggacagcacctgcagtgataccagcccccctgcccgggaagagggtatgatcgagaggaaacgggcagactctaagcagaatggcgatgccaacgcagtgctgtctgatgaggagggagctggcctcacccaacccctggcctcctccccgacccccgaggagcgccgggccctgcgacgctccaccactcgagacagaaacaagaaggcagctgcctgcttcctgctcagcactggggactatgcctgcgccgatggtagtgtccggaaaggcacattcgtcctccgtgaccttccccttcagcattcacctgaggctgcatgccctccaactgctgggactctgttcctgccacattgaggaagggggctgggcacgacatggcatcatactcaggagccttcttcaccagctccttgggacaatggaatatcccagggtggtgacagcagatggagctacttgggggagagctcaagttggtcaggcaacagctggggtgatggcctgtgagccacaggccacatcaggaactttccccactgcctccatgcaaggctgcagagctatggtccctttctccactgcactggagctttgaagacctaagaggctagtggttcctggagctagtggttacctgaacaggtatggcgatgagctacaacatcacctgagtcaccagagttgggttggcagaggggtgaagggttcaccccattccctgacccatccatgctcttcctggccttttagccctgggttcctcatgccttccagctctgctcctggtctactccttagcccacaccctgtgggtcagcagctggcttccttctaacgtctcattctttgtttctccctttcttttgctgaactccctgtccccccaaccccagaaggcaatgttgagccgaaagcgtgcgtcccagtgtctcacacctgtgctctttaaacacagagacctgccaagacgccctctcgtccaactatgcccaggctgaagtcctcaccctctcttaaagcggcaccaacgtgagagagacaggcagacagacagaaagccagaggcttagggaaactctggaacccagacaagaatcttttcgctgggaaagactcagatatccttgtttgcacaggactggtggaaaatctcccatgcgaccctcggggcccagagccatctgggtctgatgttctgttccattgtacatcgaagagatatatatgcacatatagtatctatattcatacatattatactcttgtgtgtagtgcacgtgctattggtggtttgtcttctttgttaggctgtgtctccctaagcccttgccccacccagagtttcccgtccccttcactgatttctgttgtttctgctgactgtgtgggtggaatgtcccaagaaaagtgcatctgggaattgccagtccagctgggtagtcccaggctcctgtcttggggatgtttcccctgtcagcaagtaacctggtgaagtctattgaaggccagactgccccctagggtcactgcttcactagccgcaccccaccccagattggggttctacctcccaccccacatcctcgttgtggggggacttccaggggctcctctgcagcctcctccactacttcctccaccccatctatgtccttgacttaggggggcattttgtcttttttagatttgattttgttctctctcctttgtctgtttgttgtcaaagatgctgctgggcagacaggcagggaaaggatctgtctgcccatctggcccagggggtccgagaagggaagccttgggcaagaggagaccagttgcaatactgtacttcctggtcagtggccagaggatgcgtgcaatagcagaggccaggtgaccccttcagccttggcctctgcccctcccttggccctccctccctgctcctccctggtgttggtcagtccttttctaaagctgtcccctcgtgtgtgtctggggcatgcccaggctgggccctgtgccctgtctgcatgcctccaactgtcatgctgtgctcgagccccaataaagacatctggagcatcctgctgctcctgctgtgtgagcacctgcctctgcctctcctttctggctctgtgtctattgggacctcctggggctctcacccctgacacctgaggagtgcacacactcagcataaccccactccagcaggaatcatcagtgtggcctgacccctgcattttacagggagagactagtgctcagagagggcaagtcatctgcccaaagccacacaaagaggactaacccaggaccccgagacccaaacagtgttctaatatccactgctgtccccaagcccctgccataacatggaagaaaagactgttctttgtttaaggaattccactgcattccgtttgtgcagggggcctcccctcctccctgcaattgtaccagttctaaatgggccaagaccctggggacgccaaagttattggctggatggctgatgaactgaggccaactagagactggtggcacaactggggaccacttagggatggagagtgaacacatcctgggcctggataggacggggagatggtgagtgatggtcagacgtggcccttggctctcactgttgttatccctctcacgttcacataggggcacacgcagggccagcttcatgggtgtgcaacctgtgcagccactcagaagggccccatgctgggtttaatgcttggctgtcaccatcatgaaattaataatggttgaacaggggccctgcgtttccatcttgcaccaggctctggcgggtctggttgcctgcttgcctctccttattcttgtcttactcctcactcttactctgggcatctgtgtaggaccataggggcctcaattcaaagtcttgctttgctgcttgctagctgggtgacttgggggtgactcaccgaaatggtttccctgtttgttagggaataatgatggcccctgtttcagagacagagtgaagagcctggcctggtgtcatgtgtctacctgtgatatgacatatagtagcggcacagtgtcagctccctccctgccctgttcctgtcactctcagacttttctccacagacttctgagatctccgtgtccagctgcaccaagaaaggacaagaacacacccgggagctgtcttgggcagtgtagaacagcagggtgaggacggaatggccgaggagagggaagaagccaggggaagcctgttcctgaagtgtaaggaaagatcgggcttggagcctgggccagccgaggcaagggggtggcaggcagccagtgtcaattaaagataaaatttctcctccggtagtggagggcaaacagtggctgtggcccccctagacaggagaaagccatttgcagccaggctggccttggaaaagcttggccaggcgataatgggacgggatgcgctgctgactccataatgatattacgcatcagggcccacggccaaagtggctgttttttctgtagatcgatgtggaaccatttcatggtcaggggctgagaacccagccagcagcaggggtactagatgccagagtggtcctgaggggactgaaggggtggcaactggggtccccagtgaccgtttcaggctgctggaagaggagggggcagtgtgcaggagggtggaggggtggacgagagaagcagcagactgcccctcctccccacctcacagaaacagcaggccgtgctgtcaaggaagaaagggctctggcttcctcctgttccccaaagctggagtcgagcccaaggtagggagctggttaaaagaacaggacattgtttaaaagaataagacagacttttgaagtcaggcagacttgggtttgagtcctgactccatcacttccttgttgtgtgaccctgggcaagttactcagcctctgtgaacgtctatttcctcatcttttaaatgtagtatctgcctgaggccgtgtctctctcattgagccatgaggagaaatgagtcggcgcctgtaaagcctcgcgcacagtgcctagcacataaccattgctagagggagaggggagtattttggggcaactcactccagtaacagatgaccagtttggtttgatgacctcacttttcagtgaatcagcctcatttcactgaagtccttagtccttatctccttgtgaaggaataagaggggatgattatacctaacagcgaacatttattgagtgctgggcagtacatttcatgcttataaagatgcattccaagattgatgttatccttacctttgttttacgaggagaaaaccaacacaacaatgtcaggtcatttctccaaagtcacacagccattaagtagcaaagctgggattcaaactcagtctggctctgtgggtccaatgcttagccactctctgaactgagtggggcttgtgagtcataacctccagtgtaggagtttgtgcttttagtgttatttccttaactgcaattgattctcatagcaaaggtattgttttccccttttacagataagaaaccaaggcttggagaagtgaatcattaaactcactctcccttttacgtgtatgtaccccaccccacacacacataaagcgaggaggaatgtcctcttgggattcattcattaattagcagcaggcaacacccagctcagtgactgcttggttccttccctctgcgaccccactggagttttattctctgacgcacagaagtgggtaagtgggggtaggactgctctggaacccaagttacatgaggagtggctcaagctggagaagtcttggaaacctgatcccaactaccaggtgtttaaagggtacctgtggggaagtgggtttagattcttctctgattgcagagagcagatccggaaataataggtggaaatgttaggagggcagattgggtttaaattttaaaaaatctttttttaatgaaatttttgatttgtaatttttgtgggtacatagtaggtatatataagaaccttattttctgttgtttcccttgctattataaatttattactgccagtcatggtggctcatgcctgtaatcctaacactttgggaagctgaggagagtggattgcttgaggccagaagtttgagaccagcctggataacatagtgagaccccatctctacacaaaaaaaaagaaaaagaaaaattagccaggtgtgatggcatgtgcctgtagccccagcttctcgggaggatttcttgagcccaggaggttgaggctgcagtgagctatgatcataccactgcactccagcctgggcgacagaacgagaccctgtctcaaacaaacatttatttaatacaaggtattggaaaccatccccataccaaatcaacagggaatcccctgtcacccttcctcagtcccactttcctccccagaggtgacatggttaacatctggtgtgggtcctcccaggctttttggaaaaaaaaaaaactttctaacaaaattaccaaatcaaaatgggtttccctgcggggtagtgaagttcccttccctgaaaatgtttggagacacagtggatgatcatgtgctgcaccagggttcgtgggaagtatttctgctcggcgtgggaggtggaattagaagactgtttccaatcctaagactttctgactcacgtggcacacacagctagttagtggtggaggcaggtccagaacacaggtattcagatggggttcagatgaactcctttcctagcaagattttccttaaattcttctctgcctcttcccagcccatcagggatatagggcagggcagagagacatctgtgtctcctctagtctggagcgaggggagtgtcctgggcctgggttgtgatgccatccagtgcccaccctcgtggggctcctgtggcattattgcagtgagcactttctttccgttcctggctccaagccctgtgtgtgcatacactggtacccacacaagaggtagcacgtgagctggctcagtcacttggggctgtggtaaccgcattcaaaatgcagcatcatgctaaagagccgctggggactctggggacaaggctgtctccgacccagctttagggggtgaggagagggagccaaacggctacagctgcaagtcaaagaggtcagaggccttctgatgttggcactggaagcctctcctttctttccccacaggttatgggggcttctccactccccgctcttacttgcctgcttctccagggatccctagaagagcagtggttagcaagcatatgctatagccatcaaatacgagtctacagaaatgtaggcttccccttggggctgagttagggcctctgcttctgaaatgagcaacctctggttgctggtgggggctagggcttgctccctttctctcctcacatactctttcctgggtgacctcatcccctcccattgccttaaacatcttccaggtactggtgtcatccacttgtgtagttccagttcagaaatcccgtcagctccattcattcatttgttcattcattcagcaaacatatgtggcatctctgtcccaggtactgctctacaacctgggtgtacaatagggacccaaacagacactcccttccccatgcactccctgctcacagacacacctgcgtggcagtgcctgggtgtcttcacagctccctgatgccgagctgtgatcccacccttctgcctccctggtccccctcagcgtgctgccaccattcaccttgaggctgagatagatgttgtcaaaaccaccctctcattccttaattcactcactcatttttcgtgcattaaatctttattaaacacctgtgaactctgtcctcagggaaacaatggtgaacaagaccaacaggatccctgccctcatgggacttacattctaatcagggagagaggccagaagaccaatagataaaaaatatctcccacccgtattccaacctattaccaagttctacatttctagctctgcaggagcctcctcccaggtctccctgggtcccatctgcccttctgccaccagtctccacccagtcaccagagagagagcttcttaaaatggaaactggatcagatcatgtcacccctgcttagaaccctgtcaatggctgggttcccacttcgtgtacaatccagactccttaggagggcctgtgatgccctgctgctcctcatggccttcctgcctccgcagacctattcatgcccctgctctcagcccctgagaccagcagctcactttcctgtcagtttcccacacatccccagctctctcaccttcagtgtttttccacttgcttttccctcacggggaccacttcaccccagtccagccccaccccacctccttctcttggctgagaaggcctggctgtaaatttcactttcttggtgaggcgttttcccctcacacatccacgcccctctgcctctgtcagtttccatcactgcagccagtgcattttcttcatggtacttacagtcctttgtaactatgaattgtgtattgcctgcttccctgtaagttgctagggcctataggggctcggtaaatattttatgaacaaatgaatgaatgggctggagataggcctggcatgagcagctgctgaactccatcctctcttattcctcgcaagctgtctccagctggcttttgcacctcatttctagggcattcctgggagtccttggggaataacatgaacgctcttctttttacattatgcatttcctgcctgagaaactgtcagaataatgaggaagccttggagagagagttcccatagcccttcctctctcttccttttagaacctaccattttctacctggtactttttggtacttgtcaaattccccttcccacagtggcgagttgctcagaggtgctggttcatcccagctcccactcgagggcctagcttagtggtccatgcagagtaggtgctcagcgaaatgttgaagtgaatgaaggatatggtgagaaaggaagcaatgagtaagaaggaagagtgagaaagaaggaaagaggaagaggagggaggggcaaaggggttgatgaagagtgaagaagcagagggagggaagtgaggtcagggagtgggaaacggggaaagagaaccctggcccggtgtccacctcaagccagcaccctaccccactccttccagtcttcctggactcggagcctcccaggcctgccccagccttaggtgggacagcagggttcctccagcctgccactgacaccaagggcaccctgaactcagctcagaccccaggctgcccggagcaggagagactgctcctgaagagacttctgcagggacgagagcccaggattccttaacctgaggcccagctccatccctgagatccctagagactcccctcagctcccctcccctcagctcctcatattgagcccctgatccaaggacgattaactccaaatccagcatcagtgatcaaatgttcatagcaaacaaaggaaaacaaacaccacctttcctccttgcctcagccctggggccccagaggcttggctcagagacaggtgccctgcctcctccccacgcccggcacaggcctgccagctgcccctcgagaagaccaggggccagcctcagaggcccggaggatctgttcccagagtagctgttgccacagtgaccctccctggggtggtggctcctaagctgccatgggaggcagagctgtgccactaccacgacgaccaccaccaccaccagggctgccaccacagcaaagctgctcctggggcctccctcctagttaggctgccgagagaccagtctgtgctatcctctcaccatgccaggcagccacagtaccagggaacaggagtcacaatcagcccccttccaacaccccggcagcatcccgctgtctgccccaggacccgctcttcccctgaggggatgacactgcccccctggaaaattgattagggacctcatttctgtcagcaccccactagagatggcaaccagctcccagggcgcctgggggcgggatgttgagggcagcagggaggtaagaaggctccagtgataccaggctccctctgggcctcggtgctaggtggtgacaagctgggtttccctggacaggactggaaagttgctctctaatactctctatctttctgcttgggttctttcccacccctgccagaggctcttgctaactactgtccccttacatactggcacctaaacataaacacacatttccagagtcgtcctgctctcttcattttctgacctatgcacaagaaagtattttgtgtcagtcatcagcactctagtatgaatttagggtccatgtatattttatttcccaggagataggactgttgaccttctctcaacttgtggagtgacagccttgttctctgtgataggaagtcctagcaccagagagctccaagcaggatagataattttttcgattaggagaggaagaaatccaaaacttcctgtgtgggtcaaattaggggccagagctctacaaggaattctggcctgactccaattaacaaagaaggacgtggagcgcaaaagagaaatccaaagtgatatgcaatggaggctgcctctgtctggaagatcttcctgctccttgtgctcccctcttacattctactattgtgtcctcagcctggcaaactcttactcatccctcaaggcccactcaactgtcacctctgagaatccttcctgggctctcccaggtagaattcctctgtcctttatgctctcacagaaccttgaatattcctccattatagcacttactgcagtgataacttgttgcttgtttactcatttatggatgctttccttattaatgtttttacctccagcccctgctcagtggtcaggagctcaaaggtgaacaaaggaatgagtgaatgagtaaggagtgaatgaattagctgccctctgctgacttctgcccttcacccctgtcattctagtccatggttgggttgtaagatttgtccagaataattatccgggatgctggacctctcactctgccatcccaccaccatgtgccagccaagtctcctctcacccacgccaccctcaccatcagtactcccttccaaagttccccatttcccctcaactctccaggcttcagccatctgggcctttctttcctgatgttagtagcttcaatttacatcacagttaacttggaacagcggggggggctatatcctgggtcctttctccctccgtctgcttccttctcagtcttcattagtggtgttctgtgagcctcccacccaccccaactctccgagtgctagttaggtgctcaggtttgtgctcttggatgaaactcctgctacataagtggacatagaaaaagaggctggcaagggttgtttccagaggggtctgagccaatcccacgctgttgctgggcttgaggttccacatctgtgaatgggaattaagcttcccctgccttcatccaaggtgggatgataattaaatgagagtggatggatgggtcctttggaactcctgaagcaccactggaggcaagggattatcattcttctggctttctctctgtcgaggacttgggtgttcctccagagtcagagggcaggtgcctctggaaggtataatagctaacgtggattgagtgtttacgaccagcccaagccccctacatggcttaatggatcagagcagccccaggaggtaagggctctttttatcactcacattttacaggtgaggaaactggagagtaatttgatggagatctcacagatagatttcacaggcgattttgaccatgcttctacactggctctgtggccagccccttggcaccagcaccaccactgccatcgatttctggtccacggccagattgctaattctggctccactggctttgccacttgtgagctgcgtgaccttgggcaaatgacttaacctttctaagcatggtctgtgaaatggagagaaggaaacatctccagattttgcccagaggagtaaatggaggtgggatatgtgaagtggctctagacccaggcagtaaacagtgctcagtgtgtgtccttccctattgacactgacagaccctgcctggcaggcctgagcacaacagaagcactagaagtccttttccagaaattccttgctagggcctctcactgtggactgagaggatggaggcaggtccaactcgaggcagggccttgggacaccagtgctcatgagacaactcactgtcatgaccatttccgccttagcgacccagaagtggtgacacctgtgtgcttgcttcccgaagcagtgagaagccagacggagacccacacagctgctggctctaaaggctgctccctgcacgtgggcacctcagccccaccttccattcctctctctaacctgcttcccggacctgctggggccaggagctgccccaagtcctttccacacacacctgtgagctcctgggaatgagattaaaggaggcagggaggtgagaggaagcacaggggaagactgaaagcagatctcagaagctgagaagaggaagatgaagaggaggaagagggagaagggagagtggcagagagaggagcagtagcccgcggagcagggagagaaaaagcaggtagggaagggggaggggcagaggaggggaaggaggagggcctgcacccggctgtgggcagaggctgcggggcctaaaatgaaccgaacaggctggaaatagaacagctgggcaaaccccaaacgctttgtttgggtgtctgctgagcaagcacgtgaatgagaagaaaggggcaacaatgcaaggcagaagtggctcatttcactctggaggcaggtcagaacaagaggcatgtgttccagtccagcacagattagtcggggttctttttccgggatgttttctttacgtaatcattatttttcacaggctggcttggtggcgggattagcctgacgccaccccatccttggcaggtggaaggtttgggttactttgagaccaagaccactctgggttcttattctaactgtggatgccaccggcttcgggagaagagatcttaatccactttctaaatggaggtttaggaatctaagctgtgtaatggaatactatttcccttattagaacaaaccctaactcgggtgcggtggcacacgtctgtagtcccagctactcagcaggctgagatgggaggatggcttgagcccaggagtttgaggttgcagtgcactatgatgcacctctaaattagtcacggcactgcagcctgggcaacatagcgagactctgtctaaaaataataataataaataacaaaacccagttccaggatggatcaggactagcctgaggggccctgcctgtctcagctcaaagaactgcaccatgcctcacacacaccagcacacttcgccctgggaggtgcccaggccacctgaggttctgccatgggctggttccttccctgatcaccagcagcgccacctctgtgtttttcccctcctctccccacaacccccaacacacaatatgaagaaccttcagtccagaaattagacatgggaccagcagaggctatgaaggtaactggagccaagtggcccccagagctgccatttagcccaatccaaggtgtctgcactgtggggcatttgcttcatcactgacttctctagaattcaggtcagctctacttgggcctgaatgtggacaggaattagggggcccgaactccagcctcgcttccaccatgggccgtgcagtctttggcaacttgcttaacttggctgagcttcagttccccgtttgcaaaattggggataatactgcccacctcagcgggttctcataaagctccaatgagatcctgtgtgcctcctacttagctcaataacttgacattctataaggtttaatttccttccttcctctctcccttcttttctgaatgagctctaagaaccttccccaattcactagagaacctttgaggaaagctaaattgaggagaaaaggaacacagcccagcccacagcctccccatgaggggctggggctggaggggtaggtctggcggaggagggaaggggagacatgagtgatcagaaggtctcaacctaagtgctggcggcttctgtgacagagaggcaactgaacctgtatatggtatttggatcacagctggaaatccggctggattttggctttaataaaatatttgacattttgtggagctcagttttaaacatggggccgagagctggcagacctaggtccattcctcaagttctaactcagttcaccctgctgctctgggcttcagtattctctgctctccctgtcgtcagatggcattcacatgaagacccagctggtgatcaattcgtggcaaaaagtgtcagaagctagaagacttatctccggtcagtgttttcaacatggtagttatcctgcacgtggtgattgtacaaccctaagtggaaataggaccctaaagtccactctcttccaagactagccacttagaaacataccagcaaccataaggaagctgatttaagaccccttggccccgctcccataacacacgcccaacagagttggcttgactatggaaccatcccaaaatctctcctccacactgcctcttctcttcctcttctcttctcttggcctgaagaagcttgctcagtgcacgtatcttgtcttcaggtagaactagaagttgaacaagtcagtttcctctttctgacattgagagggtgggtatcaaggaggatgtttcagagaacgaagaggttcttggctctttgtactatctgtgcctgttccagctctagctgcccttgtttgacctgcttcttgcaggaggtagtggccagcatcgtagggaatgcccatgaagtactctgggcttctccgatgtaaagggtgagaaaaatcaaagccagctcttatctccatccagatggtggggataaaaacagtccaagcccgtttcttgcctcacttgtccagtggctaagctaatgccaaactgggatttctctgacctcatgttaacccgacctcaaggctgccagagtatcagctactaaatcaccaatctataaaagtcatcttgcagccttttccagatcccagaaggagtctttactccatcctgacctcagaagccaccttgcatcctctgccaatgctttcttcttcctgtatttaggaatcacatctatcacttggggtccagaaaacatttttagctaccaaccatgagtcagacttcatccccatttacaaccgtgtgactagagggtagggagttggagaagattcctccagccacagaacagctccttgaacaagcttttgctaaaagacaagtctcctcatgcccttccttttccgaaaagtcttctctgactccctgctggataaaggttagaagcttgagcgtggcttccccagaaccttcaccgtctggtcccagcctctcttttgggcctcagtcagtccctgccctccctcccacacactcgcactccaatcccatgcacatagaagtgtttgaatgtatgtactttcctgctttgggttacacgcttccctttgcttggagtgtcccctggctttcctccacctgtgaatctgctcatcctttgtgaagtcttttctttctttttcttttctttttttttttttggtacacatttattgggtacaagtgcaattttgccacatgcctagttgcacagtagttatatcagggcttttagagtatcggtcactcaaataacatacattgtacccattaagtaatttctcattgtccacccctctcccaccctctctccctctgagtctccattgtccgtcattccactctctacatccatgtgtacacatttttaagctcctacttatgagtgagaacatacttgtctttctgtgtctaacgtatttcacctcttgttccggctgtgttgctgtaaacgacataatttcattctttttatggctgaatagtattccacgtgtatgtgtatcacattttctttatctactaatcatctattggtgggcagggcatttaggttgattccatgtctttgctattgtgaataatactgcagtaaacatacgagtgcaggtactttttttttttttttaggcaagatctagctctgtcaccgagactggagtgcaatgataccatcacagctcactgcagccttgacctctcaggcccaagtgatcctcctctgagtagctgggaccacatgccatcatgcctggctaagttttaattttttgtagagatggggtcttgccatgttacccaggctggtctggaacttctgggcttgggcagtcctcccgcctcagcctcccaaagtgtagggattataggtgggagccaccaggcctggctttcttctagatatattgatttcttctgtgaagtcttttcttttttctttttttttttttttttttgagatagtcttgctctgtcacccaggctggagtgcagtggtgcaatctcagctcactgcaacctctgccttctgggttcaagtgattcttctgcctcagcctctcaagtagctgggactacaggtgcgtgccaccacgcccggctaatttttgtatttttagtaaagacgagtttcaccatattggtcaggctggtctcaaactctgaccttgtgatccacccacctcagcctcccaaagtgctgggattacaggcatgagccaccgcacctggccttgtgaagtcttttctaatccaccctgtcccactggcagaatgtttcgccccttagccagtgatatgcctttacaagagcatatgttgcactagatgtttactcggctgctttccacaggccctttcaaaggccatagattagacccacctttcctgtagccctggccaattagatcacagagacctatgtagatatggtaggaaaaatgatccagaatgtagctgtgacctggaggatgcctgcatgttccttcaatatcatactaaggctttgtctgtcatgaagattattaattctctagaagtgtgctatcaacagatggctattgaacacttgaaatgtggctagtgcctcatgtcaaaatgacaatattttgaatgtgttaaataaattattaaaatgaatttctcctgtttgtttttactttttaatgtggctactagaaaaatttaaattatacccctggttcacattatatatccactggaaagtgctgcagtagcagacaataattgtttgactttgtcatttgctattattaattaagggctcaaagtgtgaagttacatgttatagggttttgtttttgtttttgtttttgtttttttttggcctgttagagattcaagtgatttgtatccagtaggaaaaataaccccagttttatttttctgtaggacattaactagatttgtattttttaaaaaattattttggcgtgccttttaaatcccagttcctcaaatgctctttgaatcaactttattatcgtattgtttcccttgtcagttaatgagttcaataaaatctttgatacatattcatactttaactgtatgagacttgtgtttctaactttttggaaattatactttgacatatctctgtctcctgttcggcttgatggcagagactcaattattaacatacctagtattaagtagggactcagtaaatgttgaatgaataagaagcacttgtttagaattgaggtcgaaagtttaaactgccagccaaactttgtggtgggatccctatcagccacatgtctggagagtggcagatgcaggaaagatgagacgttttcaggatcctgaactatttgggtggtttcccagtttggggggcctgtgatcccaagggaatgctggccaaagcaagtcccttctgtcagctcaagggtgaggtcctctcaggctccccgcccttcccacccacctggggtgctgcaggaagtatggagcccagataggactcttgtcccttcctgcc

SEQ ID NO: 168311 - DNA, 3018 bp, Homo sapiens
  Payload ID: 13123
  Gene Symbol: KCNC4
  Gene Name: potassium channel, voltage gated Shaw related subfamily C, member 4
  ENST ID: ENST00000413138
  CDS Start-End: 9-1883
cgcttcttatgatcagctcggtgtgtgtctcctcctaccgcgggcgcaagtcggggaacaagcctccgtccaaaacatgtctgaaggaggagatggccaagggcgaggcgtcggagaagatcatcatcaacgtgggcggcacgcgacatgagacctaccgcagcaccctgcgcaccctaccgggaacccgcctcgcctggctggccgaccccgacggcgggggccggcccgagaccgatggcggcggtgtgggtagcagcggcagcagcggcggcgggggctgcgagttcttcttcgacaggcacccgggcgtcttcgcctacgtgctcaactactaccgcaccggcaagctgcactgccccgcggacgtgtgcgggccgctcttcgaagaggagctcaccttctggggcatcgacgagaccgacgtggaaccctgctgctggatgacctaccggcagcaccgcgacgccgaggaggcgctcgacatcttcgagagcccggacggaggcggcagcggcgcggggcccagcgacgaggccggcgacgatgagcgggagctggccctgcagcgactgggcccccacgagggaggcgcgggccatggcgccgggtctgggggctgccgcggctggcagccccgcatgtgggcgctcttcgaggatccctactcctcccgggccgctagggtagtggcctttgcctctctcttcttcatcctggtctccatcaccactttctgcctggagacccatgaggcctttaatatcgaccgcaacgtgacagagatcctccgcgtagggaacatcaccagcgtgcacttccggcgggaggtagagacagagcccatcctgacctacatcgagggcgtatgtgtgctgtggttcacactggagttcctggtgcgcatcgtgtgctgccccgacacgctggacttcgtcaagaacctgctcaacatcatcgactttgtggccatcctgcccttctacctggaggtggggctgagcggcctgtcatccaaggcggcccgcgacgtgctgggcttcctgcgcgtggtgcgcttcgtgcgcatcctgcgtatcttcaagctcacacgccacttcgtggggctacgcgtgctgggccacaccctgagggccagcaccaatgagttcctgctgcttatcatcttcctggccctgggtgtgctcatctttgccaccatgatctactacgctgagcgcattggggccaggccctccgaccctcggggtaatgaccacaccgacttcaagaacatccccattggcttctggtgggctgtggtcaccatgacgacactgggctacggagacatgtaccccaagacgtggtcaggcatgctggtaggggcactgtgtgcactggctggcgtgctcaccatcgccatgccggtgcctgtcatcgtcaacaacttcggcatgtactactccctggccatggccaagcagaagctgcccaagaaacggaagaagcacgtgccacggccggcgcagctggagtcacccatgtactgcaagtctgaggagacttccccccgggacagcacctgcagtgataccagcccccctgcccgggaagagggtatgatcgagaggaaacgggcagactctaagcagaatggcgatgccaacgcagtgctgtctgatgaggagggagctggcctcacccaacccctggcctcctccccgacccccgaggagcgccgggccctgcgacgctccaccactcgagacagaaacaagaaggcagctgcctgcttcctgctcagcactggggactatgcctgcgccgatggtagtgtccggaaagaaggcaatgttgagccgaaagcgtgcgtcccagtgtctcacacctgtgctctttaaacacagagacctgccaagacgccctctcgtccaactatgcccaggctgaagtcctcaccctctcttaaagcggcaccaacgtgagagagacaggcagacagacagaaagccagaggcttagggaaactctggaacccagacaagaatcttttcgctgggaaagactcagatatccttgtttgcacaggactggtggaaaatctcccatgcgaccctcggggcccagagccatctgggtctgatgttctgttccattgtacatcgaagagatatatatgcacatatagtatctatattcatacatattatactcttgtgtgtagtgcacgtgctattggtggtttgtcttctttgttaggctgtgtctccctaagcccttgccccacccagagtttcccgtccccttcactgatttctgttgtttctgctgactgtgtgggtggaatgtcccaagaaaagtgcatctgggaattgccagtccagctgggtagtcccaggctcctgtcttggggatgtttcccctgtcagcaagtaacctggtgaagtctattgaaggccagactgccccctagggtcactgcttcactagccgcaccccaccccagattggggttctacctcccaccccacatcctcgttgtggggggacttccaggggctcctctgcagcctcctccactacttcctccaccccatctatgtccttgacttaggggggcattttgtcttttttagatttgattttgttctctctcctttgtctgtttgttgtcaaagatgctgctgggcagacaggcagggaaaggatctgtctgcccatctggcccagggggtccgagaagggaagccttgggcaagaggagaccagttgcaatactgtacttcctggtcagtggccagaggatgcgtgcaatagcagaggccaggtgaccccttcagccttggcctctgcccctcccttggccctccctccctgctcctccctggtgttggtcagtccttttctaaagctgtcccctcgtgtgtgtctggggcatgcccaggctgggccctgtgccctgtctgcatgcctccaactgtcatgctgtgctcgagccccaataaagacatctggagcatcctgctgctcctgctg

SEQ ID NO: 168312 - DNA, 2953 bp, Homo sapiens
  Payload ID: 13123
  Gene Symbol: KCNC4
  Gene Name: potassium channel, voltage gated Shaw related subfamily C, member 4
  Uniprot ID: Q03721
  ENST ID: ENST00000438661
  CDS Start-End: 1-1881
atgatcagctcggtgtgtgtctcctcctaccgcgggcgcaagtcggggaacaagcctccgtccaaaacatgtctgaaggaggagatggccaagggcgaggcgtcggagaagatcatcatcaacgtgggcggcacgcgacatgagacctaccgcagcaccctgcgcaccctaccgggaacccgcctcgcctggctggccgaccccgacggcgggggccggcccgagaccgatggcggcggtgtgggtagcagcggcagcagcggcggcgggggctgcgagttcttcttcgacaggcacccgggcgtcttcgcctacgtgctcaactactaccgcaccggcaagctgcactgccccgcggacgtgtgcgggccgctcttcgaagaggagctcaccttctggggcatcgacgagaccgacgtggaaccctgctgctggatgacctaccggcagcaccgcgacgccgaggaggcgctcgacatcttcgagagcccggacggaggcggcagcggcgcggggcccagcgacgaggccggcgacgatgagcgggagctggccctgcagcgactgggcccccacgagggaggcgcgggccatggcgccgggtctgggggctgccgcggctggcagccccgcatgtgggcgctcttcgaggatccctactcctcccgggccgctagggtagtggcctttgcctctctcttcttcatcctggtctccatcaccactttctgcctggagacccatgaggcctttaatatcgaccgcaacgtgacagagatcctccgcgtagggaacatcaccagcgtgcacttccggcgggaggtagagacagagcccatcctgacctacatcgagggcgtatgtgtgctgtggttcacactggagttcctggtgcgcatcgtgtgctgccccgacacgctggacttcgtcaagaacctgctcaacatcatcgactttgtggccatcctgcccttctacctggaggtggggctgagcggcctgtcatccaaggcggcccgcgacgtgctgggcttcctgcgcgtggtgcgcttcgtgcgcatcctgcgtatcttcaagctcacacgccacttcgtggggctacgcgtgctgggccacaccctgagggccagcaccaatgagttcctgctgcttatcatcttcctggccctgggtgtgctcatctttgccaccatgatctactacgctgagcgcattggggccaggccctccgaccctcggggtaatgaccacaccgacttcaagaacatccccattggcttctggtgggctgtggtcaccatgacgacactgggctacggagacatgtaccccaagacgtggtcaggcatgctggtaggggcactgtgtgcactggctggcgtgctcaccatcgccatgccggtgcctgtcatcgtcaacaacttcggcatgtactactccctggccatggccaagcagaagctgcccaagaaacggaagaagcacgtgccacggccggcgcagctggagtcacccatgtactgcaagtctgaggagacttccccccgggacagcacctgcagtgataccagcccccctgcccgggaagagggtatgatcgagaggaaacgggcagactctaagcagaatggcgatgccaacgcagtgctgtctgatgaggagggagctggcctcacccaacccctggcctcctccccgacccccgaggagcgccgggccctgcgacgctccaccactcgagacagaaacaagaaggcagctgcctgcttcctgctcagcactggggactatgcctgcgccgatggtagtgtccggaaagagacctgccaagacgccctctcgtccaactatgcccaggctgaagtcctcaccctctcttaaagcggcaccaacgtgagagagacaggcagacagacagaaagccagaggcttagggaaactctggaacccagacaagaatcttttcgctgggaaagactcagatatccttgtttgcacaggactggtggaaaatctcccatgcgaccctcggggcccagagccatctgggtctgatgttctgttccattgtacatcgaagagatatatatgcacatatagtatctatattcatacatattatactcttgtgtgtagtgcacgtgctattggtggtttgtcttctttgttaggctgtgtctccctaagcccttgccccacccagagtttcccgtccccttcactgatttctgttgtttctgctgactgtgtgggtggaatgtcccaagaaaagtgcatctgggaattgccagtccagctgggtagtcccaggctcctgtcttggggatgtttcccctgtcagcaagtaacctggtgaagtctattgaaggccagactgccccctagggtcactgcttcactagccgcaccccaccccagattggggttctacctcccaccccacatcctcgttgtggggggacttccaggggctcctctgcagcctcctccactacttcctccaccccatctatgtccttgacttaggggggcattttgtcttttttagatttgattttgttctctctcctttgtctgtttgttgtcaaagatgctgctgggcagacaggcagggaaaggatctgtctgcccatctggcccagggggtccgagaagggaagccttgggcaagaggagaccagttgcaatactgtacttcctggtcagtggccagaggatgcgtgcaatagcagaggccaggtgaccccttcagccttggcctctgcccctcccttggccctccctccctgctcctccctggtgttggtcagtccttttctaaagctgtcccctcgtgtgtgtctggggcatgcccaggctgggccctgtgccctgtctgcatgcctccaactgtcatgctgtgctcgagccccaataaagacatctggagcatcctgctgctcctgctgtgtga

SEQ ID NO: 168313 - DNA, 3487 bp, Homo sapiens
  Payload ID: 13123
  Gene Symbol: KCNC4
  Gene Name: potassium channel, voltage gated Shaw related subfamily C, member 4
  Uniprot ID: Q03721
  ENST ID: ENST00000469655
  CDS Start-End: 158-2065
gggggataggcaggggcaagcccaagccgcagagggggccgccaccgcctcctgcctcctcttcgtctcctccccctcccccgtctgacgctgcctcctcgggaagggtgtttggagggcagcggccgccccaagccggagccccgcagcgcttcttatgatcagctcggtgtgtgtctcctcctaccgcgggcgcaagtcggggaacaagcctccgtccaaaacatgtctgaaggaggagatggccaagggcgaggcgtcggagaagatcatcatcaacgtgggcggcacgcgacatgagacctaccgcagcaccctgcgcaccctaccgggaacccgcctcgcctggctggccgaccccgacggcgggggccggcccgagaccgatggcggcggtgtgggtagcagcggcagcagcggcggcgggggctgcgagttcttcttcgacaggcacccgggcgtcttcgcctacgtgctcaactactaccgcaccggcaagctgcactgccccgcggacgtgtgcgggccgctcttcgaagaggagctcaccttctggggcatcgacgagaccgacgtggaaccctgctgctggatgacctaccggcagcaccgcgacgccgaggaggcgctcgacatcttcgagagcccggacggaggcggcagcggcgcggggcccagcgacgaggccggcgacgatgagcgggagctggccctgcagcgactgggcccccacgagggaggcgcgggccatggcgccgggtctgggggctgccgcggctggcagccccgcatgtgggcgctcttcgaggatccctactcctcccgggccgctagggtagtggcctttgcctctctcttcttcatcctggtctccatcaccactttctgcctggagacccatgaggcctttaatatcgaccgcaacgtgacagagatcctccgcgtagggaacatcaccagcgtgcacttccggcgggaggtagagacagagcccatcctgacctacatcgagggcgtatgtgtgctgtggttcacactggagttcctggtgcgcatcgtgtgctgccccgacacgctggacttcgtcaagaacctgctcaacatcatcgactttgtggccatcctgcccttctacctggaggtggggctgagcggcctgtcatccaaggcggcccgcgacgtgctgggcttcctgcgcgtggtgcgcttcgtgcgcatcctgcgtatcttcaagctcacacgccacttcgtggggctacgcgtgctgggccacaccctgagggccagcaccaatgagttcctgctgcttatcatcttcctggccctgggtgtgctcatctttgccaccatgatctactacgctgagcgcattggggccaggccctccgaccctcggggtaatgaccacaccgacttcaagaacatccccattggcttctggtgggctgtggtcaccatgacgacactgggctacggagacatgtaccccaagacgtggtcaggcatgctggtaggggcactgtgtgcactggctggcgtgctcaccatcgccatgccggtgcctgtcatcgtcaacaacttcggcatgtactactccctggccatggccaagcagaagctgcccaagaaacggaagaagcacgtgccacggccggcgcagctggagtcacccatgtactgcaagtctgaggagacttccccccgggacagcacctgcagtgataccagcccccctgcccgggaagagggtatgatcgagaggaaacgggcagactctaagcagaatggcgatgccaacgcagtgctgtctgatgaggagggagctggcctcacccaacccctggcctcctccccgacccccgaggagcgccgggccctgcgacgctccaccactcgagacagaaacaagaaggcagctgcctgcttcctgctcagcactggggactatgcctgcgccgatggtagtgtccggaaaggcacattcgtcctccgtgaccttccccttcagcattcacctgaggctgcatgccctccaactgctgggactctgttcctgccacattgaggaagggggctgggcacgacatggcatcatactcaggagccttcttcaccagctccttgggacaatggaatatcccagggtggtgacagcagatggagctacttgggggagagctcaagttggtcaggcaacagctggggtgatggcctgtgagccacaggccacatcaggaactttccccactgcctccatgcaaggctgcagagctatggtccctttctccactgcactggagctttgaagacctaagaggctagtggttcctggagctagtggttacctgaacagagacctgccaagacgccctctcgtccaactatgcccaggctgaagtcctcaccctctcttaaagcggcaccaacgtgagagagacaggcagacagacagaaagccagaggcttagggaaactctggaacccagacaagaatcttttcgctgggaaagactcagatatccttgtttgcacaggactggtggaaaatctcccatgcgaccctcggggcccagagccatctgggtctgatgttctgttccattgtacatcgaagagatatatatgcacatatagtatctatattcatacatattatactcttgtgtgtagtgcacgtgctattggtggtttgtcttctttgttaggctgtgtctccctaagcccttgccccacccagagtttcccgtccccttcactgatttctgttgtttctgctgactgtgtgggtggaatgtcccaagaaaagtgcatctgggaattgccagtccagctgggtagtcccaggctcctgtcttggggatgtttcccctgtcagcaagtaacctggtgaagtctattgaaggccagactgccccctagggtcactgcttcactagccgcaccccaccccagattggggttctacctcccaccccacatcctcgttgtggggggacttccaggggctcctctgcagcctcctccactacttcctccaccccatctatgtccttgacttaggggggcattttgtcttttttagatttgattttgttctctctcctttgtctgtttgttgtcaaagatgctgctgggcagacaggcagggaaaggatctgtctgcccatctggcccagggggtccgagaagggaagccttgggcaagaggagaccagttgcaatactgtacttcctggtcagtggccagaggatgcgtgcaatagcagaggccaggtgaccccttcagccttggcctctgcccctcccttggccctccctccctgctcctccctggtgttggtcagtccttttctaaagctgtcccctcgtgtgtgtctggggcatgcccaggctgggccctgtgccctgtctgcatgcctccaactgtcatgctgtgctcgagccccaataaagacatctggagcatcctgctgctcctgctgtgtga

SEQ ID NO: 168314 - DNA, 4086 bp, Homo sapiens
  Payload ID: 13124
  Gene Symbol: KCNAB1
  Gene Name: potassium channel, voltage gated subfamily A regulatory beta subunit 1
  Uniprot ID: Q14722
  ENST ID: ENST00000302490
  CDS Start-End: 872-2077
agttccaactgttgtgctgcagcagatttggtctgagtctgggcagagcccctttttatggagcaaccctcccgatttgttacagcaagagcctggtgcaagtgatctttgccttcccatcgcacacaaaggcaaagagctccttaaagggacctgcctgctcctccgtgcagctgcaaacccgtgtcggtgcaggctcagcaacccaggctttcgctcgagaatgagtggggaggggtcttgaggagcccccacgtcctcccggagcggaggcgggagggagctgacagccggagtggatggagaccaccagtccgaggggacccgcttgcgattagctgcttcttgggatgctccgcgcgccagttgagcatcctgcctgtggtccaggggatgctggcggcgcatcttgcggtaagcctgcgctgatttgagccatcgcccagaagcgagcccgcattcagacaccgcggaccggctccgcgaagggctgcgtgcagtcaccatgaatgctcagctctaggcttctgtaaaaacctcccccactgcatggatttggctgtttaatcagccgagattacagcccgggaagatttgcaaacctgattctccctccagctgctgtgacaacttcggggccgtctgtttacttctctgggtccccggggactctttcctgcatcgcagccccttgtgccactttgtgggcttggctcgaaagtcagccgccaggactcctctgacggcatccccaggaagggggagcaaggagggcttaaaagaaaagcagaaatccccgcaactgctcaacctctcgtgactgcctgtgttctggggttctgagagggaccgtgcgctgcctggggaagcaatgcaagtctccatagcctgcacagagcacaatttgaagagtcggaatggtgaggaccgacttctgagcaagcagagctccaccgcccccaatgtggtgaacgcagcccgggccaaattccgcacggtcgctatcatcgcgcgcagcctggggacgttcacgcctcagcatcacatttctctcaaagagtccaccgcaaagcagactggcatgaaatataggaatcttggaaaatcaggactcagagtttcttgcttgggtcttggaacatgggtgacatttggaggtcaaatttcagatgaggttgctgaacggctgatgaccatcgcctatgaaagtggtgttaacctctttgatactgccgaagtctatgctgctggaaaggctgaagtgattctggggagcatcatcaagaagaaaggctggaggaggtccagtctggtcataacaaccaaactctactggggtggaaaagctgaaacagaaagagggctgtcaagaaagcatattattgaaggattgaagggctccctccagaggctgcagctcgagtatgtggatgtggtctttgcaaatcgaccggacagtaacactcccatggaagaaattgtccgagccatgacacatgtgataaaccaaggcatggcgatgtactggggcacctcgagatggagtgctatggagatcatggaagcctattctgtagcaagacagttcaatatgatcccaccggtctgtgaacaagctgagtaccatcttttccagagagagaaagtggaggtccagctgccagagctctaccacaaaataggtgttggcgcaatgacatggtctccacttgcctgtggaatcatctcaggaaaatacggaaacggggtgcctgaaagttccagggcttcactgaagtgctaccagtggttgaaagaaagaattgtaagtgaagaagggagaaaacagcaaaacaagctaaaagacctttccccaattgcggagcgtctgggatgcacactacctcagctagctgttgcgtggtgcctgagaaatgaaggtgtgagttctgtgctcctgggatcatccactcctgaacaactcattgaaaaccttggtgccattcaggttctcccaaagatgacatcacatgtggtaaatgagattgataacatactgcgcaacaagccctacagcaagaaggactatagatcataaggcaatgcatgaaccacagaagctgcatggttaaaatagcggcctgtgcccagtacagaaaggtgttactaaccagtcttttgaatcacttagcagcttgctgctcaacctctagtgtccctccctggattctttgaggtgtctgctgtcgctaccactgtgcacatctgaaaactcacaaccaagaaaatccattctattttcttatcttggactggagtcacctattcttgcattgctgtatacacctcatgcttatgcaatgggaagaatatgggggccagggggtgtggtactaccttcaggcatttggtaactcaaagaaggctgtacagatatattttttcaaaagaacaaaatccacagatgcaatgtgagttgcgtaagaaacagagtagatagactaaattcagtgaaggaaaggaattgagagatttttcttagtaaatagattattgttaagtaaatagttattaaaaatatatctcactgcaaaaaaaaaaaagcagtatcttcactcaaaagtcttgcttggaagaataagcagaaataattttatatattttttttctattttcacattcatactaacaagttttgttccatttgttattcaataaaacaaaaatttctaggtatttgctttattacctttcaaatatttactgttgcttggccccaagaatggccttgtacaacttatccagaatgtctattaggattctaatgttatgtccacttacaagtagagacagtaaaaggatgaatacccaatctttagtgacaatgcagctgatttatgaaagagagggctacactgctatggaaacttagcttcaaagaaaatgcaatgtatctgcaattaggtgttcattttttactacattttattaaaacctgctttatactttcaactgcttgtaggcacaacttctgcaagtttaaatatttgagctttacaaataaacatacacatgctcagttttttaagtaaacctgtaaaatacccaggaaggcaaatgttcattgtttaattagcactgggattttataatataatgtttggtatttttgaggcattgttaacatgaaagtcaaccactggctttgtgaaaaatgctatgtcactattcagaatatgctgggtaaattgacttgcctagtgaaaagcaaaatgttaaagaaagaacttctggttctataatcatattatatgcactaaactatatgcatgaaagttctttgcatggattaatggggcttacccttgttgcactcgaaatctgaggtgtatctagccctgccactattggctacttaccctcattaatatcccacttgagaaaaattgtgagactatactgtgtcaatatctgtaaaaagagagaaaacatgttttgtttttttttgaagggggtggtgtgggagtggccctttaactctatttggctatctgaggatgtacaaaattctcatttaattttctggtcagcaagttccccacacagaaatcactctgaggtttacagaagaactgtaatattattttaaaatgcgatttttctgtcattagttctagatatgtacttcatggttaaattctaaatctgaaaatgctagtgggagatatcaagaaattttctttttgattactagtacctgtattctaacagagagtttgaattttttgcccgtgttatcagaatgatggaaattgatcattttcagttgttcattgtgtattcaatccagcgaactgctgtatgtatagaggagctgaggtgctgtctaatgggaaatgtgatttgattgatttatttgcttagagtaataaaagcattttgtgcattcaatcttacaatagattttatctgatctttcactgtaaggcttatgtgtattttccatatatgtaaaacatacacatgtaaaatatatgtggccataaattaggcaataatcatctaaataaaaattatattggcagctaagctgcactgaatactcaa

SEQ ID NO: 168315 - DNA, 1119 bp, Homo sapiens
  Payload ID: 13124
  Gene Symbol: KCNAB1
  Gene Name: potassium channel, voltage gated subfamily A regulatory beta subunit 1
  ENST ID: ENST00000389634
  CDS Start-End: 1-1119
atgcaagtctccatagcctgcacagagcacaatttgaagagtcggaatggtgaggaccgacttctgagcaagcagagctccaccgcccccaatgtggtgaacgcagcccgggccaaattccgcacggtcgctatcatcgcgcgcagcctggggacgttcacgcctcagcatcacatttctctcaaagagtccaccgcaaagcagactggcatgaaatataggaatcttggaaaatcaggactcagagtttcttgcttgggtcttggaacatgggtgacatttggaggtcaaatttcagatgaggttgctgaacggctgatgaccatcgcctatgaaagtggtgttaacctctttgatactgccgaagtctatgctgctggaaaggctgaagtgattctggggagcatcatcaagaagaaaggctggaggaggtccagtctggtcataacaaccaaactctactggggtggaaaagctgaaacagaaagagggctgtcaagaaagcatattattgaagaaattgtccgagccatgacacatgtgataaaccaaggcatggcgatgtactggggcacctcgagatggagtgctatggagatcatggaagcctattctgtagcaagacagttcaatatgatcccaccggtctgtgaacaagctgagtaccatcttttccagagagagaaagtggaggtccagctgccagagctctaccacaaaataggtgttggcgcaatgacatggtctccacttgcctgtggaatcatctcaggaaaatacggaaacggggtgcctgaaagttccagggcttcactgaagtgctaccagtggttgaaagaaagaattgtaagtgaagaagggagaaaacagcaaaacaagctaaaagacctttccccaattgcggagcgtctgggatgcacactacctcagctagctgttgcgtggtgcctgagaaatgaaggtgtgagttctgtgctcctgggatcatccactcctgaacaactcattgaaaaccttggtgccattcaggttctcccaaagatgacatcacatgtggtaaatgagattgataacatactgcgcaacaagccctacagcaagaaggactatagatcataa

SEQ ID NO: 168316 - DNA, 1806 bp, Homo sapiens
  Payload ID: 13124
  Gene Symbol: KCNAB1
  Gene Name: potassium channel, voltage gated subfamily A regulatory beta subunit 1
  ENST ID: ENST00000389636
  CDS Start-End: 35-1207
agtgacttccagtcttctctgaaagatctccacgatgctggcagcccggacaggggcagcggggagtcagatctcagaggagaacaccaagttaaggagacagtctgggttttctgtagcagggaaagacaaatctcccaagaaagcctcagaaaacgctaaagacagcagccttagtccctcaggggaaagccagctcagggcgcgtcaactggctctgctgcgcgaagtggagatgaactggtacctaaagctctgcgacctgtccagcgagcacaccaccgtctgcaccacaggcatgccgcacaggaatcttggaaaatcaggactcagagtttcttgcttgggtcttggaacatgggtgacatttggaggtcaaatttcagatgaggttgctgaacggctgatgaccatcgcctatgaaagtggtgttaacctctttgatactgccgaagtctatgctgctggaaaggctgaagtgattctggggagcatcatcaagaagaaaggctggaggaggtccagtctggtcataacaaccaaactctactggggtggaaaagctgaaacagaaagagggctgtcaagaaagcatattattgaagaaattgtccgagccatgacacatgtgataaaccaaggcatggcgatgtactggggcacctcgagatggagtgctatggagatcatggaagcctattctgtagcaagacagttcaatatgatcccaccggtctgtgaacaagctgagtaccatcttttccagagagagaaagtggaggtccagctgccagagctctaccacaaaataggtgttggcgcaatgacatggtctccacttgcctgtggaatcatctcaggaaaatacggaaacggggtgcctgaaagttccagggcttcactgaagtgctaccagtggttgaaagaaagaattgtaagtgaagaagggagaaaacagcaaaacaagctaaaagacctttccccaattgcggagcgtctgggatgcacactacctcagctagctgttgcgtggtgcctgagaaatgaaggtgtgagttctgtgctcctgggatcatccactcctgaacaactcattgaaaaccttggtgccattcaggttctcccaaagatgacatcacatgtggtaaatgagattgataacatactgcgcaacaagccctacagcaagaaggactatagatcataaggcaatgcatgaaccacagaagctgcatggttaaaatagcggcctgtgcccagtacagaaaggtgttactaaccagtcttttgaatcacttagcagcttgctgctcaacctctagtgtccctccctggattctttgaggtgtctgctgtcgctaccactgtgcacatctgaaaactcacaaccaagaaaatccattctattttcttatcttggactggagtcacctattcttgcattgctgtatacacctcatgcttatgcaatgggaagaatatgggggccagggggtgtggtactaccttcaggcatttggtaactcaaagaaggctgtacagatatattttttcaaaagaacaaaatccacagatgcaatgtgagttgcgtaagaaacagagtagatagactaaattcagtgaaggaaaggaattgagagatttttcttagtaaatagattattgttaagtaaatagttattaaaaatatatctcactgcaaaaaaaaaaaagcagtatcttcactcaaaagtcttgcttggaagaataagcagaaataattttatatattttttttctattttcacattcatactaacaagtttt

SEQ ID NO: 168317 - DNA, 576 bp, Homo sapiens
  Payload ID: 13124
  Gene Symbol: KCNAB1
  Gene Name: potassium channel, voltage gated subfamily A regulatory beta subunit 1
  ENST ID: ENST00000489036
  CDS Start-End: 1-246
atagcctgcacagagcacaatttgaagagtcggaatggtgaggaccgacttctgagcaagcagagctccaccgcccccaatgtggtgaacgcagcccgggccaaattccgcacggtcgctatcatcgcgcgcagcctggggacgttcacgcctcagcatcacatttctctcaaagagtccaccgcaaagcagactggcatgaaatataggaacatgggtgacatttggaggtcaaatttcagatgaggttgctgaacggctgatgaccatcgcctatgaaagtggtgttaacctctttgatactgccgaagtctatgctgctggaaaggctgaagtgattctggggagcatcatcaagaagaaaggctggaggaggtccagtctggtcataacaaccaaactctactggggtggaaaagctgaaacagaaagagggctgtcaagaaagcatattattgaaggattgaagggctccctccagaggctgcagctcgagtatgtggatgtggtctttgcaaatcgaccggacagtaacactcccatggaagaaattgtccgagccatgacacatgtgat

SEQ ID NO: 168318 - DNA, 3301 bp, Homo sapiens
  Payload ID: 13124
  Gene Symbol: KCNAB1
  Gene Name: potassium channel, voltage gated subfamily A regulatory beta subunit 1
  Uniprot ID: Q14722
  ENST ID: ENST00000471742
  CDS Start-End: 218-1444
atgcacaggcctgggcagggacacacaaccaacagctctgtcgggaacttaggagcctgctcgcctacaaaaatgataagagagatctaaagaaaacaagctaaaccttttgagggacatactgaagccagataacccaaggtattcacagcaagatacagtgagtcttaaagttaagcaccgtgcaattagctttgcttccttgggtttttgaaacatgcatctgtataaacctgcctgtgcagacatcccgagccccaagctgggtctgccaaaatccagtgaatcggctctaaaatgtagatggcacctagcagtgaccaagactcagcctcaggcggcctgcaaacctgtgaggcccagtggagcagccgaacagaaatatgtggaaaagtttctacgtgttcatggaatttcgttgcaggaaaccaccagagcagagacgggcatggcatacaggaatcttggaaaatcaggactcagagtttcttgcttgggtcttggaacatgggtgacatttggaggtcaaatttcagatgaggttgctgaacggctgatgaccatcgcctatgaaagtggtgttaacctctttgatactgccgaagtctatgctgctggaaaggctgaagtgattctggggagcatcatcaagaagaaaggctggaggaggtccagtctggtcataacaaccaaactctactggggtggaaaagctgaaacagaaagagggctgtcaagaaagcatattattgaaggattgaagggctccctccagaggctgcagctcgagtatgtggatgtggtctttgcaaatcgaccggacagtaacactcccatggaagaaattgtccgagccatgacacatgtgataaaccaaggcatggcgatgtactggggcacctcgagatggagtgctatggagatcatggaagcctattctgtagcaagacagttcaatatgatcccaccggtctgtgaacaagctgagtaccatcttttccagagagagaaagtggaggtccagctgccagagctctaccacaaaataggtgttggcgcaatgacatggtctccacttgcctgtggaatcatctcaggaaaatacggaaacggggtgcctgaaagttccagggcttcactgaagtgctaccagtggttgaaagaaagaattgtaagtgaagaagggagaaaacagcaaaacaagctaaaagacctttccccaattgcggagcgtctgggatgcacactacctcagctagctgttgcgtggtgcctgagaaatgaaggtgtgagttctgtgctcctgggatcatccactcctgaacaactcattgaaaaccttggtgccattcaggttctcccaaagatgacatcacatgtggtaaatgagattgataacatactgcgcaacaagccctacagcaagaaggactatagatcataaggcaatgcatgaaccacagaagctgcatggttaaaatagcggcctgtgcccagtacagaaaggtgttactaaccagtcttttgaatcacttagcagcttgctgctcaacctctagtgtccctccctggattctttgaggtgtctgctgtcgctaccactgtgcacatctgaaaactcacaaccaagaaaatccattctattttcttatcttggactggagtcacctattcttgcattgctgtatacacctcatgcttatgcaatgggaagaatatgggggccagggggtgtggtactaccttcaggcatttggtaactcaaagaaggctgtacagatatattttttcaaaagaacaaaatccacagatgcaatgtgagttgcgtaagaaacagagtagatagactaaattcagtgaaggaaaggaattgagagatttttcttagtaaatagattattgttaagtaaatagttattaaaaatatatctcactgcaaaaaaaaaaaagcagtatcttcactcaaaagtcttgcttggaagaataagcagaaataattttatatattttttttctattttcacattcatactaacaagttttgttccatttgttattcaataaaacaaaaatttctaggtatttgctttattacctttcaaatatttactgttgcttggccccaagaatggccttgtacaacttatccagaatgtctattaggattctaatgttatgtccacttacaagtagagacagtaaaaggatgaatacccaatctttagtgacaatgcagctgatttatgaaagagagggctacactgctatggaaacttagcttcaaagaaaatgcaatgtatctgcaattaggtgttcattttttactacattttattaaaacctgctttatactttcaactgcttgtaggcacaacttctgcaagtttaaatatttgagctttacaaataaacatacacatgctcagttttttaagtaaacctgtaaaatacccaggaaggcaaatgttcattgtttaattagcactgggattttataatataatgtttggtatttttgaggcattgttaacatgaaagtcaaccactggctttgtgaaaaatgctatgtcactattcagaatatgctgggtaaattgacttgcctagtgaaaagcaaaatgttaaagaaagaacttctggttctataatcatattatatgcactaaactatatgcatgaaagttctttgcatggattaatggggcttacccttgttgcactcgaaatctgaggtgtatctagccctgccactattggctacttaccctcattaatatcccacttgagaaaaattgtgagactatactgtgtcaatatctgtaaaaagagagaaaacatgttttgtttttttttgaagggggtggtgtgggagtggccctttaactctatttggctatctgaggatgtacaaaattctcatttaattttctggtcagcaagttccccacacagaaatcactctgaggtttacagaagaactgtaatattattttaaaatgcgatttttctgtcattagttctagatatgtacttcatggttaaattctaaatctgaaaatgctagtgggagatatcaagaaattttctttttgattactagtacctgtattctaacagagagtttgaattttttgcccgtgttatcagaatgatggaaattgatcattttcagttgttcattgtgtattcaatccagcgaactgctgtatgtatagaggagctgaggtgctgtctaatgggaaatgtgatttgattgatttatttgcttagagtaataaaagcattttgtgcattcaatctt

SEQ ID NO: 168319 - DNA, 3122 bp, Homo sapiens
  Payload ID: 13124
  Gene Symbol: KCNAB1
  Gene Name: potassium channel, voltage gated subfamily A regulatory beta subunit 1
  Uniprot ID: Q14722
  ENST ID: ENST00000490337
  CDS Start-End: 65-1324
agaaaaatcaattcagattactttgatgacagtgacttccagtcttctctgaaagatctccacgatgctggcagcccggacaggggcagcggggagtcagatctcagaggagaacaccaagttaaggagacagtctgggttttctgtagcagggaaagacaaatctcccaagaaagcctcagaaaacgctaaagacagcagccttagtccctcaggggaaagccagctcagggcgcgtcaactggctctgctgcgcgaagtggagatgaactggtacctaaagctctgcgacctgtccagcgagcacaccaccgtctgcaccacaggcatgccgcacaggaatcttggaaaatcaggactcagagtttcttgcttgggtcttggaacatgggtgacatttggaggtcaaatttcagatgaggttgctgaacggctgatgaccatcgcctatgaaagtggtgttaacctctttgatactgccgaagtctatgctgctggaaaggctgaagtgattctggggagcatcatcaagaagaaaggctggaggaggtccagtctggtcataacaaccaaactctactggggtggaaaagctgaaacagaaagagggctgtcaagaaagcatattattgaaggattgaagggctccctccagaggctgcagctcgagtatgtggatgtggtctttgcaaatcgaccggacagtaacactcccatggaagaaattgtccgagccatgacacatgtgataaaccaaggcatggcgatgtactggggcacctcgagatggagtgctatggagatcatggaagcctattctgtagcaagacagttcaatatgatcccaccggtctgtgaacaagctgagtaccatcttttccagagagagaaagtggaggtccagctgccagagctctaccacaaaataggtgttggcgcaatgacatggtctccacttgcctgtggaatcatctcaggaaaatacggaaacggggtgcctgaaagttccagggcttcactgaagtgctaccagtggttgaaagaaagaattgtaagtgaagaagggagaaaacagcaaaacaagctaaaagacctttccccaattgcggagcgtctgggatgcacactacctcagctagctgttgcgtggtgcctgagaaatgaaggtgtgagttctgtgctcctgggatcatccactcctgaacaactcattgaaaaccttggtgccattcaggttctcccaaagatgacatcacatgtggtaaatgagattgataacatactgcgcaacaagccctacagcaagaaggactatagatcataaggcaatgcatgaaccacagaagctgcatggttaaaatagcggcctgtgcccagtacagaaaggtgttactaaccagtcttttgaatcacttagcagcttgctgctcaacctctagtgtccctccctggattctttgaggtgtctgctgtcgctaccactgtgcacatctgaaaactcacaaccaagaaaatccattctattttcttatcttggactggagtcacctattcttgcattgctgtatacacctcatgcttatgcaatgggaagaatatgggggccagggggtgtggtactaccttcaggcatttggtaactcaaagaaggctgtacagatatattttttcaaaagaacaaaatccacagatgcaatgtgagttgcgtaagaaacagagtagatagactaaattcagtgaaggaaaggaattgagagatttttcttagtaaatagattattgttaagtaaatagttattaaaaatatatctcactgcaaaaaaaaaaaagcagtatcttcactcaaaagtcttgcttggaagaataagcagaaataattttatatattttttttctattttcacattcatactaacaagttttgttccatttgttattcaataaaacaaaaatttctaggtatttgctttattacctttcaaatatttactgttgcttggccccaagaatggccttgtacaacttatccagaatgtctattaggattctaatgttatgtccacttacaagtagagacagtaaaaggatgaatacccaatctttagtgacaatgcagctgatttatgaaagagagggctacactgctatggaaacttagcttcaaagaaaatgcaatgtatctgcaattaggtgttcattttttactacattttattaaaacctgctttatactttcaactgcttgtaggcacaacttctgcaagtttaaatatttgagctttacaaataaacatacacatgctcagttttttaagtaaacctgtaaaatacccaggaaggcaaatgttcattgtttaattagcactgggattttataatataatgtttggtatttttgaggcattgttaacatgaaagtcaaccactggctttgtgaaaaatgctatgtcactattcagaatatgctgggtaaattgacttgcctagtgaaaagcaaaatgttaaagaaagaacttctggttctataatcatattatatgcactaaactatatgcatgaaagttctttgcatggattaatggggcttacccttgttgcactcgaaatctgaggtgtatctagccctgccactattggctacttaccctcattaatatcccacttgagaaaaattgtgagactatactgtgtcaatatctgtaaaaagagagaaaacatgttttgtttttttttgaagggggtggtgtgggagtggccctttaactctatttggctatctgaggatgtacaaaattctcatttaattttctggtcagcaagttccccacacagaaatcactctgaggtttacagaagaactgtaatattattttaaaatgcgatttttctgtcattagttctagatatgtacttcatggttaaattctaaatctgaaaatgctagtgggagatatcaagaaattttctttttgattactagtacctgtattctaacagagagtttgaattttttgcccgtgttatcagaatgatggaaattgatcattttcagttgttcattgtgtattcaatccagcgaactgctgtatgtatagaggagctgaggtgctgtctaatgggaa

SEQ ID NO: 168320 - DNA, 552 bp, Homo sapiens
  Payload ID: 13124
  Gene Symbol: KCNAB1
  Gene Name: potassium channel, voltage gated subfamily A regulatory beta subunit 1
  ENST ID: ENST00000475456
  CDS Start-End: 21-552
acagatgctctttccatgccatgcagctgctgctgtggggtgggagaagggtggcatcggcaattcaccgctgtctttcctactctcttcactgcctttttcagcgatatgaagttaaaaccaggaatcttggaaaatcaggactcagagtttcttgcttgggtcttggaacatgggtgacatttggaggtcaaatttcagatgaggttgctgaacggctgatgaccatcgcctatgaaagtggtgttaacctctttgatactgccgaagtctatgctgctggaaaggctgaagtgattctggggagcatcatcaagaagaaaggctggaggaggtccagtctggtcataacaaccaaactctactggggtggaaaagctgaaacagaaagagggctgtcaagaaagcatattattgaaggattgaagggctccctccagaggctgcagctcgagtatgtggatgtggtctttgcaaatcgaccggacagtaacactcccatggaagaaattgtccgagccatgacacatgtgataaaccaaggcatggcga

SEQ ID NO: 168321 - DNA, 531 bp, Homo sapiens
  Payload ID: 13124
  Gene Symbol: KCNAB1
  Gene Name: potassium channel, voltage gated subfamily A regulatory beta subunit 1
  ENST ID: ENST00000472028
  CDS Start-End: 146-531
attccctttcaggatgctcctacagcagctgcctaatactctcagttgcagtcagatgttggctgggaccacagtcatctaaggatactgctcaagctggctgttgtctggaaactcagctggggctactgatcagagcacctgcatgtggctgtccagcaaggcaatgttaaggaatcttggaaaatcaggactcagagtttcttgcttgggtcttggaacatgggtgacatttggaggtcaaatttcagatgaggttgctgaacggctgatgaccatcgcctatgaaagtggtgttaacctctttgatactgccgaagtctatgctgctggaaaggctgaagtgattctggggagcatcatcaagaagaaaggctggaggaggtccagtctggtcataacaaccaaactctactggggtggaaaagctgaaacagaaagagggctgtcaagaaagcatattattgaagaaattgtccgagccatgacacatgtgataaaccaaggcatggcgatgtactggggcacctc

SEQ ID NO: 168322 - DNA, 4437 bp, Homo sapiens
  Payload ID: 13124
  Gene Symbol: KCNAB1
  Gene Name: potassium channel, voltage gated subfamily A regulatory beta subunit 1
  ENST ID: ENST00000618897
  CDS Start-End: 1132-2046
aattcactggcgtgttccgcggcataagcaccccctctctgccttcccccagttccaactgttgtgctgcagcagatttggtctgagtctgggcagagcccctttttatggagcaaccctcccgatttgttacagcaagagcctggtgcaagtgatctttgccttcccatcgcacacaaaggcaaagagctccttaaagggacctgcctgctcctccgtgcagctgcaaacccgtgtcggtgcaggctcagcaacccaggctttcgctcgagaatgagtggggaggggtcttgaggagcccccacgtcctcccggagcggaggcgggagggagctgacagccggagtggatggagaccaccagtccgaggggacccgcttgcgattagctgcttcttgggatgctccgcgcgccagttgagcatcctgcctgtggtccaggggatgctggcggcgcatcttgcggtaagcctgcgctgatttgagccatcgcccagaagcgagcccgcattcagacaccgcggaccggctccgcgaagggctgcgtgcagtcaccatgaatgctcagctctaggcttctgtaaaaacctcccccactgcatggatttggctgtttaatcagccgagattacagcccgggaagatttgcaaacctgattctccctccagctgctgtgacaacttcggggccgtctgtttacttctctgggtccccggggactctttcctgcatcgcagccccttgtgccactttgtgggcttggctcgaaagtcagccgccaggactcctctgacggcatccccaggaagggggagcaaggagggcttaaaagaaaagcagaaatccccgcaactgctcaacctctcgtgactgcctgtgttctggggttctgagagggaccgtgcgctgcctggggaagcaatgcaagtctccatagcctgcacagagcacaatttgaagagtcggaatggtgaggaccgacttctgagcaagcagagctccaccgcccccaatgtggtgaacgcagcccgggccaaattccgcacggtcgctatcatcgcgcgcagcctggggacgttcacgcctcagcatcacatttctctcaaagagtccaccgcaaagcagactggcatgaaatataggaatcttggaaaatcaggactcagagtttcttgcttgggtcttggaacatgggtgacatttggaggtcaaatttcagatgaggttgctgaacggctgatgaccatcgcctatgaaagtggtgttaacctctttgatactgccgaagtctatgctgctggaaaggctgaagtgattctggggagcatcatcaagaagaaaggctggaggaggtccagtctggtcataacaaccaaactctactggggtggaaaagctgaaacagaaagagggctgtcaagaaagcatattattgaagaaattgtccgagccatgacacatgtgataaaccaaggcatggcgatgtactggggcacctcgagatggagtgctatggagatcatggaagcctattctgtagcaagacagttcaatatgatcccaccggtctgtgaacaagctgagtaccatcttttccagagagagaaagtggaggtccagctgccagagctctaccacaaaataggtgttggcgcaatgacatggtctccacttgcctgtggaatcatctcaggaaaatacggaaacggggtgcctgaaagttccagggcttcactgaagtgctaccagtggttgaaagaaagaattgtaagtgaagaagggagaaaacagcaaaacaagctaaaagacctttccccaattgcggagcgtctgggatgcacactacctcagctagctgttgcgtggtgcctgagaaatgaaggtgtgagttctgtgctcctgggatcatccactcctgaacaactcattgaaaaccttggtgccattcaggcaactgttctcccaaagatgacatcacatgtggtaaatgagattgataacatactgcgcaacaagccctacagcaagaaggactatagatcataaggcaatgcatgaaccacagaagctgcatggttaaaatagcggcctgtgcccagtacagaaaggtgttactaaccagtcttttgaatcacttagcagcttgctgctcaacctctagtgtccctccctggattctttgaggtgtctgctgtcgctaccactgtgcacatctgaaaactcacaaccaagaaaatccattctattttcttatcttggactggagtcacctattcttgcattgctgtatacacctcatgcttatgcaatgggaagaatatgggggccagggggtgtggtactaccttcaggcatttggtaactcaaagaaggctgtacagatatattttttcaaaagaacaaaatccacagatgcaatgtgagttgcgtaagaaacagagtagatagactaaattcagtgaaggaaaggaattgagagatttttcttagtaaatagattattgttaagtaaatagttattaaaaatatatctcactgcaaaaaaaaaaaagcagtatcttcactcaaaagtcttgcttggaagaataagcagaaataattttatatattttttttctattttcacattcatactaacaagttttgttccatttgttattcaataaaacaaaaatttctaggtatttgctttattacctttcaaatatttactgttgcttggccccaagaatggccttgtacaacttatccagaatgtctattaggattctaatgttatgtccacttacaagtagagacagtaaaaggatgaatacccaatctttagtgacaatgcagctgatttatgaaagagagggctacactgctatggaaacttagcttcaaagaaaatgcaatgtatctgcaattaggtgttcattttttactacattttattaaaacctgctttatactttcaactgcttgtaggcacaacttctgcaagtttaaatatttgagctttacaaataaacatacacatgctcagttttttaagtaaacctgtaaaatacccaggaaggcaaatgttcattgtttaattagcactgggattttataatataatgtttggtatttttgaggcattgttaacatgaaagtcaaccactggctttgtgaaaaatgctatgtcactattcagaatatgctgggtaaattgacttgcctagtgaaaagcaaaatgttaaagaaagaacttctggttctataatcatattatatgcactaaactatatgcatgaaagttctttgcatggattaatggggcttacccttgttgcactcgaaatctgaggtgtatctagccctgccactattggctacttaccctcattaatatcccacttgagaaaaattgtgagactatactgtgtcaatatctgtaaaaagagagaaaacatgttttgtttttttttgaagggggtggtgtgggagtggccctttaactctatttggctatctgaggatgtacaaaattctcatttaattttctggtcagcaagttccccacacagaaatcactctgaggtttacagaagaactgtaatattattttaaaatgcgatttttctgtcattagttctagatatgtacttcatggttaaattctaaatctgaaaatgctagtgggagatatcaagaaattttctttttgattactagtacctgtattctaacagagagtttgaattttttgcccgtgttatcagaatgatggaaattgatcattttcagttgttcattgtgtattcaatccagcgaactgctgtatgtatagaggagctgaggtgctgtctaatgggaaatgtgatttgattgatttatttgcttagagtaataaaagcattttgtgcattcaatcttacaatagattttatctgatctttcactgtaaggcttatgtgtattttccatatatgtaaaacatacacatgtaaaatatatgtggccataaattaggcaataatcatctaaataaaaattatattggcagctaagctgcactgaatactcaacagaaatagtagtgatcaaaagtctgagatttaaattgcaatccaaacatattctatcatcaatcaatcaatggagattaactactgaagataccatttctcactgggttttagaacactccgcactaaggttaaggcttcacaaattcacttttaaaaacttacttgcaaatcaaaaccaaatataaatattatggcttagctgtgggaacagccagttttttatatgcgaatctgtcatggtaaatatactaatgtatttcacagttagttagttagttagttatgtccttaagaaaaaattccacgcactcttattattttcttttctcttccaaaaagaattccctggcagagaatctatcattccaaaaggtaacct

SEQ ID NO: 168323 - DNA, 4273 bp, Homo sapiens
  Payload ID: 13125
  Gene Symbol: KCNAB2
  Gene Name: potassium channel, voltage gated subfamily A regulatory beta subunit 2
  Uniprot ID: Q13303
  ENST ID: ENST00000164247
  CDS Start-End: 565-1668
gaaatgcaaagcaggggctgtggggaaatctcaccaacccctcctcccctgggaggtggcaaaggtggtggactgggctgctgggaccctggggaggaatgaaacagaggctgtgttgatggcctgcagttccttgtaatgtggtcatcaaacggtgtacagttcccgtctgtggctgcaggctggagagctgactgctggcacagatacagcctgacctcgggtcaacacttctcggagtccagaggggttgggagtgggacaggtggcctcccagggacgcctccctgagtggccagtggtgccgcttgtccctgcacctgtagctgccctgagcacccccactggacacagtgggcattgcaccctccggagaaagctgcccttgttccacgtgcgagccctgtccccagcgccatgggctgtgctacctgcagtaacgcagactgcgagccccggctgcctctccagtgctctctctcctctggccttcagcaggctgggtcacagagaattttcccactgtaaaaaaccgagcaagtctggataagtgaggctggctccatgtatccagaatcaacgacgggctccccggctcggctctcgctgcggcagacgggctcccccgggatgatctacagtactcggtatgggagtcccaaaagacagctccagttttacaggaacctgggcaagtctggcctgcgggtctcctgcctgggacttggaacatgggtgaccttcggaggccagatcaccgatgagatggcagagcagctcatgaccttggcctatgataatggcatcaacctcttcgatacagcagaagtctacgcagccggcaaggctgaagtggtactgggaaacatcattaagaagaaaggatggaggcggtccagcctcgtcatcaccaccaagatcttctggggcggaaaggcggagacggagcggggcctgtccaggaagcacataatcgaaggtctgaaagcttccctggagcgactgcagctggagtacgtggatgtggtgtttgccaaccgcccggaccccaacaccccgatggaagagaccgtccgcgccatgacccacgtcatcaaccaggggatggccatgtactggggcacgtcacgctggagctccatggagatcatggaggcctactccgtggcccggcagttcaacctgaccccgcccatctgcgagcaggctgagtaccacatgttccagcgtgagaaagtggaggtgcagctgccggagctgttccacaagataggagtgggcgccatgacctggtcccctctggcctgtggcattgtttctggcaagtacgacagtggcatcccaccctactcaagagcctccttgaagggctaccagtggctgaaggacaagatcctcagtgaggagggccggcgccagcaagccaagctgaaggagctgcaggccatcgccgagcgcctgggctgcaccctgccccagctggccatagcctggtgcctgaggaatgagggagtcagctccgtgctcctgggggcctccaatgcggaccagctcatggagaacattggggcaatacaggtccttccgaaactgtcatcttccattatccacgagattgatagtattttgggcaataaaccctacagcaaaaaggactacagatcctaagccgcccccgcccgcctgctcggacagtttccgttccctcctagtctctgttcgctcgcttaagctgttttgaagccaagtgaagagtgtggtttgcatccaagagaaaacaccacactgtgatgtcatcgggaaatgatctcccaagtcgctgccagacaccacccactgcttcgccggacaatgtcgaagtccagtctgtgccggggaaggcactggttaggaaggatgttcaaacggtcccacccaagcctgtcacctctgctcatcctccaagaccacccagctttctcccagccacagccaagattcccaaagtcaaggcccaaagatttccaaggttcccaaagtcaaggccaggccaaggcctggttgggtccttggggcgggcagggccagcctctcctctgctgagaatccccacttggtgtagggggagaggggaaaggggtctggcccatcgaggggccccttctgccagggccttggttgctggggcagggcctccccactgggggtcttcctccacctcccactttccaagggctccaggaatctggggcctgaccacagattcctctcccatccttttctgctccaacctgccccactgggtcccggcaggggccatgcctaccaagctcgagctggcccttgacccccacccacccccacccttgctggcaggggcagggaccccagggggattgactctgcagtttgggagccacaaaaagcgtagcggtgtgatttctagctcagcctcccaccgtcttcctcctacacaccaatgatgagcctcatgccagtgaggcccggagcgcttgggaggggtcccagtggggcaggcccctctgtctggccacccctctgtcctggccccggaaggccctgtggtcatgtgctcctagctgcacggtggctgctggccacaccacggcaagtggcagcaggggccggccctgtgcacaaggatgcactcctctcggcccctgtagactttctctaaagccgcccgccagcccaggccgctgctctgcaccgagctggtgggcttgggttttgtggagcgcatgcttggaccctttcagtaaggaagggtctttggggttttctgtgcccatgacttgggggctgcacccccacagcacccccacaatgtaggaaaagacctcagggaacctctccctggaaagacgggcagggctggttagcccctcccactgcctgacacctgggacaggctgggcagaggggagagagggcaggacaggccagagtgacgcccccgtgcagcttgggccggagggcaagggatgccagtaagtctgcaggtgcggggtgccacctacaggcccaggcctgtgtcccaagcagtacccaggctttgcagaccacgcggggcagggctccactgaagccacccccacccctcgccagctagctccatagggaagcctgtgtctcctgcccccagggcgcaccctcagtgcaggcacctctgttcccgctttgcccctggaggagccactattccagaaggctccaccctgccgtcctgcgggagcctgctgtccagtcctggccgggccaaggcctgggaaactgtgaaagtcagaaaggccagcggggagaggctggggcgaggggaggagggggatcagcttctgctattaccgaccccccttcatgctgcccctggcgcctagaacccttgcccctcctcatagaccaagtcccgggggtctccactcagtcctgctgcctgcttcaccagaagcagccctgtgagtgtggggtggggaagtcccttcccaacggaggtcccagcctatggccctgggcccaggtgggggtcgcctgcttccttcccggacagggtcctgcagtggccaatggtgccagagggcaggtggcccaccctcgccatcagggagggtggctggccccatccccactgccacccagccccacccactgttggaagagggaccagcgcgaggtggtgcccagggtgggcactgctgcttaatgcgaggcacacctggggcagctgagcccccaaaggctgcgggtttgccaaacacagagaggccaggccccagtgtcaggatgcagtcagcctctggcgcagctctttccacgacctggttcctggatgtcctgcttgctccacacccatctacagggaggatgtgagggggctctgcctcctagggccaggtcccccctctcgggaggaggtattgggtaggaccatccaagaaagggcagaagaccaagggcagtcggggtctagaaaggagggcgctggccctgctggacgcttcggagcccccactgtttcccactcagctttgtgctcagatcccaggtcccaaggagtgacaggggcttcctcccaccttctgtccttgtccagtcatgtaaataatgtgctttttctctccccgagtctttttttttaaacctaccgtggttcctcagctaactgcattccctacccaggcagagactgtcctatgcctcgagcttccaaacgagactcagaccgcgacacagccaccgtatttatggaatgacaaaataaataaagcccaaaccc

SEQ ID NO: 168324 - DNA, 4165 bp, Homo sapiens
  Payload ID: 13125
  Gene Symbol: KCNAB2
  Gene Name: potassium channel, voltage gated subfamily A regulatory beta subunit 2
  Uniprot ID: Q13303
  ENST ID: ENST00000352527
  CDS Start-End: 486-1547
atcaccagaaccctctgccctgagaaaggggctcctgggccgacagggaaggtctgcctcctactctggaggggccgcttggggacaggcccgggctgtctcctcacagccacctgcttcctgtcctctgcctgtctcctgccccatctggccgctgctcatccaggaaggtcggagatgtcgggccctcccacctgggtcacgcgctaggcatgcctgagagcaaaggccacgccccgacaccccacggggccctggcgcgccaggcttctcagccctgcggcggcagtgcatagctctggcacgcgctgcaccaacttcctgttgggtgctgtggtcccaaggcgcgtgctttgcagcagatgtgtgacctggcgttcccctgagtgctcggaaaatggccttgtctccggtcgttcccgttcaggagcagaattttcccactgtaaaaaaccgagcaagtctggataagtgaggctggctccatgtatccagaatcaacgacgggctccccggctcggctctcgctgcggcagacgggctcccccgggatgatctacaggaacctgggcaagtctggcctgcgggtctcctgcctgggacttggaacatgggtgaccttcggaggccagatcaccgatgagatggcagagcagctcatgaccttggcctatgataatggcatcaacctcttcgatacagcagaagtctacgcagccggcaaggctgaagtggtactgggaaacatcattaagaagaaaggatggaggcggtccagcctcgtcatcaccaccaagatcttctggggcggaaaggcggagacggagcggggcctgtccaggaagcacataatcgaaggtctgaaagcttccctggagcgactgcagctggagtacgtggatgtggtgtttgccaaccgcccggaccccaacaccccgatggaagagaccgtccgcgccatgacccacgtcatcaaccaggggatggccatgtactggggcacgtcacgctggagctccatggagatcatggaggcctactccgtggcccggcagttcaacctgaccccgcccatctgcgagcaggctgagtaccacatgttccagcgtgagaaagtggaggtgcagctgccggagctgttccacaagataggagtgggcgccatgacctggtcccctctggcctgtggcattgtttctggcaagtacgacagtggcatcccaccctactcaagagcctccttgaagggctaccagtggctgaaggacaagatcctcagtgaggagggccggcgccagcaagccaagctgaaggagctgcaggccatcgccgagcgcctgggctgcaccctgccccagctggccatagcctggtgcctgaggaatgagggagtcagctccgtgctcctgggggcctccaatgcggaccagctcatggagaacattggggcaatacaggtccttccgaaactgtcatcttccattatccacgagattgatagtattttgggcaataaaccctacagcaaaaaggactacagatcctaagccgcccccgcccgcctgctcggacagtttccgttccctcctagtctctgttcgctcgcttaagctgttttgaagccaagtgaagagtgtggtttgcatccaagagaaaacaccacactgtgatgtcatcgggaaatgatctcccaagtcgctgccagacaccacccactgcttcgccggacaatgtcgaagtccagtctgtgccggggaaggcactggttaggaaggatgttcaaacggtcccacccaagcctgtcacctctgctcatcctccaagaccacccagctttctcccagccacagccaagattcccaaagtcaaggcccaaagatttccaaggttcccaaagtcaaggccaggccaaggcctggttgggtccttggggcgggcagggccagcctctcctctgctgagaatccccacttggtgtagggggagaggggaaaggggtctggcccatcgaggggccccttctgccagggccttggttgctggggcagggcctccccactgggggtcttcctccacctcccactttccaagggctccaggaatctggggcctgaccacagattcctctcccatccttttctgctccaacctgccccactgggtcccggcaggggccatgcctaccaagctcgagctggcccttgacccccacccacccccacccttgctggcaggggcagggaccccagggggattgactctgcagtttgggagccacaaaaagcgtagcggtgtgatttctagctcagcctcccaccgtcttcctcctacacaccaatgatgagcctcatgccagtgaggcccggagcgcttgggaggggtcccagtggggcaggcccctctgtctggccacccctctgtcctggccccggaaggccctgtggtcatgtgctcctagctgcacggtggctgctggccacaccacggcaagtggcagcaggggccggccctgtgcacaaggatgcactcctctcggcccctgtagactttctctaaagccgcccgccagcccaggccgctgctctgcaccgagctggtgggcttgggttttgtggagcgcatgcttggaccctttcagtaaggaagggtctttggggttttctgtgcccatgacttgggggctgcacccccacagcacccccacaatgtaggaaaagacctcagggaacctctccctggaaagacgggcagggctggttagcccctcccactgcctgacacctgggacaggctgggcagaggggagagagggcaggacaggccagagtgacgcccccgtgcagcttgggccggagggcaagggatgccagtaagtctgcaggtgcggggtgccacctacaggcccaggcctgtgtcccaagcagtacccaggctttgcagaccacgcggggcagggctccactgaagccacccccacccctcgccagctagctccatagggaagcctgtgtctcctgcccccagggcgcaccctcagtgcaggcacctctgttcccgctttgcccctggaggagccactattccagaaggctccaccctgccgtcctgcgggagcctgctgtccagtcctggccgggccaaggcctgggaaactgtgaaagtcagaaaggccagcggggagaggctggggcgaggggaggagggggatcagcttctgctattaccgaccccccttcatgctgcccctggcgcctagaacccttgcccctcctcatagaccaagtcccgggggtctccactcagtcctgctgcctgcttcaccagaagcagccctgtgagtgtggggtggggaagtcccttcccaacggaggtcccagcctatggccctgggcccaggtgggggtcgcctgcttccttcccggacagggtcctgcagtggccaatggtgccagagggcaggtggcccaccctcgccatcagggagggtggctggccccatccccactgccacccagccccacccactgttggaagagggaccagcgcgaggtggtgcccagggtgggcactgctgcttaatgcgaggcacacctggggcagctgagcccccaaaggctgcgggtttgccaaacacagagaggccaggccccagtgtcaggatgcagtcagcctctggcgcagctctttccacgacctggttcctggatgtcctgcttgctccacacccatctacagggaggatgtgagggggctctgcctcctagggccaggtcccccctctcgggaggaggtattgggtaggaccatccaagaaagggcagaagaccaagggcagtcggggtctagaaaggagggcgctggccctgctggacgcttcggagcccccactgtttcccactcagctttgtgctcagatcccaggtcccaaggagtgacaggggcttcctcccaccttctgtccttgtccagtcatgtaaataatgtgctttttctctccccgagtctttttttttaaacctaccgtggttcctcagctaactgcattccctacccaggcagagactgtcctatgcctcgagcttccaaacgagactcagaccgcgacacagccaccgtatttatggaatgacaaaataaataaagcccaaacccatcggtctctgtg

SEQ ID NO: 168325 - DNA, 4207 bp, Homo sapiens
  Payload ID: 13125
  Gene Symbol: KCNAB2
  Gene Name: potassium channel, voltage gated subfamily A regulatory beta subunit 2
  Uniprot ID: Q13303
  ENST ID: ENST00000341524
  CDS Start-End: 486-1589
atcaccagaaccctctgccctgagaaaggggctcctgggccgacagggaaggtctgcctcctactctggaggggccgcttggggacaggcccgggctgtctcctcacagccacctgcttcctgtcctctgcctgtctcctgccccatctggccgctgctcatccaggaaggtcggagatgtcgggccctcccacctgggtcacgcgctaggcatgcctgagagcaaaggccacgccccgacaccccacggggccctggcgcgccaggcttctcagccctgcggcggcagtgcatagctctggcacgcgctgcaccaacttcctgttgggtgctgtggtcccaaggcgcgtgctttgcagcagatgtgtgacctggcgttcccctgagtgctcggaaaatggccttgtctccggtcgttcccgttcaggagcagaattttcccactgtaaaaaaccgagcaagtctggataagtgaggctggctccatgtatccagaatcaacgacgggctccccggctcggctctcgctgcggcagacgggctcccccgggatgatctacagtactcggtatgggagtcccaaaagacagctccagttttacaggaacctgggcaagtctggcctgcgggtctcctgcctgggacttggaacatgggtgaccttcggaggccagatcaccgatgagatggcagagcagctcatgaccttggcctatgataatggcatcaacctcttcgatacagcagaagtctacgcagccggcaaggctgaagtggtactgggaaacatcattaagaagaaaggatggaggcggtccagcctcgtcatcaccaccaagatcttctggggcggaaaggcggagacggagcggggcctgtccaggaagcacataatcgaaggtctgaaagcttccctggagcgactgcagctggagtacgtggatgtggtgtttgccaaccgcccggaccccaacaccccgatggaagagaccgtccgcgccatgacccacgtcatcaaccaggggatggccatgtactggggcacgtcacgctggagctccatggagatcatggaggcctactccgtggcccggcagttcaacctgaccccgcccatctgcgagcaggctgagtaccacatgttccagcgtgagaaagtggaggtgcagctgccggagctgttccacaagataggagtgggcgccatgacctggtcccctctggcctgtggcattgtttctggcaagtacgacagtggcatcccaccctactcaagagcctccttgaagggctaccagtggctgaaggacaagatcctcagtgaggagggccggcgccagcaagccaagctgaaggagctgcaggccatcgccgagcgcctgggctgcaccctgccccagctggccatagcctggtgcctgaggaatgagggagtcagctccgtgctcctgggggcctccaatgcggaccagctcatggagaacattggggcaatacaggtccttccgaaactgtcatcttccattatccacgagattgatagtattttgggcaataaaccctacagcaaaaaggactacagatcctaagccgcccccgcccgcctgctcggacagtttccgttccctcctagtctctgttcgctcgcttaagctgttttgaagccaagtgaagagtgtggtttgcatccaagagaaaacaccacactgtgatgtcatcgggaaatgatctcccaagtcgctgccagacaccacccactgcttcgccggacaatgtcgaagtccagtctgtgccggggaaggcactggttaggaaggatgttcaaacggtcccacccaagcctgtcacctctgctcatcctccaagaccacccagctttctcccagccacagccaagattcccaaagtcaaggcccaaagatttccaaggttcccaaagtcaaggccaggccaaggcctggttgggtccttggggcgggcagggccagcctctcctctgctgagaatccccacttggtgtagggggagaggggaaaggggtctggcccatcgaggggccccttctgccagggccttggttgctggggcagggcctccccactgggggtcttcctccacctcccactttccaagggctccaggaatctggggcctgaccacagattcctctcccatccttttctgctccaacctgccccactgggtcccggcaggggccatgcctaccaagctcgagctggcccttgacccccacccacccccacccttgctggcaggggcagggaccccagggggattgactctgcagtttgggagccacaaaaagcgtagcggtgtgatttctagctcagcctcccaccgtcttcctcctacacaccaatgatgagcctcatgccagtgaggcccggagcgcttgggaggggtcccagtggggcaggcccctctgtctggccacccctctgtcctggccccggaaggccctgtggtcatgtgctcctagctgcacggtggctgctggccacaccacggcaagtggcagcaggggccggccctgtgcacaaggatgcactcctctcggcccctgtagactttctctaaagccgcccgccagcccaggccgctgctctgcaccgagctggtgggcttgggttttgtggagcgcatgcttggaccctttcagtaaggaagggtctttggggttttctgtgcccatgacttgggggctgcacccccacagcacccccacaatgtaggaaaagacctcagggaacctctccctggaaagacgggcagggctggttagcccctcccactgcctgacacctgggacaggctgggcagaggggagagagggcaggacaggccagagtgacgcccccgtgcagcttgggccggagggcaagggatgccagtaagtctgcaggtgcggggtgccacctacaggcccaggcctgtgtcccaagcagtacccaggctttgcagaccacgcggggcagggctccactgaagccacccccacccctcgccagctagctccatagggaagcctgtgtctcctgcccccagggcgcaccctcagtgcaggcacctctgttcccgctttgcccctggaggagccactattccagaaggctccaccctgccgtcctgcgggagcctgctgtccagtcctggccgggccaaggcctgggaaactgtgaaagtcagaaaggccagcggggagaggctggggcgaggggaggagggggatcagcttctgctattaccgaccccccttcatgctgcccctggcgcctagaacccttgcccctcctcatagaccaagtcccgggggtctccactcagtcctgctgcctgcttcaccagaagcagccctgtgagtgtggggtggggaagtcccttcccaacggaggtcccagcctatggccctgggcccaggtgggggtcgcctgcttccttcccggacagggtcctgcagtggccaatggtgccagagggcaggtggcccaccctcgccatcagggagggtggctggccccatccccactgccacccagccccacccactgttggaagagggaccagcgcgaggtggtgcccagggtgggcactgctgcttaatgcgaggcacacctggggcagctgagcccccaaaggctgcgggtttgccaaacacagagaggccaggccccagtgtcaggatgcagtcagcctctggcgcagctctttccacgacctggttcctggatgtcctgcttgctccacacccatctacagggaggatgtgagggggctctgcctcctagggccaggtcccccctctcgggaggaggtattgggtaggaccatccaagaaagggcagaagaccaagggcagtcggggtctagaaaggagggcgctggccctgctggacgcttcggagcccccactgtttcccactcagctttgtgctcagatcccaggtcccaaggagtgacaggggcttcctcccaccttctgtccttgtccagtcatgtaaataatgtgctttttctctccccgagtctttttttttaaacctaccgtggttcctcagctaactgcattccctacccaggcagagactgtcctatgcctcgagcttccaaacgagactcagaccgcgacacagccaccgtatttatggaatgacaaaataaataaagcccaaacccatcggtctctgtg

SEQ ID NO: 168326 - DNA, 4142 bp, Homo sapiens
  Payload ID: 13125
  Gene Symbol: KCNAB2
  Gene Name: potassium channel, voltage gated subfamily A regulatory beta subunit 2
  Uniprot ID: Q13303
  ENST ID: ENST00000378083
  CDS Start-End: 290-1537
acttcccgagcttttaggggaagaggcactcgtgaataattcagcctctttcactgagatgaaaacgccctaatagaactaatggactcgctgcctcaaaactcgactctggtgggactcatctcattcaccaattgcttctgacgtcctgcagtgacactccctaatgaaaaagccgctgtgccagatccttagagtgtctggtgatccctaataaaccagactgtggcctttttaacgagcagacgcccccacgaaggcagtggcagctcccaagccaggcggcaccatgctgtccatgacgtacagcgagagtctgcggagcgtgagcagcaggtgccactctgaatgggccctgcaccccgtccgccagacggacacgctggaactgcagcggctgcgggaggtgcgggcggctgcccaggccaggaacatggagagcttcctccgcatgcacggcctttccctggacggctgcaccgcccagcgcacaggcatgaagtatcggaacctgggcaagtctggcctgcgggtctcctgcctgggacttggaacatgggtgaccttcggaggccagatcaccgatgagatggcagagcagctcatgaccttggcctatgataatggcatcaacctcttcgatacagcagaagtctacgcagccggcaaggctgaagtggtactgggaaacatcattaagaagaaaggatggaggcggtccagcctcgtcatcaccaccaagatcttctggggcggaaaggcggagacggagcggggcctgtccaggaagcacataatcgaaggtctgaaagcttccctggagcgactgcagctggagtacgtggatgtggtgtttgccaaccgcccggaccccaacaccccgatggaaggggacccatttagttcctccaagtcaaggacattcatcatagaagagaccgtccgcgccatgacccacgtcatcaaccaggggatggccatgtactggggcacgtcacgctggagctccatggagatcatggaggcctactccgtggcccggcagttcaacctgaccccgcccatctgcgagcaggctgagtaccacatgttccagcgtgagaaagtggaggtgcagctgccggagctgttccacaagataggagtgggcgccatgacctggtcccctctggcctgtggcattgtttctggcaagtacgacagtggcatcccaccctactcaagagcctccttgaagggctaccagtggctgaaggacaagatcctcagtgaggagggccggcgccagcaagccaagctgaaggagctgcaggccatcgccgagcgcctgggctgcaccctgccccagctggccatagcctggtgcctgaggaatgagggagtcagctccgtgctcctgggggcctccaatgcggaccagctcatggagaacattggggcaatacaggtccttccgaaactgtcatcttccattatccacgagattgatagtattttgggcaataaaccctacagcaaaaaggactacagatcctaagccgcccccgcccgcctgctcggacagtttccgttccctcctagtctctgttcgctcgcttaagctgttttgaagccaagtgaagagtgtggtttgcatccaagagaaaacaccacactgtgatgtcatcgggaaatgatctcccaagtcgctgccagacaccacccactgcttcgccggacaatgtcgaagtccagtctgtgccggggaaggcactggttaggaaggatgttcaaacggtcccacccaagcctgtcacctctgctcatcctccaagaccacccagctttctcccagccacagccaagattcccaaagtcaaggcccaaagatttccaaggttcccaaagtcaaggccaggccaaggcctggttgggtccttggggcgggcagggccagcctctcctctgctgagaatccccacttggtgtagggggagaggggaaaggggtctggcccatcgaggggccccttctgccagggccttggttgctggggcagggcctccccactgggggtcttcctccacctcccactttccaagggctccaggaatctggggcctgaccacagattcctctcccatccttttctgctccaacctgccccactgggtcccggcaggggccatgcctaccaagctcgagctggcccttgacccccacccacccccacccttgctggcaggggcagggaccccagggggattgactctgcagtttgggagccacaaaaagcgtagcggtgtgatttctagctcagcctcccaccgtcttcctcctacacaccaatgatgagcctcatgccagtgaggcccggagcgcttgggaggggtcccagtggggcaggcccctctgtctggccacccctctgtcctggccccggaaggccctgtggtcatgtgctcctagctgcacggtggctgctggccacaccacggcaagtggcagcaggggccggccctgtgcacaaggatgcactcctctcggcccctgtagactttctctaaagccgcccgccagcccaggccgctgctctgcaccgagctggtgggcttgggttttgtggagcgcatgcttggaccctttcagtaaggaagggtctttggggttttctgtgcccatgacttgggggctgcacccccacagcacccccacaatgtaggaaaagacctcagggaacctctccctggaaagacgggcagggctggttagcccctcccactgcctgacacctgggacaggctgggcagaggggagagagggcaggacaggccagagtgacgcccccgtgcagcttgggccggagggcaagggatgccagtaagtctgcaggtgcggggtgccacctacaggcccaggcctgtgtcccaagcagtacccaggctttgcagaccacgcggggcagggctccactgaagccacccccacccctcgccagctagctccatagggaagcctgtgtctcctgcccccagggcgcaccctcagtgcaggcacctctgttcccgctttgcccctggaggagccactattccagaaggctccaccctgccgtcctgcgggagcctgctgtccagtcctggccgggccaaggcctgggaaactgtgaaagtcagaaaggccagcggggagaggctggggcgaggggaggagggggatcagcttctgctattaccgaccccccttcatgctgcccctggcgcctagaacccttgcccctcctcatagaccaagtcccgggggtctccactcagtcctgctgcctgcttcaccagaagcagccctgtgagtgtggggtggggaagtcccttcccaacggaggtcccagcctatggccctgggcccaggtgggggtcgcctgcttccttcccggacagggtcctgcagtggccaatggtgccagagggcaggtggcccaccctcgccatcagggagggtggctggccccatccccactgccacccagccccacccactgttggaagagggaccagcgcgaggtggtgcccagggtgggcactgctgcttaatgcgaggcacacctggggcagctgagcccccaaaggctgcgggtttgccaaacacagagaggccaggccccagtgtcaggatgcagtcagcctctggcgcagctctttccacgacctggttcctggatgtcctgcttgctccacacccatctacagggaggatgtgagggggctctgcctcctagggccaggtcccccctctcgggaggaggtattgggtaggaccatccaagaaagggcagaagaccaagggcagtcggggtctagaaaggagggcgctggccctgctggacgcttcggagcccccactgtttcccactcagctttgtgctcagatcccaggtcccaaggagtgacaggggcttcctcccaccttctgtccttgtccagtcatgtaaataatgtgctttttctctccccgagtctttttttttaaacctaccgtggttcctcagctaactgcattccctacccaggcagagactgtcctatgcctcgagcttccaaacgagactcagaccgcgacacagccaccgtatttatggaatgacaaaataaataaagcccaaaccc

SEQ ID NO: 168327 - DNA, 1202 bp, Homo sapiens
  Payload ID: 13125
  Gene Symbol: KCNAB2
  Gene Name: potassium channel, voltage gated subfamily A regulatory beta subunit 2
  Uniprot ID: Q13303
  ENST ID: ENST00000378092
  CDS Start-End: 141-1202
agcgggattcgggggcgctaaagtcgcaggggcagggcgggaaggaagatccggcgcggggcacaggatccggagctggagcccccagaattttcccactgtaaaaaaccgagcaagtctggataagtgaggctggctccatgtatccagaatcaacgacgggctccccggctcggctctcgctgcggcagacgggctcccccgggatgatctacaggaacctgggcaagtctggcctgcgggtctcctgcctgggacttggaacatgggtgaccttcggaggccagatcaccgatgagatggcagagcagctcatgaccttggcctatgataatggcatcaacctcttcgatacagcagaagtctacgcagccggcaaggctgaagtggtactgggaaacatcattaagaagaaaggatggaggcggtccagcctcgtcatcaccaccaagatcttctggggcggaaaggcggagacggagcggggcctgtccaggaagcacataatcgaaggtctgaaagcttccctggagcgactgcagctggagtacgtggatgtggtgtttgccaaccgcccggaccccaacaccccgatggaagagaccgtccgcgccatgacccacgtcatcaaccaggggatggccatgtactggggcacgtcacgctggagctccatggagatcatggaggcctactccgtggcccggcagttcaacctgaccccgcccatctgcgagcaggctgagtaccacatgttccagcgtgagaaagtggaggtgcagctgccggagctgttccacaagataggagtgggcgccatgacctggtcccctctggcctgtggcattgtttctggcaagtacgacagtggcatcccaccctactcaagagcctccttgaagggctaccagtggctgaaggacaagatcctcagtgaggagggccggcgccagcaagccaagctgaaggagctgcaggccatcgccgagcgcctgggctgcaccctgccccagctggccatagcctggtgcctgaggaatgagggagtcagctccgtgctcctgggggcctccaatgcggaccagctcatggagaacattggggcaatacaggtccttccgaaactgtcatcttccattatccacgagattgatagtattttgggcaataaaccctacagcaaaaaggactacagatcctaa

SEQ ID NO: 168328 - DNA, 4201 bp, Homo sapiens
  Payload ID: 13125
  Gene Symbol: KCNAB2
  Gene Name: potassium channel, voltage gated subfamily A regulatory beta subunit 2
  Uniprot ID: Q13303
  ENST ID: ENST00000378097
  CDS Start-End: 479-1582
ggaccgaggactggccgaggggcgcgccccgtccgctgccacccgcgggaggagcctcggaaggcggcgcaccgcgccgcacactcagtccaagaacccgcctcgcgtcactgtcgccgtcagggccgcggagccaatcagagcccaagtcgagggctgcgctttgcgagcgccagccaatcggtgcggcggcgggcccatcctgatttgcatgtccgacgacccctcaaccaatggtaatgtgactggcgtgaacaatagccaatcagaagctggaagaggcgtggccccgggcgtcccacgaggtgaagatgctgctggcggaacctgcaggagctagcgggattcgggggcgctaaagtcgcaggggcagggcgggaaggaagatccggcgcggggcacaggatccggagctggagcccccagaattttcccactgtaaaaaaccgagcaagtctggataagtgaggctggctccatgtatccagaatcaacgacgggctccccggctcggctctcgctgcggcagacgggctcccccgggatgatctacagtactcggtatgggagtcccaaaagacagctccagttttacaggaacctgggcaagtctggcctgcgggtctcctgcctgggacttggaacatgggtgaccttcggaggccagatcaccgatgagatggcagagcagctcatgaccttggcctatgataatggcatcaacctcttcgatacagcagaagtctacgcagccggcaaggctgaagtggtactgggaaacatcattaagaagaaaggatggaggcggtccagcctcgtcatcaccaccaagatcttctggggcggaaaggcggagacggagcggggcctgtccaggaagcacataatcgaaggtctgaaagcttccctggagcgactgcagctggagtacgtggatgtggtgtttgccaaccgcccggaccccaacaccccgatggaagagaccgtccgcgccatgacccacgtcatcaaccaggggatggccatgtactggggcacgtcacgctggagctccatggagatcatggaggcctactccgtggcccggcagttcaacctgaccccgcccatctgcgagcaggctgagtaccacatgttccagcgtgagaaagtggaggtgcagctgccggagctgttccacaagataggagtgggcgccatgacctggtcccctctggcctgtggcattgtttctggcaagtacgacagtggcatcccaccctactcaagagcctccttgaagggctaccagtggctgaaggacaagatcctcagtgaggagggccggcgccagcaagccaagctgaaggagctgcaggccatcgccgagcgcctgggctgcaccctgccccagctggccatagcctggtgcctgaggaatgagggagtcagctccgtgctcctgggggcctccaatgcggaccagctcatggagaacattggggcaatacaggtccttccgaaactgtcatcttccattatccacgagattgatagtattttgggcaataaaccctacagcaaaaaggactacagatcctaagccgcccccgcccgcctgctcggacagtttccgttccctcctagtctctgttcgctcgcttaagctgttttgaagccaagtgaagagtgtggtttgcatccaagagaaaacaccacactgtgatgtcatcgggaaatgatctcccaagtcgctgccagacaccacccactgcttcgccggacaatgtcgaagtccagtctgtgccggggaaggcactggttaggaaggatgttcaaacggtcccacccaagcctgtcacctctgctcatcctccaagaccacccagctttctcccagccacagccaagattcccaaagtcaaggcccaaagatttccaaggttcccaaagtcaaggccaggccaaggcctggttgggtccttggggcgggcagggccagcctctcctctgctgagaatccccacttggtgtagggggagaggggaaaggggtctggcccatcgaggggccccttctgccagggccttggttgctggggcagggcctccccactgggggtcttcctccacctcccactttccaagggctccaggaatctggggcctgaccacagattcctctcccatccttttctgctccaacctgccccactgggtcccggcaggggccatgcctaccaagctcgagctggcccttgacccccacccacccccacccttgctggcaggggcagggaccccagggggattgactctgcagtttgggagccacaaaaagcgtagcggtgtgatttctagctcagcctcccaccgtcttcctcctacacaccaatgatgagcctcatgccagtgaggcccggagcgcttgggaggggtcccagtggggcaggcccctctgtctggccacccctctgtcctggccccggaaggccctgtggtcatgtgctcctagctgcacggtggctgctggccacaccacggcaagtggcagcaggggccggccctgtgcacaaggatgcactcctctcggcccctgtagactttctctaaagccgcccgccagcccaggccgctgctctgcaccgagctggtgggcttgggttttgtggagcgcatgcttggaccctttcagtaaggaagggtctttggggttttctgtgcccatgacttgggggctgcacccccacagcacccccacaatgtaggaaaagacctcagggaacctctccctggaaagacgggcagggctggttagcccctcccactgcctgacacctgggacaggctgggcagaggggagagagggcaggacaggccagagtgacgcccccgtgcagcttgggccggagggcaagggatgccagtaagtctgcaggtgcggggtgccacctacaggcccaggcctgtgtcccaagcagtacccaggctttgcagaccacgcggggcagggctccactgaagccacccccacccctcgccagctagctccatagggaagcctgtgtctcctgcccccagggcgcaccctcagtgcaggcacctctgttcccgctttgcccctggaggagccactattccagaaggctccaccctgccgtcctgcgggagcctgctgtccagtcctggccgggccaaggcctgggaaactgtgaaagtcagaaaggccagcggggagaggctggggcgaggggaggagggggatcagcttctgctattaccgaccccccttcatgctgcccctggcgcctagaacccttgcccctcctcatagaccaagtcccgggggtctccactcagtcctgctgcctgcttcaccagaagcagccctgtgagtgtggggtggggaagtcccttcccaacggaggtcccagcctatggccctgggcccaggtgggggtcgcctgcttccttcccggacagggtcctgcagtggccaatggtgccagagggcaggtggcccaccctcgccatcagggagggtggctggccccatccccactgccacccagccccacccactgttggaagagggaccagcgcgaggtggtgcccagggtgggcactgctgcttaatgcgaggcacacctggggcagctgagcccccaaaggctgcgggtttgccaaacacagagaggccaggccccagtgtcaggatgcagtcagcctctggcgcagctctttccacgacctggttcctggatgtcctgcttgctccacacccatctacagggaggatgtgagggggctctgcctcctagggccaggtcccccctctcgggaggaggtattgggtaggaccatccaagaaagggcagaagaccaagggcagtcggggtctagaaaggagggcgctggccctgctggacgcttcggagcccccactgtttcccactcagctttgtgctcagatcccaggtcccaaggagtgacaggggcttcctcccaccttctgtccttgtccagtcatgtaaataatgtgctttttctctccccgagtctttttttttaaacctaccgtggttcctcagctaactgcattccctacccaggcagagactgtcctatgcctcgagcttccaaacgagactcagaccgcgacacagccaccgtatttatggaatgacaaaataaataaagcccaaacccatcggtctctgtga

SEQ ID NO: 168329 - DNA, 822 bp, Homo sapiens
  Payload ID: 13125
  Gene Symbol: KCNAB2
  Gene Name: potassium channel, voltage gated subfamily A regulatory beta subunit 2
  ENST ID: ENST00000378111
  CDS Start-End: 144-665
agacgtccaccaaagccacacatcgcgacacacggaggcagaaagcagcggtctcctaagaagttagacacgaggaatctcgggcagcgagaattttcccactgtaaaaaaccgagcaagtctggataagtgaggctggctccatgtatccagaatcaacgacgggctccccggctcggctctcgctgcggcagacgggctcccccgggatgatctacagtactcggtatgggagtcccaaaagacagctccagttttacaggaacctgggcaagtctggcctgcgggtctcctgcctgggacttggaacatgggtgaccttcggaggccagatcaccgatgagatggcagagcagctcatgaccttggcctatgataatggcatcaacctcttcgatacagcagaagtctacgcagccggcaaggctgaagtggtactgggaaacatcattaagaagaaaggatggaggcagaggggagagagggcaggacaggccagagtgacgcccccgtgcagcttgggccggagggcaagggatgccagtaagtctgcaggtgcggggtgccacctacaggcccaggcctgtgtcccaagcagtacccaggctttgcagaccacgcggggcagggctccactgaagccacccccacccctcgccagctagctccatagggaagcctgtgtctcctgcccccagggcgcaccctcagtgcaggcacctctgttcccgctttgcccctggaggagccactattccagaaggctccaccctgccgtcctgcgggagcctgctgtccagtcctggccgggccaaggcctgg

SEQ ID NO: 168330 - DNA, 959 bp, Homo sapiens
  Payload ID: 13125
  Gene Symbol: KCNAB2
  Gene Name: potassium channel, voltage gated subfamily A regulatory beta subunit 2
  ENST ID: ENST00000389632
  CDS Start-End: 199-959
agtgcatagctctggcacgcgctgcaccaacttcctgttgggtgctgtggtcccaaggcgcgtgctttgcagcagatgtgtgacctggcgttcccctgagtgctcggaaaatggccttgtctccggtcgttcccgttcaggagcagaattttcccactgtaaaaaaccgagcaagtctggataagtgaggctggctccatgtatccagaatcaacgacgggctccccggctcggctctcgctgcggcagacgggctcccccgggatgatctacagtactcggtatgggagtcccaaaagacagctccagttttacaggaacctgggcaagtctggcctgcgggtctcctgcctgggacttggaacatgggtgaccttcggaggccagatcaccgatgagatggcagagcagctcatgaccttggcctatgataatggcatcaacctcttcgatacagcagaagtctacgcagccggcaaggctgaagtggtactgggaaacatcattaagaagaaaggatggaggcggtccagcctcgtcatcaccaccaagatcttctggggcggaaaggcggagacggagcggggcctgtccaggaagcacataatcgaaggtctgaaagcttccctggagcgactgcagctggagtacgtggatgtggtgtttgccaaccgcccggaccccaacaccccgatggaagagaccgtccgcgccatgacccacgtcatcaaccaggggatggccatgtactggggcacgtcacgctggagctccatggagatcatggaggcctactccgtggcccggcagttcaacctgaccccgcccatctgcgagcaggctgagtaccacatgttccagcgtgagaaagtggaggtgcagctgccggagctgttccacaagataggagtgggcgccatgacctggtcccctctggcctgtggcattgtttctggcaa

SEQ ID NO: 168331 - DNA, 1336 bp, Homo sapiens
  Payload ID: 13125
  Gene Symbol: KCNAB2
  Gene Name: potassium channel, voltage gated subfamily A regulatory beta subunit 2
  Uniprot ID: Q13303
  ENST ID: ENST00000458166
  CDS Start-End: 153-1055
agagtgtctggtgatccctaataaaccagactgtggcctttttaacgagcagacgcccccacgaaggcaggaacctgggcaagtctggcctgcgggtctcctgcctgggacttggaacatgggtgaccttcggaggccagatcaccgatgagatggcagagcagctcatgaccttggcctatgataatggcatcaacctcttcgatacagcagaagtctacgcagccggcaaggctgaagtggtactgggaaacatcattaagaagaaaggatggaggcggtccagcctcgtcatcaccaccaagatcttctggggcggaaaggcggagacggagcggggcctgtccaggaagcacataatcgaaggtctgaaagcttccctggagcgactgcagctggagtacgtggatgtggtgtttgccaaccgcccggaccccaacaccccgatggaagagaccgtccgcgccatgacccacgtcatcaaccaggggatggccatgtactggggcacgtcacgctggagctccatggagatcatggaggcctactccgtggcccggcagttcaacctgaccccgcccatctgcgagcaggctgagtaccacatgttccagcgtgagaaagtggaggtgcagctgccggagctgttccacaagataggagtgggcgccatgacctggtcccctctggcctgtggcattgtttctggcaagtacgacagtggcatcccaccctactcaagagcctccttgaagggctaccagtggctgaaggacaagatcctcagtgaggagggccggcgccagcaagccaagctgaaggagctgcaggccatcgccgagcgcctgggctgcaccctgccccagctggccatagcctggtgcctgaggaatgagggagtcagctccgtgctcctgggggcctccaatgcggaccagctcatggagaacattggggcaatacaggtccttccgaaactgtcatcttccattatccacgagattgatagtattttgggcaataaaccctacagcaaaaaggactacagatcctaagccgcccccgcccgcctgctcggacagtttccgttccctcctagtctctgttcgctcgcttaagctgttttgaagccaagtgaagagtgtggtttgcatccaagagaaaacaccacactgtgatgtcatcgggaaatgatctcccaagtcgctgccagacaccacccactgcttcgccggacaatgtcgaagtccagtctgtgccggggaaggcactggttaggaaggatgttcaaacggtcccacccaagcctgtcacctctgctcatcctccaagacca

SEQ ID NO: 168332 - DNA, 486 bp, Homo sapiens
  Payload ID: 13125
  Gene Symbol: KCNAB2
  Gene Name: potassium channel, voltage gated subfamily A regulatory beta subunit 2
  ENST ID: ENST00000445501
  CDS Start-End: 332-486
gggggcgctaaagtcgcaggggcagggcgggaaggaagatccggcgcggggcacaggatccggagctggagcccccagaggcctcacgacaggactagtgccttggtaagaagaggaaaaggccagagctccctccctaccctgtgtggacccagcaggaaggaattctgtctgcaagagagagccctcacctggaaccaaatcagccaggaccctgatgttggatttaccagcctccagcaccgtgagacagaaacgtctgctgtttcagccacccagaattttcccactgtaaaaaaccgagcaagtctggataagtgaggctggctccatgtatccagaatcaacgacgggctccccggctcggctctcgctgcggcagacgggctcccccgggatgatctacagtactcggtatgggagtcccaaaagacagctccagttttacaggaacctgggcaagtctggcctgcgggtctcctgcct

SEQ ID NO: 168333 - DNA, 961 bp, Homo sapiens
  Payload ID: 13125
  Gene Symbol: KCNAB2
  Gene Name: potassium channel, voltage gated subfamily A regulatory beta subunit 2
  ENST ID: ENST00000428161
  CDS Start-End: 199-961
agtgcatagctctggcacgcgctgcaccaacttcctgttgggtgctgtggtcccaaggcgcgtgctttgcagcagatgtgtgacctggcgttcccctgagtgctcggaaaatggccttgtctccggtcgttcccgttcaggagcagaattttcccactgtaaaaaaccgagcaagtctggataagtgaggctggctccatgtatccagaatcaacgacgggctccccggctcggctctcgctgcggcagacgggctcccccgggatgatctacaggaacctgggcaagtctggcctgcgggtctcctgcctgggacttggaacatgggtgaccttcggaggccagatcaccgatgagatggcagagcagctcatgaccttggcctatgataatggcatcaacctcttcgatacagcagaagtctacgcagccggcaaggctgaagtggtactgggaaacatcattaagaagaaaggatggaggcggtccagcctcgtcatcaccaccaagatcttctggggcggaaaggcggagacggagcggggcctgtccaggaagcacataatcgaaggtctgaaagcttccctggagcgactgcagctggagtacgtggatgtggtgtttgccaaccgcccggaccccaacaccccgatggaagagaccgtccgcgccatgacccacgtcatcaaccaggggatggccatgtactggggcacgtcacgctggagctccatggagatcatggaggcctactccgtggcccggcagttcaacctgaccccgcccatctgcgagcaggctgagtaccacatgttccagcgtgagaaagtggaggtgcagctgccggagctgttccacaagataggagtgggcgccatgacctggtcccctctggcctgtggcattgtttctggcaagtacgacagtggcatcccaccctactcaagagcctccttgaagg

SEQ ID NO: 168334 - DNA, 536 bp, Homo sapiens
  Payload ID: 13125
  Gene Symbol: KCNAB2
  Gene Name: potassium channel, voltage gated subfamily A regulatory beta subunit 2
  ENST ID: ENST00000472700
  CDS Start-End: 1-488
agacgggctcccccgggatgatctacagtactcggtatgggagtcccaaaagacagctccagttttacaggaacctgggcaagtctggcctgcgggtctcctgcctgggacttggaacatgggtgaccttcggaggccagatcaccgatgagatggcagagcagctcatgaccttggcctatgataatggcatcaacctcttcgatacagcagaagtctacgcagccggcaaggctgaagtggtactgggaaacatcattaagaagaaaggatggaggatcttcgcggcgtctcagcctctccggagctcactgttcccatctgtaagaggaaacatcagaagcagttataaagttgggcctccctcctccctcccctcgaaatgccactcagaatcccagtgccaaggggagcccccgccccctcccccatggattcctgacaccccttcctcttgtcccatcaaatttgttttttggcaactctgatcccaaaacaaattcctcctcaccctgtaattaaacgaaattgcacgt

SEQ ID NO: 168335 - DNA, 683 bp, Homo sapiens
  Payload ID: 13125
  Gene Symbol: KCNAB2
  Gene Name: potassium channel, voltage gated subfamily A regulatory beta subunit 2
  ENST ID: ENST00000462676
  CDS Start-End: 1-369
tacgcagccggcaaggctgaagtggtactgggaaacatcattaagaagaaaggatggaggatcttcgcggcgtctcagcctctccggagctcactgttcccatctgtaagagggtgtgtgtgggaccgttccggcagggctatcctgagggtcagtggccccaagtctgtaaatcacccacccagctcagggcgggacgtgtcacactcctctgggaagtggtcccctccagcacagaccggggagcggtccccgggtgtgatggagcccaaaggtcgcagatcgggggccatccacccttctctcccaggagcctatgggcccttcccaggccaaggtcctcacccaccttgggaccaactgggctgagcacttgcctacattttgaggctccccagacccctggacacagctttatctcaaggtgctgacaagccccggggccctgttccttaataaatgcgtctttattttcagaaacatcagaagcagttataaagttgggcctccctcctccctcccctcgaaatgccactcagaatcccagtgccaaggggagcccccgccccctcccccatggattcctgacaccccttcctcttgtcccatcaaatttgttttttggcaactctgatcccaaaacaaattcctcctcaccctgtaattaaacgaaattgcacgta

SEQ ID NO: 168336 - DNA, 2396 bp, Homo sapiens
  Payload ID: 13125
  Gene Symbol: KCNAB2
  Gene Name: potassium channel, voltage gated subfamily A regulatory beta subunit 2
  Uniprot ID: Q13303
  ENST ID: ENST00000602612
  CDS Start-End: 179-1366
gctgcaccaacttcctgttgggtgctgtggtcccaaggcgcgtgctttgcagcagatgtgtgacctggcgttcccctgagtgctcggaaaatggccttgtctccggtcgttcccgttcaggagcagaattttcccactgtaaaaaaccgagcaagtctggataagtgaggctggctccatgtatccagaatcaacgacgggctccccggctcggctctcgctgcggcagacgggctcccccgggatgatctacagtactcggtatgggagtcccaaaagacagctccagttttacaggaacctgggcaagtctggcctgcgggtctcctgcctgggacttggaacatgggtgaccttcggaggccagatcaccgatgagatggcagagcagctcatgaccttggcctatgataatggcatcaacctcttcgatacagcagaagtctacgcagccggcaaggctgaagtggtactgggaaacatcattaagaagaaaggatggaggcggtccagcctcgtcatcaccaccaagatcttctggggcggaaaggcggagacggagcggggcctgtccaggaagcacataatcgaaggtctgaaagcttccctggagcgactgcagctggagtacgtggatgtggtgtttgccaaccgcccggaccccaacaccccgatggaagagaccgtccgcgccatgacccacgtcatcaaccaggggatggccatgtactggggcacgtcacgctggagctccatggagatcatggaggcctactccgtggcccggcagttcaacctgaccccgcccatctgcgagcaggctgagtaccacatgttccagcgtgagaaagtggaggtgcagctgccggagctgttccacaagataggagtgggcgccatgacctggtcccctctggcctgtggcattgtttctggcaagtacgacagtggcatcccaccctactcaagagcctccttgaagggctaccagtggctgaaggacaagatcctcagtgaggagggccggcgccagcaagccaagctgaaggagctgcaggccatcgccgagcgcctgggctgcaccctgccccagctggccatagcctggtgcctgaggaatgagggagtcagctccgtgctcctgggggcctccaatgcggaccagctcatggagaacattggggcaatacaggtaagagtgagaggccctgctgggcagagggcccatcccagcccgagccccgtccagtgcatcctcccaggctcgtcctgcgtgccaggctctgttctaggcactcaggatgcgcccgtgaaccatcagagttgtgctcctggagagcttgctttccagcaggaacagacatgaacactaactgcacgaaacaaggaggttagaatgtgtgtcagggtggacgagcgctgtaggagagaagccagagataaagggagggagctggggccagggacggtggcgctgcagactcaggttcaagggggcctgtcaggtgggcttgttgagaaggtggtgcttgagcagtcttgagagatgcggagtaagtcacgcaaatgcctgcgggaagaaccttccaccagcaggaagagttgatgcaaaggcccaaaaaggcctggagcagaggggcagatcctgagaggcacgaaacacctccagggacttctgagtgagacgggagccgtggcaaaattgtgggcagaggagggcgagctgcagctcagcctggaaagggaggctgctctccggctgctccatcggggaggctttgggaagcaaaagtcgaagcagagagccctggtgggaagtggcagctgcgggtccgagacgggagtggtggttggatcctggatgtttgggaaggtggggcccccgggactggctgacaaactggatgtgggggtgagaaggcgaggtggaagtcggtccccgggtgtgtcacccggaagggtggcggtgctgtatgctgaggcaggcgcagctggaaaaagcagtcacggacatggaagtccagcatttggcctggagtttccattttatgtcactgctgccaccacccttcaggaaggttctagggcaccttgacatttgagagggagtgcacagacccaggcatgcttcctctctgccccaaaccttctgaaacacaaaagcagcgtggcctccatctgcctcagatggagcccagatgtgatggggcaacccgggcctggccagccgaccatctggaagagcctggccccacctcctccccaggccaggcccgtcttgttggtgggattctgatttgttgttgttcttgcacgcaggtccttccgaaactgtcatcttccattatccacgagattgatagtattttgggcaataaaccctacagcaaaaagga

SEQ ID NO: 168337 - DNA, 2458 bp, Homo sapiens
  Payload ID: 13126
  Gene Symbol: KCNAB3
  Gene Name: potassium channel, voltage gated subfamily A regulatory beta subunit 3
  Uniprot ID: O43448
  ENST ID: ENST00000303790
  CDS Start-End: 1-1215
atgcaggtgtctatcgcgtgtaccgagcagaaccttcgcagccggagcagtgaggaccgtctgtgtggaccccggccgggccccgggggcggtaatggtgggccggccggcggggggcacgggaatcctccggggggtggagggtctggccccaaggcccgagctgcactggttccccgacccccagcgcccgctggggccctccgagagagcaccggccgaggcactggcatgaaatacaggaacctagggaagtctggtcttcgggtatcctgtcttggcctaggtacctgggtcacatttggttctcagatctcagatgagacagcagaggatgtgctgactgtagcctatgagcatggtgtaaacctgtttgacaccgccgaagtgtacgcagcaggaaaggctgaaagaaccctagggaacatcctcaagagcaaaggttggaggagatcaagctatgtcatcactaccaagattttttggggaggacaggcagaaaccgagcgaggtttaagccgaaagcacatcattgagggcttgcgaggatccctggaacgcctccagctgggatacgtggacattgtctttgccaatcgctcagaccccaactgtcctatggaggagattgtgcgagccatgacctatgtcatcaaccagggcctggccctatactgggggacatcccgatggggggctgcagaaatcatggaggcctactccatggccagacagttcaatctgattcctccagtgtgtgaacaagcggagcaccatctgtttcagagggagaaggtggagatgcagctgccagagctctaccacaagattggagttggatcagtcacttggtaccctctagcctgtggtctcattactagcaagtatgatgggcgagtcccagatacttgcagggcctccatcaagggctaccagtggctcaaggacaaagtgcagagtgaagatggcaagaagcaacaagccaaagtcatggaccttcttcctgtcgctcaccagctgggctgcaccgtggcccagcttgctattgcgtggtgtctccgcagtgagggtgtcagctctgtcttgctgggggtgtcgagtgcggagcagttgatagaacacctgggcgcgctacaggtgctgagccagctgaccccgcagacagtgatggaaatagacgggctcctgggaaacaagccgcattccaagaagtagtctgtcgcgggcgcagggacccaacccggtgtcgctgcacccgcccgagccccgctcctcgcagccgcctctcccgctccggatccctccacgcagcggccggagccagactagccccgcccaccaacgagtcccggcttcgagtagtgatacgcatgaacaaagccatatccttttgcagtggggtcgagagagaaagtagcacgcccgccccctgctgcgtctttctaggcccttcttgcaaatcccgggcatgagctactcgccgtcggctctctgccacttcgtctcgctccctactctcctccccttattcccgaggcccagaaaagaaaacaaaaacaaaaacccagcacatacaagaaacatacagtgtacctcaaaaggggcccttgaaatgtcatcaaagggtaataacctagtgagtgagttgtgatgtcatctggaacataggaaatggggctcttagcgtattcggtacgaaggaagccaggctggtcctggcaggaagtaaatgataatctttgggaaaccaggaccctgcctcccagcccagaggtggaggagggcggtcagggtggggtctacagtggcacagcactgacaaaggtagagggaaatgtaatagcacatctacgctgcagtctggtgaaagtggccggggtggtccttggaaaacagttgggctgttcttggcaggaattagtgacagcctttccgtcacgggcagggacgccttgatttaaaaaaaataaataaataaaacgtctgggtatagacttttgagccttgagcagggcctcctacctggcagtggggaactgcagtcttcctcctggcaataaacctaaagcaataatgatggccccttctctgtaagacttcccaggtaactgtaaataaacctcagcttgatcctcacagtgtctaaagttgcaggggcttgggaggttagggtcacagtctcacttgtctggccctctcgccccctaacattagaaatctgctagcattagctttctctccattgctcattcaccttggtgacccaggcatcgggctcctagtcactgttctcatcaaggaccaagacaccagataccccaggccccagttttcttccttcagctaccacattccttagaacccagaaatctggcttcataattttgttcctcctctttctatgaaagacttagctatctgcctttatttgtttgtatttaaagtaatattagccata

SEQ ID NO: 168338 - DNA, 2406 bp, Homo sapiens
  Payload ID: 13126
  Gene Symbol: KCNAB3
  Gene Name: potassium channel, voltage gated subfamily A regulatory beta subunit 3
  ENST ID: ENST00000570587
  CDS Start-End: 1-129
atgcaggtgtctatcgcgtgtaccgagcagaaccttcgcagccggagcagtgaggaccgtctgtgtggaccccggccgggccccgggggcggtcctcaatctgcctttcctccaggcccatctgcctagcctagccagggacccctgtctgtctgaatgcctgaacttgacttggtttacctcttccaacctgccatctaccatttggcacagcactctgcctgagggcctggtctcacaaactcaccacaatcaaacaaaattcctcccagcccctcactgcacacaacccacagatgactcaaacacagacaagaccccagaagaaggacaaaccagactgcacgtcttcaatgtgataagagggaatggagactctggacagtggctccagaggaacagtcacatatggttcacttgtccttttgagaaaattcctaggacctctgctctggagatagcacttgcccaatcttataggcccactgggtctaatttctttggactgagacacctgagggcttctcagtctggaaggagaggagctgggggctgataatctaagtccataatggaggctccaccccttcccgctgcttctgtatcttgcaggaacctagggaagtctggtcttcgggtatcctgtcttggcctaggtacctgggtcacatttggttctcagatctcagatgagacagcagaggatgtgctgactgtagcctatgagcatggtgtaaacctgtttgacaccgccgaagtgtacgcagcaggaaaggctgaaagaaccctagggaacatcctcaagagcaaaggttggaggagatcaagctatgtcatcactaccaagattttttggggaggacaggcagaaaccgagcgaggtttaagccgaaagcacatcattgagggctggagtgtaatggcacgatctcggctcactgcaacctcctcctcccgggttcaagggattctcctacctcagcgtctcgagtaactgggattacaggcacacgccaccacgcctggctaattttttgtatttttagtagaaatggggtttcaccacgttagccaggctggtctcaaactcctgacctcaggcttgcgaggatccctggaacgcctccagctgggatacgtggacattgtctttgccaatcgctcagaccccaactgtcctatggagggtaaaagcagcacccccaaaccttacagtccttcaaaactgagcacttccttgctgggtgcggtggctcattcctgtaatcccaggacgttgggaggccaaggcaggaggatcacttggggcctggagttcgagaacagtctgggcaacatagcaagaccctgtctctacaaaaaatgttttaaaattagctggctgtggtggtgtgtgccttgtactcccagctgttcaggaggctgaggcaggaggatcattcaagcccaggagtttgaggccacagtgagctatgattgcaccactgaactacatcctgagtgacagagtgagaccctgtctcaaaaaatctaaaatacaaaaattgagcacttcctcaaaccctcagcaggaagccagcccctgctcagaaggcctccaaaactccacagtggaggctgagactccaggatgtggacaggaagagaggcaaagaattgtgcgagccatgacctatgtcatcaaccagggcctggccctatactgggggacatcccgatggggggctgcagaaatcatggaggcctactccatggccagacagttcaatctgattcctccagtgtgtgaacaagcggagcaccatctgtttcagagggagaaggtggagatgcagctgccagagctctaccacaagattggagttggatcagtcacttggtaccctctagcctgtggtctcattactagcaagtatgatgggcgagtcccagatacttgcagggcctccatcaagggctaccagtggctcaaggacaaagtgcagagtgaagatggcaagaagcaacaagccaaagtcatggaccttcttcctgtcgctcaccagctgggctgcaccgtggcccagcttgctattgcgtggtgtctccgcagtgagggtgtcagctctgtcttgctgggggtgtcgagtgcggagcagttgatagaacacctgggcgcgctacaggtgctgagccagctgaccccgcagacagtgatggaaatagacgggctcctgggaaacaagccgcattccaagaagtagtctgtcgcgggcgcagggacccaacccggtgtcgctgcacccgcccgagccccgctcctcgcagccgcctctcccgctccggatccctccacgcagcggccggagccagactagccccgcccaccaacgagtcccggcttcgagtagtgatacgcatgaacaa

SEQ ID NO: 168339 - DNA, 1315 bp, Homo sapiens
  Payload ID: 13126
  Gene Symbol: KCNAB3
  Gene Name: potassium channel, voltage gated subfamily A regulatory beta subunit 3
  ENST ID: ENST00000570852
  CDS Start-End: 369-674
cgcgctgaagtggcatctctctcccgccccgcttccccctgggtccttatcctccgagacctttacctcatcctcgacctttaccctcatccatttccccctcctaatccttgctcctgtgtcccccgtaactgaatatctccactcctggcgccccccacgtttcttccctcccgccgcaaacctcgcgacctccagcagcccgcccccgcgggcccgatcctgcctggcggctcccgccgcagcctcctcagccttcccgctctgccggggttcgccccactacgcccccggtcgtcagccctcgggcttccctgctcccccctcccgtcccctcggagccccctcccccgcctcggccagccagcatgcaggtgtctatcgcgtgtaccgagcagaaccttcgcagccggagcagtgaggaccgtctgtgtggaccccggccgggccccgggggcggtaatggtgggccggccggcggggggcacgggaatcctccggggggtggagggtctggccccaaggcccgagctgcactggttccccgacccccagcgcccgctggggccctccgagagagcaccggccgaggcactggcatgaaatacaggtatgggggtggccgggcagcccaccccttccgctttcctttcgggacccctgagactgcttgagatggccgccaagaccccttcaaacttcactaagtcctcaatctgcctttcctccaggcccatctgcctagcctagccagggacccctgtctgtctgaatgcctgaacttgacttggtttacctcttccaacctgccatctaccatttggcacagcactctgcctgagggcctggtctcacaaactcaccacaatcaaacaaaattcctcccagcccctcactgcacacaacccacagatgactcaaacacagacaagaccccagaagaaggacaaaccagactgcacgtcttcaatgtgataagagggaatggagactctggacagtggctccagaggaacagtcacatatggttcacttgtccttttgagaaaattcctaggacctctgctctggagatagcacttgcccaatcttataggcccactgggtctaatttctttggactgagacacctgagggcttctcagtctggaaggagaggagctgggggctgataatctaagtccataatggaggctccaccccttcccgctgcttctgtatcttgcaggaacctagggaagtctggtcttcgggtatcctgtcttggcctaggtacctgggtcacatttggttctcagatctcagatgagacagc

SEQ ID NO: 168340 - DNA, 3347 bp, Homo sapiens
  Payload ID: 13127
  Gene Symbol: KCNE1
  Gene Name: potassium channel, voltage gated subfamily E regulatory beta subunit 1
  Uniprot ID: P15382
  ENST ID: ENST00000337385
  CDS Start-End: 401-790
cagctggcttttttcaaaccttagcaaccaccaaacagacaagcccttcggcctgtcctggagggcgttgaatggcatggcctggagctcaaccaggagaaccgtgctcaggaggaagagaccagaaggataactcaaaaagttctgagaagttcctaagaccacctgaagagaaggagcctgctgccaatggtgtggacaccgcagtgtgcttgaggagacttcagaaacgagaactggaaaaatccctctgctttctctggccagtttcacacaatcatcaggtgagccgaggatccattggaggaaggcattatctgtatccagaggaaatagccaaggatattcagaggtgtgcctgggaagtttgagctgcagcagtggaaccttaatgcccaggatgatcctgtctaacaccacagcggtgacgccctttctgaccaagctgtggcaggagacagttcagcagggtggcaacatgtcgggcctggcccgcaggtccccccgcagcagtgacggcaagctggaggccctctacgtcctcatggtactgggattcttcggcttcttcaccctgggcatcatgctgagctacatccgctccaagaagctggagcactcgaacgacccattcaacgtctacatcgagtccgatgcctggcaagagaaggacaaggcctatgtccaggcccgggtcctggagagctacaggtcgtgctatgtcgttgaaaaccatctggccatagaacaacccaacacacaccttcctgagacgaagccttccccatgaaccccaccactggctaaaactggacacatcctgcctggcaacctgattttctaatcacattcctctcatactctttattgtgatggataccactggatttctttttggctgttgtaaggggtgaggggtggattaatgacactgtttcactgtttctctaaaatcacgttcttttgtgatagactgtcagtggttcccccatatctgtccctgccttgctaaatttagcagaatccctgaggacatggcctctgagaatagcagctgcatttcccagactcccttgcagctagcaaggttgtgtgactaagccctggccagtaggcatggaagtgaagactgtaatgtccaagtaatccttggaaagaaaagaacgtgcccttaactaactttgtcctgcttcccagtggctggatgtggaggaggtggagagcagttatgagactgggaaagaacggggcactcaaagagccacacacatctgggcctgggcgacgtggatcctccttaccacccaccaggccagatttacaggagagagaaatccactccactcttccttaagccactgttattctgatctctgttaaggtcgcagaatcaatgcccttactgatacacctaccttataggactgaacctaaaggcatgacatttccatacttgtcacaagcacacactgattctgcccttgtcacttctgtgctcactcttgtggctctatcctcctcctgcccttccgccttccactcctcccttgcacccatcctgcacacatctccctgaaaacacacaggcacatacactcatatacatagacacacatacacacctcaatctagaaagaacttgctttgtacagggctgagatggaggagaaaaaaatgcccccttcagaatgcataccaaggggaaggtgctcggtcactgtgggagcagggaaaggtgcccccactccccgagagccaggggaaggagtggctctgggcagagagggacacatagcactggggtggcaggtccttttgaggtgatgggccggttttgtgagatgaattgtatcccccaaaaagacaggtaccttcaatgtgacctaattgggaaatagagtctttgcagatgatctagttgagatgaggtcattggggtgggccctcacccaatatgactggagtccttatcggaagagggaaattcagacacagatgcatagggaggacaccatgccgtgacagaggcagagggtgcagtgacacagccacaaaccaaggaaggccgaggatggatgcgcatccccatcccaagaagtcgggaagaagccaggaaggctcctctcccacaggtttcagaggaagcacagccctgcttgaattcaaacttttggcctccagaactgtgagtcagtacctgttgttgaagccacccagcttaggatactctggcagcctactgccatacagtattgggatactatagtgagcccatgcagcacctctcacccacccagagatggagctgctctgccttccagcggggcacccggagggctgccccagcagatagagagggcctccgttctgccacctgccttgaaagggtctccagctgccatatgtagcattggagtcctctgcaatgcgacatcctgaaagctcagctgcctgggcattcctgaagagtatggaatatttaaatgaaacatatttttttaaaacctgcgcataagataaaagcagcccgtgtgcatcttgggccatcctcaaatggacagacttggtcttgtgaggttccagtccttgtttcacataataaacactggcatggctcagcccctgagttaccacagtccttgagatgagtggttctttgggttacaaagtcctctgaaagtctagtgagagctgtgatctttgccccacccgaataatgcatatggacaccacaccttgcctgccgtgtccaggattcatgaccagtagcagcccagctatgcctgccacgtctcacggcccctgtgtaagccagacccttcttaggcagttgcatattcccagactgaggcagggcaggtttgcagagagagacccagagtgcacgtgacccgcagtgtgatccctggcacgcactgactttgatattccaggcacacggactggctatttatcaccacttctttttccccactaagattcctgtgccttttaaggcagagggagatccctatggcgttagtcttcccaggccttaaagggcccttgtcttcactcacaaacctcttatctcttcttctccttcctctacattttaaagggggagagggaaaagtaaccgggagacaaattgagccacatattttcagacacttgttaccatattttaaaatctggcttcacatacacagagtctttgctatgcaccatgtactgttctaagcttcttaaaaatagaatctcaattattattttgcaggcaatactctatgcattcattagctaggacaacaatgcatttgcagtagtgagatttcgctaaaaaattaaagccatttactatgatc

SEQ ID NO: 168341 - DNA, 666 bp, Homo sapiens
  Payload ID: 13127
  Gene Symbol: KCNE1
  Gene Name: potassium channel, voltage gated subfamily E regulatory beta subunit 1
  Uniprot ID: P15382
  ENST ID: ENST00000399284
  CDS Start-End: 277-666
gagaaccgtgctcaggaggaagagaccagaaggataactcaaaaagttctgagaagttcctaagaccacctgaagagaaggagcctgctgccaatggtgtggacaccgcagtgtgcttgaggagacttcagaaacgagaactgtttcacacaatcatcaggtgagccgaggatccattggaggaaggcattatctgtatccagaggaaatagccaaggatattcagaggtgtgcctgggaagtttgagctgcagcagtggaaccttaatgcccaggatgatcctgtctaacaccacagcggtgacgccctttctgaccaagctgtggcaggagacagttcagcagggtggcaacatgtcgggcctggcccgcaggtccccccgcagcagtgacggcaagctggaggccctctacgtcctcatggtactgggattcttcggcttcttcaccctgggcatcatgctgagctacatccgctccaagaagctggagcactcgaacgacccattcaacgtctacatcgagtccgatgcctggcaagagaaggacaaggcctatgtccaggcccgggtcctggagagctacaggtcgtgctatgtcgttgaaaaccatctggccatagaacaacccaacacacaccttcctgagacgaagccttccccatga

SEQ ID NO: 168342 - DNA, 1204 bp, Homo sapiens
  Payload ID: 13127
  Gene Symbol: KCNE1
  Gene Name: potassium channel, voltage gated subfamily E regulatory beta subunit 1
  Uniprot ID: P15382
  ENST ID: ENST00000399286
  CDS Start-End: 626-1015
gaaatcacaaattacaaaacgtcagagtactttctggaaataagccttcctctccagggaacaacgcatttgacacttgactgggatacactaccggatcctccgagggtgatggttctcaagaaggcagaagcaatggtgaccaatagacctccttaaaggctgagccgctgggcaccttcctactcctctcgaccgtgctaggatgactgcagcagagtccccgagtcctttgatgcaagggtctagcaaccaccaaacagacaagcccttcggcctgtcctggagggcgttgaatggcatggcctggagctcaaccaggagaaccgtgctcaggaggaagagaccagaaggataactcaaaaagttctgagaagttcctaagaccacctgaagagaaggagcctgctgccaatggtgtggacaccgcagtgtgcttgaggagacttcagaaacgagaactggaaaaatccctctgctttctctggccagtttcacacaatcatcaggtgagccgaggatccattggaggaaggcattatctgtatccagaggaaatagccaaggatattcagaggtgtgcctgggaagtttgagctgcagcagtggaaccttaatgcccaggatgatcctgtctaacaccacagcggtgacgccctttctgaccaagctgtggcaggagacagttcagcagggtggcaacatgtcgggcctggcccgcaggtccccccgcagcagtgacggcaagctggaggccctctacgtcctcatggtactgggattcttcggcttcttcaccctgggcatcatgctgagctacatccgctccaagaagctggagcactcgaacgacccattcaacgtctacatcgagtccgatgcctggcaagagaaggacaaggcctatgtccaggcccgggtcctggagagctacaggtcgtgctatgtcgttgaaaaccatctggccatagaacaacccaacacacaccttcctgagacgaagccttccccatgaaccccaccactggctaaaactggacacatcctgcctggcaacctgattttctaatcacattcctctcatactctttattgtgatggataccactggatttctttttggctgttgtaaggggtgaggggtggattaatgacactgtttcactgtttctctaaaatcacgttcttttgtgatagactgtca

SEQ ID NO: 168343 - DNA, 3154 bp, Homo sapiens
  Payload ID: 13127
  Gene Symbol: KCNE1
  Gene Name: potassium channel, voltage gated subfamily E regulatory beta subunit 1
  Uniprot ID: P15382
  ENST ID: ENST00000399289
  CDS Start-End: 210-599
gggctgtctgtggcctcagcgctcggcaggcgcgcactcagctccacacccggctctctcggcatctcagacccggtttcacacaatcatcaggtgagccgaggatccattggaggaaggcattatctgtatccagaggaaatagccaaggatattcagaggtgtgcctgggaagtttgagctgcagcagtggaaccttaatgcccaggatgatcctgtctaacaccacagcggtgacgccctttctgaccaagctgtggcaggagacagttcagcagggtggcaacatgtcgggcctggcccgcaggtccccccgcagcagtgacggcaagctggaggccctctacgtcctcatggtactgggattcttcggcttcttcaccctgggcatcatgctgagctacatccgctccaagaagctggagcactcgaacgacccattcaacgtctacatcgagtccgatgcctggcaagagaaggacaaggcctatgtccaggcccgggtcctggagagctacaggtcgtgctatgtcgttgaaaaccatctggccatagaacaacccaacacacaccttcctgagacgaagccttccccatgaaccccaccactggctaaaactggacacatcctgcctggcaacctgattttctaatcacattcctctcatactctttattgtgatggataccactggatttctttttggctgttgtaaggggtgaggggtggattaatgacactgtttcactgtttctctaaaatcacgttcttttgtgatagactgtcagtggttcccccatatctgtccctgccttgctaaatttagcagaatccctgaggacatggcctctgagaatagcagctgcatttcccagactcccttgcagctagcaaggttgtgtgactaagccctggccagtaggcatggaagtgaagactgtaatgtccaagtaatccttggaaagaaaagaacgtgcccttaactaactttgtcctgcttcccagtggctggatgtggaggaggtggagagcagttatgagactgggaaagaacggggcactcaaagagccacacacatctgggcctgggcgacgtggatcctccttaccacccaccaggccagatttacaggagagagaaatccactccactcttccttaagccactgttattctgatctctgttaaggtcgcagaatcaatgcccttactgatacacctaccttataggactgaacctaaaggcatgacatttccatacttgtcacaagcacacactgattctgcccttgtcacttctgtgctcactcttgtggctctatcctcctcctgcccttccgccttccactcctcccttgcacccatcctgcacacatctccctgaaaacacacaggcacatacactcatatacatagacacacatacacacctcaatctagaaagaacttgctttgtacagggctgagatggaggagaaaaaaatgcccccttcagaatgcataccaaggggaaggtgctcggtcactgtgggagcagggaaaggtgcccccactccccgagagccaggggaaggagtggctctgggcagagagggacacatagcactggggtggcaggtccttttgaggtgatgggccggttttgtgagatgaattgtatcccccaaaaagacaggtaccttcaatgtgacctaattgggaaatagagtctttgcagatgatctagttgagatgaggtcattggggtgggccctcacccaatatgactggagtccttatcggaagagggaaattcagacacagatgcatagggaggacaccatgccgtgacagaggcagagggtgcagtgacacagccacaaaccaaggaaggccgaggatggatgcgcatccccatcccaagaagtcgggaagaagccaggaaggctcctctcccacaggtttcagaggaagcacagccctgcttgaattcaaacttttggcctccagaactgtgagtcagtacctgttgttgaagccacccagcttaggatactctggcagcctactgccatacagtattgggatactatagtgagcccatgcagcacctctcacccacccagagatggagctgctctgccttccagcggggcacccggagggctgccccagcagatagagagggcctccgttctgccacctgccttgaaagggtctccagctgccatatgtagcattggagtcctctgcaatgcgacatcctgaaagctcagctgcctgggcattcctgaagagtatggaatatttaaatgaaacatatttttttaaaacctgcgcataagataaaagcagcccgtgtgcatcttgggccatcctcaaatggacagacttggtcttgtgaggttccagtccttgtttcacataataaacactggcatggctcagcccctgagttaccacagtccttgagatgagtggttctttgggttacaaagtcctctgaaagtctagtgagagctgtgatctttgccccacccgaataatgcatatggacaccacaccttgcctgccgtgtccaggattcatgaccagtagcagcccagctatgcctgccacgtctcacggcccctgtgtaagccagacccttcttaggcagttgcatattcccagactgaggcagggcaggtttgcagagagagacccagagtgcacgtgacccgcagtgtgatccctggcacgcactgactttgatattccaggcacacggactggctatttatcaccacttctttttccccactaagattcctgtgccttttaaggcagagggagatccctatggcgttagtcttcccaggccttaaagggcccttgtcttcactcacaaacctcttatctcttcttctccttcctctacattttaaagggggagagggaaaagtaaccgggagacaaattgagccacatattttcagacacttgttaccatattttaaaatctggcttcacatacacagagtctttgctatgcaccatgtactgttctaagcttcttaaaaatagaatctcaattattattttgcaggcaatactctatgcattcattagctaggacaacaatgcatttgcagtagtgagatttcgctaaaaaattaaagccatttactatga

SEQ ID NO: 168344 - DNA, 3184 bp, Homo sapiens
  Payload ID: 13127
  Gene Symbol: KCNE1
  Gene Name: potassium channel, voltage gated subfamily E regulatory beta subunit 1
  Uniprot ID: P15382
  ENST ID: ENST00000432085
  CDS Start-End: 238-627
gggctgtctgtggcctcagcgctcggcaggcgcgcactcagctccacacccggctctctcggcatctcagacccgggaaaaatccctctgctttctctggccagtttcacacaatcatcaggtgagccgaggatccattggaggaaggcattatctgtatccagaggaaatagccaaggatattcagaggtgtgcctgggaagtttgagctgcagcagtggaaccttaatgcccaggatgatcctgtctaacaccacagcggtgacgccctttctgaccaagctgtggcaggagacagttcagcagggtggcaacatgtcgggcctggcccgcaggtccccccgcagcagtgacggcaagctggaggccctctacgtcctcatggtactgggattcttcggcttcttcaccctgggcatcatgctgagctacatccgctccaagaagctggagcactcgaacgacccattcaacgtctacatcgagtccgatgcctggcaagagaaggacaaggcctatgtccaggcccgggtcctggagagctacaggtcgtgctatgtcgttgaaaaccatctggccatagaacaacccaacacacaccttcctgagacgaagccttccccatgaaccccaccactggctaaaactggacacatcctgcctggcaacctgattttctaatcacattcctctcatactctttattgtgatggataccactggatttctttttggctgttgtaaggggtgaggggtggattaatgacactgtttcactgtttctctaaaatcacgttcttttgtgatagactgtcagtggttcccccatatctgtccctgccttgctaaatttagcagaatccctgaggacatggcctctgagaatagcagctgcatttcccagactcccttgcagctagcaaggttgtgtgactaagccctggccagtaggcatggaagtgaagactgtaatgtccaagtaatccttggaaagaaaagaacgtgcccttaactaactttgtcctgcttcccagtggctggatgtggaggaggtggagagcagttatgagactgggaaagaacggggcactcaaagagccacacacatctgggcctgggcgacgtggatcctccttaccacccaccaggccagatttacaggagagagaaatccactccactcttccttaagccactgttattctgatctctgttaaggtcgcagaatcaatgcccttactgatacacctaccttataggactgaacctaaaggcatgacatttccatacttgtcacaagcacacactgattctgcccttgtcacttctgtgctcactcttgtggctctatcctcctcctgcccttccgccttccactcctcccttgcacccatcctgcacacatctccctgaaaacacacaggcacatacactcatatacatagacacacatacacacctcaatctagaaagaacttgctttgtacagggctgagatggaggagaaaaaaatgcccccttcagaatgcataccaaggggaaggtgctcggtcactgtgggagcagggaaaggtgcccccactccccgagagccaggggaaggagtggctctgggcagagagggacacatagcactggggtggcaggtccttttgaggtgatgggccggttttgtgagatgaattgtatcccccaaaaagacaggtaccttcaatgtgacctaattgggaaatagagtctttgcagatgatctagttgagatgaggtcattggggtgggccctcacccaatatgactggagtccttatcggaagagggaaattcagacacagatgcatagggaggacaccatgccgtgacagaggcagagggtgcagtgacacagccacaaaccaaggaaggccgaggatggatgcgcatccccatcccaagaagtcgggaagaagccaggaaggctcctctcccacaggtttcagaggaagcacagccctgcttgaattcaaacttttggcctccagaactgtgagtcagtacctgttgttgaagccacccagcttaggatactctggcagcctactgccatacagtattgggatactatagtgagcccatgcagcacctctcacccacccagagatggagctgctctgccttccagcggggcacccggagggctgccccagcagatagagagggcctccgttctgccacctgccttgaaagggtctccagctgccatatgtagcattggagtcctctgcaatgcgacatcctgaaagctcagctgcctgggcattcctgaagagtatggaatatttaaatgaaacatatttttttaaaacctgcgcataagataaaagcagcccgtgtgcatcttgggccatcctcaaatggacagacttggtcttgtgaggttccagtccttgtttcacataataaacactggcatggctcagcccctgagttaccacagtccttgagatgagtggttctttgggttacaaagtcctctgaaagtctagtgagagctgtgatctttgccccacccgaataatgcatatggacaccacaccttgcctgccgtgtccaggattcatgaccagtagcagcccagctatgcctgccacgtctcacggcccctgtgtaagccagacccttcttaggcagttgcatattcccagactgaggcagggcaggtttgcagagagagacccagagtgcacgtgacccgcagtgtgatccctggcacgcactgactttgatattccaggcacacggactggctatttatcaccacttctttttccccactaagattcctgtgccttttaaggcagagggagatccctatggcgttagtcttcccaggccttaaagggcccttgtcttcactcacaaacctcttatctcttcttctccttcctctacattttaaagggggagagggaaaagtaaccgggagacaaattgagccacatattttcagacacttgttaccatattttaaaatctggcttcacatacacagagtctttgctatgcaccatgtactgttctaagcttcttaaaaatagaatctcaattattattttgcaggcaatactctatgcattcattagctaggacaacaatgcatttgcagtagtgagatttcgctaaaaaattaaagccatttactatgatc

SEQ ID NO: 168345 - DNA, 796 bp, Homo sapiens
  Payload ID: 13127
  Gene Symbol: KCNE1
  Gene Name: potassium channel, voltage gated subfamily E regulatory beta subunit 1
  Uniprot ID: P15382
  ENST ID: ENST00000416357
  CDS Start-End: 407-796
atttgcaggtgtctcgctcagcgcagctgcccagagccctgtgtcctgagtgatttccagtagattagcagctctgggtctaagcttttaagaaaaaaaaaaaattgcactacccttcagtaggggcagcattcacatctcacacccaggcagaagcagaaacggccaggaatccaccccactttctgggcctgacaaggccacagtttgagaacgttcagcacaggccaagcatcagatggattttgaacatctctggctcctaccatttctgcctccaccatccctttactcactgtgcaagctacaaaagctgaggggacaggaacaaggatgatttctgatggcatatttagaggtgtgcctgggaagtttgagctgcagcagtggaaccttaatgcccaggatgatcctgtctaacaccacagcggtgacgccctttctgaccaagctgtggcaggagacagttcagcagggtggcaacatgtcgggcctggcccgcaggtccccccgcagcagtgacggcaagctggaggccctctacgtcctcatggtactgggattcttcggcttcttcaccctgggcatcatgctgagctacatccgctccaagaagctggagcactcgaacgacccattcaacgtctacatcgagtccgatgcctggcaagagaaggacaaggcctatgtccaggcccgggtcctggagagctacaggtcgtgctatgtcgttgaaaaccatctggccatagaacaacccaacacacaccttcctgagacgaagccttccccatga

SEQ ID NO: 168346 - DNA, 3222 bp, Homo sapiens
  Payload ID: 13127
  Gene Symbol: KCNE1
  Gene Name: potassium channel, voltage gated subfamily E regulatory beta subunit 1
  Uniprot ID: P15382
  ENST ID: ENST00000611936
  CDS Start-End: 276-665
caaaccttagcaaccaccaaacagacaagcccttcggcctgtcctggagggcgttgaatggcatggcctggagctcaaccaggagaaccgtgctcaggaggaagagaccagaaggataactcaaaaagttctgagaagttcctaagaccacctgaagagaaggagcctgctgccaatggtgtggacaccgcagtgtgcttgaggagacttcagaaacgagaactgaggtgtgcctgggaagtttgagctgcagcagtggaaccttaatgcccaggatgatcctgtctaacaccacagcggtgacgccctttctgaccaagctgtggcaggagacagttcagcagggtggcaacatgtcgggcctggcccgcaggtccccccgcagcagtgacggcaagctggaggccctctacgtcctcatggtactgggattcttcggcttcttcaccctgggcatcatgctgagctacatccgctccaagaagctggagcactcgaacgacccattcaacgtctacatcgagtccgatgcctggcaagagaaggacaaggcctatgtccaggcccgggtcctggagagctacaggtcgtgctatgtcgttgaaaaccatctggccatagaacaacccaacacacaccttcctgagacgaagccttccccatgaaccccaccactggctaaaactggacacatcctgcctggcaacctgattttctaatcacattcctctcatactctttattgtgatggataccactggatttctttttggctgttgtaaggggtgaggggtggattaatgacactgtttcactgtttctctaaaatcacgttcttttgtgatagactgtcagtggttcccccatatctgtccctgccttgctaaatttagcagaatccctgaggacatggcctctgagaatagcagctgcatttcccagactcccttgcagctagcaaggttgtgtgactaagccctggccagtaggcatggaagtgaagactgtaatgtccaagtaatccttggaaagaaaagaacgtgcccttaactaactttgtcctgcttcccagtggctggatgtggaggaggtggagagcagttatgagactgggaaagaacggggcactcaaagagccacacacatctgggcctgggcgacgtggatcctccttaccacccaccaggccagatttacaggagagagaaatccactccactcttccttaagccactgttattctgatctctgttaaggtcgcagaatcaatgcccttactgatacacctaccttataggactgaacctaaaggcatgacatttccatacttgtcacaagcacacactgattctgcccttgtcacttctgtgctcactcttgtggctctatcctcctcctgcccttccgccttccactcctcccttgcacccatcctgcacacatctccctgaaaacacacaggcacatacactcatatacatagacacacatacacacctcaatctagaaagaacttgctttgtacagggctgagatggaggagaaaaaaatgcccccttcagaatgcataccaaggggaaggtgctcggtcactgtgggagcagggaaaggtgcccccactccccgagagccaggggaaggagtggctctgggcagagagggacacatagcactggggtggcaggtccttttgaggtgatgggccggttttgtgagatgaattgtatcccccaaaaagacaggtaccttcaatgtgacctaattgggaaatagagtctttgcagatgatctagttgagatgaggtcattggggtgggccctcacccaatatgactggagtccttatcggaagagggaaattcagacacagatgcatagggaggacaccatgccgtgacagaggcagagggtgcagtgacacagccacaaaccaaggaaggccgaggatggatgcgcatccccatcccaagaagtcgggaagaagccaggaaggctcctctcccacaggtttcagaggaagcacagccctgcttgaattcaaacttttggcctccagaactgtgagtcagtacctgttgttgaagccacccagcttaggatactctggcagcctactgccatacagtattgggatactatagtgagcccatgcagcacctctcacccacccagagatggagctgctctgccttccagcggggcacccggagggctgccccagcagatagagagggcctccgttctgccacctgccttgaaagggtctccagctgccatatgtagcattggagtcctctgcaatgcgacatcctgaaagctcagctgcctgggcattcctgaagagtatggaatatttaaatgaaacatatttttttaaaacctgcgcataagataaaagcagcccgtgtgcatcttgggccatcctcaaatggacagacttggtcttgtgaggttccagtccttgtttcacataataaacactggcatggctcagcccctgagttaccacagtccttgagatgagtggttctttgggttacaaagtcctctgaaagtctagtgagagctgtgatctttgccccacccgaataatgcatatggacaccacaccttgcctgccgtgtccaggattcatgaccagtagcagcccagctatgcctgccacgtctcacggcccctgtgtaagccagacccttcttaggcagttgcatattcccagactgaggcagggcaggtttgcagagagagacccagagtgcacgtgacccgcagtgtgatccctggcacgcactgactttgatattccaggcacacggactggctatttatcaccacttctttttccccactaagattcctgtgccttttaaggcagagggagatccctatggcgttagtcttcccaggccttaaagggcccttgtcttcactcacaaacctcttatctcttcttctccttcctctacattttaaagggggagagggaaaagtaaccgggagacaaattgagccacatattttcagacacttgttaccatattttaaaatctggcttcacatacacagagtctttgctatgcaccatgtactgttctaagcttcttaaaaatagaatctcaattattattttgcaggcaatactctatgcattcattagctaggacaacaatgcatttgcagtagtgagatttcgctaaaaaattaaagccatttactatgatc

SEQ ID NO: 168347 - DNA, 3148 bp, Homo sapiens
  Payload ID: 13127
  Gene Symbol: KCNE1
  Gene Name: potassium channel, voltage gated subfamily E regulatory beta subunit 1
  Uniprot ID: P15382
  ENST ID: ENST00000621601
  CDS Start-End: 202-591
agtggcttcccccctggcaacctcaaactcccgcaggaaggaaaaatccctctgctttctctggccagtttcacacaatcatcaggtgagccgaggatccattggaggaaggcattatctgtatccagaggaaatagccaaggatattcagaggtgtgcctgggaagtttgagctgcagcagtggaaccttaatgcccaggatgatcctgtctaacaccacagcggtgacgccctttctgaccaagctgtggcaggagacagttcagcagggtggcaacatgtcgggcctggcccgcaggtccccccgcagcagtgacggcaagctggaggccctctacgtcctcatggtactgggattcttcggcttcttcaccctgggcatcatgctgagctacatccgctccaagaagctggagcactcgaacgacccattcaacgtctacatcgagtccgatgcctggcaagagaaggacaaggcctatgtccaggcccgggtcctggagagctacaggtcgtgctatgtcgttgaaaaccatctggccatagaacaacccaacacacaccttcctgagacgaagccttccccatgaaccccaccactggctaaaactggacacatcctgcctggcaacctgattttctaatcacattcctctcatactctttattgtgatggataccactggatttctttttggctgttgtaaggggtgaggggtggattaatgacactgtttcactgtttctctaaaatcacgttcttttgtgatagactgtcagtggttcccccatatctgtccctgccttgctaaatttagcagaatccctgaggacatggcctctgagaatagcagctgcatttcccagactcccttgcagctagcaaggttgtgtgactaagccctggccagtaggcatggaagtgaagactgtaatgtccaagtaatccttggaaagaaaagaacgtgcccttaactaactttgtcctgcttcccagtggctggatgtggaggaggtggagagcagttatgagactgggaaagaacggggcactcaaagagccacacacatctgggcctgggcgacgtggatcctccttaccacccaccaggccagatttacaggagagagaaatccactccactcttccttaagccactgttattctgatctctgttaaggtcgcagaatcaatgcccttactgatacacctaccttataggactgaacctaaaggcatgacatttccatacttgtcacaagcacacactgattctgcccttgtcacttctgtgctcactcttgtggctctatcctcctcctgcccttccgccttccactcctcccttgcacccatcctgcacacatctccctgaaaacacacaggcacatacactcatatacatagacacacatacacacctcaatctagaaagaacttgctttgtacagggctgagatggaggagaaaaaaatgcccccttcagaatgcataccaaggggaaggtgctcggtcactgtgggagcagggaaaggtgcccccactccccgagagccaggggaaggagtggctctgggcagagagggacacatagcactggggtggcaggtccttttgaggtgatgggccggttttgtgagatgaattgtatcccccaaaaagacaggtaccttcaatgtgacctaattgggaaatagagtctttgcagatgatctagttgagatgaggtcattggggtgggccctcacccaatatgactggagtccttatcggaagagggaaattcagacacagatgcatagggaggacaccatgccgtgacagaggcagagggtgcagtgacacagccacaaaccaaggaaggccgaggatggatgcgcatccccatcccaagaagtcgggaagaagccaggaaggctcctctcccacaggtttcagaggaagcacagccctgcttgaattcaaacttttggcctccagaactgtgagtcagtacctgttgttgaagccacccagcttaggatactctggcagcctactgccatacagtattgggatactatagtgagcccatgcagcacctctcacccacccagagatggagctgctctgccttccagcggggcacccggagggctgccccagcagatagagagggcctccgttctgccacctgccttgaaagggtctccagctgccatatgtagcattggagtcctctgcaatgcgacatcctgaaagctcagctgcctgggcattcctgaagagtatggaatatttaaatgaaacatatttttttaaaacctgcgcataagataaaagcagcccgtgtgcatcttgggccatcctcaaatggacagacttggtcttgtgaggttccagtccttgtttcacataataaacactggcatggctcagcccctgagttaccacagtccttgagatgagtggttctttgggttacaaagtcctctgaaagtctagtgagagctgtgatctttgccccacccgaataatgcatatggacaccacaccttgcctgccgtgtccaggattcatgaccagtagcagcccagctatgcctgccacgtctcacggcccctgtgtaagccagacccttcttaggcagttgcatattcccagactgaggcagggcaggtttgcagagagagacccagagtgcacgtgacccgcagtgtgatccctggcacgcactgactttgatattccaggcacacggactggctatttatcaccacttctttttccccactaagattcctgtgccttttaaggcagagggagatccctatggcgttagtcttcccaggccttaaagggcccttgtcttcactcacaaacctcttatctcttcttctccttcctctacattttaaagggggagagggaaaagtaaccgggagacaaattgagccacatattttcagacacttgttaccatattttaaaatctggcttcacatacacagagtctttgctatgcaccatgtactgttctaagcttcttaaaaatagaatctcaattattattttgcaggcaatactctatgcattcattagctaggacaacaatgcatttgcagtagtgagatttcgctaaaaaattaaagccatttactatgatc

SEQ ID NO: 168348 - DNA, 1051 bp, Homo sapiens
  Payload ID: 13128
  Gene Symbol: KCNE2
  Gene Name: potassium channel, voltage gated subfamily E regulatory beta subunit 2
  Uniprot ID: Q9Y6J6
  ENST ID: ENST00000290310
  CDS Start-End: 141-512
gtaaggtgaaggtgcccagcaggctgaggcttgtgtgcaacccagaagagagctcgctaacgccagcaagaaggttcagaacagcctggctttggaaaggaatttcatcctgcccacacactgcatagcaggagggaagcatgtctactttatccaatttcacacagacgctggaagacgtcttccgaaggatttttattacttatatggacaattggcgccagaacacaacagctgagcaagaggccctccaagccaaagttgatgctgagaacttctactatgtcatcctgtacctcatggtgatgattggaatgttctctttcatcatcgtggccatcctggtgagcactgtgaaatccaagagacgggaacactccaatgacccctaccaccagtacattgtagaggactggcaggaaaagtacaagagccaaatcttgaatctagaagaatcgaaggccaccatccatgagaacattggtgcggctgggttcaaaatgtccccctgataagggagaaaggcaccaagctaacatctgacgtccagacatgaagagatgccagtgccacgaggcaaatccaaattgtctttgcttagaagaaagtgagttccttgctctctgttgagaattttcatggagattatgtggttggccaataaagatagatgacatttcaatctcagtgatttatgcttgcttgttggagcaatattttgtgctgaagacctcttttactttccgggcaagtgaatgtcattttaatcaatatcaatgatgaaaataaagccaaatttgaagtaaagtgtctgggcagtggctgtggggatagaaaggagagatttacaaatcattgaatcttctttctcatgaaacatcatttgtgtgtgacaaattcaatttataaataacccagatgtattatgtagaagctgaggctcaaaagctatcacttgcttaccagacggacataggagcatttatctgtaatattaattcatgagtgtggagtctgaagagatgaataaacaaaccataagattacttta

SEQ ID NO: 168349 - DNA, 3143 bp, Homo sapiens
  Payload ID: 13129
  Gene Symbol: KCNE3
  Gene Name: potassium channel, voltage gated subfamily E regulatory beta subunit 3
  Uniprot ID: Q9Y6H6
  ENST ID: ENST00000310128
  CDS Start-End: 421-732
ggtgtgctggggcccgggcggggcagggggaggggacgcccgggggagggaaaagggagccgagcgcgggtgggagcccagagccagagagcgcgctgggcggtgctgggcacccgcggagtggaacggggctggtggaatgcacagggtcgcagcgcttgggccaccctcggtcagagggcgccgtgtccagcgagcaaacgggcgccccggagccttgctgagaggcagctctgggctttcccagctccgaagtcaatactgagatcccagatgtgtccagagacatcctgaagaggctcgggggtggaggagccttagtgtgtccacaaagggactcctgaaactgactgagagccagtggatttgccagcagtctgagcttctaccgagtcttcccccacctcaatccctgttgctatggagactaccaatggaacggagacctggtatgagagcctgcatgccgtgctgaaggctctaaatgccactcttcacagcaatttgctctgccggccagggccagggctggggccagacaaccagactgaagagaggcgggccagcctacctggccgtgatgacaactcctacatgtacattctctttgtcatgtttctatttgctgtaactgtgggcagcctcatcctgggatacacccgctcccgcaaagtggacaagcgtagtgacccctatcatgtgtatatcaagaaccgtgtgtctatgatctaacacgagagggctgggacggtggaagaccaagacacctggggattgcgtctggggcctccagaactctgctgtggactgcatcaggtctcagtgtccctatctgtaagatcaacaagaaacacggttaagggaggtcgtcactggggtgggagaagaggggctggtagaccgaagccttgtgcataaggattttttcccaggaaaagatagactttataaacagtgggagcccatgaacaaacatataaaagtagcaacagataatgaccaataactggttcagtggctggagtattaggggcctggggattggagaacggagaagaagttgtagcagagggaaatgagacaggaagatgctctggggacacattttttatgtgttatcttcagccatgagaagcagtgatgactatcccatatcacagatatgatttaccaccaccaccctgcccccgctcccgtgaagaaagcagggcaagtgctgtgctgcccatttgggcctgcatagtgccatgattggaacccaggaactctggtctccttgcctagtgcttttcaaaactctgtgctacacaggagtggatccaggcctgaaggtcatacaattctggggactctctttaagaaaaagaattctaaaatatcttacttttgcaaacattatgaaaatatactgccacattaatatgttgctagggcccctgctaggaccttaagaaggagctcatgtgagtcaggaccctgaatgttaggcctcgttagctctatggttcatatgcttcttgaaccaagtcacagggcacttcccagccacattgccaggcaacaggactaaactacctccaaagcaagcagtcttttcagttttgactgagtgatgtgagaaacttcttttcttttcttttctttttttttttttgagacagtctccctatgtcacccaggctgtggtgcagcaacccaatcttggctcactgcaacccccacctcccgggttcaagcaattatcctgcctcagccacctgagtagctgggattacaggttcctgtcaccacacccagttaatttatatatatatatatatatatatatttaagtagagacagggtttcacatgttgcccaggctggtctcgaactcctgtcctcaagttatctgcccattttggtctcccaaagtgctgggattacaagtgtaagccaccacgactatctgagagaagttttctgatgtcatgttgaatctgcttctaaaagactgatactgccaaggtgggcggatcacctgaggtcaggagttcgagaccagcctggccaacatggtgaaaccccatctactaaaaaaatacaaaaattagccagacctggtggcgggtgcccgtattcccagctacttgggaggctgaggcaggagaattgtttgaacccgggaggtggaggttgcagtaagccaagatcacgccactgcactccagcctgggtgacagagcaaggctctgtctcaaaaaaaaacaaaaacaaaaacaaaaaagactgatatcgcacctaaattattattatattaaaagaagcagagtatgagagacaggtacatggtccagtaggaagagaagcagccctgattctaccacttaaggtgatgtatgatcttaggctggacacttctctccctcatccgttttcctcttcaacataatgaaatagacttgaaagtctctaaggctctatcagttctgacattctaggcttcatatacattaagttgagccatatgtaatcactgtgtttgtaggttagaaacagctgagtatcgtagtttcatatatggttccagctaatacatgcaatgtggctggtgaacacttctgaattcagaaactatcccagatctcagctagaaccatccactgttctgtttgtccagtttcaacttaagggatctccatgcggtccctggaagtacccattgaaacatgcgtatttgtgtatagcagaactctgaaataatattctgacagcagttatctctgaggaattgggttataggtgattttccctttccgcatgataaatttatgtaatatttgactgacttgaccgtaagtatgttacttgtataataaaaggaaaaaaggtacttctattttgaaaaaataaaaataaaagcctttgggttcttgaatggaggatcatggaacacatttgctgccatatgcagttatgttgatgctctgcaaacctgtgctgagccctgttgctcaagcccttcctcatctcttcttgagggagaaggtggagacttccttaaggagatgtgacatatgggaagacaacagattcagaaatttacgtggataggactttagacaccacccagcccaaacttccaaataaaatatggaacgcaa

SEQ ID NO: 168350 - DNA, 585 bp, Homo sapiens
  Payload ID: 13129
  Gene Symbol: KCNE3
  Gene Name: potassium channel, voltage gated subfamily E regulatory beta subunit 3
  ENST ID: ENST00000532569
  CDS Start-End: 288-585
ccaggaagcaggcgctgcaggggacggaagggtcggagcccacagccgggggaggccaaggagctgggcggaggcactccaggccagcccggggagaactctgggctttcccagctccgaagtcaatactgagatcccagatgtgtccagagacatcctgaagaggctcgggggtggaggagccttagtgtgtccacaaagggactcctgaaactgactgagagccagtggatttgccagcagtctgagcttctaccgagtcttcccccacctcaatccctgttgctatggagactaccaatggaacggagacctggtatgagagcctgcatgccgtgctgaaggctctaaatgccactcttcacagcaatttgctctgccggccagggccagggctggggccagacaaccagactgaagagaggcgggccagcctacctggccgtgatgacaactcctacatgtacattctctttgtcatgtttctatttgctgtaactgtgggcagcctcatcctgggatacacccgctcccgcaaagtggacaagcgtagtgacccctatcatgtgtatatcaagaaccgtg

SEQ ID NO: 168351 - DNA, 935 bp, Homo sapiens
  Payload ID: 13129
  Gene Symbol: KCNE3
  Gene Name: potassium channel, voltage gated subfamily E regulatory beta subunit 3
  Uniprot ID: Q9Y6H6
  ENST ID: ENST00000525550
  CDS Start-End: 454-765
tcacccagtgaagacactgtaagtctggaggtaggggacagcaatcagaggccctttggtcactgcacagttcctttaactgcaaccctaggctggcctgacccagctgctgcaggaaggggaggggccatgggagggggtcagagcccacagcaggactgttgcataatccttggggcctggccttgggcaatccaccctggttctgaagtttgtgctttgtgtctggttccttccttttctgccttctctcctgctttctagctctgggctttcccagctccgaagtcaatactgagatcccagatgtgtccagagacatcctgaagaggctcgggggtggaggagccttagtgtgtccacaaagggactcctgaaactgactgagagccagtggatttgccagcagtctgagcttctaccgagtcttcccccacctcaatccctgttgctatggagactaccaatggaacggagacctggtatgagagcctgcatgccgtgctgaaggctctaaatgccactcttcacagcaatttgctctgccggccagggccagggctggggccagacaaccagactgaagagaggcgggccagcctacctggccgtgatgacaactcctacatgtacattctctttgtcatgtttctatttgctgtaactgtgggcagcctcatcctgggatacacccgctcccgcaaagtggacaagcgtagtgacccctatcatgtgtatatcaagaaccgtgtgtctatgatctaacacgagagggctgggacggtggaagaccaagacacctggggattgcgtctggggcctccagaactctgctgtggactgcatcaggtctcagtgtccctatctgtaagatcaacaagaaacacggttaagggaggtcgtcactggggtgggagaagaggggctggtagacc

SEQ ID NO: 168352 - DNA, 607 bp, Homo sapiens
  Payload ID: 13129
  Gene Symbol: KCNE3
  Gene Name: potassium channel, voltage gated subfamily E regulatory beta subunit 3
  ENST ID: ENST00000531854
  CDS Start-End: 450-607
agagccagagagcgcgctgggcggtgctgggcacccgcggagtggaacggggctggtggaatgcacagggtcgcagcgcttgggccaccctcggtcagagggcgccgtgtccagcgagcaaacgggcgccccggagccttgctgagaggcagatgcggacagaagctgaggcccagaaaagggaagtcttatgtccaaagtcacacaaggagcagctgagctgggacaactcccctggtttccatttccttcaccgtaaactctgggctttcccagctccgaagtcaatactgagatcccagatgtgtccagagacatcctgaagaggctcgggggtggaggagccttagtgtgtccacaaagggactcctgaaactgactgagagccagtggatttgccagcagtctgagcttctaccgagtcttcccccacctcaatccctgttgctatggagactaccaatggaacggagacctggtatgagagcctgcatgccgtgctgaaggctctaaatgccactcttcacagcaatttgctctgccggccagggccagggctggggccagacaaccagactgaagagaggcgggccagcctacctggccg

SEQ ID NO: 168353 - DNA, 555 bp, Homo sapiens
  Payload ID: 13129
  Gene Symbol: KCNE3
  Gene Name: potassium channel, voltage gated subfamily E regulatory beta subunit 3
  ENST ID: ENST00000529425
  CDS Start-End: 407-555
cagagccagagagcgcgctgggcggtgctgggcacccgcggagtggaacggggctggtggaatgcacagggtcgcagcgcttgggccaccctcggtcagagggcgccgtgtccagcgagcaaacgggcgccccggagccttgctgagaggcagacactgaagacgctcattctgaaagagtagctgaaacggagtgacgggaaagaaagacccaaggctctgggctttcccagctccgaagtcaatactgagatcccagatgtgtccagagacatcctgaagaggctcgggggtggaggagccttagtgtgtccacaaagggactcctgaaactgactgagagccagtggatttgccagcagtctgagcttctaccgagtcttcccccacctcaatccctgttgctatggagactaccaatggaacggagacctggtatgagagcctgcatgccgtgctgaaggctctaaatgccactcttcacagcaatttgctctgccggccagggccagggctggggccagacaaccagactgaagagaggcgggccagcct

SEQ ID NO: 168354 - DNA, 550 bp, Homo sapiens
  Payload ID: 13129
  Gene Symbol: KCNE3
  Gene Name: potassium channel, voltage gated subfamily E regulatory beta subunit 3
  ENST ID: ENST00000526855
  CDS Start-End: 514-550
agagccagagagcgcgctgggcggtgctgggcacccgcggagtggaacggggctggtggaatgcacagggtcgcagcgcttgggccaccctcggtcagagggcgccgtgtccagcgagcaaacgggcgccccggagccttgctgagaggcagacactgaagacgctcattctgaaagagtagctgaaacggagtgacgggaaagaaagacccaaggatgcggacagaagctgaggcccagaaaagggaagtcttatgtccaaagtcacacaaggagcagctgagctgggacaactcccctggtttccatttccttcaccgtaaactctgggctttcccagctccgaagtcaatactgagatcccagatgtgtccagagacatcctgaagaggctcgggggtggaggagccttagtgtgtccacaaagggactcctgaaactgactgagagccagtggatttgccagcagtctgagcttctaccgagtcttcccccacctcaatccctgttgctatggagactaccaatggaacggagacctggtatgaga

SEQ ID NO: 168355 - DNA, 3291 bp, Homo sapiens
  Payload ID: 13130
  Gene Symbol: KCNE4
  Gene Name: potassium channel, voltage gated subfamily E regulatory beta subunit 4
  Uniprot ID: Q8WWG9
  ENST ID: ENST00000281830
  CDS Start-End: 332-997
attatgggattcagctgcctctgaaaacctgtagcccaataatggttattccccaggagccgcgcgaagcatgagctaattttcagtgagcgcggactttggggtaacggttccagcacagcacatccctttctcctcttttcactcatcgtcaccgctacctgaaaaccctggccgggtgctggggcttgaggagcagttcccacttcccagtctttttcacttttcacagctgcaaagttcagggagttgaactgcagtgctttcagttcactgctcactctgccacgatcaatctctgttgtaaattttcctcccagagcacgtgacgatgcacttcttgactatatatcccaactgcagcagcggagttgtcagagcgcagagccggacagagcagaagaaccctcttggactggacgatttgggaattcaaaacttgggacaaactgtcagccttgcccctgctgtggaggcagcctcaatgctgaaaatggagcctctgaacagcacgcaccccggcaccgccgcctccagcagccccctggagtcccgtgcggccggcggcggcagcggcaatggcaacgagtacttctacattctggttgtcatgtccttctacggcattttcttgatcggaatcatgctgggctacatgaaatccaagaggcgggagaagaagtccagcctcctgctgctgtacaaagacgaggagcggctctggggggaggccatgaagccgctgcctgtggtgtcgggcctgaggtcggtgcaggtgcccctgatgctgaacatgctgcaggagagcgtggcgcccgcgctgtcctgcaccctctgttccatggaaggggacagcgtgagctccgagtcctcctccccggacgtgcacctcaccattcaggaggagggggcagacgatgagctggaggagacctcggagacgcccctcaacgagagcagcgaagggtcctcggagaacatccatcagaattcctagcacccccgggacccctgccggtggctccatcagccagcaaccttagagagaggaaagacagttttcaagtgtctggtttcactttcacagtgcggctgccactttgaagagacccttggtaaacccctgattcggggtggggtgggggactaggctcagccggaaccagcacctccaaggagtccgggaggtgcctgtggtttgcacccaccactgaaaaagccgcggagatgcgcagcgcgtacactgactttggggcctgggtgttggggttctgatcagaatttggcgggatgatatgtttgccattttctcactggatgccctgggtagctcctgcagggtctgcctgttcccagggctgccgaatgcttaggacacgctgagagactagttgtgatttgctattttgcctagagctttgtccttctagatctgattggctgtaagtatctctactgtgtacctgtggcattccttcacagtgggttacaagcttcttttggattagagggggatttttgatgggagaaagctggagatctgaacccagcccatttgcacactataagaaaaaaaagtaacttttaaacctgttaacattggccggggttataagagatgatcttctattttgaccttttgtctaacttatgaccttgaactctgacctgtgaccatgcagcatcacatgatggcatgacgttctttggatcagaagagcttccccagaatctaacctgcactcccgatggtggttcaggagactcttcctgatctttctagaaggggtaaagtggggttgaacaaggccaagccgttagctctgctgctgctcagtttcccagcctagttttctgagctgggagaggacataatgtggtatttcgtcacgtagctgagacctagaagggcatactcaggcggagattgcacaaagctgggctccaagttctgtgcttcctgatcccgagccctgacactcatttgctgtgtggtcccgggcatgtcatcaagaagctcgctgtctgcatgaggctcccgacgatctccatccccagggggttgggaggatgtctttagattttaggactctgtgataaatattccacagcctggtgtgaggaagcttggaccaaatgcttcccctttggccggttagtctgaacaaggatctgctgatttaaaggagcagttggagattcagaacacatataactggggaattcagggcaagctaccaacccagccctgctgtagttttcccaggactgaaggaaagaggcagacaccacattctcctctgcaaagttctctggagaatgtgtgatgttaacactcccagctaagggaaagcaaagtctaaaggaaaacacacaggaatgcttccaatgtctccaagtattcctgtggtcaacagtttcgcagatccgttaggcccttaaagacaaggaggaagtaaaaggtcaaatttaaatctatttaaaaaaacttttaaaaaaattatttatttattattattttttatttttaagacagaatctcgctctgttgcccaggctggagtgcagtggtgcaatcttggctcactgcaacctccacctcctgggtttcagcgattctcctgcctcagcctcctgagtagctgggattacaggcgcctgccaccacgcccagctaattttttgatttttagtagagatggggtttcgccattttggccaggctggtctcaaactcctggccttaaatgatcctcccacctcggcctcccaaagtgctgggattacaggcatgagccactgcacccggccactttttttttttttaaagaaaaatgctctgcatggattggagacacagcaataactactgttgccatggaagggttaacagtgtaggagctggtttatcagtccgctttgacatacagctaaaggaaatttatgtttgggggaaaaaggccctctgttcactttaaaattcagtgtggacttatgccaaagggggctgtttaagttgaaagaagccaagttaagtttggcctcttgcctggaatcacttgaattctgaaatttcactgcgacggacatgtgccttgtcacattttccattgcttaatcctgaagtttggtgcaagtctctctgcacctattaaaaagtgatgtatatacttccttcttattctgttgagttgtatagaattgtcttttgtatttaacactttgtaattttcacaatattttttaatttaaataaataaacacattttttccctcctgggaagtcatgaa

SEQ ID NO: 168356 - DNA, 1473 bp, Homo sapiens
  Payload ID: 13131
  Gene Symbol: KCNE5
  Gene Name: potassium channel, voltage gated subfamily E regulatory beta subunit 5
  Uniprot ID: Q9UJ90
  ENST ID: ENST00000372101
  CDS Start-End: 153-581
agccactgcgcgctcgccggagagctgggtgctaccgctgtttccgctgctgagccctgcccgccggccggcccgctcgctagctcgcttcccctcgcccagggggaaaggtcagcagcgtcctggagccgccgtgtcactccccgaaagccatgaactgcagcgagagccagcggctgcgaacccttctgagccgcctgttgctcgagctgcaccaccggggtaatgccagcggcttgggcgctggccctcgtcccagcatgggcatgggggtcgtgcctgaccctttcgtgggccgcgaggtgaccagcgccaagggcgacgacgcctatctctacatcctgctcatcatgatcttctacgcctgcttggccggaggcctcatcctggcctacacccgctcccgtaagctcgtcgaggccaaggacgagccgtcccaggcttgcgccgagcacgaatgggccccgggaggcgccctgaccgccgacgccgaggctgccgcgggctcccaggccgagggccgccgccagcttgcctccgaggggctgcctgccctcgcccagggcgctgagcgggtctaaaaccacagccccagattgctggttcgcgccctcctcatctcgctcatccctgggcgcgcctcccaccttccacccccaactcccttccagggttcgcctcatctgaggcccagataatggtgagaggccaggagaccttgtctggaaggccctggaaggagaagcaccaccttacccattcgggccagtttctccctcttcacccctgcgcctccacccctaccccgcacatccaactgcactaaactgcctctgctctcttgtcttcagacagccctgacagcacgctccagccctctgggaactgaatccaacacgtccaacacttggcactgaactgaagcaatgcattctatcagaactctgggccgtctaactggcagctgctccaggggctgccagggactgctcactctgcagagccaacgggcttgccaggccgactgcagcagctccagcttccagttgccttagggacagagacaaaggaaatgaagagacctcagacatcttttccctccctctctctttcagcagggagctagcaggacactaggaccagtctgtgggatagaatgaacttaatgggggacggaagggggaggagtgctcaacggggagggaaatgatctatgactccaaccgtatgattttcttgcctccccagttttcatcccagtggtaacgcctgatttttggtagctatgccatcttctgctgaggattaccattactgggtgtatcaccccagtacttccaaatgcctctcctctattgattcagttgttattgcagtgtctgcttcatccgtggaacttgaggctcagatgccccctgctctgtaaccctggggaatgtcagaggcaggtaataaaggttgtttaaacaataa

SEQ ID NO: 168357 - DNA, 4237 bp, Homo sapiens
  Payload ID: 13132
  Gene Symbol:
  Gene Name: Potassium voltage-gated channel subfamily A member 6  [Source:UniProtKB/Swiss-Prot
  Acc:P17658]
  Uniprot ID: P17658
  ENST ID: ENST00000280684
  CDS Start-End: 867-2456
aagcttactggtgaggcaagtgtgcgtctatttccatggcgccctggctcgcggcagcccctggctgggcgaggggtgtgatgtgggagtggggtgggagggggcagcaggcggggcctgccacgtcacttggagagtgtgtgttgggaaggaagggcagagcggagagccgagccgctgcagctgcggcggcggcagcgaagccttgagccgtggggaggtgggtccccgcgctcgggcgccggggcagccccgggccctctgcgaggcctgcggcgcggctcctagggaggaggtggcggctgtggcggccggaaccgcgaccttggccggacccagccccgcggtggacgcagggcggaggccgagccccgccaggagtctttgccgagccggagggaggcgcatctggcgcttcggtaccagcggcagccgggggtccggagcggctggaggagcgcagtgggaactgggaagagctagcccggctggagggcggacctctgcgtccgggagccgggtctcaggcaccgctgggggcgaagccacgcgtcttttcgggcagccaatttcacacgcgcctgtgtgcggttccgggcatcccagtaagctctagcacccgggcgcgggtaacgggaagcgcagaaccaaatccccagcgcccaggtcacctccccagacccagccttgcagggaccagggctttagggctcacggacccaacggccaggtcagaccgcgaaccgggaggagcgcgggccccaccctaaagagggcgcagccgggagctggggagcgggtgccgcgctccagagattgtgtcgtgggcgccgtcctagtggcggggagcgcacctccgagggggcatgagatcggagaaatcccttacgctggcggcgccgggggaggtccgtgggccggagggagagcaacaggatgcgggagacttcccggaggccggcgggggcgggggctgctgtagtagcgagcggctggtgatcaatatctccgggctgcgctttgagacacaattgcgcaccctgtcgctgtttccggacacgctgctcggagaccctggccggcgagtccgcttcttcgaccccctgaggaacgagtacttcttcgaccgcaaccggcccagcttcgacgccatcctctactactaccagtctgggggccgcctgcggaggccggtcaacgtgcccctggacattttcctggaggagatccgcttctaccagctgggggacgaggccctggcggccttccgggaggacgagggctgcctgcccgaaggtggcgaggacgagaagccgctgccctcccagcccttccagcgccaggtgtggctgctctttgagtacccagagagctctgggccggccaggggcatcgccatcgtctccgtgttggtcattctcatctccatagtcatcttttgcctggagaccttaccccagttccgtgtagatggtcgaggtggaaacaatggtggtgtgagtcgagtctccccagtttccagggggagtcaggaggaagaggaggatgaagacgattcctacacatttcatcatggcatcacccctggggaaatggggaccgggggctcctcctcactcagtactcttgggggctccttctttacagaccccttctttctggtggagacgctgtgcattgtctggttcacttttgagctcctggtgcgcttctccgcctgccctagcaagccggccttcttccggaacatcatgaacatcattgacttggtggctatcttcccctacttcatcaccctgggcactgagctggtgcagcagcaggagcagcaaccagccagtggaggaggcggccagaatgggcagcaggccatgtccctggccatcctccgagtcatccgcctggtccgggtgttccgcatcttcaagctctcccgccactccaaggggctgcagatcctgggcaagaccttgcaggcctccatgagggagctggggctgctcatcttcttcctcttcatcggggtcatcctcttctccagtgccgtctacttcgcagaggctgacgatgacgattcgctttttcccagcatcccggatgccttctggtgggcagtggttacaatgaccacggtaggttacggggacatgtaccccatgactgtggggggaaagatcgtgggctcgctgtgtgccatcgctggggtcctcaccattgccctgcctgtgcccgtcatcgtctccaacttcaactacttctaccaccgggagacggagcaggaggagcaaggccagtatacccacgtcacttgtgggcagcctgcgccggacctgagggcaactgacaacggacttggcaagcctgacttccccgaggctaaccgggaacggagacccagctaccttcctacaccacatcgggcctatgcagagaaaagaatgctcacggaggtctgacccatgcaggcagggcctgcaggaggggagcactgagctaacagtctcttaggcttccttctcatttccactactcactctagcttcagttgacttcttgactctctcccctacacccactacctggcatccaggaccaaatacctggactatcaaccttgttgcttaatccctgcagcattcaaggttaatccatctaagtgacatttttgaaattccagcggtgccacccaatcatgcccagcttctgtcatatgaatgagatatacatttatgtctgaccttccctcaagactgatttttcatgtctgggacttacaatatctcaaggaacagcaatgtcaacaggatggaaaccagccctatctgagtcttcgctccctccttagtgttctttgctttgggtcatgtgcgtttcctagcttcaggctacttggtaactggaagaagctggaggacagaagcagtactcaacttgctgttattccagtgccctgtaacaatcactggtcctcctgcagatgacccttggtagagtctttatttgcatagcctcaaaataggttattcgtttctaaacttggatggaattagagaatacaatcaaactttaccacttggaggacacggggttagtccaggaccaaagaggccaatggatttttcaaagtgtgccccagcacaagaggcactggtgttcggtctacatttagttctccccactctgatcccctgactctccagcttccaggaaggttccttctcagagccaaatactctttgtgcaagtgccttcctgagcagaagaactggagaaagggaaccacagagccaggaggaatgtctgagcagagtcaagcaactggcttgaccacagtctgaagcaaggtgccacttaaacagatactgttttctcaaaggggcagaggaatcgtgttgcagatggcagccttttctccttcattttccccacattttctctggccctctaccttgcttcctgggagtttgatttaggattgctgttgaaggcttcctcaggcaaactccagcttaaagccctagacaggtaaaagcacacattggatggcagcatgggtttcttcccattttatgggcatgaaatatgtggtttagaataaggaacaagcattattcctttgccaacagcctcactctaagaggcttttttgctgagtcaagcaaacacttgcctgctctgccccttggagctgcatttgacctgctctcactggtaaggtgacttggtggcgttcccacttgatttagccattttcttccattgtgagaccactgccatctatccacctgcccacctccccttttgtttctcagtaacattgccatttgttttttgcctttgataaactgtgatgtactgttctgagatcttttgggtgcagttctgaaactgaaaggactgttaacatgtttttaattttatatctatgctttcagactctttgatgataattttttttttaaaaattattctctcgaagagcaacttacgagaggacagccttatgagggtttgcttgagaggcagtgtggcttctgtgactgccagctctaaatctcgatcttgccataactttacagggtaacttgggtccacagtcactctttgtgcctcagtttacccacccattaaatgggaacattactgtcttcccctccctacctcatggggaatgtctgggaagctggggacattgctatgcaaatgtgtgaatcttagtcatggatttgatttttag

SEQ ID NO: 168358 - DNA, 4538 bp, Homo sapiens
  Payload ID: 13133
  Gene Symbol: KCNS1
  Gene Name: potassium voltage-gated channel, modifier subfamily S, member 1
  Uniprot ID: Q96KK3
  ENST ID: ENST00000306117
  CDS Start-End: 398-1978
ggcagcgatcgatgcggccttcagccgcgggggactaggcaaggaagaaggaaggagagggcagcggggccgcctgcagcaggaggctcggcggggccggcggggcagaggcgagaccgagtatagccagcggctcccagcctcggtggctttgggacagacacgcgaggcgcccgggaggtgccaccacaggtggagatccaagtggaggtgggagcggagctacatcacacgtttattgtgcattgattatgtgccagggaccatgctgccgataaacaccttgcatcatttaattctctgagcctctcctggaaagtatgatgctacccggttccacagacagggaaacaagcccagagagggcgacgaatgcactcaaggacagcagctagtgatgctgatgctgctggtccggggaacacactatgagaacctccggtctaaagtggtgctgccaacacccctaggagggaggagcactgaaacctttgtgagcgagttcccgggccccgacaccgggatccgctggcggcgaagcgacgaggcgctgcgcgtgaacgtgggtggcgtgcggcggcagctgagcgcgcgcgccctggcgcgcttcccgggcacgcggctgggccgcctgcaggccgcggcgtcggaggagcaggcgcggcgcctgtgcgacgactacgacgaggcggcgcgcgaattctacttcgaccggcacccgggcttcttcctgagcctgctgcacttctaccgcactggccacctgcacgtgctcgacgagctgtgcgtcttcgcctttggccaggaggccgactactggggcctaggcgagaacgcgcttgccgcgtgctgccgcgcgcgctacctggagaggcggctgacccagccgcacgcctgggacgaggacagcgacacgccgagcagcgtggacccgtgccccgacgagatctccgacgtgcagcgagaactggcgcgctatggcgcggcgcgctgtggccgcctgcgccgccgcctctggctgaccatggagaacccgggctactcgctgccgagcaagctcttcagctgcgtctccatcagcgtggtgctcgcctccatcgccgccatgtgcatccacagcctgcccgagtaccaggcccgcgaggcggcggccgccgtggctgcggtggccgcgggccgcagcccggaaggcgtgcgcgacgacccggtgctgcgacgcctcgagtacttctgcatcgcctggttcagcttcgaggtgtcgtcgcgcctcctgctggcgcccagtacgcgcaacttcttctgccacccgctcaacctcatcgacattgtgtctgtgctgcccttctatctcacgctgctggctggtgtggcactgggcgaccagggcggcaaggagttcggccacctgggcaaggtggtgcaggtgttccgcctcatgcgcatcttccgcgtactcaagttggcgcgccattccaccgggctgcgctcgctgggagccacgctcaagcacagctaccgtgaggtgggcatcttgctgctgtacctggctgtgggtgtgtcagtgttctctggtgtggcctacacagctgaaaaggaggaggacgtgggctttaacaccatcccagcctgctggtggtggggcacagtgagcatgaccaccgtgggctatggggatgtggtgccagtgacggtggctggcaagctggcagcctcaggctgcatcctagggggcatcctggtggtagcactccccatcaccatcatcttcaacaagttctcccacttctaccggcgccagaaggctctggaggcagccgtgcgcaacagcaaccaccaagagtttgaggacttgctgagcagcattgatggggtgtcggaggcatctctggagacatcccgagaaacctctcaggagggacagtctgcagatctagagagccaggcccccagtgagcctccacaccctcagatgtattaaaaccagggatccgtgaccccctgccatgcccctacagtagagattcctcccctgctaaagttcttcatggtagtgagcctcccaggatcactcatgctgtcctgagaaatgagattcaaaagctgcattccttcctccaaaggcccaggacaggacagtgctaccctagattctgtgagattctgcaagcaactcagaaagctttataaacctgcctccaagccattcatgaagcaggcatgagccagagggaggaagttgaaaggatactaatgattcctgagcacctcctgtacatgaaccaggtcatgtttggccttgtgttggagaaagagaattatccccacttcacagatgaggaaaccaaggctaagagatgagcgatgcctctcccagatgtcacaattagaagtggcagagtcaggtttggaatctgggcttgttggtgtgcctggagcaatgctccatcaactccatctttcttctgccctcatgaagtttgcgtgtgttttttggtgattcatggatccccagagttgatccacaagataagaaatccctttcagagccagggaagggtccagacaggagatttggatataggagctctggatctcagctgtggttcctttctaggagcatccaacaggagtcagcaatcaaagatgagtcctggagggaaggaggatgagtcctgggaggaagtaccatagcattgtacttgcctctttagctggtatgcaagatttgctaagcaataatcttccgaccttcctcccagggctgatgtgagagaaagaaaatctgaagggcccctggcctgagatctagacaacctagctgcgccaagacctgctgtgtaaagtggtccaatccctgcccccaagtccagattccagcccctctgtcaaatggtcagaatctgtgacccagagggcaatgaaagccaaggagagcagaggggtctctaacttaaagccagctcagctctgaaatgttcagagggctgacatatatgaatactggcttctaagaccctcccccaacagtctgaccttggcagttcctttctgcccatcacacagacgtccagccctacattgtccagccctacctagagtacccatccaggcccatgtgtgagagtcctctcccttctggccagctccagccccctcacccttgctgggggcatatctctcatacccacctgctgaatcttctcttcacttgctgagaaagtcagaggaggggatccagtagccctttccacatactgtggctacagcacccagcactgtgctgttgttgtctgactgtggctatctctgtcccatcaccctgagcctcaagatggaagacattgtctgcttgaactctgggcttggtgcagagtaggtatttggtaaatgttgaatagatcaaccaattcctacagcccactgggtgccaagctcagagggggaaaaaaagatagccagagagagacctggccctcaaaaaggtgtgaacaagactgaaaaggaggtccgttcagctccgcctgccctgtccctgcttggttcttgaagtttttacaatatattccttgtaggttcttcactcactcactcaacaaatacccgttggaagagtcttaaactggggcttcatgtgtggcctgcagtcatgtttcggcttagtccaacagtgtttttattatattttaagaatctgaatgcctttgcgtgaggcatgcactctcaggttccccatagtgtctcccccgctgccacccacaaacagacacacatgccgttgtgttatgcccagccactctgatatactggcttctgacttatgggctgcttactagtctcaagagatacagtggtggaaaaatatatccctatactcatgaagcttaccgactagtagggaagatagactctaatgcaataatcacataaatatagcgagctctactaagtacaggtgtgtataatgtatcagggaccatggcccgagaaagtgagaaggctttcctgagcaagtgacaatctaacctgccatccaaatgataaattgctaattaagcaaatgaggttccaggggggagtactccaagcagagagaatggcatgtgtgaaggtgtgtgtcatacacagggcctagtacatagtgggccccctacatacgcatggattctgggtctccagattggaacagaggatggagctaagcagcaaagggcctcccttgaattcaccacacacataccagcccttctgcacactctgctccttacatctaggcccagctgaacccaggttaggggcagatcagaagggctgcgtgtagcacccttatggtcttgcagaacacaccaagaaacccgacggcttccatattttctgaccctacaaacaggtccctaatactgatgtggagaaagctcaagagggaatcatctggcctgagcctaccatgaggctgtttgtggtcctggcagaaaagcaacaactcgctccccttcccatgtatcagtgaaaaccattatgcaaataaagagctgggcccc

SEQ ID NO: 168359 - DNA, 2136 bp, Homo sapiens
  Payload ID: 13133
  Gene Symbol: KCNS1
  Gene Name: potassium voltage-gated channel, modifier subfamily S, member 1
  Uniprot ID: Q96KK3
  ENST ID: ENST00000537075
  CDS Start-End: 51-1631
gtggctttgggacagacacgcgaggcgcccgggaggtgccaccacaggtgatgctgatgctgctggtccggggaacacactatgagaacctccggtctaaagtggtgctgccaacacccctaggagggaggagcactgaaacctttgtgagcgagttcccgggccccgacaccgggatccgctggcggcgaagcgacgaggcgctgcgcgtgaacgtgggtggcgtgcggcggcagctgagcgcgcgcgccctggcgcgcttcccgggcacgcggctgggccgcctgcaggccgcggcgtcggaggagcaggcgcggcgcctgtgcgacgactacgacgaggcggcgcgcgaattctacttcgaccggcacccgggcttcttcctgagcctgctgcacttctaccgcactggccacctgcacgtgctcgacgagctgtgcgtcttcgcctttggccaggaggccgactactggggcctaggcgagaacgcgcttgccgcgtgctgccgcgcgcgctacctggagaggcggctgacccagccgcacgcctgggacgaggacagcgacacgccgagcagcgtggacccgtgccccgacgagatctccgacgtgcagcgagaactggcgcgctatggcgcggcgcgctgtggccgcctgcgccgccgcctctggctgaccatggagaacccgggctactcgctgccgagcaagctcttcagctgcgtctccatcagcgtggtgctcgcctccatcgccgccatgtgcatccacagcctgcccgagtaccaggcccgcgaggcggcggccgccgtggctgcggtggccgcgggccgcagcccggaaggcgtgcgcgacgacccggtgctgcgacgcctcgagtacttctgcatcgcctggttcagcttcgaggtgtcgtcgcgcctcctgctggcgcccagtacgcgcaacttcttctgccacccgctcaacctcatcgacattgtgtctgtgctgcccttctatctcacgctgctggctggtgtggcactgggcgaccagggcggcaaggagttcggccacctgggcaaggtggtgcaggtgttccgcctcatgcgcatcttccgcgtactcaagttggcgcgccattccaccgggctgcgctcgctgggagccacgctcaagcacagctaccgtgaggtgggcatcttgctgctgtacctggctgtgggtgtgtcagtgttctctggtgtggcctacacagctgaaaaggaggaggacgtgggctttaacaccatcccagcctgctggtggtggggcacagtgagcatgaccaccgtgggctatggggatgtggtgccagtgacggtggctggcaagctggcagcctcaggctgcatcctagggggcatcctggtggtagcactccccatcaccatcatcttcaacaagttctcccacttctaccggcgccagaaggctctggaggcagccgtgcgcaacagcaaccaccaagagtttgaggacttgctgagcagcattgatggggtgtcggaggcatctctggagacatcccgagaaacctctcaggagggacagtctgcagatctagagagccaggcccccagtgagcctccacaccctcagatgtattaaaaccagggatccgtgaccccctgccatgcccctacagtagagattcctcccctgctaaagttcttcatggtagtgagcctcccaggatcactcatgctgtcctgagaaatgagattcaaaagctgcattccttcctccaaaggcccaggacaggacagtgctaccctagattctgtgagattctgcaagcaactcagaaagctttataaacctgcctccaagccattcatgaagcaggcatgagccagagggaggaagttgaaaggatactaatgattcctgagcacctcctgtacatgaaccaggtcatgtttggccttgtgttggagaaagagaattatccccacttcacagatgaggaaaccaaggctaagagatgagcgatgcctctcccagatgtcacaattagaagtggcagagtcaggtttggaatctgggcttgttggtgtgcctggagcaatgctccatcaactccatctttcttctgccctcatgaagtttgcgt

SEQ ID NO: 168360 - DNA, 5219 bp, Homo sapiens
  Payload ID: 13134
  Gene Symbol: KCNS2
  Gene Name: potassium voltage-gated channel, modifier subfamily S, member 2
  Uniprot ID: Q9ULS6
  ENST ID: ENST00000287042
  CDS Start-End: 351-1784
cacggggcgaatgcggcgcgggttcctgcctctctgggtgggtgaggggcgcgcggatccggagagggggctccgggagcggcgggaccacgcagccacctgtgagccttcggcagctgcgggcggcggcggcgtacccggcccgagacgggaggagacgctcggcggcccccgcccgccggcccgccgggcgcacacactcgcacccgcgcacgcaccgccagcaggcagcggccaccgccgcgatgctcgcccgcgggttggggaagtttcccgccggcctcggccgcgggcacccgtgctcccaggtgtagcgcccccgcgcggcgcgggcggccggcgcctccagcatgaccggccagagcctgtgggacgtgtcggaggctaacgtcgaggacggggagatccgcatcaatgtgggcggcttcaagaggaggctgcgctcgcacacgctgctgcgcttccccgagacgcgcctgggccgcttgctgctctgccactcgcgcgaggccattctggagctctgcgatgactacgacgacgtccagcgggagttctacttcgaccgcaaccctgagctcttcccctacgtgctgcatttctatcacaccggcaagcttcacgtcatggctgagctatgtgtcttctccttcagccaggagatcgagtactggggcatcaacgagttcttcattgactcctgctgcagctacagctaccatggccgcaaagtagagcccgagcaggagaagtgggacgagcagagtgaccaggagagcaccacgtcttccttcgatgagatccttgccttctacaacgacgcctccaagttcgatgggcagcccctcggcaacttccgcaggcagctgtggctggcgctggacaaccccggctactcagtgctgagcagggtcttcagcatcctgtccatcctggtggtgatggggtccatcatcaccatgtgcctcaatagcctgcccgatttccaaatccctgacagccagggcaaccctggcgaggaccctaggttcgaaatcgtggagcactttggcattgcctggttcacatttgagctggtggccaggtttgctgtggcccctgacttcctcaagttcttcaagaatgccctaaaccttattgacctcatgtccatcgtccccttttacatcactctggtggtgaacctggtggtggagagcacacctactttagccaacttgggcagggtggcccaggtcctgaggctgatgcggatcttccgcatcttaaagctggccaggcactccactggcctccgctccctgggggccactttgaaatacagctacaaagaagtagggctgctcttgctctacctctccgtggggatttccatcttctccgtggtggcctacaccattgaaaaggaggagaacgagggcctggccaccatccctgcctgctggtggtgggctaccgtcagtatgaccacagtggggtacggggatgtggtcccagggaccacggcaggaaagctgactgcctctgcctgcatcttggcaggcatcctcgtggtggtcctgcccatcaccttgatcttcaataagttctcccacttttaccggcgccaaaagcaacttgagagtgccatgcgcagctgtgactttggagatggaatgaaggaggtcccttcggtcaatttaagggactattatgcccataaagttaaatcccttatggcaagcctgacgaacatgagcaggagctcaccaagtgaactcagtttaaatgattccctacgttagccgggaggacttgtcaccctccaccccacattgctgagctgcctcttgtgcctctggcacagcccaggcaccttatggttatggtgtaaggagtatgcccagcccctgaggggagagatgcatgggatatgcacccaggtttcttttacagtttttagaatcgtttttagagggtggtgtgtctgacaccatgcctttgcacctttccatgaaatgacactcactggtctttgcatcgtgggcataaaatgttcacctttttgccagatgagtacacccagaatgctaatttttctgtccatcgtgtacgctattctagtgcttgtggcccagtactgtctatgagttgtcgtgctcctgtttctgaggttgtcgtgtgagttctgtacaaaaagcccccacaagtcgtccagtagaaatgcatctatgaggtcagcaaggatatgatgagattttgctcacagtcatgtgaaaacaaaatctcagctctttatccattgctttcacttagttttagtaccaaaacaaagagaatgcaaagttaagcagacttgaccaatgcaagtctctaagttgtttttataaatgatctgtagttccgtggcttgcatgggtgcaccaatcatctttagaacgatgtacactgatgttcatctcataaatgtcactctttagagaatgttacttagttaaacatgcagtgaagatcgaatttttttcccaagaacagatgtgttagggagaggggcttcagctaaatagtccaaaccctagggtgcttaaagccaagttagtgcaggctgagccccttggttcacagtcaagcctccttgtttcctagggtgactgtagagaaatgtatttccggatgaggtttctgatctaggccatttgaccaaactttgctgtgtctaagatattagcatgtttttgaaatatttattttttaagatgtttaggagtaaggtcgtgttgtcttcctcaactaaaaagaagtttactgttgtatcgtctccctgaggtgaacgttgttgggttgctagcaagggcagtagcttaaatacttttgttgcctactctgaaagctcatcaaatgagagcccttttatttccaagcagaatttagtcagataattttgcttctaggatatagtatgttgtatatgatgctgtgattgccctggagttcctgccatgacatggaaacctggtggtatggaagcatgtactcaaaatatagacgtgcacgatggtggtgtggcttacccaggatggaaacactgcagttcttacttgcattcccactgcctttcatggggggtgactgggtagaggccaggagaaaggaaagagttgtaaaataaaaaactgctagttcataaaatgtcataaaaaattgtaaacttgaaaagcttaatgctattcaaaagaccttcaagcttccaaacttgtattgaagggagacgactgtttcctcctccaaaatgctcctgctcctcttgttcggttaaccagcacataacattgtgatggggaacctgggttcctctataagataattcttctccatcatctttaaggtaatctgatggttttccaggtggctttcattattgttccatctttgaaaaggcaatagaacccaggggtctgagcatggagctatccagggttttcatccaaaggttgggcctcttcttaagaggtccttttgtgtttcagttgattgaagatgatacttacctcattggaggtgtggcaaggatcttatcagaaggctttgtgttcttgtagttgtcatggctactacagtgtgggtgatttattgaatgaattcactagccacttgtgtcctggagcccccagttcaaatctttccattggactggaggcttgtgggaggctgggaggtggctgtctcctagtgtctacatccgtgtctctgaagcatcaggaaaagtgagatgacttagaggcaactgggcactgaatcagaggagcagagttatttttcagaatttgcacatggaacacttagatttggctggtgcttccagccctggaaggcataacatttacggactcatccccagctgcactgaaggcaggtggtggtacagacttatgaggacggatcagtttgccaaggctgatggtattgggtcactgagcctggtatccatggccgctgaccaggaagcttatgcaaagtggaagcaaggaacaaggcagaataactcagtcactttcatgaagatttttctaaacaagaaggcttaccaccaaaaaagaggtaccctagtggttaccctttgcagatgtgaaagctggaaaacttgacttttctttttggtaatgacttgcatttatctggtgcctttcgttggaggaatcccaacgtgctttagagactatctttttaacatctcttgtacatacatatatacttatataaaatattatcttgcccaactggacctttactcacttctgagcatgagaatgtcccaatagcattgagtttttcaagtggtggtttcagataagtgggagaaagaacaacccggctggcttaaaccctggagctaattcccacaaggaatgtagactgaatggtgacccagggagaaataatcttcctctcccctaaagtctcactaaggtttgaagtttacaggtgctctccactgggtctttgatcgaccttgctagataacatctaaccagcagtttcttttagtccctgaagctaaccagggagagtcaggttaattttctgtaaaaatatgaggtgacatctttggcaaccaggctgtcagactgacctgtaaacctcctttagggggacagagtagaaactggagatgacttgtttccagctgtgagcttgagagaagtgtcactcccagcatttgaaggttattgttttcaatgccagtgggccaaatatatgggccaggctttgatatctgtgatgtgcattttggaagtgctgggttgggaagtgacacgtctgttgcacaaatgcatattggttataggtttgtgttttctgccaaacccccacatttctcgggtttgtgagtgaggaagggcatgttgtaatgccaagctgatttgtagctcgtaaggtagtaattggtatttaacatttgcatttgttatttctacttatcttagcactcaaataattgaactacctgctaattcttgccgcatttcaaagaaaataagttgttatgcactttgggatagtggtgatctgtacaggctgtgtgttagctacttgaaggcgtaactggtatttcttgtgtgttttaacagcatgacttcttacagagctgtaatttttaaaattgaggatgccatatttgagatgtcagttttaacactcattaacacactactgtgcaagcattgacacaggctgcactg

SEQ ID NO: 168361 - DNA, 4340 bp, Homo sapiens
  Payload ID: 13134
  Gene Symbol: KCNS2
  Gene Name: potassium voltage-gated channel, modifier subfamily S, member 2
  Uniprot ID: Q9ULS6
  ENST ID: ENST00000521839
  CDS Start-End: 172-1605
tcccccccaccccaccaaagctacgcgccccccgtgtcggcccggccctgcccgtgcgtatctcagctccggtcccgcctgtctgcggcgagcgggcgggggcgtctcccgggcctgcccatggacaaggtgtagcgcccccgcgcggcgcgggcggccggcgcctccagcatgaccggccagagcctgtgggacgtgtcggaggctaacgtcgaggacggggagatccgcatcaatgtgggcggcttcaagaggaggctgcgctcgcacacgctgctgcgcttccccgagacgcgcctgggccgcttgctgctctgccactcgcgcgaggccattctggagctctgcgatgactacgacgacgtccagcgggagttctacttcgaccgcaaccctgagctcttcccctacgtgctgcatttctatcacaccggcaagcttcacgtcatggctgagctatgtgtcttctccttcagccaggagatcgagtactggggcatcaacgagttcttcattgactcctgctgcagctacagctaccatggccgcaaagtagagcccgagcaggagaagtgggacgagcagagtgaccaggagagcaccacgtcttccttcgatgagatccttgccttctacaacgacgcctccaagttcgatgggcagcccctcggcaacttccgcaggcagctgtggctggcgctggacaaccccggctactcagtgctgagcagggtcttcagcatcctgtccatcctggtggtgatggggtccatcatcaccatgtgcctcaatagcctgcccgatttccaaatccctgacagccagggcaaccctggcgaggaccctaggttcgaaatcgtggagcactttggcattgcctggttcacatttgagctggtggccaggtttgctgtggcccctgacttcctcaagttcttcaagaatgccctaaaccttattgacctcatgtccatcgtccccttttacatcactctggtggtgaacctggtggtggagagcacacctactttagccaacttgggcagggtggcccaggtcctgaggctgatgcggatcttccgcatcttaaagctggccaggcactccactggcctccgctccctgggggccactttgaaatacagctacaaagaagtagggctgctcttgctctacctctccgtggggatttccatcttctccgtggtggcctacaccattgaaaaggaggagaacgagggcctggccaccatccctgcctgctggtggtgggctaccgtcagtatgaccacagtggggtacggggatgtggtcccagggaccacggcaggaaagctgactgcctctgcctgcatcttggcaggcatcctcgtggtggtcctgcccatcaccttgatcttcaataagttctcccacttttaccggcgccaaaagcaacttgagagtgccatgcgcagctgtgactttggagatggaatgaaggaggtcccttcggtcaatttaagggactattatgcccataaagttaaatcccttatggcaagcctgacgaacatgagcaggagctcaccaagtgaactcagtttaaatgattccctacgttagccgggaggacttgtcaccctccaccccacattgctgagctgcctcttgtgcctctggcacagcccaggcaccttatggttatggtgtaaggagtatgcccagcccctgaggggagagatgcatgggatatgcacccaggtttcttttacagtttttagaatcgtttttagagggtggtgtgtctgacaccatgcctttgcacctttccatgaaatgacactcactggtctttgcatcgtgggcataaaatgttcacctttttgccagatgagtacacccagaatgctaatttttctgtccatcgtgtacgctattctagtgcttgtggcccagtactgtctatgagttgtcgtgctcctgtttctgaggttgtcgtgtgagttctgtacaaaaagcccccacaagtcgtccagtagaaatgcatctatgaggtcagcaaggatatgatgagattttgctcacagtcatgtgaaaacaaaatctcagctctttatccattgctttcacttagttttagtaccaaaacaaagagaatgcaaagttaagcagacttgaccaatgcaagtctctaagttgtttttataaatgatctgtagttccgtggcttgcatgggtgcaccaatcatctttagaacgatgtacactgatgttcatctcataaatgtcactctttagagaatgttacttagttaaacatgcagtgaagatcgaatttttttcccaagaacagatgtgttagggagaggggcttcagctaaatagtccaaaccctagggtgcttaaagccaagttagtgcaggctgagccccttggttcacagtcaagcctccttgtttcctagggtgactgtagagaaatgtatttccggatgaggtttctgatctaggccatttgaccaaactttgctgtgtctaagatattagcatgtttttgaaatatttattttttaagatgtttaggagtaaggtcgtgttgtcttcctcaactaaaaagaagtttactgttgtatcgtctccctgaggtgaacgttgttgggttgctagcaagggcagtagcttaaatacttttgttgcctactctgaaagctcatcaaatgagagcccttttatttccaagcagaatttagtcagataattttgcttctaggatatagtatgttgtatatgatgctgtgattgccctggagttcctgccatgacatggaaacctggtggtatggaagcatgtactcaaaatatagacgtgcacgatggtggtgtggcttacccaggatggaaacactgcagttcttacttgcattcccactgcctttcatggggggtgactgggtagaggccaggagaaaggaaagagttgtaaaataaaaaactgctagttcataaaatgtcataaaaaattgtaaacttgaaaagcttaatgctattcaaaagaccttcaagcttccaaacttgtattgaagggagacgactgtttcctcctccaaaatgctcctgctcctcttgttcggttaaccagcacataacattgtgatggggaacctgggttcctctataagataattcttctccatcatctttaaggtaatctgatggttttccaggtggctttcattattgttccatctttgaaaaggcaatagaacccaggggtctgagcatggagctatccagggttttcatccaaaggttgggcctcttcttaagaggtccttttgtgtttcagttgattgaagatgatacttacctcattggaggtgtggcaaggatcttatcagaaggctttgtgttcttgtagttgtcatggctactacagtgtgggtgatttattgaatgaattcactagccacttgtgtcctggagcccccagttcaaatctttccattggactggaggcttgtgggaggctgggaggtggctgtctcctagtgtctacatccgtgtctctgaagcatcaggaaaagtgagatgacttagaggcaactgggcactgaatcagaggagcagagttatttttcagaatttgcacatggaacacttagatttggctggtgcttccagccctggaaggcataacatttacggactcatccccagctgcactgaaggcaggtggtggtacagacttatgaggacggatcagtttgccaaggctgatggtattgggtcactgagcctggtatccatggccgctgaccaggaagcttatgcaaagtggaagcaaggaacaaggcagaataactcagtcactttcatgaagatttttctaaacaagaaggcttaccaccaaaaaagaggtaccctagtggttaccctttgcagatgtgaaagctggaaaacttgacttttctttttggtaatgacttgcatttatctggtgcctttcgttggaggaatcccaacgtgctttagagactatctttttaacatctcttgtacatacatatatacttatataaaatattatcttgcccaactggacctttactcacttctgagcatgagaatgtcccaatagcattgagtttttcaagtggtggtttcagataagtgggagaaagaacaacccggctggcttaaaccctggagctaattcccacaaggaatgtagactgaatggtgacccagggagaaataatcttcctctcccctaaagtctcactaaggtttgaagtttacaggtgctctccactgggtctttgatcgaccttgctagataacatctaaccagcagtttct

SEQ ID NO: 168362 - DNA, 2333 bp, Homo sapiens
  Payload ID: 13135
  Gene Symbol: KCNS3
  Gene Name: potassium voltage-gated channel, modifier subfamily S, member 3
  Uniprot ID: Q9BQ31
  ENST ID: ENST00000304101
  CDS Start-End: 381-1856
cgcgggccaccccgctctcctcgccgccgcggcggcaggcgcggggccgcgccgcgaggcctgatccctgcagcgcgggcaggcggcgtcgcagagcggagctagctggatgcgtccggactcctgcaggtgagagtgattttccagtgattgctttggcctgtacaaccagagaacaggattcttcccttctttttggccaccaaatgcctatgtgcaccacacattccagtgtgctgagaagggcagagcttcttggatgatgatggacgtcccaccgggcaggatgaaggcagagcgtgtggcatctccacctcaagggtgcagcctgatcttcctcttctcccttgccagccagcactctgccttctgtatccaccatggtgtttggtgagtttttccatcgccctggacaagacgaggaacttgtcaacctgaatgtggggggctttaagcagtctgttgaccaaagcaccctcctgcggtttcctcacaccagactggggaagctgcttacttgccattctgaagaggccattctggagctgtgtgatgattacagtgtggccgataaggagtactactttgatcggaatccctccttgttcagatatgttttgaatttttattacacggggaagctgcatgtcatggaggagctgtgcgtattctcattctgccaggagatcgagtactggggcatcaacgagctcttcattgattcttgctgcagcaatcgctaccaggaacgcaaggaggaaaaccacgagaaggactgggaccagaaaagccatgatgtgagtaccgactcctcgtttgaagagtcgtctctgtttgagaaagagctggagaagtttgacacactgcgatttggtcagctccggaagaaaatctggattagaatggagaatccagcgtactgcctgtccgctaagcttatcgctatctcctccttgagcgtggtgctggcctccatcgtggccatgtgcgttcacagcatgtcggagttccagaatgaggatggagaagtggatgatccggtgctggaaggagtggagatcgcgtgcattgcctggttcaccggggagcttgccgtccggctggctgccgctccttgtcaaaagaaattctggaaaaaccctctgaacatcattgactttgtctctattattcccttctatgccacgttggctgtagacaccaaggaggaagagagtgaggatattgagaacatgggcaaggtggtccagatcctacggcttatgaggattttccgaattctaaagcttgcccggcactcggtaggacttcggtctctaggtgccacactgagacacagctaccatgaagttgggcttctgcttctcttcctctctgtgggcatttccattttctctgtgcttatctactccgtggagaaagatgaccacacatccagcctcaccagcatccccatctgctggtggtgggccaccatcagcatgacaactgtgggctatggagacacccacccggtcaccttggcgggaaagctcatcgccagcacatgcatcatctgtggcatcttggtggtggcccttcccatcaccatcatcttcaacaagttttccaagtactaccagaagcaaaaggacattgatgtggaccagtgcagtgaggatgcaccagagaagtgtcatgagctaccttactttaacattagggatatatatgcacagcggatgcacaccttcattaccagtctctcttctgtaggcattgtggtgagcgatcctgactccacagatgcttcaagcattgaagacaatgaggacatttgtaacaccacctccttggagaattgcacagcaaaatgagcgggggtgtttgtgcctgtttctcttatcctttcccgacattaggttaacacagctttataaacctcagtgggttcgttaaaatcatttaattctcagggtgtacctttcagccatagttggacattcattgctgaattctgaaatgatagaattgtctttatttttctctgtgaggtcaattaaatgccttgttctgaaatttattttttacaagagagagttgtgatatagtttggaatataagataaatggtattgggtggggtttgtggctacagcttatgcatcattctgtgtttgtcatttactcacattgagctaactttaaattactgacaagtagaatcaaaggtgcagctgactgagacgacatgcatgtaagatccacaaaatgagacaatgcatgtaaatccatgctcatgttctaaacatggaaactaggagcctaataaacttcctaattcagtatggagaa

SEQ ID NO: 168363 - DNA, 2397 bp, Homo sapiens
  Payload ID: 13135
  Gene Symbol: KCNS3
  Gene Name: potassium voltage-gated channel, modifier subfamily S, member 3
  Uniprot ID: Q9BQ31
  ENST ID: ENST00000403915
  CDS Start-End: 452-1927
agtgcagcgaggccagcgatgccttctggaccacacgctgtcctcgccgaggtcctggtttgttcctcaacgtcggctgaaggcatcgtcccctgacttcctcttccattcgtccttccgaaaggggacccgactggttcctcttctacatatgaggcgcatctgcttggtgcaaatgtccaagcacctcttctgactcggtgagagtgattttccagtgattgctttggcctgtacaaccagagaacaggattcttcccttctttttggccaccaaatgcctatgtgcaccacacattccagtgtgctgagaagggcagagcttcttggatgatgatggacgtcccaccgggcaggatgaaggcagagcgtgtggcatctccacctcaagggtgcagcctgatcttcctcttctcccttgccagccagcactctgccttctgtatccaccatggtgtttggtgagtttttccatcgccctggacaagacgaggaacttgtcaacctgaatgtggggggctttaagcagtctgttgaccaaagcaccctcctgcggtttcctcacaccagactggggaagctgcttacttgccattctgaagaggccattctggagctgtgtgatgattacagtgtggccgataaggagtactactttgatcggaatccctccttgttcagatatgttttgaatttttattacacggggaagctgcatgtcatggaggagctgtgcgtattctcattctgccaggagatcgagtactggggcatcaacgagctcttcattgattcttgctgcagcaatcgctaccaggaacgcaaggaggaaaaccacgagaaggactgggaccagaaaagccatgatgtgagtaccgactcctcgtttgaagagtcgtctctgtttgagaaagagctggagaagtttgacacactgcgatttggtcagctccggaagaaaatctggattagaatggagaatccagcgtactgcctgtccgctaagcttatcgctatctcctccttgagcgtggtgctggcctccatcgtggccatgtgcgttcacagcatgtcggagttccagaatgaggatggagaagtggatgatccggtgctggaaggagtggagatcgcgtgcattgcctggttcaccggggagcttgccgtccggctggctgccgctccttgtcaaaagaaattctggaaaaaccctctgaacatcattgactttgtctctattattcccttctatgccacgttggctgtagacaccaaggaggaagagagtgaggatattgagaacatgggcaaggtggtccagatcctacggcttatgaggattttccgaattctaaagcttgcccggcactcggtaggacttcggtctctaggtgccacactgagacacagctaccatgaagttgggcttctgcttctcttcctctctgtgggcatttccattttctctgtgcttatctactccgtggagaaagatgaccacacatccagcctcaccagcatccccatctgctggtggtgggccaccatcagcatgacaactgtgggctatggagacacccacccggtcaccttggcgggaaagctcatcgccagcacatgcatcatctgtggcatcttggtggtggcccttcccatcaccatcatcttcaacaagttttccaagtactaccagaagcaaaaggacattgatgtggaccagtgcagtgaggatgcaccagagaagtgtcatgagctaccttactttaacattagggatatatatgcacagcggatgcacaccttcattaccagtctctcttctgtaggcattgtggtgagcgatcctgactccacagatgcttcaagcattgaagacaatgaggacatttgtaacaccacctccttggagaattgcacagcaaaatgagcgggggtgtttgtgcctgtttctcttatcctttcccgacattaggttaacacagctttataaacctcagtgggttcgttaaaatcatttaattctcagggtgtacctttcagccatagttggacattcattgctgaattctgaaatgatagaattgtctttatttttctctgtgaggtcaattaaatgccttgttctgaaatttattttttacaagagagagttgtgatatagtttggaatataagataaatggtattgggtggggtttgtggctacagcttatgcatcattctgtgtttgtcatttactcacattgagctaactttaaattactgacaagtagaatcaaaggtgcagctgactgagacgacatgcatgtaagatccacaaaatgagacaatgcatgtaaatccatgctcatgttctaaacatggaaactaggagcctaataaacttcctaattcagta

SEQ ID NO: 168364 - DNA, 553 bp, Homo sapiens
  Payload ID: 13135
  Gene Symbol: KCNS3
  Gene Name: potassium voltage-gated channel, modifier subfamily S, member 3
  ENST ID: ENST00000419802
  CDS Start-End: 331-553
agggaagagcgaacccagggcccttgctctcgtgcagcgctgcgccctgggtggggacggcgtgaggcttgcagcgcaggtgagagtgattttccagtgattgctttggcctgtacaaccagagaacaggattcttcccttctttttggccaccaaatgcctatgtgcaccacacattccagtgtgctgagaagggcagagcttcttggatgatgatggacgtcccaccgggcaggatgaaggcagagcgtgtggcatctccacctcaagggtgcagcctgatcttcctcttctcccttgccagccagcactctgccttctgtatccaccatggtgtttggtgagtttttccatcgccctggacaagacgaggaacttgtcaacctgaatgtggggggctttaagcagtctgttgaccaaagcaccctcctgcggtttcctcacaccagactggggaagctgcttacttgccattctgaagaggccattctggagctgtgtgatgattacagtgtggccgataaggagtactactttgatcggaatccctcct

SEQ ID NO: 168365 - DNA, 1478 bp, Homo sapiens
  Payload ID: 13136
  Gene Symbol: POTEB
  Gene Name: POTE ankyrin domain family, member B
  ENST ID: ENST00000435397
  CDS Start-End: 34-939
ctactaccggcctcccctggctgttaaaagcagatggtggctgaggtttgttcaatgcccgctgcctctgctgtgaagaagccatttgatctcaggagcaagatgggcaagtggtgccaccaccgcttcccctgctgcagggggagcggcacgagcaatgtgggcacttctggagaccatgacgactcctttatgaagacactcaggagcaagatgggcaagtggtgctgtcactgcttcccctgctgcagggggagcggcaagagcaacgtgggcacttggggagactacgacgacagcgccttcatggagccgaggtaccacgtccgtcgagaagatctggacaagctccacagagctgcctggtggggtaaagtccccagaaaggatctcatcgtcatgctcagggacactgacatgaacaagagggacaagcaaaagaggactgctctacatttggcctctgccaatggaaattcagaagtagtacaactcctgctggacagacgatgtcaacttaacgtccttgacaacaaaaaaaggacagctctgataaaggccgtacaatgccaggaagatgaatgtgtgttaatgttgctggaacatggcgctgatggaaatattcaagatgagtatggaaataccgctctacactatgctatctacaatgaagataaattaatggccaaagcactgctcttatatggtgctgatattgaatcaaaaaacaagtgtggcctcacaccacttttgcttggcgtacatgaacaaaaacaggaagtggtgaaatttttaatcaagaaaaaagctaatttaaatgcacttgatagatatggaagaatttgtgaattactttctgactataaagaaaaacagatgctaaaaatctcttctgaaaacagcaatccagaaaatgtctcaagaaccagaaataaataaggactgtgatagagaggttgaagaagaaataaagaagcatggaagtaatcctgtgggattaccagaaaacctgactaatggtgccagtgctggcaatggtgatgatggattaattccacaaaggaagagcagaaaacctgaaaatcagcaatttcctgacactgagaatgaagagtatcacagtgacgaacaaaatgatacccagaaacaactttctgaagaacagaacactggaatatcacaagatgagattctgactaataaacaaaagcagatagaagtggctgaaaaggaaatgaattctgagctttctcttagtcataagaaagaagaagatctcttgcgtgaaaacagcatgttgcgggaagaaattgccaagctaagactggaactagatgaaacaaaacatcagaaccagctaagggaaaataaaattttggaggaaattgaaagtgtaaaagaaaaacttctaaagactatacaactgaatgaagaagcattaacgaaaaccagtatttaagtacagtggacagcttagg

SEQ ID NO: 168366 - DNA, 1706 bp, Homo sapiens
  Payload ID: 13136
  Gene Symbol: POTEB
  Gene Name: POTE ankyrin domain family, member B
  ENST ID: ENST00000439682
  CDS Start-End: 53-1687
ggtagacgcgatctgttcgctactaccggcctcccctggctgttaaaagcagatggtggctgaggtttgttcaatgcccgctgcctctgctgtgaagaagccatttgatctcaggagcaagatgggcaagtggtgccaccaccgcttcccctgctgcagggggagcggcacgagcaatgtgggcacttctggagaccatgacgactcctttatgaagacactcaggagcaagatgggcaagtggtgctgtcactgcttcccctgctgcagggggagcggcaagagcaacgtgggcacttggggagactacgacgacagcgccttcatggagccgaggtaccacgtccgtcgagaagatctggacaagctccacagagctgcctggtggggtaaagtccccagaaaggatctcatcgtcatgctcagggacactgacatgaacaagagggacaagcaaaagaggactgctctacatttggcctctgccaatggaaattcagaagtagtacaactcctgctggacagacgatgtcaacttaacgtccttgacaacaaaaaaaggacagctctgataaaggccgtacaatgccaggaagatgaatgtgtgttaatgttgctggaacatggcgctgatggaaatattcaagatgagtatggaaataccgctctacactatgctatctacaatgaagataaattaatggccaaagcactgctcttatatggtgctgatattgaatcaaaaaacaagtgtggcctcacaccacttttgcttggcgtacatgaacaaaaacaggaagtggtgaaatttttaatcaagaaaaaagctaatttaaatgcacttgatagatatggaagaactgccctcatacttgctgtatgttgtggatcagcaagtatagtcaatcttctacttgagcaaaatgttgatgtatcttctcaagatctatctggacagacagccagagagtatgctgtttctagtcatcatcatgtaatttgtgaattactttctgactataaagaaaaacagatgctaaaaatctcttctgaaaacagcaatccagaacaagacttaaagctgacatcagaggaagagtcacaaaggcttaaagtcagtgaaaatagccagccagagaaaatgtctcaagaaccagaaataaataaggactgtgatagagaggttgaagaagaaataaagaagcatggaagtaatcctgtgggattaccagaaaacctgactaatggtgccagtgctggcaatggtgatgatggattaattccacaaaggaagagcagaaaacctgaaaatcagcaatttcctgacactgagaatgaagagtatcacagtgacgaacaaaatgatacccagaaacaactttctgaagaacagaacactggaatatcacaagatgagattctgactaataaacaaaagcagatagaagtggctgaaaaggaaatgaattctgagctttctcttagtcataagaaagaagaagatctcttgcgtgaaaacagcatgttgcgggaagaaattgccaagctaagactggaactagatgaaacaaaacatcagaaccagctaagggaaaataaaattttggaggaaattgaaagtgtaaaagaaaaacttctaaagactatacaactgaatgaagaagcattaacgaaaaccagtatttaagtacagtggacagcttagg

SEQ ID NO: 168367 - DNA, 1478 bp, Homo sapiens; identical to SEQ ID NO: 168365
  Payload ID: 13137
  Gene Symbol: POTEB2
  Gene Name: POTE ankyrin domain family, member B2
  ENST ID: ENST00000438063
  CDS Start-End: 34-939

SEQ ID NO: 168368 - DNA, 1687 bp, Homo sapiens
  Payload ID: 13137
  Gene Symbol: POTEB2
  Gene Name: POTE ankyrin domain family, member B2
  Uniprot ID: H3BUK9
  ENST ID: ENST00000454856
  CDS Start-End: 34-1668
ctactaccggcctcccctggctgttaaaagcagatggtggctgaggtttgttcaatgcccgctgcctctgctgtgaagaagccatttgatctcaggagcaagatgggcaagtggtgccaccaccgcttcccctgctgcagggggagcggcacgagcaatgtgggcacttctggagaccatgacgactcctttatgaagacactcaggagcaagatgggcaagtggtgctgtcactgcttcccctgctgcagggggagcggcaagagcaacgtgggcacttggggagactacgacgacagcgccttcatggagccgaggtaccacgtccgtcgagaagatctggacaagctccacagagctgcctggtggggtaaagtccccagaaaggatctcatcgtcatgctcagggacactgacatgaacaagagggacaagcaaaagaggactgctctacatttggcctctgccaatggaaattcagaagtagtacaactcctgctggacagacgatgtcaacttaacgtccttgacaacaaaaaaaggacagctctgataaaggccgtacaatgccaggaagatgaatgtgtgttaatgttgctggaacatggcgctgatggaaatattcaagatgagtatggaaataccgctctacactatgctatctacaatgaagataaattaatggccaaagcactgctcttatatggtgctgatattgaatcaaaaaacaagtgtggcctcacaccacttttgcttggcgtacatgaacaaaaacaggaagtggtgaaatttttaatcaagaaaaaagctaatttaaatgcacttgatagatatggaagaactgccctcatacttgctgtatgttgtggatcagcaagtatagtcaatcttctacttgagcaaaatgttgatgtatcttctcaagatctatctggacagacagccagagagtatgctgtttctagtcatcatcatgtaatttgtgaattactttctgactataaagaaaaacagatgctaaaaatctcttctgaaaacagcaatccagaacaagacttaaagctgacatcagaggaagagtcacaaaggcttaaagtcagtgaaaatagccagccagagaaaatgtctcaagaaccagaaataaataaggactgtgatagagaggttgaagaagaaataaagaagcatggaagtaatcctgtgggattaccagaaaacctgactaatggtgccagtgctggcaatggtgatgatggattaattccacaaaggaagagcagaaaacctgaaaatcagcaatttcctgacactgagaatgaagagtatcacagtgacgaacaaaatgatacccagaaacaactttctgaagaacagaacactggaatatcacaagatgagattctgactaataaacaaaagcagatagaagtggctgaaaaggaaatgaattctgagctttctcttagtcataagaaagaagaagatctcttgcgtgaaaacagcatgttgcgggaagaaattgccaagctaagactggaactagatgaaacaaaacatcagaaccagctaagggaaaataaaattttggaggaaattgaaagtgtaaaagaaaaacttctaaagactatacaactgaatgaagaagcattaacgaaaaccagtatttaagtacagtggacagcttagg

SEQ ID NO: 168369 - DNA, 1820 bp, Homo sapiens
  Payload ID: 13138
  Gene Symbol: POTEB3
  Gene Name: POTE ankyrin domain family, member B3
  ENST ID: ENST00000615774
  CDS Start-End: 49-1794
gacgcgatctgttcgctactaccggcctcccctggctgttaaaagcagatggtggctgaggtttgttcaatgcccgctgcctctgctgtgaagaagccatttgatctcagaagcaagatgggcaagtggtgccaccaccgcttcccctgctgcagggggagcggcaagagcaacatgggcacttctggagaccacgacgactcctttatgaagacgctcaggagcaagatgggcaagtgttgccatcactgcttcccctgctgcagggggagcggcacgagcaatgtgggcacttctggagaccatgacaactcctttatgaagacactcaggagcaagatgggcaagtggtgctgtcactgcttcccctgctgcagggggagcggcaagagcaacgtgggcacttggggagactacgacgacagcgccttcatggagccgaggtaccacgtccgtcgagaagatctggacaagctccacagagctgcctggtggggtaaagtccccagaaaggatctcatcgtcatgctcagggacactgacatgaacaagagggacaagcaaaagaggactgctctacatttggcctctgccaatggaaattcagaagtagtacaactcctgctggacagacgatgtcaacttaacgtccttgacaacaaaaaaaggacagctctgataaaggccgtacaatgccaggaagatgaatgtgtgttaatgttgctggaacatggcgctgatggaaatattcaagatgagtatggaaataccgctctacactatgctatctacaatgaagataaattaatggccaaagcactgctcttatatggtgctgatattgaatcaaaaaacaagtgtggcctcacaccacttttgcttggcgtacatgaacaaaaacaggaagtggtgaaatttttaatcaagaaaaaagctaatttaaatgcacttgatagatatggaagaactgccctcatacttgctgtatgttgtggatcagcaagtatagtcaatcttctacttgagcaaaatgttgatgtatcttctcaagatctatctggacagacggccagagagtatgctgtttctagtcatcatcatgtaatttgtgaattactttctgactataaagaaaaacagatgctaaaaatctcttctgaaaacagcaatccagaacaagacttaaagctgacatcagaggaagagtcacaaaggcttaaagtcagtgaaaatagccagccagagaaaatgtctcaagaaccagaaataaataaggactgtgatagagaggttgaagaagaaataaagaagcatggaagtaatcctgtgggattaccagaaaacctgactaatggtgccagtgctggcaatggtgatgatggattaattccacaaaggaagagcagaaaacctgaaaatcagcaatttcctgacactgagaatgaagagtatcacagtgacgaacaaaatgatacccagaaacaactttctgaagaacagaacactggaatatcacaagatgagattctgactaataaacaaaagcagatagaagtggctgaaaaggaaatgaattctgagctttctcttagtcataagaaagaagaagatctcttgcgtgaaaacagcatgttgcgggaagaaattgccatgctaagactggaactagatgaaacaaaacatcagaaccagctaagggaaaataaaattttggaggaaattgaaagtgtaaaagaaaaacttctaaaggctatacaactgaatgaagaagcattaacgaaaaccagtatttaagtacagtggacagcttaggattttga

SEQ ID NO: 168370 - DNA, 1813 bp, Homo sapiens
  Payload ID: 13138
  Gene Symbol: POTEB3
  Gene Name: POTE ankyrin domain family, member B3
  Uniprot ID: A0JP26
  ENST ID: ENST00000611217
  CDS Start-End: 49-1794
gacgcgatctgttcgctactaccggcctcccctggctgttaaaagcagatggtggctgaggtttgttcaatgcccgctgcctctgctgtgaagaagccatttgatctcaggagcaagatgggcaagtggtgccaccaccgcttcccctgctgcagggggagcggcaagagcaacatgggcacttctggagaccacgacgactcctttatgaagacgctcaggagcaagatgggcaagtgttgccaccactgcttcccctgctgcagggggagcggcacgagcaatgtgggcacttctggagaccatgacaactcctttatgaagacactcaggagcaagatgggcaagtggtgctgtcactgcttcccctgctgcagggggagcggcaagagcaacgtgggcacttggggagactacgacgacagcgccttcatggagccgaggtaccacgtccgtcgagaagatctggacaagctccacagagctgcctggtggggtaaagtccccagaaaggatctcatcgtcatgctcagggacactgacatgaacaagagggacaagcaaaagaggactgctctacatttggcctctgccaatggaaattcagaagtagtacaactcctgctggacagacgatgtcaacttaacgtccttgacaacaaaaaaaggacagctctgataaaggccgtacaatgccaggaagatgaatgtgtgttaatgttgctggaacatggcgctgatggaaatattcaagatgagtatggaaataccgctctacactatgctatctacaatgaagataaattaatggccaaagcactgctcttatatggtgctgatattgaatcaaaaaacaagtgtggcctcacaccacttttgcttggcgtacatgaacaaaaacagcaagtggtgaaatttttaatcaagaaaaaagctaatttaaatgcacttgatagatatggaagaactgccctcatacttgctgtatgttgtggatcagcaagtatagtcaatcttctacttgagcaaaatgttgatgtatcttctcaagatctatctggacagacggccagagagtatgctgtttctagtcatcatcatgtaatttgtgaattactttctgactataaagaaaaacagatgctaaaaatctcttctgaaaacagcaatccagaacaagacttaaagctgacatcagaggaagagtcacaaaggcttaaagtcagtgaaaatagccagccagagaaaatgtctcaagaaccagaaataaataaggactgtgatagagaggttgaagaagaaataaagaagcatggaagtaatcctgtgggattaccagaaaacctgactaatggtgccagtgctggcaatggtgatgatggattaattccacaaaggaagagcagaaaacctgaaaatcagcaatttcctgacactgagaatgaagagtatcacagtgacgaacaaaatgatacccagaaacaactttctgaagaacagaacactggaatatcacaagatgagattctgactaataaacaaaagcagatagaagtggctgaaaaggaaatgaattctaagctttctcttagtcataagaaagaagaagatctcttgcgtgaaaacagcatgttgcgggaagaaattgccatgctaagactggaactagatgaaacaaaacatcagaaccagctaagggaaaataaaattttggaggaaattgaaagtgtaaaagaaaaacttctaaaggctatacaactgaatgaagaagcattaacgaaaaccagtatttaagtacagtggacagcttagg

SEQ ID NO: 168371 - DNA, 1989 bp, Homo sapiens
  Payload ID: 13138
  Gene Symbol: POTEB3
  Gene Name: POTE ankyrin domain family, member B3
  ENST ID: ENST00000612601
  CDS Start-End: 372-1517
agtagctttgcctggtgtttcttgcttggattggcgtttcctccctcgcattcctttgctggacttgaccttttctctgctgggtttggcattcccttgactgggctgggtgtttccttgggagggggggcttggcctttcctggggtgggcgtggggtccccctggtgggcgtgggctttccccgggtgggtgtgggttttccctgggtggggtgggctgggctcccttgctgggcttggcaagttttggctgggattgacctttctcttcaaacagattggaaacccagggtttcctgctagttggtgaaactggttggtagacgcgatctgttcgctactaccggcctcccctggctgttaaaagcagatggtggctgaggtttgttcaatgcccgctgcctctgctgtgaagaagccatttgatctcaggagcaagatgggcaagtggtgccaccaccgcttcccctgctgcagggggagcggcaagagcaacatgggcacttctggagaccacgacgactcctttatgaagacgctcaggagcaagatgggcaagtgttgccaccactgcttcccctgctgcagggggagcggcacgagcaatgtgggcacttctggagaccatgacaactcctttatgaagacactcaggagcaagatgggcaagtggtgctgtcactgcttcccctgctgcagggggagcggcaagagcaacgtgggcacttggggagactacgacgacagcgccttcatggagccgaggtaccacgtccgtcgagaagatctggacaagctccacagagctgcctggtggggtaaagtccccagaaaggatctcatcgtcatgctcagggacactgacatgaacaagagggacaagcaaaagaggactgctctacatttggcctctgccaatggaaattcagaagtagtacaactcctgctggacagacgatgtcaacttaacgtccttgacaacaaaaaaaggacagctctgataaaggccgtacaatgccaggaagatgaatgtgtgttaatgttgctggaacatggcgctgatggaaatattcaagatgagtatggaaataccgctctacactatgctatctacaatgaagataaattaatggccaaagcactgctcttatatggtgctgatattgaatcaaaaaacaagtgtggcctcacaccacttttgcttggcgtacatgaacaaaaacagcaagtggtgaaatttttaatcaagaaaaaagctaatttaaatgcacttgatagatatggaagaactgccctcatacttgctgtatgttgtggatcagcaagtatagtcaatcttctacttgagcaaaatgttgatgtatcttctcaagatctatctggacagacggccagagagtatgctgtttctagtcatcatcatgtaatttgtgaattactttctgactataaagaaaaacagatgctaaaaatctcttctgaaaacagcaatccaggtaaagaagcagaagaataatttttggcagaaggaacatgcaacaagtttgtgtgtttgccagaagaacatctgatgagattgcctgtttggcaggaagagcaacaactgcaaaagacaggatgccgagtgaactttgcagggtttctgagcagttcacttttgctagtaccaaaagtgtgagacaccagagtttgggaatgaggtgaatacttagctaagtgtgaaagccaccatgattatatgtaagcaaacaggcatgactgagctcctataaaactttatttacaaagccaaaaggcagattggatttgtcctgtggcctatagtttgctgggattgatggaagataaccatgtaaagaaaccaggagacaaaggaagcttttgcagtagtcatctatagtttccatgtcacacatccttggactagtatcaatgtattctaaggttttcacctgcccatggtgaaataaagtttggaatccccatta

SEQ ID NO: 168372 - DNA, 1989 bp, Homo sapiens
  Payload ID: 13138
  Gene Symbol: POTEB3
  Gene Name: POTE ankyrin domain family, member B3
  ENST ID: ENST00000617395
  CDS Start-End: 372-1517
agtagctttgcctggtgtttcttgcttggattggcgtttcctccctcgcattcctttgctggacttgaccttttctctgctgggtttggcattcccttgactgggctgggtgtttccttgggagggggggcttggcctttcctggggtgggcgtggggtccccctggtgggcgtgggctttccccgggtgggtgtgggttttccctgggtggggtgggctgggctcccttgctgggcttggcaagttttggctgggattgacctttctcttcaaacagattggaaacccagggtttcctgctagttggtgaaactggttggtagacgcgatctgttcgctactaccggcctcccctggctgttaaaagcagatggtggctgaggtttgttcaatgcccgctgcctctgctgtgaagaagccatttgatctcagaagcaagatgggcaagtggtgccaccaccgcttcccctgctgcagggggagcggcaagagcaacatgggcacttctggagaccacgacgactcctttatgaagacgctcaggagcaagatgggcaagtgttgccatcactgcttcccctgctgcagggggagcggcacgagcaatgtgggcacttctggagaccatgacaactcctttatgaagacactcaggagcaagatgggcaagtggtgctgtcactgcttcccctgctgcagggggagcggcaagagcaacgtgggcacttggggagactacgacgacagcgccttcatggagccgaggtaccacgtccgtcgagaagatctggacaagctccacagagctgcctggtggggtaaagtccccagaaaggatctcatcgtcatgctcagggacactgacatgaacaagagggacaagcaaaagaggactgctctacatttggcctctgccaatggaaattcagaagtagtacaactcctgctggacagacgatgtcaacttaacgtccttgacaacaaaaaaaggacagctctgataaaggccgtacaatgccaggaagatgaatgtgtgttaatgttgctggaacatggcgctgatggaaatattcaagatgagtatggaaataccgctctacactatgctatctacaatgaagataaattaatggccaaagcactgctcttatatggtgctgatattgaatcaaaaaacaagtgtggcctcacaccacttttgcttggcgtacatgaacaaaaacaggaagtggtgaaatttttaatcaagaaaaaagctaatttaaatgcacttgatagatatggaagaactgccctcatacttgctgtatgttgtggatcagcaagtatagtcaatcttctacttgagcaaaatgttgatgtatcttctcaagatctatctggacagacggccagagagtatgctgtttctagtcatcatcatgtaatttgtgaattactttctgactataaagaaaaacagatgctaaaaatctcttctgaaaacagcaatccaggtaaagaagcagaagaataatttttggcaggaggaacatgcaacaagtttgtgtgtttgccagaagaacatctgatgagattgcctgtttggcaggaagagcaacaactgcaaaagacaagatgccgagtgaactttgcagggtttctgagcagttcacttttgctagtaccaaaagtgtgagacaccagagtttgggaatgaggtgaatacttagctaagtgtgaaagccaccatgattatatgtaagcaaacaggcatgactgagctcctataaaactttatttacaaagccaaaaggcagattggatttgtcctgtggcctatagtttgctgggattgatggaagataaccatgtaaagaaaccaggagacaaaggaagcttttgcagtagtcagctatagtttccatgtcacacatccttggactagtatcaatgtattctaaggttttcacctgcccatggtgaaataaagtttggaatctccgtta

SEQ ID NO: 168373 - DNA, 2855 bp, Homo sapiens
  Payload ID: 13138
  Gene Symbol: POTEB3
  Gene Name: POTE ankyrin domain family, member B3
  ENST ID: ENST00000624267
  CDS Start-End: 441-1595
acctgtaacgggtacacttcgcttcgcgttcctcgcttggccttgcgttcctagcttggcttggctgttagtagctttgcctggtgtttcttgcttggattggcgtttcctccctcgcattcctttgctggacttgaccttttctctgctgggtttggcattcccttgactgggctgggtgtttccttgggagggggggcttggcctttcctggggtgggcgtggggtccccctggtgggcgtgggctttccccgggtgggtgtgggttttccctgggtggggtgggctgggctcccttgctgggcttggcaagttttggctgggattgacctttctcttcaaacagattggaaacccagggtttcctgctagttggtgaaactggttggtagacgcgatctgttcgctactaccggcctcccctggctgttaaaagcagatggtggctgaggtttgttcaatgcccgctgcctctgctgtgaagaagccatttgatctcaggagcaagatgggcaagtggtgccaccaccgcttcccctgctgcagggggagcggcaagagcaacatgggcacttctggagaccacgacgactcctttatgaagacgctcaggagcaagatgggcaagtgttgccaccactgcttcccctgctgcagggggagcggcacgagcaatgtgggcacttctggagaccatgacaactcctttatgaagacactcaggagcaagatgggcaagtggtgctgtcactgcttcccctgctgcagggggagcggcaagagcaacgtgggcacttggggagactacgacgacagcgccttcatggagccgaggtaccacgtccgtcgagaagatctggacaagctccacagagctgcctggtggggtaaagtccccagaaaggatctcatcgtcatgctcagggacactgacatgaacaagagggacaagcaaaagaggactgctctacatttggcctctgccaatggaaattcagaagtagtacaactcctgctggacagacgatgtcaacttaacgtccttgacaacaaaaaaaggacagctctgataaaggccgtacaatgccaggaagatgaatgtgtgttaatgttgctggaacatggcgctgatggaaatattcaagatgagtatggaaataccgctctacactatgctatctacaatgaagataaattaatggccaaagcactgctcttatatggtgctgatattgaatcaaaaaacaagtgtggcctcacaccacttttgcttggcgtacatgaacaaaaacagcaagtggtgaaatttttaatcaagaaaaaagctaatttaaatgcacttgatagatatggaagaactgccctcatacttgctgtatgttgtggatcagcaagtatagtcaatcttctacttgagcaaaatgttgatgtatcttctcaagatctatctggacagacggccagagagtatgctgtttctagtcatcatcatgtaatttgtgaattactttctgactataaagaaaaacagatgctaaaaatctcttctgaaaacagcaatccagaaaatgtctcaagaaccagaaataaataaggactgtgatagagaggttgaagaagaaataaagaagcatggaagtaatcctgtgggattaccagaaaacctgactaatggtgccagtgctggcaatggtgatgatggattaattccacaaaggaagagcagaaaacctgaaaatcagcaatttcctgacactgagaatgaagagtatcacagtgacgaacaaaatgatacccagaaacaactttctgaagaacagaacactggaatatcacaagatgagattctgactaataaacaaaagcagatagaagtggctgaaaaggaaatgaattctaagctttctcttagtcataagaaagaagaagatctcttgcgtgaaaacagcatgttgcgggaagaaattgccatgctaagactggaactagatgaaacaaaacatcagaaccagctaagggaaaataaaattttggaggaaattgaaagtgtaaaagaaaaacttctaaaggctatacaactgaatgaagaagcattaacgaaaaccagtatttaagtacagtggacagcttaggattttgacaactgagaatgctcagttctgaactggagaatgtaagacacagctaggaaacactggaaatggaaattcaatcatgtcattgtagactgactactgctctacatgattgtgatcaaagtcagatagctgaaagggacttctttccagagaacaaacatcaacaggtttatttacaggagaaaatgaattcttatatatctcacctaaaagataacagtgagattctttctgaacaactctaacgctgacagtaaaattaacaacctaaaaattaagctccatcacacaggataaattctgagagaaaagatgaggcaggccaccatctttcctgtttgggcaacttagtcattccagcgtgcgggctttggagagtacaaactcaccagggacagaagagatcctgtggcatagcacagctgctttaccaaatcatggccagaatgcttctgtaagcaggcccctgatcctgttcctcgtcactggacaggatctcccacctgaggcctccagctacacccaccagtgttccctggccaatggagatttgaaaccttcctgggacagagttcccagagagaggggtgggccatgatgggcaggtcttcctggcctgggtctccagccagccccccacttgagccttcaagccagtagcaactcagcaactccctggacagagcttccaggagcaacagaaatcctctctgcca

SEQ ID NO: 168374 - DNA, 2855 bp, Homo sapiens
  Payload ID: 13138
  Gene Symbol: POTEB3
  Gene Name: POTE ankyrin domain family, member B3
  ENST ID: ENST00000630023
  CDS Start-End: 441-1595
acctgtaacgggtacgcttcgcttggcgttcctcccttggccttgcgttcctagcttggcttggctgttagtagctttgcctggtgtttcttgcttggattggcgtttcctccctcgcattcctttgctggacttgaccttttctctgctgggtttggcattcccttgactgggctgggtgtttccttgggagggggggcttggcctttcctggggtgggcgtggggtccccctggtgggcgtgggctttccccgggtgggtgtgggttttccctgggtggggtgggctgggctcccttgctgggcttggcaagttttggctgggattgacctttctcttcaaacagattggaaacccagggtttcctgctagttggtgaaactggttggtagacgcgatctgttcgctactaccggcctcccctggctgttaaaagcagatggtggctgaggtttgttcaatgcccgctgcctctgctgtgaagaagccatttgatctcagaagcaagatgggcaagtggtgccaccaccgcttcccctgctgcagggggagcggcaagagcaacatgggcacttctggagaccacgacgactcctttatgaagacgctcaggagcaagatgggcaagtgttgccatcactgcttcccctgctgcagggggagcggcacgagcaatgtgggcacttctggagaccatgacaactcctttatgaagacactcaggagcaagatgggcaagtggtgctgtcactgcttcccctgctgcagggggagcggcaagagcaacgtgggcacttggggagactacgacgacagcgccttcatggagccgaggtaccacgtccgtcgagaagatctggacaagctccacagagctgcctggtggggtaaagtccccagaaaggatctcatcgtcatgctcagggacactgacatgaacaagagggacaagcaaaagaggactgctctacatttggcctctgccaatggaaattcagaagtagtacaactcctgctggacagacgatgtcaacttaacgtccttgacaacaaaaaaaggacagctctgataaaggccgtacaatgccaggaagatgaatgtgtgttaatgttgctggaacatggcgctgatggaaatattcaagatgagtatggaaataccgctctacactatgctatctacaatgaagataaattaatggccaaagcactgctcttatatggtgctgatattgaatcaaaaaacaagtgtggcctcacaccacttttgcttggcgtacatgaacaaaaacaggaagtggtgaaatttttaatcaagaaaaaagctaatttaaatgcacttgatagatatggaagaactgccctcatacttgctgtatgttgtggatcagcaagtatagtcaatcttctacttgagcaaaatgttgatgtatcttctcaagatctatctggacagacggccagagagtatgctgtttctagtcatcatcatgtaatttgtgaattactttctgactataaagaaaaacagatgctaaaaatctcttctgaaaacagcaatccagaaaatgtctcaagaaccagaaataaataaggactgtgatagagaggttgaagaagaaataaagaagcatggaagtaatcctgtgggattaccagaaaacctgactaatggtgccagtgctggcaatggtgatgatggattaattccacaaaggaagagcagaaaacctgaaaatcagcaatttcctgacactgagaatgaagagtatcacagtgacgaacaaaatgatacccagaaacaactttctgaagaacagaacactggaatatcacaagatgagattctgactaataaacaaaagcagatagaagtggctgaaaaggaaatgaattctgagctttctcttagtcataagaaagaagaagatctcttgcgtgaaaacagcatgttgcgggaagaaattgccatgctaagactggaactagatgaaacaaaacatcagaaccagctaagggaaaataaaattttggaggaaattgaaagtgtaaaagaaaaacttctaaaggctatacaactgaatgaagaagcattaacgaaaaccagtatttaagtacagtggacagcttaggattttgacaactgagaatgctcagttctgaactggagaatgtaagacacagctaggaaacactggaaatggaaattcaatcatgtcattgtagactgactactgctctacatgattgtgatcaaagtcagatagctgaaagggacttctttccagagagcaaacatcaacaggtttatttacaggagaaaatgaattcttatatatctcacctaaaagataacagtgagattctttctgaacaactctaacgctgacagtaaaattaacaacctaaaaattaagctccatcacacaggataaattctgagagaaaagatgaggcaggccaccatctttcctgtttgggcaacttagtcattccagcgtgcgggctttggagagtacaaactcaccagggacagaagagatcctgtggcatagcacagctgctttaccaaatcatggccagaatgcttctgtaagcaggcccctgatcctgttcctcatcactggacaggatctcccacctgaggcctccagctacacccaccagtgttccctggccaatggagatttgaaaccttcctgggacagagttcccagagagaggggtgggccatgatgggcaggtcttcctggcctgggtctccagccagccccccacttgagccttcaagccagtagcaactcagcaactccctggacagagcttccaggagcaacagaaatcctctctgcca

SEQ ID NO: 168375 - DNA, 1338 bp, Homo sapiens
  Payload ID: 13138
  Gene Symbol: POTEB3
  Gene Name: POTE ankyrin domain family, member B3
  ENST ID: ENST00000631051
  CDS Start-End: 1-799
ggggagcggcacgagcaatgtgggcacttctggagaccatgacaactcctttatgaagacactcaggagcaagatgggcaagtggtgctgtcactgcttcccctgctgcagggggagcggcaagagcaacgtgggcacttggggagactacgacgacagcgccttcatggagccgaggtaccacgtccgtcgagaagatctggacaagctccacagagctgcctggtggggtaaagtccccagaaaggatctcatcgtcatgctcagggacactgacatgaacaagagggacaagcaaaagaggactgctctacatttggcctctgccaatggaaattcagaagtagtacaactcctgctggacagacgatgtcaacttaacgtccttgacaacaaaaaaaggacagctctgataaaggccgtacaatgccaggaagatgaatgtgtgttaatgttgctggaacatggcgctgatggaaatattcaagatgagtatggaaataccgctctacactatgctatctacaatgaagataaattaatggccaaagcactgctcttatatggtgctgatattgaatcaaaaaacaagtgtggcctcacaccacttttgcttggcgtacatgaacaaaaacaggaagtggtgaaatttttaatcaagaaaaaagctaatttaaatgcacttgatagatatggaagaatttgtgaattactttctgactataaagaaaaacagatgctaaaaatctcttctgaaaacagcaatccagaaaatgtctcaagaaccagaaataaataaggactgtgatagagaggttgaagaagaaataaagaagcatggaagtaatcctgtgggattaccagaaaacctgactaatggtgccagtgctggcaatggtgatgatggattaattccacaaaggaagagcagaaaacctgaaaatcagcaatttcctgacactgagaatgaagagtatcacagtgacgaacaaaatgatacccagaaacaactttctgaagaacagaacactggaatatcacaagatgagattctgactaataaacaaaagcagatagaagtggctgaaaaggaaatgaattctgagctttctcttagtcataagaaagaagaagatctcttgcgtgaaaacagcatgttgcgggaagaaattgccatgctaagactggaactagatgaaacaaaacatcagaaccagctaagggaaaataaaattttggaggaaattgaaagtgtaaaagaaaaacttctaaaggctatacaactgaatgaagaagcattaacgaaaaccagtatttaagtacagtggacagcttagg

SEQ ID NO: 168376 - DNA, 1629 bp, Homo sapiens
  Payload ID: 13139
  Gene Symbol: POTEC
  Gene Name: POTE ankyrin domain family, member C
  Uniprot ID: B2RU33
  ENST ID: ENST00000358970
  CDS Start-End: 1-1629
atggtgactgaggtttgttcaatgcccgctgcctctgctgtgaagaagccattcgatctcaggagcaagatgggcaagtggtttcaccaccgcttcccctgctgcaaggggagcggcaagagcaacatgggcacttctggagaccacgacgactcctttatgaagatgctcaggagcaagatgggcaagtgttgccaccactgcttcccctgctgcagggggagcggcacgagcaacgtgggcacttctggagaccatgacaactcctttatgaagacgctcaggagcaagatgggcaagtggtgctgtcactgcttcccctgctgcagggggagcggcaagagcaacgtgggcgcttggggagactacgacgacagcgccttcatggagccgaggtaccacgtccgtcgagaagatctggacaagctccacagagctgcctggtggggtaaggtccccagaaaggatctcatcgtcatgctcagggacacggacatgaacaagagggacaagcaaaagaggactgctctacatttggcctctgccaatggaaattcagaagtagtacaactcctgctggacagacgatgtcaacttaatgtccttgacaacaaaaaaaggacagctctgataaaggccgtacaatgccaggaagatgaatgtgtgttaatgttgctggaacatggcgctgatcaaaatattccagatgagtatggaaataccactctacactatgctgtccacaatgaagataaattaatggccaaagcactgctcttatatggtgctgatattgaatcaaaaaacaagtgtggcctcacaccacttttgcttggcgtacatgaacaaaaacagcaagtggtgaaatttttaatcaagaaaaaagctaatttaaatgcacttgatagatatggaagaactgccctcatacttgctgtatgttgtggatcagcaagtatagtcaatcttctccttgagcaaaatgttgatgtatcttctcaagatctatctggacagacggccagagagtatgctgtttctagtcatcatcatgtaatttgtgaattactttctgactataaagaaaaacagatgctaaaaatctcttctgaaaacagcaatccagaacaagacttaaagctaacatcagaggaagagtcacaaaggcttaaagtcagtgaaaatagccagccagagaaaatgtctcaagaaccagaaataaataaggactgtgatagagaggttgaagaagaaataaagaagcatggaagtaatcctgtgggattaccagaaaacctgactaatggtgccagtgctggcaatggtgatgatggattaattccacaaaggaggagcagaaaacctgaaaatcagcaatttcctgacactgagaatgaagagtatcacagtgacgaacaaaatgatacccggaaacaactttctgaagaacagaacactggaatatcacaagatgagattctgactaataaacaaaagcagatagaagtggctgaaaagaaaatgaattctgagctttctcttagtcataagaaagaagaagatctcttgcgtgaaaacagcatgttgcaggaagaaattgccatgctaatttctggagactggaactag

SEQ ID NO: 168377 - DNA, 6556 bp, Homo sapiens
  Payload ID: 13139
  Gene Symbol: POTEC
  Gene Name: POTE ankyrin domain family, member C
  ENST ID: ENST00000511306
  CDS Start-End: 440-1594
acctgtaacgggtacgcttcgctttgcgttcctcgcttggccttgcgttcctagcttggcttggcgttagtcgctttgcctggtgtttcttgcttggattggcgtttcctccctcgcattcctttgctgggcttgactttttctctgctgggtttggcattcccttgactgggctgggtgtttccttgggagggggggcttggcctttcctggggtgggcgttgggtccccctggtgggcgtgggctttccccgggtgggtgtgggttttccctgggtggggtggactgggctcccttgctggggttggcaagttttggctgggattgacctttctcttcaaacagattggaaacccagggtttcctgctagttggtgaaactggttggtagacgcgatctgttcgctactaccggcctccccgggctgttaaaagcagatggtgactgaggtttgttcaatgcccgctgcctctgctgtgaagaagccattcgatctcaggagcaagatgggcaagtggtttcaccaccgcttcccctgctgcaaggggagcggcaagagcaacatgggcacttctggagaccacgacgactcctttatgaagatgctcaggagcaagatgggcaagtgttgccaccactgcttcccctgctgcagggggagcggcacgagcaacgtgggcacttctggagaccatgacaactcctttatgaagacgctcaggagcaagatgggcaagtggtgctgtcactgcttcccctgctgcagggggagcggcaagagcaacgtgggcgcttggggagactacgacgacagcgccttcatggagccgaggtaccacgtccgtcgagaagatctggacaagctccacagagctgcctggtggggtaaggtccccagaaaggatctcatcgtcatgctcagggacacggacatgaacaagagggacaagcaaaagaggactgctctacatttggcctctgccaatggaaattcagaagtagtacaactcctgctggacagacgatgtcaacttaatgtccttgacaacaaaaaaaggacagctctgataaaggccgtacaatgccaggaagatgaatgtgtgttaatgttgctggaacatggcgctgatcaaaatattccagatgagtatggaaataccactctacactatgctgtccacaatgaagataaattaatggccaaagcactgctcttatatggtgctgatattgaatcaaaaaacaagtgtggcctcacaccacttttgcttggcgtacatgaacaaaaacagcaagtggtgaaatttttaatcaagaaaaaagctaatttaaatgcacttgatagatatggaagaactgccctcatacttgctgtatgttgtggatcagcaagtatagtcaatcttctccttgagcaaaatgttgatgtatcttctcaagatctatctggacagacggccagagagtatgctgtttctagtcatcatcatgtaatttgtgaattactttctgactataaagaaaaacagatgctaaaaatctcttctgaaaacagcaatccagaaaatgtctcaagaaccagaaataaataaggactgtgatagagaggttgaagaagaaataaagaagcatggaagtaatcctgtgggattaccagaaaacctgactaatggtgccagtgctggcaatggtgatgatggattaattccacaaaggaggagcagaaaacctgaaaatcagcaatttcctgacactgagaatgaagagtatcacagtgacgaacaaaatgatacccggaaacaactttctgaagaacagaacactggaatatcacaagatgagattctgactaataaacaaaagcagatagaagtggctgaaaagaaaatgaattctgagctttctcttagtcataagaaagaagaagatctcttgcgtgaaaacagcatgttgcaggaagaaattgccatgctaatttctggagactggaactagatgaaacaaaacatcagaaccagctaagggaaaataaaattttggaggaaattgaaagtgtgaaagaaaagactgataaacttctaagggctatgcaattgaatgaagaagcattaacgaaaaccaatatttaagtacagtggacagcttaggattttgacaactgagaatgctcagttctgaactggagaatgtaagacacagctaggaaacactggaaatggaaattcaatcatgtcattgtagactgactactgctctacatgattgtgatcaaagtcagatagctgaaagggacttctttccagagaacaaacatgaacaggtttatttacaggagaaaatgaattctcatatatctcacctaaaagataacagtgagattctttctgaacaactctaacgctgacagtaaaattaacaacctaaaaattaagctccatcacacaggataaattctgagagaaaagatgaggcaggccaccatctttcctgtttgggcaacttagcgattccagcgtgcgggctttggagagtacaaacccaccaggggcagaagagatcctgtggcatagcacagctgctttaccaaatcatgtccagaatgcttctgtaagcaggcctctgatcctgttcctcgtcactggacaggatctcccacctgaggcctccagctacacccaccagtgttccctggccaatggagatttgaaaccttcctgggacagagttcccagagagaggggtgggccatgacctttgttgtttgggcaactagcccttctggcctgtgggctttggagagcccaagctgaccaggggtggaagtggtacctcagcacagaacagccaccctgcgaaaacgtggccagattcttgtttaagccagtccccaaccacatttctaatcactgggtggagcctttcaaccagggtctccagccaccttcactgctgttctctggctcacagaggtttcaggcctcctgagtcagagctcccagggggaggaccagactgtcatctttgctgtttggatgactcagccagttcagtcttagagtttcagagtgtctgaggagaccaggggctgaagtgaaccccccacacagcatagccactctacaaaaacgtggccagacttcttttttaaacaagtccctattcctgttcctccttactaggcaagacttctcaacttgcttccagtcacatcctacaggtgtgttgagattggcaacaggttcatacctcagaggtacagagctcccagagggaagggcaggctatcgtctttgctttttctcaggcttcactgctgataccttcagccactggaaaatacgaggcaattggcgactggagtggacccccagcataccacggcagccccacagaaaagtggccagactgttatgtgggtgcccatttccatatctcctcgatgggcaggtcttcctggcctgggtctccagccagccccccacttgagctttcaagccagtagcaactcagcaactccctggacagagcttccaggagcaacagaaatcctctctgccactgcctctgcagtggaactgcccttgctaccctcagaatatcaagggagcaaagaccctaagtgccatattgacacctccaacaagctgcagttgacacaaggaacaagtcagtccatcttccacaggtacaacacaccccttactgctcatcaccagacaaggaaccgtggcttgggcccacaacacagaccctccatcctggggtgattacattaagtaactgctaacttacacctctctggggtggagcccccaggagacaaggaaagtagtggagcagcaagtcagctgatgtggagcctggagggcagggacagctatgtctctaggctccacttgctcttatgagacactttatcccagcactttaggagtgctgaggtcagaccagccccatctcacgtgcaagattgcccagcacagatcaggtctaagagttctcttcgtaaaaaaggggacttgcttaaaaaagaagtctggccacgtttgtgtagagcagttgtgctgtgctgaggattcacttttgagagagttctcctctgagacctgatctgtgctgggcagtcttgcacatgagatggggctggtctgacctcagcaccccttagtctgcttgcctctcccaggaccccagccaggccacacctgcttagagggcactttcgggtgcccacaccatagcttctgtacaagcggaccgtgcctgatcagtggagagctgcagcaaggtgacctctacagccacgcactagcctgcacattaccattccatactgcagccctttatatggaaacttcctacatcactttgctgtgtgtgtttacacaggtgggttttgttgtacttgccctaacagcatatgggaatgcagcacacaccccaacccacaccaactgccactgaagatgaagccatggtgggcacagaaccaaaaaccccacccctgctagcatctcacccttgaggtaatgctgtgcagaggaaaagggaccttcttataccctgagtgaccactgttgcttgggggggatcagagaaggcaccttcactggccagccacccaccccaaaccagcactacctccagtgcaacagcacacacagtcagcaggggcccgtggcccacaccccagctgttttgcctccaccactgggtgaatgcccacagggaggcagggacttttgcatctgctagcattctgccacagctgctgcactttggtcccctcagtgcagtggactccaaacctcgaggagccagaggacaaagttgtggcccaatacaagttccccagagttaaagcacacagtccaagaattgggagctgcatgttggccccttaaaatcctccaaaaacaaaacctgttggctgaatccaccttacaccacaatcaaatcctcaaggtcatcagatataataaaggaaaaataccctgtccaaaggtcagcaacctcaaagattgaagatggataagcccataaagatgagaaaaagactctgtgcaagaacactgaaaactcaaaaattcagcataccttcttttctccaaatgactgcatcaactctccagcaagtgttcagaactgggctgaggctgagatgtctgaaatgatacaagcagagttcaggatatgggtaggaacaaagttcattgagtgaaagaagtatgttgtaatccaatacaaggaagctaaaaatcattgtaaaacattgcaggaactaacagacaaaatagtgagtataaagaagaaaataactgacctgacagagctgtaaatcacactagaagaattttcataatgtagtcacatggtgattgtgtgtgattgcattatgaatattattgtagtatgtgtgggcacctgagagtgccctgtaagcaggtgtggccaggctggggtcctgggagaggcaagcagactagggagggctgaggtcagaccagctccatctcatgtgcaagaccatctaacagaatagaccaagaagaggaaagaatcccagagcttgaaaactggctttctgaaataaaacaggcaaacaagaatgggggaaaaaagaatgaaagggaatgaacaaaacatccgagaaatatgggattatataaacgaccaaatctatgactgattaatgtacctgaaagagatgaggagaatggaaccaacttggaaaacacatttcagaatatcattcatgagaatgtccccaacctagccagacaggccaacattcaacttcaggaaatccagagaacctcagtaagatatgccatgagaagatcatccccaagacacataatcatcagattctctgaggtcaaaataaaagaaaaaatgttaaaggcagctagggagaaaggcaacatcacctgcaaagggaattccatcagacttagcagacctctcaactgaaactgtacaagccagaaaagacattcaacatttcaaagaaaagaaatttcaacccagaatttcatgtccagcaaaattaagcatcataagtgaaggagaaacaagatcgttttcagacaagcaaatgctgagggaattcgttatcaccagacctaccttacaagagctcctgaaggaagcactaaatatggaaagaaaagaccaccaccagccactacaaaaacacactgaagtacacagacaagtgatgctaaaaaccaaccacatacataagtctgcaaaagagccagctgacagcatgatgacaggatcaaatccacacataccattactaaccttaaatggaaatgggctaaatgctccaattgaaagacacagggggcaagctggataaagaaccaagacccattggagtatgccgtcttcaagaaacccatctcacatgcagtgccatacataggctcaaaataaaggaatggagaaaaatatttcaaggaaatggaaaacagaaaaaagcaggtgttgcactcctagtttctgacaaaacagactataccaataaagatttaaaaaaaaaaaaa

SEQ ID NO: 168378 - DNA, 2147 bp, Homo sapiens
  Payload ID: 13139
  Gene Symbol: POTEC
  Gene Name: POTE ankyrin domain family, member C
  ENST ID: ENST00000618124
  CDS Start-End: 368-2128
gctttgcctggtgtttcttgcttggattggcgtttcctccctcgcattcctttgctgggcttgactttttctctgctgggtttggcattcccttgactgggctgggtgtttccttgggagggggggcttggcctttcctggggtgggcgttgggtccccctggtgggcgtgggctttccccgggtgggtgtgggttttccctgggtggggtggactgggctcccttgctggggttggcaagttttggctgggattgacctttctcttcaaacagattggaaacccagggtttcctgctagttggtgaaactggttggtagacgcgatctgttcgctactaccggcctccccgggctgttaaaagcagatggtgactgaggtttgttcaatgcccgctgcctctgctgtgaagaagccattcgatctcaggagcaagatgggcaagtggtttcaccaccgcttcccctgctgcaaggggagcggcaagagcaacatgggcacttctggagaccacgacgactcctttatgaagatgctcaggagcaagatgggcaagtgttgccaccactgcttcccctgctgcagggggagcggcacgagcaacgtgggcacttctggagaccatgacaactcctttatgaagacgctcaggagcaagatgggcaagtggtgctgtcactgcttcccctgctgcagggggagcggcaagagcaacgtgggcgcttggggagactacgacgacagcgccttcatggagccgaggtaccacgtccgtcgagaagatctggacaagctccacagagctgcctggtggggtaaggtccccagaaaggatctcatcgtcatgctcagggacacggacatgaacaagagggacaagcaaaagaggactgctctacatttggcctctgccaatggaaattcagaagtagtacaactcctgctggacagacgatgtcaacttaatgtccttgacaacaaaaaaaggacagctctgataaaggccgtacaatgccaggaagatgaatgtgtgttaatgttgctggaacatggcgctgatcaaaatattccagatgagtatggaaataccactctacactatgctgtccacaatgaagataaattaatggccaaagcactgctcttatatggtgctgatattgaatcaaaaaacaagtgtggcctcacaccacttttgcttggcgtacatgaacaaaaacagcaagtggtgaaatttttaatcaagaaaaaagctaatttaaatgcacttgatagatatggaagaactgccctcatacttgctgtatgttgtggatcagcaagtatagtcaatcttctccttgagcaaaatgttgatgtatcttctcaagatctatctggacagacggccagagagtatgctgtttctagtcatcatcatgtaatttgtgaattactttctgactataaagaaaaacagatgctaaaaatctcttctgaaaacagcaatccagaacaagacttaaagctaacatcagaggaagagtcacaaaggcttaaagtcagtgaaaatagccagccagagaaaatgtctcaagaaccagaaataaataaggactgtgatagagaggttgaagaagaaataaagaagcatggaagtaatcctgtgggattaccagaaaacctgactaatggtgccagtgctggcaatggtgatgatggattaattccacaaaggaggagcagaaaacctgaaaatcagcaatttcctgacactgagaatgaagagtatcacagtgacgaacaaaatgatacccggaaacaactttctgaagaacagaacactggaatatcacaagatgagattctgactaataaacaaaagcagatagaagtggctgaaaagaaaatgaattctgagctttctcttagtcataagaaagaagaagatctcttgcgtgaaaacagcatgttgcaggaagaaattgccatgctaattctggagctggaactagatgaaacaaaacatcagaaccagctaagggaaaataaaattttggaggaaattgaaagtgtgaaagaaaagactgataaacttctaagggctatgcaattgaatgaagaagcattaacgaaaaccaatatttaagtacagtggacagcttagg

SEQ ID NO: 168379 - DNA, 1988 bp, Homo sapiens
  Payload ID: 13139
  Gene Symbol: POTEC
  Gene Name: POTE ankyrin domain family, member C
  ENST ID: ENST00000620346
  CDS Start-End: 372-1517
agtcgctttgcctggtgtttcttgcttggattggcgtttcctccctcgcattcctttgctgggcttgactttttctctgctgggtttggcattcccttgactgggctgggtgtttccttgggagggggggcttggcctttcctggggtgggcgttgggtccccctggtgggcgtgggctttccccgggtgggtgtgggttttccctgggtggggtggactgggctcccttgctggggttggcaagttttggctgggattgacctttctcttcaaacagattggaaacccagggtttcctgctagttggtgaaactggttggtagacgcgatctgttcgctactaccggcctccccgggctgttaaaagcagatggtgactgaggtttgttcaatgcccgctgcctctgctgtgaagaagccattcgatctcaggagcaagatgggcaagtggtttcaccaccgcttcccctgctgcaaggggagcggcaagagcaacatgggcacttctggagaccacgacgactcctttatgaagatgctcaggagcaagatgggcaagtgttgccaccactgcttcccctgctgcagggggagcggcacgagcaacgtgggcacttctggagaccatgacaactcctttatgaagacgctcaggagcaagatgggcaagtggtgctgtcactgcttcccctgctgcagggggagcggcaagagcaacgtgggcgcttggggagactacgacgacagcgccttcatggagccgaggtaccacgtccgtcgagaagatctggacaagctccacagagctgcctggtggggtaaggtccccagaaaggatctcatcgtcatgctcagggacacggacatgaacaagagggacaagcaaaagaggactgctctacatttggcctctgccaatggaaattcagaagtagtacaactcctgctggacagacgatgtcaacttaatgtccttgacaacaaaaaaaggacagctctgataaaggccgtacaatgccaggaagatgaatgtgtgttaatgttgctggaacatggcgctgatcaaaatattccagatgagtatggaaataccactctacactatgctgtccacaatgaagataaattaatggccaaagcactgctcttatatggtgctgatattgaatcaaaaaacaagtgtggcctcacaccacttttgcttggcgtacatgaacaaaaacagcaagtggtgaaatttttaatcaagaaaaaagctaatttaaatgcacttgatagatatggaagaactgccctcatacttgctgtatgttgtggatcagcaagtatagtcaatcttctccttgagcaaaatgttgatgtatcttctcaagatctatctggacagacggccagagagtatgctgtttctagtcatcatcatgtaatttgtgaattactttctgactataaagaaaaacagatgctaaaaatctcttctgaaaacagcaatccaggtaaagaagcagaagaataatgtttggcagaaggaacatgcaacaagattgtgtgtttgccagaagaacatctaatgaggttgcctgtttggcaggaagagcagcaagtgcaaaacgcaagatgctgagtgaaccttgcagggtttctgagcagttcacttttgctagtaccaaaagtgtgagacaccagaggttgggaataaggtgaatacttagctaagtgtgaaagccaccatgattatatgtaagcaaacaggcatgactgagctcctataaaactttatttacaaagccaaaaggcagactggatttggcctgtggcctatagcttgctgggattgagggaagataaccatgtaaagaaaccaggagacaaaggaagcttttgcagtagtcagctatagtttccatgtcacacacccttggactagtatcaatgtattctaaggttttcacctgcccatggcaaaataaagtttggaatctcagtt

SEQ ID NO: 168380 - DNA, 1826 bp, Homo sapiens
  Payload ID: 13140
  Gene Symbol: POTED
  Gene Name: POTE ankyrin domain family, member D
  Uniprot ID: Q86YR6
  ENST ID: ENST00000299443
  CDS Start-End: 53-1807
ggtagacgcgatctgttcgctactaccggcctcccctggctgttaaaagcagatggtggctgaggtttgttcaatgcccactgcctctactgtgaagaagccatttgatctcaggagcaagatgggcaagtggtgccaccaccgcttcccctgctgcagggggagcggcaagagcaacatgggcacttctggagaccacgacgactcctttatgaagatgctcaggagcaagatgggcaagtgttgccgccactgcttcccctgctgcagggggagcggcacgagcaacgtgggcacttctggagaccatgaaaactcctttatgaagatgctcaggagcaagatgggcaagtggtgctgtcactgcttcccctgctgcagggggagcggcaagagcaacgtgggcgcttggggagactacgaccacagcgccttcatggagccgaggtaccacatccgtcgagaagatctggacaagctccacagagctgcctggtggggtaaagtccccagaaaggatctcatcgtcatgctcagggacactgacatgaacaagagggacaaggaaaagaggactgctctacatttggcctctgccaatggaaattcagaagtagtacaactcctgctggacagacgatgtcaacttaatgtccttgacaacaaaaaaaggacagctctgataaaggccatacaatgccaggaagatgaatgtgtgttaatgttgctggaacatggcgctgatcgaaatattccagatgagtatggaaataccgctctacactatgctatctacaatgaagataaattaatggccaaagcactgctcttatatggtgctgatattgaatcaaaaaacaagtgtggcctcacaccacttttgcttggcgtacatgaacaaaaacagcaagtggtgaaatttttaatcaagaaaaaagctaatttaaatgtacttgatagatatggaagaactgccctcatacttgctgtatgttgtggatcagcaagtatagtcaatcttctacttgagcaaaatgttgatgtatcttctcaagatctatctggacagacggccagagagtatgctgtttctagtcatcatcatgtaatttgtgaattactttctgactataaagaaaaacagatgctaaaaatctcttctgaaaacagcaatccagaacaagacttaaagctgacatcagaggaagagtcacaaaggcttaaagtcagtgaaaatagccagccagagaaaatgtctcaagaaccagaaataaataaggactgtgatagagaggttgaagaagaaataaagaagcatggaagtaatcctgtgggattaccagaaaacctgactaatggtgccagtgctggcaatggtgatgatggattaattccacaaaggaggagcagaaaacctgaaaatcagcaatttcctgacactgagaatgaagagtatcacagtgatgaacaaaatgatacccggaaacaactttctgaagaacagaacactggaatatcacaagatgagattctgactaataaacaaaagcagatagaagtggctgaacagaaaatgaattctgagctttctcttagtcataagaaagaagaagatctcttgcgtgaaaacagcgtgttgcaggaagaaattgccatgctaagactggaactagatgaaacaaaacatcagaaccagctaagggaaaataaaattttggaggaaattgaaagtgtgaaagaaaagactgataaacttctaagggctatgcaattgaatgaagaagcattaacgaaaaccaatatttaagtacagtggacagcttagg

SEQ ID NO: 168381 - DNA, 1988 bp, Homo sapiens
  Payload ID: 13140
  Gene Symbol: POTED
  Gene Name: POTE ankyrin domain family, member D
  ENST ID: ENST00000620442
  CDS Start-End: 372-1517
agtcgctttgcctggtgtttcttgcttggattggcgttttctccctcgcattcctttgctgggcctgaatttttctctgctgggtttggcattcccttgactgggctgggtgtttccttcggagggggggcttggcctttcctggggtgggcctggggtccccctggtgggcgtgggctttccccgggtgggtgtgggttttccctgggtggggtgggctgggctcccttgctggggttggcaagttttggctgggattgacctttctcttcaaacagattggaaacccaaggtttcctgctagttggtgaaactggttggtagacgcgatctgttcgctactaccggcctcccctggctgttaaaagcagatggtggctgaggtttgttcaatgcccactgcctctactgtgaagaagccatttgatctcaggagcaagatgggcaagtggtgccaccaccgcttcccctgctgcagggggagcggcaagagcaacatgggcacttctggagaccacgacgactcctttatgaagatgctcaggagcaagatgggcaagtgttgccgccactgcttcccctgctgcagggggagcggcacgagcaacgtgggcacttctggagaccatgaaaactcctttatgaagatgctcaggagcaagatgggcaagtggtgctgtcactgcttcccctgctgcagggggagcggcaagagcaacgtgggcgcttggggagactacgaccacagcgccttcatggagccgaggtaccacatccgtcgagaagatctggacaagctccacagagctgcctggtggggtaaagtccccagaaaggatctcatcgtcatgctcagggacactgacatgaacaagagggacaaggaaaagaggactgctctacatttggcctctgccaatggaaattcagaagtagtacaactcctgctggacagacgatgtcaacttaatgtccttgacaacaaaaaaaggacagctctgataaaggccatacaatgccaggaagatgaatgtgtgttaatgttgctggaacatggcgctgatcgaaatattccagatgagtatggaaataccgctctacactatgctatctacaatgaagataaattaatggccaaagcactgctcttatatggtgctgatattgaatcaaaaaacaagtgtggcctcacaccacttttgcttggcgtacatgaacaaaaacagcaagtggtgaaatttttaatcaagaaaaaagctaatttaaatgtacttgatagatatggaagaactgccctcatacttgctgtatgttgtggatcagcaagtatagtcaatcttctacttgagcaaaatgttgatgtatcttctcaagatctatctggacagacggccagagagtatgctgtttctagtcatcatcatgtaatttgtgaattactttctgactataaagaaaaacagatgctaaaaatctcttctgaaaacagcaatccaggtaaagaagcagaagaataatgtttggcagaaggaacacgcaacaagattgtgtgtttgccagaagaacatctaatgagattgcctgtttggcaggaagagcagcaagtgcaaaacacaagatgctgagtgaactttgcagggtttctgagcagttcacttttgctagtaccaaaagtgtgagacaccagaggttgggaataaggtgaatacttagctaagtgtgaaagccaccatgattatatgtaagcaaacaggcatgactgagctcctataaaactttatttacaaagccaaaaggcagattggatttggcctgtggcctatagtttgctgggattgatggaagataaccatgtaaagaaaccaggagaaaaaggaagcttttgcagtagtcagctatagtttccatgtcacacatccttggactagtatcaatgtattctaaggttttcacctgcccatggcaaaataaagtttggaatctcagtt

SEQ ID NO: 168382 - DNA, 4159 bp, Homo sapiens
  Payload ID: 13141
  Gene Symbol: POTEE
  Gene Name: POTE ankyrin domain family, member E
  Uniprot ID: Q6S8J3
  ENST ID: ENST00000356920
  CDS Start-End: 337-3564
tgctgggcttgaccttttctctgctgggtttggcattcccttgggtgggctgggtgttttcttgggggcgggggttggccctttctggggttggccctttctggggtgggcgtggggtcgcccagggggggcgtgggctttcctcgggtgggtgtgggttttccctgggtggggtgggctgggctggaatcccctgctggggttggcaggttttggctgggattgacatttctcttcaaacagattggaaacccggagttacctgctagttggtgaaactggttggtagacgcgatctgttggctactactggcttctcctggctgttaaaagcagatggtggttgaggttgattccatgccggctgcctcttctgtgaagaagccatttggtctcaggagcaagatgggcaagtggtgctgccgttgcttcccctgctacagggagagcggcaagagcaacgtgggcacttctggagaccacgacgactctgctatgaagacactcaggagcaagatgggcaagtggtgccaccactgcttcccctgctgcagggggagtggcaagagcaacgtgggcgcttctggagaccacgacgactctgctatgaagacactcaggaacaagatggggaagtggtgctgccactgcttcccctgctgcagggggagcggcaagagcaaggtgggcgcttggggagactacgatgacagcgccttcatggagcccaggtaccacgtccgtggagaagatctggacaagctccacagagctgcctggtggggtaaagtccccagaaaggatctcatcgtcatgctcagggacactgacgtgaacaagaaggacaagcaaaagaggactgctctacatctggcctctgccaatgggaattcagaagtagtaaaactcctgctggacagacgatgtcaacttaatgtccttgacaacaaaaagaggacagctctgataaaggccgtacaatgccaggaagatgaatgtgcgttaatgttgctggaacatggcactgatccaaatattccagatgagtatggaaataccactctgcactacgctatctataatgaagataaattaatggccaaagcactgctcttatatggtgctgatatcgaatcaaaaaacaagcatggcctcacaccactgttacttggtgtacatgagcaaaaacagcaagtcgtgaaatttttaatcaagaaaaaagcgaatttaaatgcactggatagatatggaaggactgctctcatacttgctgtatgttgtggatcagcaagtatagtcagccttctacttgagcaaaatattgatgtatcttctcaagatctatctggacagacggccagagagtatgctgtttctagtcatcatcatgtaatttgccagttactttctgactacaaagaaaaacagatgctaaaaatctcttctgaaaacagcaatccagaacaagagttaaagctgacatcagaggaagagtcacaaaggttcaaaggcagtgaaaatagccagccagagaaaatgtctcaagaactagaaataaataaggatggtgatagagaggttgaagaagaaatgaagaagcatgaaagtaataatgtgggattactagaaaacctgactaatggtgtcactgctggcaatggtgataatggattaattcctcaaaggaagagcagaacacctgaaaatcagcaatttcctgacaacgaaagtgaagagtatcacagaatttgtgaattactttctgactacaaagaaaagcagatgccaaaatactcttctgaaaacagcaacccagaacaagacttaaagctgacatcagaggaagagtcacaaaggcttaaaggcagtgaaaatggccagccagagaaaagatctcaagaaccagaaataaataaggatggtgatagagagctagaaaattttatggctatcgaagaaatgaagaagcacggaagtactcatgtcggattcccagaaaacctgactaatggtgccactgctggcaatggtgatgatggattaattcctccaaggaagagcagaacacctgaaagccagcaatttcctgacactgagaatgaagagtatcacagtgacgaacaaaatgatactcagaagcaattttgtgaagaacagaacactggaatattacacgatgagattctgattcatgaagaaaagcagatagaagtggttgaaaaaatgaattctgagctttctcttagttgtaagaaagaaaaagacgtcttgcatgaaaatagtacgttgcgggaagaaattgccatgctaagactggagctagacacaatgaaacatcagagccagctaagagaaaagaaatatttggaggatattgaaagtgtgaaaaaaaagaatgataatcttttaaaggctctacaattgaatgagctcaccatggatgatgataccgccgtgctcgtcattgacaacggctctggcatgtgcaaggccggctttgcgggcgacgatgccccccgggctgtcttcccttccatcgtggggcgccccaggcagcagggcatgatggggggcatgcatcagaaagagtcctatgtgggcaaggaggcccagagcaagagaggcatcctgaccctgaagtaccccatggaacacggcatcatcaccaactgggatgacatggagaagatctggcaccacaccttctacaacgagctgcgtgtggctcccgaggagcaccccatcctgctgaccgaggcccccctgaaccccaaggccaaccgcgagaagatgacccagatcatgtttgagaccttcaacaccccagccatgtacgtggccatccaggccgtgccgtccctgtacacctctggccgtactactggcatcgtgatggactctggtgacggggtcacccacactgtgcccatctatgaggggaatgccctcccccatgccaccctgcgcctagacctggctgggcgggaactgcctgactacctcatgaagatcctcaccgagcgtggctataggttcaccaccatggccgagcgggaaatcgtgcgtgacatcaaagagaagctgtgctatgttgccctggacttcgagcaggagatggccacggcggcctccagctcctccctagagaagagctacgagctgcccgatggccaggtcatcaccatcggcaacgagcggttccgctgccccgaggcgctcttccagccttgcttcctgggcatggaatcctgtggcatccatgaaactaccttcaactccatcatgaagtctgatgtggacatccgcaaagacctgtacaccaacacagtgctgtctggcggcaccaccatgtaccctggcatggcccacagaatgcagaaggagatcgctgccctggcgcctagcatgatgaagatcaggatcattgctcctcccaagcgcaagtactccgtgtgggtcggtggctccatcctggcctcgctgtccaccttccagcagatgtggatcagcaagcaggagtatgatgagtcaggcccctccattgtccaccgcaaatgcttctaggtggactctgacttagttgcgttacaccctttcttgacaaaaccaaacttctcagaaaacaacatgagattggcatggctttatttgttttcttgtttcattttttgttttgttttttattggcttgactcaggatttaaaaaccggaatggtgaaggtgacagcagtcggttggaggaagcttcctccaaagttctacaatgttgccaaggactttgattgtacattgttcttcttttcaatagtcattccaaatattgtgagacgcattgtttcaggaagccccttgccctgctaaaagccatcccacttctctctaaggagaatggcccagtcctctccctagttcacacaggggaggtgatagcattgcttttgtgcaaattacataatgcaaaattttttgaatcttcgccttaatactttttaattttgttttattttgaatgatcagccttcgtggcccccctcttttgtaccccaacttggggtgtatgaaggcttttggtctccctgagagtggctggaggcagccagggcttacctgtactctgacttgaggagagttggataaaagtgcacaccttaaaaaaaa

SEQ ID NO: 168383 - DNA, 2147 bp, Homo sapiens
  Payload ID: 13141
  Gene Symbol: POTEE
  Gene Name: POTE ankyrin domain family, member E
  Uniprot ID: Q6S8J3
  ENST ID: ENST00000358087
  CDS Start-End: 53-1237
ggtagacgcgatctgttggctactactggcttctcctggctgttaaaagcagatggtggttgaggttgattccatgccggctgcctcttctgtgaagaagccatttggtctcaggagcaagatgggcaagtggtgctgccgttgcttcccctgctacagggagagcggcaagagcaacgtgggcacttctggagaccacgacgactctgctatgaagacactcaggagcaagatgggcaagtggtgccaccactgcttcccctgctgcagggggagtggcaagagcaacgtgggcgcttctggagaccacgacgactctgctatgaagacactcaggaacaagatggggaagtggtgctgccactgcttcccctgctgcagggggagcggcaagagcaaggtgggcgcttggggagactacgatgacagcgccttcatggagcccaggtaccacgtccgtggagaagatctggacaagctccacagagctgcctggtggggtaaagtccccagaaaggatctcatcgtcatgctcagggacactgacgtgaacaagaaggacaagcaaaagaggactgctctacatctggcctctgccaatgggaattcagaagtagtaaaactcctgctggacagacgatgtcaacttaatgtccttgacaacaaaaagaggacagctctgataaaggtatgcagtagccaactatatcagcatgaggccgtacaatgccaggaagatgaatgtgcgttaatgttgctggaacatggcactgatccaaatattccagatgagtatggaaataccactctgcactacgctatctataatgaagataaattaatggccaaagcactgctcttatatggtgctgatatcgaatcaaaaaacaagcatggcctcacaccactgttacttggtgtacatgagcaaaaacagcaagtcgtgaaatttttaatcaagaaaaaagcgaatttaaatgcactggatagatatggaaggactgctctcatacttgctgtatgttgtggatcagcaagtatagtcagccttctacttgagcaaaatattgatgtatcttctcaagatctatctggacagacggccagagagtatgctgtttctagtcatcatcatgtaatttgccagttactttctgactacaaagaaaaacagatgctaaaaatctcttctgaaaacagcaatccagaaaatgtctcaagaactagaaataaataaggatggtgatagagaggttgaagaagaaatgaagaagcatgaaagtaataatgtgggattactagaaaacctgactaatggtgtcactgctggcaatggtgataatggattaattcctcaaaggaagagcagaacacctgaaaatcagcaatttcctgacaacgaaagtgaagagtatcacagaatttgtgaattactttctgactacaaagaaaagcagatgccaaaatactcttctgaaaacagcaacccagaacaagacttaaagctgacatcagaggaagagtcacaaaggcttaaaggcagtgaaaatggccagccagagaaaagatctcaagaaccagaaataaataaggatggtgatagagagctagaaaattttatggctatcgaagaaatgaagaagcacggaagtactcatgtcggattcccagaaaacctgactaatggtgccactgctggcaatggtgatgatggattaattcctccaaggaagagcagaacacctgaaagccagcaatttcctgacactgagaatgaagagtatcacagtgacgaacaaaatgatactcagaagcaattttgtgaagaacagaacactggaatattacacgatgagattctgattcatgaagaaaagcagatagaagtggttgaaaaaatgaattctgagctttctcttagttgtaagaaagaaaaagacgtcttgcatgaaaatagtacgttgcgggaagaaattgccatgctaagactggagctagacacaatgaaacatcagagccagctaagagaaaagaaatatttggaggatattgaaagtgtgaaaaaaaagaatgataatcttttaaaggctctacaattgaatgagctcaccatggatgatgataccgccgtgctcgtcattgacaac

SEQ ID NO: 168384 - DNA, 2072 bp, Homo sapiens
  Payload ID: 13141
  Gene Symbol: POTEE
  Gene Name: POTE ankyrin domain family, member E
  Uniprot ID: Q6S8J3
  ENST ID: ENST00000514256
  CDS Start-End: 53-1183
ggtagacgcgatctgttggctactactggcttctcctggctgttaaaagcagatggtggttgaggttgattccatgccggctgcctcttctgtgaagaagccatttggtctcaggagcaagatgggcaagtggtgctgccgttgcttcccctgctacagggagagcggcaagagcaacgtgggcacttctggagaccacgacgactctgctatgaagacactcaggagcaagatgggcaagtggtgccaccactgcttcccctgctgcagggggagtggcaagagcaacgtgggcgcttctggagaccacgacgactctgctatgaagacactcaggaacaagatggggaagtggtgctgccactgcttcccctgctgcagggggagcggcaagagcaaggtgggcgcttggggagactacgatgacagcgccttcatggagcccaggtaccacgtccgtggagaagatctggacaagctccacagagctgcctggtggggtaaagtccccagaaaggatctcatcgtcatgctcagggacactgacgtgaacaagaaggacaagcaaaagaggactgctctacatctggcctctgccaatgggaattcagaagtagtaaaactcctgctggacagacgatgtcaacttaatgtccttgacaacaaaaagaggacagctctgataaaggccgtacaatgccaggaagatgaatgtgcgttaatgttgctggaacatggcactgatccaaatattccagatgagtatggaaataccactctgcactacgctatctataatgaagataaattaatggccaaagcactgctcttatatggtgctgatatcgaatcaaaaaacaagcatggcctcacaccactgttacttggtgtacatgagcaaaaacagcaagtcgtgaaatttttaatcaagaaaaaagcgaatttaaatgcactggatagatatggaaggactgctctcatacttgctgtatgttgtggatcagcaagtatagtcagccttctacttgagcaaaatattgatgtatcttctcaagatctatctggacagacggccagagagtatgctgtttctagtcatcatcatgtaatttgccagttactttctgactacaaagaaaaacagatgctaaaaatctcttctgaaaacagcaatccaggttgaagaagaaatgaagaagcatgaaagtaataatgtgggattactagaaaacctgactaatggtgtcactgctggcaatggtgataatggattaattcctcaaaggaagagcagaacacctgaaaatcagcaatttcctgacaacgaaagtgaagagtatcacagaatttgtgaattactttctgactacaaagaaaagcagatgccaaaatactcttctgaaaacagcaacccagaacaagacttaaagctgacatcagaggaagagtcacaaaggcttaaaggcagtgaaaatggccagccagagaaaagatctcaagaaccagaaataaataaggatggtgatagagagctagaaaattttatggctatcgaagaaatgaagaagcacggaagtactcatgtcggattcccagaaaacctgactaatggtgccactgctggcaatggtgatgatggattaattcctccaaggaagagcagaacacctgaaagccagcaatttcctgacactgagaatgaagagtatcacagtgacgaacaaaatgatactcagaagcaattttgtgaagaacagaacactggaatattacacgatgagattctgattcatgaagaaaagcagatagaagtggttgaaaaaatgaattctgagctttctcttagttgtaagaaagaaaaagacgtcttgcatgaaaatagtacgttgcgggaagaaattgccatgctaagactggagctagacacaatgaaacatcagagccagctaagagaaaagaaatatttggaggatattgaaagtgtgaaaaaaaagaatgataatcttttaaaggctctacaattgaatgagctcaccatggatgatgataccgccgtgctcgtcattgacaac

SEQ ID NO: 168385 - DNA, 1926 bp, Homo sapiens
  Payload ID: 13141
  Gene Symbol: POTEE
  Gene Name: POTE ankyrin domain family, member E
  ENST ID: ENST00000613282
  CDS Start-End: 53-1579
ggtagacgcgatctgttggctactactggcttctcctggctgttaaaagcagatggtggttgaggttgattccatgccggctgcctcttctgtgaagaagccatttggtctcaggagcaagatgggcaagtggtgctgccgttgcttcccctgctacagggagagcggcaagagcaacgtgggcacttctggagaccacgacgactctgctatgaagacactcaggagcaagatgggcaagtggtgccaccactgcttcccctgctgcagggggagtggcaagagcaacgtgggcgcttctggagaccacgacgactctgctatgaagacactcaggaacaagatggggaagtggtgctgccactgcttcccctgctgcagggggagcggcaagagcaaggtgggcgcttggggagactacgatgacagcgccttcatggagcccaggtaccacgtccgtggagaagatctggacaagctccacagagctgcctggtggggtaaagtccccagaaaggatctcatcgtcatgctcagggacactgacgtgaacaagaaggacaagcaaaagaggactgctctacatctggcctctgccaatgggaattcagaagtagtaaaactcctgctggacagacgatgtcaacttaatgtccttgacaacaaaaagaggacagctctgataaaggccgtacaatgccaggaagatgaatgtgcgttaatgttgctggaacatggcactgatccaaatattccagatgagtatggaaataccactctgcactacgctatctataatgaagataaattaatggccaaagcactgctcttatatggtgctgatatcgaatcaaaaaacaagcatggcctcacaccactgttacttggtgtacatgagcaaaaacagcaagtcgtgaaatttttaatcaagaaaaaagcgaatttaaatgcactggatagatatggaaggactgctctcatacttgctgtatgttgtggatcagcaagtatagtcagccttctacttgagcaaaatattgatgtatcttctcaagatctatctggacagacggccagagagtatgctgtttctagtcatcatcatgtaatttgccagttactttctgactacaaagaaaaacagatgctaaaaatctcttctgaaaacagcaatccagaacaagagttaaagctgacatcagaggaagagtcacaaaggttcaaaggcagtgaaaatagccagccagagaaaatgtctcaagaactagaaataaataaggatggtgatagaaaggttgaagaagaaatgaagaagcacggaagtactcatgtcggattcccagaaaacctgactaatggtgccactgctggcaatggtgatgatggattaattcctccaaggaagagcagaacacctgaaagccagcaatttcctgacactgagaatgaagagtatcacagtgacgaacaaaatgatactcagaagcaattttgtgaagaacagaacactggaatattacacgatgagattctgattcatgaagaaaagcagatagaagtggttgaaaatgaattctgagctttctcttagttgtaagaaagaaaaagacgtcttgcatgaaaatagtacgttgcgggaagaaattgccatgctaagactggagctagacacaatgaaacatcagagccagctaagagaaaagaaatatttggaggatattgaaagtgtgaaaaaaaagaatgataatcttttaaaggctctacaattgaatgagctcaccatggatgatgataccgccgtgctcgtcattgacaacggctctggcatgtgcaaggccggctttgcgggcgacgatgccccccgggctgtcttcccttccatcgtggggcgccccaggcagcagggcatgatggggggcatgcatc

SEQ ID NO: 168386 - DNA, 2027 bp, Homo sapiens
  Payload ID: 13141
  Gene Symbol: POTEE
  Gene Name: POTE ankyrin domain family, member E
  Uniprot ID: Q6S8J3
  ENST ID: ENST00000626191
  CDS Start-End: 53-1183
ggtagacgcgatctgttggctactactggcttctcctggctgttaaaagcagatggtggttgaggttgattccatgccggctgcctcttctgtgaagaagccatttggtctcaggagcaagatgggcaagtggtgctgccgttgcttcccctgctacagggagagcggcaagagcaacgtgggcacttctggagaccacgacgactctgctatgaagacactcaggagcaagatgggcaagtggtgccaccactgcttcccctgctgcagggggagtggcaagagcaacgtgggcgcttctggagaccacgacgactctgctatgaagacactcaggaacaagatggggaagtggtgctgccactgcttcccctgctgcagggggagcggcaagagcaaggtgggcgcttggggagactacgatgacagcgccttcatggagcccaggtaccacgtccgtggagaagatctggacaagctccacagagctgcctggtggggtaaagtccccagaaaggatctcatcgtcatgctcagggacactgacgtgaacaagaaggacaagcaaaagaggactgctctacatctggcctctgccaatgggaattcagaagtagtaaaactcctgctggacagacgatgtcaacttaatgtccttgacaacaaaaagaggacagctctgataaaggccgtacaatgccaggaagatgaatgtgcgttaatgttgctggaacatggcactgatccaaatattccagatgagtatggaaataccactctgcactacgctatctataatgaagataaattaatggccaaagcactgctcttatatggtgctgatatcgaatcaaaaaacaagcatggcctcacaccactgttacttggtgtacatgagcaaaaacagcaagtcgtgaaatttttaatcaagaaaaaagcgaatttaaatgcactggatagatatggaaggactgctctcatacttgctgtatgttgtggatcagcaagtatagtcagccttctacttgagcaaaatattgatgtatcttctcaagatctatctggacagacggccagagagtatgctgtttctagtcatcatcatgtaatttgccagttactttctgactacaaagaaaaacagatgctaaaaatctcttctgaaaacagcaatccaggttgaagaagaaatgaagaagcatgaaagtaataatgtgggattactagaaaacctgactaatggtgtcactgctggcaatggtgataatggattaattcctcaaaggaagagcagaacacctgaaaatcagcaatttcctgacaacgaaagtgaagagtatcacagaatttgtgaattactttctgactacaaagaaaagcagatgccaaaatactcttctgaaaacagcaacccagaacaagacttaaagctgacatcagaggaagagtcacaaaggcttaaaggcagtgaaaatggccagccagagctagaaaattttatggctatcgaagaaatgaagaagcacggaagtactcatgtcggattcccagaaaacctgactaatggtgccactgctggcaatggtgatgatggattaattcctccaaggaagagcagaacacctgaaagccagcaatttcctgacactgagaatgaagagtatcacagtgacgaacaaaatgatactcagaagcaattttgtgaagaacagaacactggaatattacacgatgagattctgattcatgaagaaaagcagatagaagtggttgaaaaaatgaattctgagctttctcttagttgtaagaaagaaaaagacgtcttgcatgaaaatagtacgttgcgggaagaaattgccatgctaagactggagctagacacaatgaaacatcagagccagctaagagaaaagaaatatttggaggatattgaaagtgtgaaaaaaaagaatgataatcttttaaaggctctacaattgaatgagctcaccatggatgatgataccgccgtgctcgtcattgacaac

SEQ ID NO: 168387 - DNA, 4031 bp, Homo sapiens
  Payload ID: 13142
  Gene Symbol: POTEF
  Gene Name: POTE ankyrin domain family, member F
  Uniprot ID: A5A3E0
  ENST ID: ENST00000357462
  CDS Start-End: 95-3322
gattggaaacccggagttacctgctagttggtgaaactggttggtagacgcgatctgttggctactactggcttctcctggctgttaaaagcagatggtggttgaggttgattccatgccggctgcctcttctgtgaagaagccatttggtctcaggagcaagatgggcaagtggtgctgccgttgcttcccctgctgcagggagagcggcaagagcaacgtgggcacttctggagaccacgacgactctgctatgaagacactcaggagcaagatgggcaagtggtgccgccactgcttcccctgctgcagggggagtggcaagagcaacgtgggcgcttctggagaccacgacgactctgctatgaagacactcaggaacaagatgggcaagtggtgctgccactgcttcccctgctgcagggggagcagcaagagcaaggtgggcgcttggggagactacgatgacagtgccttcatggagcccaggtaccacgtccgtggagaagatctggacaagctccacagagctgcctggtggggtaaagtccccagaaaggatctcatcgtcatgctcagggacactgacgtgaacaagcaggacaagcaaaagaggactgctctacatctggcctctgccaatgggaattcagaagtagtaaaactcctgctggacagacgatgtcaacttaatgtccttgacaacaaaaagaggacagctctgataaaggccgtacaatgccaggaagatgaatgtgcgttaatgttgctggaacatggcactgatccaaatattccagatgagtatggaaataccactctgcactacgctatctataatgaagataaattaatggccaaagcactgctcttatatggtgctgatatcgaatcaaaaaacaagcatggcctcacaccactgttacttggtgtacatgagcaaaaacagcaagtcgtgaaatttttaattaagaaaaaagcgaatttaaatgcactggatagatatggaagaactgctctcatacttgctgtatgttgtggatcagcaagtatagtcagccttctacttgagcaaaatattgatgtatcttctcaagatctatctggacagacggccagagagtatgctgtttctagtcatcatcatgtaatttgccagttactttctgactacaaagaaaaacagatgctaaaaatctcttctgaaaacagcaatccagaacaagacttaaagctgacatcagaggaagagtcacaaaggttcaaaggcagtgaaaatagccagccagagaaaatgtctcaagaaccagaaataaataaggatggtgatagagaggttgaagaagaaatgaagaagcatgaaagtaataatgtgggattactagaaaacctgactaatggtgtcactgctggcaatggtgataatggattaattcctcaaaggaagagcagaacacctgaaaatcagcaatttcctgacaacgaaagtgaagagtatcacagaatttgtgaattactttctgactacaaagaaaagcagatgccaaaatactcttctgaaaacagcaacccagaacaagacttaaagctgacatcagaggaagagtcacaaaggcttaaaggcagtgaaaatggccagccagagaaaagatctcaagaaccagaaataaataaggatggtgatagagagctagaaaattttatggctatcgaagaaatgaagaagcacagaagtactcatgtcggattcccagaaaacctgactaatggtgccactgctggcaatggtgatgatggattaattcctccaaggaagagcagaacacctgaaagccagcaatttcctgacactgagaatgaagagtatcacagtgacgaacaaaatgatactcagaagcaattttgtgaagaacagaacactggaatattacacgatgagattctgattcatgaagaaaagcagatagaagtggttgaaaaaatgaattctgagctttctcttagttgtaagaaagaaaaagacatcttgcatgaaaatagtacgttgcgggaagaaattgccatgctaagactggagctagacacaatgaaacatcagagccagctaagagaaaagaaatatttggaggatattgaaagtgtgaaaaaaaggaatgataatcttttaaaggctctacaattgaatgagctcaccatggatgatgataccgctgtgctcgtcattgacaacggctctggcatgtgcaaggccggctttgcgggcgacgatgccccccgggctgtcttcccttccatcgtggggcgccccaggcagcagggcatgatggggggcatgcatcagaaagagtcctatgtgggcaaggaggcccagagcaaaagaggcatcctgaccctgaagtaccccatggaacacggcatcatcaccaactgggatgacatggagaagatctggcaccacaccttctacaacgagctgcgtgtggctcccgaggagcaccccgtcctgctgaccgaggccaccctgaaccctaaggccaaccgcgagaagatgacccagatcatgtttgagaccttcaacaccccagccatgtacgtggccatccaggctgtgctgtccctgtacacctctggccgtactactggcatcgtgatggactctggtgacggggtcacccacactgtgcccatctatgaggggaatgccctcccccatgccaccctgcgcctagacctggctgggcgggaactgcctgactacctcatgaagatcctcaccgagcatggctataggttcaccaccatggccgagcgggaaatcgtgcgtgacatcaaagagaagctgtgctatgttgccctggacttcgagcaggagatggccacggtggcctccagctcctccctagagaagagctacgagctgcccgatggccaggtcatcaccatcggcaacgagcggttccgctgccccgaggcgctcttccagccttgcttcctgggcatggaatcctgtggcatccatgaaactaccttcaactccatcatgaagtctgatgtggacatccgcaaagacctgtacaccaacacagtgctgtctggcggcaccaccatgtaccctggcatggcccacagaatgcagaaggagatcgctgccctggcgcctagcatgatgaagatcaggatcattgctcctcccaagcgcaagtactccgtgtgggtcggtggctccatcctggcctcgctgtccaccttccagcagatgtggatcagcaagcaggagtatgatgagtcaggcccctccattgtccaccgcaaatgcttgtaggtggactctgacttagttgcgttacaccctttcttgacaaaaccaaacttctcagaaaacaacatgagattggcatggctttatttgttttcttgtttcattttttgttttgttttttattggcttgactcaggatttaaaaaccggaatggtgaaggtgacagcagtcggttggaggaagcttcctccaaagttctacaatgtggccaaggactttgattgtaccttgttcttcttttcaatagtcattccaaatattgtgagacgcattgtttcaggaagccccttgccctgctaaaagccaccccacttctctctaaggagaatggcccagtcctctccctagttcacacaggggaggtgatagcattgcttttgtgcaaattacataatgcaaaattttttgaatcttcgccttaatactttttaattttgttttattttgaatgatcagccttcgtggcccccctcttttgtaccccaacttggggtgtatgaaggcttttggtctccctgagagtggctggaggcagccagggcttacctgtactctgacttgaggagagttggataaaagtgcacaccttaaaacaaattgaggaagcacagtatttcagtacagtggacagcttagcatgttgacaactgagaataaaatgctcagttctgaactggacaatgtaagacacaacgaggaaacactggaaat

SEQ ID NO: 168388 - DNA, 1926 bp, Homo sapiens
  Payload ID: 13142
  Gene Symbol: POTEF
  Gene Name: POTE ankyrin domain family, member F
  ENST ID: ENST00000361163
  CDS Start-End: 53-1579
ggtagacgcgatctgttggctactactggcttctcctggctgttaaaagcagatggtggttgaggttgattccatgccggctgcctcttctgtgaagaagccatttggtctcaggagcaagatgggcaagtggtgctgccgttgcttcccctgctgcagggagagcggcaagagcaacgtgggcacttctggagaccacgacgactctgctatgaagacactcaggagcaagatgggcaagtggtgccgccactgcttcccctgctgcagggggagtggcaagagcaacgtgggcgcttctggagaccacgacgactctgctatgaagacactcaggaacaagatgggcaagtggtgctgccactgcttcccctgctgcagggggagcagcaagagcaaggtgggcgcttggggagactacgatgacagtgccttcatggagcccaggtaccacgtccgtggagaagatctggacaagctccacagagctgcctggtggggtaaagtccccagaaaggatctcatcgtcatgctcagggacactgacgtgaacaagcaggacaagcaaaagaggactgctctacatctggcctctgccaatgggaattcagaagtagtaaaactcctgctggacagacgatgtcaacttaatgtccttgacaacaaaaagaggacagctctgataaaggccgtacaatgccaggaagatgaatgtgcgttaatgttgctggaacatggcactgatccaaatattccagatgagtatggaaataccactctgcactacgctatctataatgaagataaattaatggccaaagcactgctcttatatggtgctgatatcgaatcaaaaaacaagcatggcctcacaccactgttacttggtgtacatgagcaaaaacagcaagtcgtgaaatttttaattaagaaaaaagcgaatttaaatgcactggatagatatggaagaactgctctcatacttgctgtatgttgtggatcagcaagtatagtcagccttctacttgagcaaaatattgatgtatcttctcaagatctatctggacagacggccagagagtatgctgtttctagtcatcatcatgtaatttgccagttactttctgactacaaagaaaaacagatgctaaaaatctcttctgaaaacagcaatccagaacaagacttaaagctgacatcagaggaagagtcacaaaggttcaaaggcagtgaaaatagccagccagagaaaatgtctcaagaaccagaaataaataaggatggtgatagaaaggttgaagaagaaatgaagaagcacagaagtactcatgtcggattcccagaaaacctgactaatggtgccactgctggcaatggtgatgatggattaattcctccaaggaagagcagaacacctgaaagccagcaatttcctgacactgagaatgaagagtatcacagtgacgaacaaaatgatactcagaagcaattttgtgaagaacagaacactggaatattacacgatgagattctgattcatgaagaaaagcagatagaagtggttgaaaatgaattctgagctttctcttagttgtaagaaagaaaaagacatcttgcatgaaaatagtacgttgcgggaagaaattgccatgctaagactggagctagacacaatgaaacatcagagccagctaagagaaaagaaatatttggaggatattgaaagtgtgaaaaaaaggaatgataatcttttaaaggctctacaattgaatgagctcaccatggatgatgataccgctgtgctcgtcattgacaacggctctggcatgtgcaaggccggctttgcgggcgacgatgccccccgggctgtcttcccttccatcgtggggcgccccaggcagcagggcatgatggggggcatgcatc

SEQ ID NO: 168389 - DNA, 3842 bp, Homo sapiens
  Payload ID: 13142
  Gene Symbol: POTEF
  Gene Name: POTE ankyrin domain family, member F
  Uniprot ID: A5A3E0
  ENST ID: ENST00000409914
  CDS Start-End: 401-3628
gcgggagcttctcctgccaggcaggaagacgagtagaagggagcggcatgctggaggctggagcctgagcccctggggctcgccttgctgtgtttggtggtgacgtgggacactgcagctcggccagagtggtagaaatgtcctggtgtaggcttttctggctttgcccgtctagctgctccaagccaggctggaggaggaggagaaggaatcacctgtggtacgctggagcctgcatgtggcgtgactctgcagctcgcctcgtgtgactgatggcagccacggagactgcagctcgacaggagtgattggaaacccggagttacctgctagttggtgaaactggttggtagacgcgatctgttggctactactggcttctcctggctgttaaaagcagatggtggttgaggttgattccatgccggctgcctcttctgtgaagaagccatttggtctcaggagcaagatgggcaagtggtgctgccgttgcttcccctgctgcagggagagcggcaagagcaacgtgggcacttctggagaccacgacgactctgctatgaagacactcaggagcaagatgggcaagtggtgccgccactgcttcccctgctgcagggggagtggcaagagcaacgtgggcgcttctggagaccacgacgactctgctatgaagacactcaggaacaagatgggcaagtggtgctgccactgcttcccctgctgcagggggagcagcaagagcaaggtgggcgcttggggagactacgatgacagtgccttcatggagcccaggtaccacgtccgtggagaagatctggacaagctccacagagctgcctggtggggtaaagtccccagaaaggatctcatcgtcatgctcagggacactgacgtgaacaagcaggacaagcaaaagaggactgctctacatctggcctctgccaatgggaattcagaagtagtaaaactcctgctggacagacgatgtcaacttaatgtccttgacaacaaaaagaggacagctctgataaaggccgtacaatgccaggaagatgaatgtgcgttaatgttgctggaacatggcactgatccaaatattccagatgagtatggaaataccactctgcactacgctatctataatgaagataaattaatggccaaagcactgctcttatatggtgctgatatcgaatcaaaaaacaagcatggcctcacaccactgttacttggtgtacatgagcaaaaacagcaagtcgtgaaatttttaattaagaaaaaagcgaatttaaatgcactggatagatatggaagaactgctctcatacttgctgtatgttgtggatcagcaagtatagtcagccttctacttgagcaaaatattgatgtatcttctcaagatctatctggacagacggccagagagtatgctgtttctagtcatcatcatgtaatttgccagttactttctgactacaaagaaaaacagatgctaaaaatctcttctgaaaacagcaatccagaacaagacttaaagctgacatcagaggaagagtcacaaaggttcaaaggcagtgaaaatagccagccagagaaaatgtctcaagaaccagaaataaataaggatggtgatagagaggttgaagaagaaatgaagaagcatgaaagtaataatgtgggattactagaaaacctgactaatggtgtcactgctggcaatggtgataatggattaattcctcaaaggaagagcagaacacctgaaaatcagcaatttcctgacaacgaaagtgaagagtatcacagaatttgtgaattactttctgactacaaagaaaagcagatgccaaaatactcttctgaaaacagcaacccagaacaagacttaaagctgacatcagaggaagagtcacaaaggcttaaaggcagtgaaaatggccagccagagaaaagatctcaagaaccagaaataaataaggatggtgatagagagctagaaaattttatggctatcgaagaaatgaagaagcacagaagtactcatgtcggattcccagaaaacctgactaatggtgccactgctggcaatggtgatgatggattaattcctccaaggaagagcagaacacctgaaagccagcaatttcctgacactgagaatgaagagtatcacagtgacgaacaaaatgatactcagaagcaattttgtgaagaacagaacactggaatattacacgatgagattctgattcatgaagaaaagcagatagaagtggttgaaaaaatgaattctgagctttctcttagttgtaagaaagaaaaagacatcttgcatgaaaatagtacgttgcgggaagaaattgccatgctaagactggagctagacacaatgaaacatcagagccagctaagagaaaagaaatatttggaggatattgaaagtgtgaaaaaaaggaatgataatcttttaaaggctctacaattgaatgagctcaccatggatgatgataccgctgtgctcgtcattgacaacggctctggcatgtgcaaggccggctttgcgggcgacgatgccccccgggctgtcttcccttccatcgtggggcgccccaggcagcagggcatgatggggggcatgcatcagaaagagtcctatgtgggcaaggaggcccagagcaaaagaggcatcctgaccctgaagtaccccatggaacacggcatcatcaccaactgggatgacatggagaagatctggcaccacaccttctacaacgagctgcgtgtggctcccgaggagcaccccgtcctgctgaccgaggccaccctgaaccctaaggccaaccgcgagaagatgacccagatcatgtttgagaccttcaacaccccagccatgtacgtggccatccaggctgtgctgtccctgtacacctctggccgtactactggcatcgtgatggactctggtgacggggtcacccacactgtgcccatctatgaggggaatgccctcccccatgccaccctgcgcctagacctggctgggcgggaactgcctgactacctcatgaagatcctcaccgagcatggctataggttcaccaccatggccgagcgggaaatcgtgcgtgacatcaaagagaagctgtgctatgttgccctggacttcgagcaggagatggccacggtggcctccagctcctccctagagaagagctacgagctgcccgatggccaggtcatcaccatcggcaacgagcggttccgctgccccgaggcgctcttccagccttgcttcctgggcatggaatcctgtggcatccatgaaactaccttcaactccatcatgaagtctgatgtggacatccgcaaagacctgtacaccaacacagtgctgtctggcggcaccaccatgtaccctggcatggcccacagaatgcagaaggagatcgctgccctggcgcctagcatgatgaagatcaggatcattgctcctcccaagcgcaagtactccgtgtgggtcggtggctccatcctggcctcgctgtccaccttccagcagatgtggatcagcaagcaggagtatgatgagtcaggcccctccattgtccaccgcaaatgcttgtaggtggactctgacttagttgcgttacaccctttcttgacaaaaccaaacttctcagaaaacaacatgagattggcatggctttatttgttttcttgtttcattttttgttttgttttttattggcttgactcaggatttaaaaaccggaatggtgaaggtgacagcagtcggttggaggaagcttcctccaaagttctacaatgtggccaaggac

SEQ ID NO: 168390 - DNA, 2147 bp, Homo sapiens
  Payload ID: 13142
  Gene Symbol: POTEF
  Gene Name: POTE ankyrin domain family, member F
  ENST ID: ENST00000630260
  CDS Start-End: 53-1237
ggtagacgcgatctgttggctactactggcttctcctggctgttaaaagcagatggtggttgaggttgattccatgccggctgcctcttctgtgaagaagccatttggtctcaggagcaagatgggcaagtggtgctgccgttgcttcccctgctgcagggagagcggcaagagcaacgtgggcacttctggagaccacgacgactctgctatgaagacactcaggagcaagatgggcaagtggtgccgccactgcttcccctgctgcagggggagtggcaagagcaacgtgggcgcttctggagaccacgacgactctgctatgaagacactcaggaacaagatgggcaagtggtgctgccactgcttcccctgctgcagggggagcagcaagagcaaggtgggcgcttggggagactacgatgacagtgccttcatggagcccaggtaccacgtccgtggagaagatctggacaagctccacagagctgcctggtggggtaaagtccccagaaaggatctcatcgtcatgctcagggacactgacgtgaacaagcaggacaagcaaaagaggactgctctacatctggcctctgccaatgggaattcagaagtagtaaaactcctgctggacagacgatgtcaacttaatgtccttgacaacaaaaagaggacagctctgataaaggtatgcagtagccaactatatcagcatgaggccgtacaatgccaggaagatgaatgtgcgttaatgttgctggaacatggcactgatccaaatattccagatgagtatggaaataccactctgcactacgctatctataatgaagataaattaatggccaaagcactgctcttatatggtgctgatatcgaatcaaaaaacaagcatggcctcacaccactgttacttggtgtacatgagcaaaaacagcaagtcgtgaaatttttaattaagaaaaaagcgaatttaaatgcactggatagatatggaagaactgctctcatacttgctgtatgttgtggatcagcaagtatagtcagccttctacttgagcaaaatattgatgtatcttctcaagatctatctggacagacggccagagagtatgctgtttctagtcatcatcatgtaatttgccagttactttctgactacaaagaaaaacagatgctaaaaatctcttctgaaaacagcaatccagaaaatgtctcaagaaccagaaataaataaggatggtgatagagaggttgaagaagaaatgaagaagcatgaaagtaataatgtgggattactagaaaacctgactaatggtgtcactgctggcaatggtgataatggattaattcctcaaaggaagagcagaacacctgaaaatcagcaatttcctgacaacgaaagtgaagagtatcacagaatttgtgaattactttctgactacaaagaaaagcagatgccaaaatactcttctgaaaacagcaacccagaacaagacttaaagctgacatcagaggaagagtcacaaaggcttaaaggcagtgaaaatggccagccagagaaaagatctcaagaaccagaaataaataaggatggtgatagagagctagaaaattttatggctatcgaagaaatgaagaagcacagaagtactcatgtcggattcccagaaaacctgactaatggtgccactgctggcaatggtgatgatggattaattcctccaaggaagagcagaacacctgaaagccagcaatttcctgacactgagaatgaagagtatcacagtgacgaacaaaatgatactcagaagcaattttgtgaagaacagaacactggaatattacacgatgagattctgattcatgaagaaaagcagatagaagtggttgaaaaaatgaattctgagctttctcttagttgtaagaaagaaaaagacatcttgcatgaaaatagtacgttgcgggaagaaattgccatgctaagactggagctagacacaatgaaacatcagagccagctaagagaaaagaaatatttggaggatattgaaagtgtgaaaaaaaggaatgataatcttttaaaggctctacaattgaatgagctcaccatggatgatgataccgctgtgctcgtcattgacaac

SEQ ID NO: 168391 - DNA, 2073 bp, Homo sapiens
  Payload ID: 13143
  Gene Symbol: POTEG
  Gene Name: POTE ankyrin domain family, member G
  Uniprot ID: Q6S5H5
  ENST ID: ENST00000547722
  CDS Start-End: 53-1021
ggtagacgcgatctgctggctactaccggcctcccctggctgttaaaagcagatggtggctgaggctggttcaatgccggctgcctcctctgtgaagaagccatttggtctcagaagcaagatgggcaagtggtgccgccactgcttcccctggtgcagggggagcggcaagagcaacgtgggcacttctggagaccacgacgattctgctatgaagacactcaggagcaagatgggcaagtggtgccgccactgcttcccctggtgcagggggagcagcaagagcaacgtgggcacttctggagaccacgacgactctgctatgaagacactcaggagcaagatgggcaagtggtgctgccactgcttcccctgctgcagggggagcggcaagagcaaagtgggcccttggggagactacgacgacagcgctttcatggagccgaggtaccacgtccgtcgagaagatctggacaagctccacagagctgcctggtggggtaaagtccccagaaaggatctcatcgtcatgctcaaggacactgacatgaacaagaaggacaagcaaaagaggactgctctacatctggcctctgccaatggaaattcagaagtagtaaaactcctgctggacagacgatgtcaacttaatatccttgacaacaaaaagaggacagctctgacaaaggccgtacaatgccgggaagatgaatgtgcgttaatgttgctggaacatggcactgatccgaatattccagatgagtatggaaataccgctctacactatgctatctacaatgaagataaattaatggccaaagcactgctcttatacggtgctgatatcgaatcaaaaaacaagattgagtctcactctgtttcccaggctggagtgcagtggtgtgatcacagctcactgcaacctcgacctcccgaagctcagatggtcctccaacctcaacctcagttgtttttttctttctttctttttatttttatttttatttttatttttttttagtagagatgaggtttttgccatgtttctcaggctggtcttgaactcctgggctcaagcaattcatccccctcagcctcccaaagtgctaggattacagcatggcctcacaccactgttacttggtgtacatgagcaaaaacagcaagtggtgaaattcttaatcaagaaaaaagcaaatttaaatgcactggatagatatggaagaactgctctcatacttgctgtatgttgtggatcggcaagtatagtcagccttctacttgagcaaaacattgatgtatcttctcaagatctatctggacagacggccagagagtatgctgtttctagtcatcataatgtaatttgccagttactttctgactacaaagaaaaacagatgctaaaagtctcttctgaaaacagcaatccagaacaagacttaaagctgacatcagaggaagagtcacaaaggcttaaaggaagtgaaaatagccagccagaggaaatgtctcaagaaccagaaataaataagggtggtgatagaaaggttgaagaagaaatgaagaagcacggaagtactcatatgggattcccagaaaacctgcctaacggtgccactgctgacaatggtgatgatggattaattccaccaaggaaaagcagaacacctgaaagccagcaatttcctgacactgagaatgaacagtatcacagtgatgaacaaaatgatactcagaagcaactttctgaagaacagaacactggaatattacaagatgagattctgattcatgaagaaaagcagatagaagtggctgaaaatgaattctgagctttctcttagttataagaaagaaaaagacctcttgcatgaaaatagtacgttgcaggaagaaattgtcatgctaagactggaactagacgtaatgaaacatcagagccagctaagagaaaagaaatatttggaggaaattgaaagtgtggaaaaaaagaatgataatcttttaaagggtctacaactgaatgagctcaccatggatgatgatactgccgtgctcgtcattgacaac

SEQ ID NO: 168392 - DNA, 2204 bp, Homo sapiens
  Payload ID: 13143
  Gene Symbol: POTEG
  Gene Name: POTE ankyrin domain family, member G
  Uniprot ID: Q6S5H5
  ENST ID: ENST00000547848
  CDS Start-End: 53-1579
ggtagacgcgatctgctggctactaccggcctcccctggctgttaaaagcagatggtggctgaggctggttcaatgccggctgcctcctctgtgaagaagccatttggtctcagaagcaagatgggcaagtggtgccgccactgcttcccctggtgcagggggagcggcaagagcaacgtgggcacttctggagaccacgacgattctgctatgaagacactcaggagcaagatgggcaagtggtgccgccactgcttcccctggtgcagggggagcagcaagagcaacgtgggcacttctggagaccacgacgactctgctatgaagacactcaggagcaagatgggcaagtggtgctgccactgcttcccctgctgcagggggagcggcaagagcaaagtgggcccttggggagactacgacgacagcgctttcatggagccgaggtaccacgtccgtcgagaagatctggacaagctccacagagctgcctggtggggtaaagtccccagaaaggatctcatcgtcatgctcaaggacactgacatgaacaagaaggacaagcaaaagaggactgctctacatctggcctctgccaatggaaattcagaagtagtaaaactcctgctggacagacgatgtcaacttaatatccttgacaacaaaaagaggacagctctgacaaaggccgtacaatgccgggaagatgaatgtgcgttaatgttgctggaacatggcactgatccgaatattccagatgagtatggaaataccgctctacactatgctatctacaatgaagataaattaatggccaaagcactgctcttatacggtgctgatatcgaatcaaaaaacaagcatggcctcacaccactgttacttggtgtacatgagcaaaaacagcaagtggtgaaattcttaatcaagaaaaaagcaaatttaaatgcactggatagatatggaagaactgctctcatacttgctgtatgttgtggatcggcaagtatagtcagccttctacttgagcaaaacattgatgtatcttctcaagatctatctggacagacggccagagagtatgctgtttctagtcatcataatgtaatttgccagttactttctgactacaaagaaaaacagatgctaaaagtctcttctgaaaacagcaatccagaacaagacttaaagctgacatcagaggaagagtcacaaaggcttaaaggaagtgaaaatagccagccagaggaaatgtctcaagaaccagaaataaataagggtggtgatagaaaggttgaagaagaaatgaagaagcacggaagtactcatatgggattcccagaaaacctgcctaacggtgccactgctgacaatggtgatgatggattaattccaccaaggaaaagcagaacacctgaaagccagcaatttcctgacactgagaatgaacagtatcacagtgatgaacaaaatgatactcagaagcaactttctgaagaacagaacactggaatattacaagatgagattctgattcatgaagaaaagcagatagaagtggctgaaaatgaattctgagctttctcttagttataagaaagaaaaagacctcttgcatgaaaatagtacgttgcaggaagaaattgtcatgctaagactggaactagacgtaatgaaacatcagagccagctaagagaaaagaaatatttggaggaaattgaaagtgtggaaaaaaagaatgataatcttttaaagggtctacaactgaatgagctcaccatggatgatgatactgccgtgctcgtcattgacaacggctctggcatgtgcaaggccggctttgcaggtgacgatgccccccgggctgtcttcccttccatcgtggggtgccccaggcaccagaacatgatggggggcatgcgtcagatggagtcctatgtgggcaatgaggcccagagcaagagaggcatcctgaccctgaagtaccccatggagcacggcatcatcaccaactgggacgacatggagaagatctggcaccacaccttctacaatgagctgcgtgtggctcccgaggagcaccccatcctgctgaccgaggcacccctgaaccccaaggccaaccgtgagaagatgacccggatcatgtttgagaccttcaacaccccagccatgtacgtggccatccaagccgtgctgtcc

SEQ ID NO: 168393 - DNA, 1975 bp, Homo sapiens
  Payload ID: 13143
  Gene Symbol: POTEG
  Gene Name: POTE ankyrin domain family, member G
  Uniprot ID: Q6S5H5
  ENST ID: ENST00000622767
  CDS Start-End: 53-1513
ggtagacgcgatctgctggctactaccggcctcccctggctgttaaaagcagatggtggctgaggctggttcaatgccggctgcctcctctgtgaagaagccatttggtctcagaagcaagatgggcaagtggtgccgccactgcttcccctggtgcagggggagcggcaagagcaacgtgggcacttctggagaccacgacgattctgctatgaagacactcaggagcaagatgggcaagtggtgccgccactgcttcccctggtgcagggggagcagcaagagcaacgtgggcacttctggagaccacgacgactctgctatgaagacactcaggagcaagatgggcaagtggtgctgccactgcttcccctgctgcagggggagcggcaagagcaaagtgggcccttggggagactacgacgacagcgctttcatggagccgaggtaccacgtccgtcgagaagatctggacaagctccacagagctgcctggtggggtaaagtccccagaaaggatctcatcgtcatgctcaaggacactgacatgaacaagaaggacaagcaaaagaggactgctctacatctggcctctgccaatggaaattcagaagtagtaaaactcctgctggacagacgatgtcaacttaatatccttgacaacaaaaagaggacagctctgacaaaggccgtacaatgccgggaagatgaatgtgcgttaatgttgctggaacatggcactgatccgaatattccagatgagtatggaaataccgctctacactatgctatctacaatgaagataaattaatggccaaagcactgctcttatacggtgctgatatcgaatcaaaaaacaagcatggcctcacaccactgttacttggtgtacatgagcaaaaacagcaagtggtgaaattcttaatcaagaaaaaagcaaatttaaatgcactggatagatatggaagaactgctctcatacttgctgtatgttgtggatcggcaagtatagtcagccttctacttgagcaaaacattgatgtatcttctcaagatctatctggacagacggccagagagtatgctgtttctagtcatcataatgtaatttgccagttactttctgactacaaagaaaaacagatgctaaaagtctcttctgaaaacagcaatccagaacaagacttaaagctgacatcagaggaagagtcacaaaggcttaaaggaagtgaaaatagccagccagaggaaatgtctcaagaaccagaaataaataagggtggtgatagaaaggttgaagaagaaatgaagaagcacggaagtactcatatgggattcccagaaaacctgcctaacggtgccactgctgacaatggtgatgatggattaattccaccaaggaaaagcagaacacctgaaagccagcaatttcctgacactgagaatgaacagtatcacagggacttttctggccatcccaactttcccacgacccttcccatcaaacagtgatgaacaaaatgatactcagaagcaactttctgaagaacagaacactggaatattacaagatgagattctgattcatgaagaaaagcagatagaagtggctgaaaatgaattctgagctttctcttagttataagaaagaaaaagacctcttgcatgaaaatagtacgttgcaggaagaaattgtcatgctaagactggaactagacgtaatgaaacatcagagccagctaagagaaaagaaatatttggaggaaattgaaagtgtggaaaaaaagaatgataatcttttaaagggtctacaactgaatgagctcaccatggatgatgatactgccgtgctcgtcattgacaacggctctggcatgtgcaaggccggctttgcaggtgacgatgccccccgggctgtcttcccttccatcgtggggtgccccaggcaccagaacatgatggggggcatgcgtc

SEQ ID NO: 168394 - DNA, 1928 bp, Homo sapiens
  Payload ID: 13144
  Gene Symbol: POTEH
  Gene Name: POTE ankyrin domain family, member H
  Uniprot ID: Q6S545
  ENST ID: ENST00000343518
  CDS Start-End: 53-1690
ggtagacgcgatctgctggctactaccggccttccctggctgttaaaagcagatggtggctgaggctggttcaatgccggctgcctcctctgtgaagaagccatttggtctcagaagcaagatgggcaagtggtgccgccactgcttcgcctggtgcagggggagcggcaagagcaacgtgggcacttctggagaccacgacgattctgctatgaagacactcaggagcaagatgggcaagtggtgctgccactgcttcccctggtgcagggggagcggcaagagcaacgtgggcacttctggagaccacgacgattctgctatgaagacactcaggagcaagatgggcaagtggtgctgccactgcttcccctgctgcagggggagcggcaagagcaacgtgggcacttctggagaccacgacgactctgctatgaagacactcaggagcaagatgggcaagtggtgctgccactgcttcccctgctgcagggggagcggcaagaacaaagtgggcccttggggagactacgacgacagcgctttcatggagccgaggtaccacgtccgtcgagaagatctggacaagctccacagagctgcctggtggggtaaagtccccagaaaggatctcatcgtcatgctcaaggacactgacatgaacaagaaggacaagcaaaagaggactgctctacatctggcctctgccaatggaaattcagaagtagtaaaactcctgctggacagacgatgtcaacttaatatccttgacaacaaaaagaggacagctctgacaaaggccgtacaatgccaggaagatgaatgtgcgttaatgttgctggaacatggcactgatccgaatattccagatgagtatggaaataccgctctacactatgctatctacaatgaagataaattaatggccaaagcactgctcttatacggtgctgatatcgaatcaaaaaacaagcatggcctcacaccactgttacttggtgtacatgagcaaaaacagcaagtggtgaaatttttaatcaagaaaaaagcaaatttaaatgcactggatagatatggaagaactgctctcatacttgctgtatgttgtggatcggcaagtatagtcagccttctacttgagcaaaacattgatgtatcttctcaagatctatctggacagacggccagagagtatgctgtttctagtcgtcataatgtaatttgccagttactttctgactacaaagaaaaacagatactaaaagtctcttctgaaaacagcaatccagaacaagacttaaagctgacatcagaggaagagtcacaaaggcttaaaggaagtgaaaatagccagccagaggaaatgtctcaagaaccagaaataaataagggtggtgatagaaaggttgaagaagaaatgaagaagcacggaagtactcatatgggattcccagaaaacctgactaacggtgccactgctgacaatggtgatgatggattaattccaccaaggaaaagcagaacacctgaaagccagcaatttcctgacactgagaatgaacagtatcacagtgatgaacaaaatgatactcagaagcaactttctgaagaacagaacactggaatattacaagatgagattctgattcatgaagaaaagcagatagaagtggctgaaaatgaattctgagctttctcttagttataagaaagaaaaagacctcttgcatgaaaatagtacgttgcaggaagaaattgtcatgctaagactggaactagacataatgaaacatcagagccagctaagagaaaagaaatatttggaggaaattgaaagtgtggaaaaaaagaatgataatcttttaaagggtctacaactgaatgagctcaccatggatgatgatactgccgtgctcgtcattgacaac

SEQ ID NO: 168395 - DNA, 1964 bp, Homo sapiens
  Payload ID: 13144
  Gene Symbol: POTEH
  Gene Name: POTE ankyrin domain family, member H
  ENST ID: ENST00000452800
  CDS Start-End: 1-912
ctcaggagcaagatgggcaagtggtgctgccactgcttcccctggtgcagggggagcggcaagagcaacgtgggcacttctggagaccacgacgattctgctatgaagacactcaggagcaagatgggcaagtggtgctgccactgcttcccctgctgcagggggagcggcaagagcaacgtgggcacttctggagaccacgacgactctgctatgaagacactcaggagcaagatgggcaagtggtgctgccactgcttcccctgctgcagggggagcggcaagaacaaagtgggcccttggggagactacgacgacagcgctttcatggagccgaggtaccacgtccgtcgagaagatctggacaagctccacagagctgcctggtggggtaaagtccccagaaaggatctcatcgtcatgctcaaggacactgacatgaacaagaaggacaagcaaaagaggactgctctacatctggcctctgccaatggaaattcagaagtagtaaaactcctgctggacagacgatgtcaacttaatatccttgacaacaaaaagaggacagctctgacaaaggccgtacaatgccaggaagatgaatgtgcgttaatgttgctggaacatggcactgatccgaatattccagatgagtatggaaataccgctctacactatgctatctacaatgaagataaattaatggccaaagcactgctcttatacggtgctgatatcgaatcaaaaaacaagattgagtctcactctgtttcccaggctggagtgcagtggtgtgatcacagctcactgcaacctcgacctcccgaagctcagatggtcctccaacctcaacctcagttgtttttttctttctttctttttatttttatttttatttttatttttttttagtagagatttggtttttgccatgtttctcaggctggtcttgaactcctgggctcaagcaattcatccccctcagcctcccaaagtgctaggattacagcatggcctcacaccactgttacttggtgtacatgagcaaaaacagcaagtggtgaaatttttaatcaagaaaaaagcaaatttaaatgcactggatagatatggaagaactgctctcatacttgctgtatgttgtggatcggcaagtatagtcagccttctacttgagcaaaacattgatgtatcttctcaagatctatctggacagacggccagagagtatgctgtttctagtcgtcataatgtaatttgccagttactttctgactacaaagaaaaacagatactaaaagtctcttctgaaaacagcaatccagaacaagacttaaagctgacatcagaggaagagtcacaaaggcttaaaggaagtgaaaatagccagccagaggaaatgtctcaagaaccagaaataaataagggtggtgatagaaaggttgaagaagaaatgaagaagcacggaagtactcatatgggattcccagaaaacctgactaacggtgccactgctgacaatggtgatgatggattaattccaccaaggaaaagcagaacacctgaaagccagcaatttcctgacactgagaatgaacagtatcacagtgatgaacaaaatgatactcagaagcaactttctgaagaacagaacactggaatattacaagatgagattctgattcatgaagaaaagcagatagaagtggctgaaaatgaattctgagctttctcttagttataagaaagaaaaagacctcttgcatgaaaatagtacgttgcaggaagaaattgtcatgctaagactggaactagacataatgaaacatcagagccagctaagagaaaagaaatatttggaggaaattgaaagtgtggaaaaaaagaatgataatcttttaaagggtctacaactgaatgagctcaccatggatgatgatactgccgtgctcgtcattgacaac

SEQ ID NO: 168396 - DNA, 1874 bp, Homo sapiens
  Payload ID: 13144
  Gene Symbol: POTEH
  Gene Name: POTE ankyrin domain family, member H
  ENST ID: ENST00000621704
  CDS Start-End: 1-1527
atggtggctgaggctggttcaatgccggctgcctcctctgtgaagaagccatttggtctcagaagcaagatgggcaagtggtgccgccactgcttcgcctggtgcagggggagcggcaagagcaacgtgggcacttctggagaccacgacgattctgctatgaagacactcaggagcaagatgggcaagtggtgctgccactgcttcccctggtgcagggggagcggcaagagcaacgtgggcacttctggagaccacgacgactctgctatgaagacactcaggagcaagatgggcaagtggtgctgccactgcttcccctgctgcagggggagcggcaagaacaaagtgggcccttggggagactacgacgacagcgctttcatggagccgaggtaccacgtccgtcgagaagatctggacaagctccacagagctgcctggtggggtaaagtccccagaaaggatctcatcgtcatgctcaaggacactgacatgaacaagaaggacaagcaaaagaggactgctctacatctggcctctgccaatggaaattcagaagtagtaaaactcctgctggacagacgatgtcaacttaatatccttgacaacaaaaagaggacagctctgacaaaggccgtacaatgccaggaagatgaatgtgcgttaatgttgctggaacatggcactgatccgaatattccagatgagtatggaaataccgctctacactatgctatctacaatgaagataaattaatggccaaagcactgctcttatacggtgctgatatcgaatcaaaaaacaagcatggcctcacaccactgttacttggtgtacatgagcaaaaacagcaagtggtgaaatttttaatcaagaaaaaagcaaatttaaatgcactggatagatatggaagaactgctctcatacttgctgtatgttgtggatcggcaagtatagtcagccttctacttgagcaaaacattgatgtatcttctcaagatctatctggacagacggccagagagtatgctgtttctagtcgtcataatgtaatttgccagttactttctgactacaaagaaaaacagatactaaaagtctcttctgaaaacagcaatccagaacaagacttaaagctgacatcagaggaagagtcacaaaggcttaaaggaagtgaaaatagccagccagaggaaatgtctcaagaaccagaaataaataagggtggtgatagaaaggttgaagaagaaatgaagaagcacggaagtactcatatgggattcccagaaaacctgactaacggtgccactgctgacaatggtgatgatggattaattccaccaaggaaaagcagaacacctgaaagccagcaatttcctgacactgagaatgaacagtatcacagtgatgaacaaaatgatactcagaagcaactttctgaagaacagaacactggaatattacaagatgagattctgattcatgaagaaaagcagatagaagtggctgaaaatgaattctgagctttctcttagttataagaaagaaaaagacctcttgcatgaaaatagtacgttgcaggaagaaattgtcatgctaagactggaactagacataatgaaacatcagagccagctaagagaaaagaaatatttggaggaaattgaaagtgtggaaaaaaagaatgataatcttttaaagggtctacaactgaatgagctcaccatggatgatgatactgccgtgctcgtcattgacaacggctctggcatgtgcaaggccggctttgcaggtgacgatgccccccgggctgtcttcccttccatcgtggggtgccccaggcaccagaacatgatggggggcatgcgtc

SEQ ID NO: 168397 - DNA, 7020 bp, Homo sapiens
  Payload ID: 13145
  Gene Symbol: POTEI
  Gene Name: POTE ankyrin domain family, member I
  Uniprot ID: P0CG38
  ENST ID: ENST00000451531
  CDS Start-End: 432-3659
taactgcttggctggcctgtagcggcttggcttggctttgcgttctttgcttggcttggtgttggtcgcttggcctggtgttcctccttggattgacgtttcctccttggattggcgtttcctctctcgcgttcccttgctaggcttgaccttttctctgctgggtttggcattcccttgggtgggctgggtgttttcttgggggggggggttggcccttcctcgggtgggcgtgggctttccccgggtgggtgtgggttttccctgggtggggtgggttgggcttacctgctggggttggcaggttttggctgggattgacttttctcttcaaacagattggaaacccggagttacctgctagttggtgaaactggttggtagacgtgatctgctcgctactaccggcctccccaggctgttaaaagcagatggtagctgaggttgattcaatgccggctgcctcttctgtgaagaagccatttgttctcaggagcaagatgggcaagtggtgccgccactgcttcccctgctgcagggggagcggcaagagcaacgtgggcacttctggagaccaggacgactccactatgaagacactcaggagcaagatgggcaagtggtgctgccactgcttcccctgctgcagggggagtggcaagagcaacgtgggcacttctggagaccacgacgactccgctatgaagacgctcaggagcaagatgggcaagtggtgctgccactgcttcccctgctgcagggggagcggcaagagcaacgtgggtgcttggggagactacgacgacagcgccttcgtggagccgagataccacgtccgtcgagaagatctggacaagctccacagagctgcctggtggggtaaagtcgccagaaaggatctgatcgtcatgctcagggacactgacgtgaacaagcaggacaagcaaaagaggactgctctacatctggcctctgccaatgggaattcaggagtagtaaaactcctgctggacagacgatgtcaacttaatgtccttgacaacaaaaagaggacagctctgacaaaggccgtacaatgccaggaagatgaatgtgcgttaatgttgctggaacatggcactgatccaaacattccagatgagtatggaaataccactctacactacgctatctacaatgaagataaattaatggccaaagcactgctcttatacggtgctgatatcgaatcaaaaaacaagcatggcctcacaccactgctacttggtgtacatgagcaaaaacagcaagtggtgaaatttttaatcaagaaaaaagcgaatttaaatgcgctggatagatatggaagaactgctctcatacttgctgtatgttgtggatcagcaagtatagtcagccttctacttgagcaaaatattgatgtatcttctcaagatctatctggacagacggccagagagtatgctgtttctagtcatcatcatgtaatttgccagttactttctgactacaaagaaaaacagatgctaaaaatctcttctgaaaacagcaatccagaacaagacttaaagctgacatcagaggaagagtcacaaaggttcaaaggcagtgaaaatagccagccagagaaaatgtctcaagaaccagaaataaataaggatggtgatagagaggttgaagaagaaatgaagaagcatgaaagtaataatgtgggattactagaaaacctgagtaatggtgtcactgctggcaatggtgatgatggattaattcctcaaaggaagagcagaacacctgaaaatcagcaatttcctgacaacgaaagtgaagagtatcacagaatttgcgaattagtttctgactacaaagaaaaacagatgccaaaatactcttctgaaaacagcaacccagaacaagacttaaagctgacatcagaggaagagtcacaaaggcttaaaggcagtgaaaatggccagccagagaaaagatctcaagaaccagaaataaataaggatggtgatagagagctagaaaattttatggctatcgaagaaatgaagaagcacggaagtactcacgtcggattcccagaaaacctgactaatggtgccactgctggcaatggtgatgatggattaattcctccaaggaagagcagaacacctgaaagccagcaatttcctgacactgagaatgaagagtatcacagtgacgaacaaaatgatactcagaagcaattttgtgaagaacagaacactggaatattacacgatgagattctgattcatgaagaaaagcagatagaagtggttgaaaaaatgaattctgagctttctcttagttgtaagaaagaaaaagacttcttgcatgaaaatagtacgttgcgggaagaaattgccatgctaagactggagctagacacaatgaaacatcagagccagctaagaaaaaagaaatatttggaggatattgaaagtgtgaaaaaaaagaatgataatcttttaaaggctctacaattgaatgagctcaccatggatgatgataccgccgtgctcgtcattgacaacggctctggcatgtgcaaggccggctttgcgggcgacgatgccccccgggctgtcttcccttccatcgtggggcgccccaggcagcagggcatgatggggggcatgcatcagaaagagtcctatgtgggcaaggaggcccagagcaagagaggcatcctgaccctgaagtaccccatggaacacggcatcatcaccaactgggatgacatggagaagatctggcaccacaccttctacaacgagctgcgtgtggcccctgaggagcaccccatcctgctgaccgaggcccccctgaaccccaaggccaaccgcgagaagatgacccagatcatgtttgagaccttcaacaccccagccatgtacgtggccatccaggccatgctgtccctgtacacctctggccgtactactggcatcgtgatggactctggtgacggggtcacccacactgtgcccatctatgatgggaatgccctcccccatgccaccctgcgcctagacctggctgggcgggaactgactgactacctcatgaagatcctcaccgagcgtggctataggttcaccaccatggccgagcgggaaatcgtgcgtgacatcaaagagaagctgtgctatgttgccctggacttcgagcaggagatggccatggcggcctccagctcctccctagagaagagctacgagctgcccgatggccaggtcatcaccatcggcaacgagtggttccgctgccccgaggcgctcttccagccttgcttcctgggcatggaatcctgtggcatccatgaaactaccttcaactccatcatgaagtctgatgtggacatccgcaaagacctgtacaccaacacagtgctgtctggcggcaccaccatgtaccctggcatggcccacagaatgcagaaggagatcgctgccctggcgcctagcatgttgaagatcaggatcattgctcctcccaagcgcaagtactccgtgtgggtcggtggctccatcctggcctcgctgtccaccttccagcagatgtggatcagcaagcaggagtatgatgagtcaggcccctccattgtccaccgcaaatgcttctaggtggactctgacttagttgcgttacaccctttcttgacaaaaccaaacttctcagaaaacaacatgagattggcatggctttatttgttttcttgtttcattttttgttttgttttttattggcttgactcaggatttaaaaaccggaatggtgaaggtgacagcagtcggttggaggaagcttcctccaaagttctacaatgtggccaaggactttgattgtacattgttcttcttttcaatagtcattccaaatattgtgagacgcattgtttcaggaagccccttgccctgctaaaagccaccccacttctctctaaggagaatggcccagtcctctccctagttcacacaggggaggtgatagcattgcttttgtgcagattacataatgcaaaattttttgaatcttcgccttaatactttttaattttgttttattttgaatgatcagccttcgtggcccccctcttttgtaccccaacttggggtgtatgaaggcttttggtctccctgagagtggctggaggcagccagggcttacctgtactctgacttgaggagagttggataaaagtgcacaccttaaaaaaaattgaggaagcacagtatttcagtacagtggacagcttagcatgttgacaactgagaataaaatgctcagttctgaactggacaatgtaagacacaacgaggaaacaccggaaatggaaattcaattacgtcattgtagactggctgctgctctacatgattgtgaccaaagtcagatagctgaaagagacttctttccagagaacaagacatgaacaggtttatttacagaagacaatgaattctcatttatctcacctaaaagagaacagattctttctcaacaagtctaacgtagacagtaaaatcaacaggctaaaaattaagctccatgaaacaagataaaactctgagagaaaagacggggcaggccgccatctttcccgttcaggcaacttagtcattccagcctgcgggctttggagagtacaaaccgacgagggacagaagagatcccacagcacagcatagctgctttaccaaatcatggccagactgcttctgtaagcaggcccctgatcctgttccatctcactggacaggacctcccaactggggcctccagctacccccaccagcattccttggccaatggaaatgtgaaatgttcctgggacagagctcccggagaggggcaggcccccacctttgctctttcggtgactagccattctggcctgcgggctttggagagcccaagctgacaaggggtggaagaggtacctcagcacagcacagccacgctaccaaaacgtggccagactcttgtttacgtcagtccctgaccacatttctagtcagtgggtgaagtctttcaaccagggtctctggctaccttgactgctgttctctggccgacagaggtctcaggcctccctgagtcagagctcccagggggaggaccagattgtcatctttgctgttggggcgacccaggcatttcagccttagggcttcagagtgtctgaggcggaccaggggctgaagtgaacccccagcacagcacagctgctctataaaaacgtggccagacttttctttttgaagcaagtccctgttcttgttcgtcctgactaggtaagacttctcaacttgcctccagccacatcttataggtgtgttcagattggcaacaggttcgtacctcagtggtacagagcttccagaggaaggggcagactatcatcttccctggaaaatacaaggcaattagggactggaggggacccccagcataccacagcagccctacagaaaagtggccaggctctctacttgatgggcagatcctcctggcctgggtctctagccagcccaccactggagctatcaagccagtagcaactctgcagttcctgggacagagcttccaggagcaaatgaaatcctttctgccactgcctctgcagtggaactgcccttgctgccctcagaagatgcaagggagcaaagaccctaagtgccctatcaacacctccaataagctgcagttgacccaaagaacaagccagtccatctcccacgggtaccacacaccctccactactcatcaccagacagggaaccctggcttgggcccacagcacagaccctccatcctgggctgattacactaagtgattgctaactcacatgtctctgggatggagcacccaggaaacaagcaaagtggtggagcagcaagtcaggtgatgtggagcccagaggtcagggatggctgtctctctagggtccacttgcccttgtgagacactttatcccagcactttaggaatactgaggtcataccagccacatcttatatgcaagattgcccagcagagatcaggtccgagagttccctttttaaaaaaaggagacttgcttaataaaagaagtctagccacgtttgtgtagagcggctgtgctgtgctgggggttcacttttgagagagttctcctctgagacctgatctctggaggctgggcaatcttgcacttgagatggggctggtctgatctcagcactccttagtctgctcgcctctcccatggccccagcctggccacacctgcttacggggcactcttagatgcccacaccatagcttccgtgctagtggactgtaccatatcagtggagagctgcagcaaggtggcccctagagccacgcaccagcctgcacattgcctctccatacggcagccctttatttggaaacttcctaaatcactttgctgtgtgtgtttacacgggtgggttttgctttacttgccctgagagcacacaggagtgcagcacacaccccaacccacatcaactgccattaaagaaaagaaatttcagcccagaatttcatgtccagcaaaattaagcatcataagtgaaggagaaataagatccttttcagacaagcaagtgctgagggaatttggtatcaccagatctaccttacgagagctcctgaaggaagcactaaatatggaaagaaaagatcatcacctgctactacaaaaacacactgaagtacacagtccaatgatgctaaaaagcaagcacatatgtaagtctgcaaaataaccagctgacagcatgacgacaggataaaatccacacataccattactaaccttaaatgtaaatgggctaaatgctcccattgaaagacacggggcaagctgggtaaagaaccaagacccactggagtatgccgtcttcaagcaacccatctcacgtgcagtgccatacataggctcaaaataaaggaatggagaaaaatatttcaag

SEQ ID NO: 168398 - DNA, 1926 bp, Homo sapiens
  Payload ID: 13145
  Gene Symbol: POTEI
  Gene Name: POTE ankyrin domain family, member I
  ENST ID: ENST00000615053
  CDS Start-End: 53-1579
ggtagacgtgatctgctcgctactaccggcctccccaggctgttaaaagcagatggtagctgaggttgattcaatgccggctgcctcttctgtgaagaagccatttgttctcaggagcaagatgggcaagtggtgccgccactgcttcccctgctgcagggggagcggcaagagcaacgtgggcacttctggagaccaggacgactccactatgaagacactcaggagcaagatgggcaagtggtgctgccactgcttcccctgctgcagggggagtggcaagagcaacgtgggcacttctggagaccacgacgactccgctatgaagacgctcaggagcaagatgggcaagtggtgctgccactgcttcccctgctgcagggggagcggcaagagcaacgtgggtgcttggggagactacgacgacagcgccttcgtggagccgagataccacgtccgtcgagaagatctggacaagctccacagagctgcctggtggggtaaagtcgccagaaaggatctgatcgtcatgctcagggacactgacgtgaacaagcaggacaagcaaaagaggactgctctacatctggcctctgccaatgggaattcaggagtagtaaaactcctgctggacagacgatgtcaacttaatgtccttgacaacaaaaagaggacagctctgacaaaggccgtacaatgccaggaagatgaatgtgcgttaatgttgctggaacatggcactgatccaaacattccagatgagtatggaaataccactctacactacgctatctacaatgaagataaattaatggccaaagcactgctcttatacggtgctgatatcgaatcaaaaaacaagcatggcctcacaccactgctacttggtgtacatgagcaaaaacagcaagtggtgaaatttttaatcaagaaaaaagcgaatttaaatgcgctggatagatatggaagaactgctctcatacttgctgtatgttgtggatcagcaagtatagtcagccttctacttgagcaaaatattgatgtatcttctcaagatctatctggacagacggccagagagtatgctgtttctagtcatcatcatgtaatttgccagttactttctgactacaaagaaaaacagatgctaaaaatctcttctgaaaacagcaatccagaacaagacttaaagctgacatcagaggaagagtcacaaaggttcaaaggcagtgaaaatagccagccagagaaaatgtctcaagaaccagaaataaataaggatggtgatagaaaggttgaagaagaaatgaagaagcacggaagtactcacgtcggattcccagaaaacctgactaatggtgccactgctggcaatggtgatgatggattaattcctccaaggaagagcagaacacctgaaagccagcaatttcctgacactgagaatgaagagtatcacagtgacgaacaaaatgatactcagaagcaattttgtgaagaacagaacactggaatattacacgatgagattctgattcatgaagaaaagcagatagaagtggttgaaaatgaattctgagctttctcttagttgtaagaaagaaaaagacttcttgcatgaaaatagtacgttgcgggaagaaattgccatgctaagactggagctagacacaatgaaacatcagagccagctaagaaaaaagaaatatttggaggatattgaaagtgtgaaaaaaaagaatgataatcttttaaaggctctacaattgaatgagctcaccatggatgatgataccgccgtgctcgtcattgacaacggctctggcatgtgcaaggccggctttgcgggcgacgatgccccccgggctgtcttcccttccatcgtggggcgccccaggcagcagggcatgatggggggcatgcatc

SEQ ID NO: 168399 - DNA, 2072 bp, Homo sapiens
  Payload ID: 13145
  Gene Symbol: POTEI
  Gene Name: POTE ankyrin domain family, member I
  ENST ID: ENST00000631234
  CDS Start-End: 53-1183
ggtagacgtgatctgctcgctactaccggcctccccaggctgttaaaagcagatggtagctgaggttgattcaatgccggctgcctcttctgtgaagaagccatttgttctcaggagcaagatgggcaagtggtgccgccactgcttcccctgctgcagggggagcggcaagagcaacgtgggcacttctggagaccaggacgactccactatgaagacactcaggagcaagatgggcaagtggtgctgccactgcttcccctgctgcagggggagtggcaagagcaacgtgggcacttctggagaccacgacgactccgctatgaagacgctcaggagcaagatgggcaagtggtgctgccactgcttcccctgctgcagggggagcggcaagagcaacgtgggtgcttggggagactacgacgacagcgccttcgtggagccgagataccacgtccgtcgagaagatctggacaagctccacagagctgcctggtggggtaaagtcgccagaaaggatctgatcgtcatgctcagggacactgacgtgaacaagcaggacaagcaaaagaggactgctctacatctggcctctgccaatgggaattcaggagtagtaaaactcctgctggacagacgatgtcaacttaatgtccttgacaacaaaaagaggacagctctgacaaaggccgtacaatgccaggaagatgaatgtgcgttaatgttgctggaacatggcactgatccaaacattccagatgagtatggaaataccactctacactacgctatctacaatgaagataaattaatggccaaagcactgctcttatacggtgctgatatcgaatcaaaaaacaagcatggcctcacaccactgctacttggtgtacatgagcaaaaacagcaagtggtgaaatttttaatcaagaaaaaagcgaatttaaatgcgctggatagatatggaagaactgctctcatacttgctgtatgttgtggatcagcaagtatagtcagccttctacttgagcaaaatattgatgtatcttctcaagatctatctggacagacggccagagagtatgctgtttctagtcatcatcatgtaatttgccagttactttctgactacaaagaaaaacagatgctaaaaatctcttctgaaaacagcaatccaggttgaagaagaaatgaagaagcatgaaagtaataatgtgggattactagaaaacctgagtaatggtgtcactgctggcaatggtgatgatggattaattcctcaaaggaagagcagaacacctgaaaatcagcaatttcctgacaacgaaagtgaagagtatcacagaatttgcgaattagtttctgactacaaagaaaaacagatgccaaaatactcttctgaaaacagcaacccagaacaagacttaaagctgacatcagaggaagagtcacaaaggcttaaaggcagtgaaaatggccagccagagaaaagatctcaagaaccagaaataaataaggatggtgatagagagctagaaaattttatggctatcgaagaaatgaagaagcacggaagtactcacgtcggattcccagaaaacctgactaatggtgccactgctggcaatggtgatgatggattaattcctccaaggaagagcagaacacctgaaagccagcaatttcctgacactgagaatgaagagtatcacagtgacgaacaaaatgatactcagaagcaattttgtgaagaacagaacactggaatattacacgatgagattctgattcatgaagaaaagcagatagaagtggttgaaaaaatgaattctgagctttctcttagttgtaagaaagaaaaagacttcttgcatgaaaatagtacgttgcgggaagaaattgccatgctaagactggagctagacacaatgaaacatcagagccagctaagaaaaaagaaatatttggaggatattgaaagtgtgaaaaaaaagaatgataatcttttaaaggctctacaattgaatgagctcaccatggatgatgataccgccgtgctcgtcattgacaac

SEQ ID NO: 168400 - DNA, 3383 bp, Homo sapiens
  Payload ID: 13146
  Gene Symbol: POTEJ
  Gene Name: POTE ankyrin domain family, member J
  Uniprot ID: P0CG39
  ENST ID: ENST00000409602
  CDS Start-End: 53-3169
ggtagacgtgatctgctcgctactaccggcctccccaggctgttaaaagcagatggtagctgaggttgattcaatgccggctgcctcttctgtgaagaagccatttgttctcaggagcaagatgggcaagtggtgccgccactgcttcccctgctgcagggggagcggcaagagcaacgtgggcacttctggagaccaggacgactccactatgaagacactcaggagcaagatgggcaagtggtgctgccactgcttcccctgctgcagggggagcggcaagagcaacgtgggtgcttggggagactacgacgacagcgccttcgtggagccgagataccacgtccgtcgagaagatctggacaagctccacagagctgcctggtggggtaaagtcgccagaaaggatctgatcgtcatgctcagggacactgacgtgaacaagcaggacaagcaaaagaggactgctctacatctggcctctgccaatgggaattcaggagtagtaaaactcctgctggacagacgatgtcaacttaatgtccttgacaacaaaaagaggacagctctgacaaaggccgtacaatgccaggaagatgaatgtgcgttaatgttgctggaacatggcactgatccaaacattccagatgagtatggaaataccactctacactacgctatctacaatgaagataaattaatggccaaagcactgctcttatacggtgctgatatcgaatcaaaaaacaagcatggcctcacaccactgctacttggtgtacatgagcaaaaacagcaagtggtgaaatttttaatcaagaaaaaagcgaatttaaatgcactggatagatatggaagaactgctctcatacttgctgtatgttgtggatcagcaagtatagtcagccttctacttgagcaaaatattgatgtatcttctcaagatctatctggacagacggccagagagtatgctgtttctagtcatcatcatgtaatttgccagttactttctgactacaaagaaaaacagatgctaaaaatctcttctgaaaacagcaatccagaacaagacttaaagctgacatcagaggaagagtcacaaaggttcaaaggcagtgaaaatagccagccagagaaaatgtctcaagaaccagaaataaataaggatggtgatagagaggttgaagaagaaatgaagaagcatgaaagtaataatgtgggattactagaaaacctgagtaatggtgtcactgctggcaatggtgatgatggattaattcctcaaaggaagagcagaacacctgaaaatcagcaatttcctgacaacgaaagtgaagagtatcacagaatttgcgaattagtttctgactacaaagaaaaacagatgccaaaatactcttctgaaaacagcaacccagaacaagacttaaagctgacatcagaggaagagtcacaaaggcttaaaggcagtgaaaatggccagccagagaaaagatctcaagaaccagaaataaataaggatggtgatagagagctagaaaattttatggctatcgaagaaatgaagaagcacggaagtactcacgtcggattcccagaaaacctgactaatggtgccactgctggcaatggtgatgatggattaattcctccaaggaagagcagaacacctgaaagccagcaatttcctgacactgagaatgaagagtatcacagtgacgaacaaaatgatactcagaagcaattttgtgaagaacagaacactggaatattacacgatgagattctgattcatgaagaaaagcagatagaagtggttgaaaaaatgaattctgagctttctcttagttgtaagaaagaaagagacttcttgcatgaaaatagtatgttgcgggaagaaattgccatgctaagactggagctagacacaatgaaacatcagagccagctaagaaaaaagaaatatttggaggatattgaaagtgtgaaaaaaaagaatgataatcttttaaaggctctacaattgaatgagctcaccatggatgatgataccgctgtgctcgtcattgacaacggctctggcatgtgcaaggccggctttgcgggcgacgatgccccccgggctgtcttcccttccatcgtggggtgccccaggcagcagggcatgatggggggcatgcatcagaaagagtcctatgtgggcaaggaggcccagagcaagagaggcatcctgaccctgaagtaccccatggaacacggcatcatcaccaactgggatgacatggagaagatctggcaccacaccttctacaacgagctgcgtgtggcccccgaggagcaccccatcctgctgaccgaggcccccctgaaccccaaggccaaccgcgagaagatgacccagatcatgtttgagaccttcaacaccccagccatgtacgtggccatccaggccatgctgtccctgtacacctctggccgtactactggcatcgtgatggactctggtgacggggtcacccacactgtgcccatctatgatgggaatgccctcccccatgccaccctgcgcctagacctggctgggcgggaactgactgactacctcatgaagatcctcaccgagcgtggctataggttcaccaccatggccgagcgggaaatcgtgcgtgacatcaaagagaagctgtgctatgttgccctggacttcgagcaggagatggccatggtggcctccagctcctccctagagaagagctacgagctgcccgatggccaggtcatcaccatcagcaacgagtggttccgctgccccgaggcgctcttccagccttgcttcctgggcatggaatcctgtggcatccatgaaactaccttcaactccatcatgaagtctgatgtggacatccgcaaagacctgtacaccaacacagtgctgtctggcggcaccaccatgtaccctggcatggcccacagaatgcagaaggagatcgctgccctggcgcctagcatgatgaagatcaggatcattgctcctcccaagcgcaagtactccgtgtgggtcggtggctccatcctggcctcgctgtccaccttccagcagatgtggatcagcaagcaggagtatgatgagtcaggcccctccattgtccaccgcaaatgcttctaggtggactctgacttagttgcgttacaccctttcttgacaaaaccaaacttctcagaaaacaacatgagattggcatggctttatttgttttcttgtttcattttttgttttgttttttattggcttgactcaggatttaaaaaccggaatggtgaaggtgacagcagtcggttggaggaagcttcctccaaagttctacaatgtggccaaggac

SEQ ID NO: 168401 - DNA, 1817 bp, Homo sapiens
  Payload ID: 13147
  Gene Symbol: POTEM
  Gene Name: POTE ankyrin domain family, member M
  Uniprot ID: A6NI47
  ENST ID: ENST00000547889
  CDS Start-End: 53-1579
ggtagacgcgatctgctggctactaccggcctcccctggctgttaaaagcagatggtggctgaggctggttcaatgccggctgcctcctctgtgaagaagccatttggtctcagaagcaagatgggcaagtggtgccgccactgcttcccctggtgcagggggagcggcaagagcaacgtgggcacttctggagaccacgatgattctgctatgaagacactcaggagcaagatgggcaagtggtgccgccactgcttcccctggtgcagggggagcggcaagagcaacgtgggcacttctggagaccacgacgactctgctatgaagacactcaggagcaagatgggcaagtggtgctgccactgcttcccctgctgcagggggagcggcaagagcaaagtgggcccctggggagactacgacgacagcgctttcatggagccgaggtaccacgtccgtcgagaagatctggacaagctccacagagctgcctggtggggtaaagtccccagaaaggatctcatcgtcatgctcaaggacactgacatgaacaagaaggacaagcaaaagaggactgctctacatctggcctctgccaatggaaattcagaagtagtaaaactcctgctggacagacgatgtcaacttaatatccttgacaacaaaaagaggacagctctgacaaaggccgtacaatgccaggaagatgaatgtgcgttaatgttgctggaacatggcactgatccgaatattccagatgagtatggaaataccgctctacactatgctatctacaatgaagataaattaatggccaaagcactgctcttatacggtgctgatatcgaatcaaaaaacaagcatggcctcacaccactgttacttggtgtacatgagcaaaaacagcaagtggtgaaattcttaatcaagaaaaaagcaaatttaaatgcactggatagatatggaagaactgttctcatacttgctgtatgttgtggatcggcaagtatagtcagccttctacttgagcaaaacattgatgtatcttctcaagatctatctggacagacggccagagagtatgctgtttctagtcgtcataatgtaatttgccagttactttctgactacaaagaaaaacagatactaaaagtctcttctgaaaacagcaatccagaacaagacttaaagctgacatcagaggaagagtcacaaaggcttaaaggaagtgaaaatagccagccagaggaaatgtctcaagaaccagaaataaataagggtggtgatagaaaggttgaagaagaaatgaagaagcacggaagtactcatatgggattcccagaaaacctgcctaacggtgccactgctgacaatggtgatgatggattaattccaccaaggaaaagcagaacacctgaaagccagcaatttcctgacactgagaatgaacagtatcacagtgatgaacaaaatgatactcagaagcaactttctgaagaacagaacactggaatattacaagatgagattctgattcatgaagaaaagcagatagaagtggctgaaaatgaattctgagctttctcttagttataagaaagaaaaagacctcttgcatgaaaatagtacgttgcaggaagaaattgtcatgctaagactggaactagacgtaatgaaacatcagagccagctaagagaaaagaaatatttggaggaaattgaaagtgtggaaaaaaagaatgataatcttttaaagggtctacaactgaatgagctcaccatggatgatgatactgccgtgctcgtcattgacaac

SEQ ID NO: 168402 - DNA, 2073 bp, Homo sapiens
  Payload ID: 13147
  Gene Symbol: POTEM
  Gene Name: POTE ankyrin domain family, member M
  ENST ID: ENST00000552966
  CDS Start-End: 53-1021
ggtagacgcgatctgctggctactaccggcctcccctggctgttaaaagcagatggtggctgaggctggttcaatgccggctgcctcctctgtgaagaagccatttggtctcagaagcaagatgggcaagtggtgccgccactgcttcccctggtgcagggggagcggcaagagcaacgtgggcacttctggagaccacgatgattctgctatgaagacactcaggagcaagatgggcaagtggtgccgccactgcttcccctggtgcagggggagcggcaagagcaacgtgggcacttctggagaccacgacgactctgctatgaagacactcaggagcaagatgggcaagtggtgctgccactgcttcccctgctgcagggggagcggcaagagcaaagtgggcccctggggagactacgacgacagcgctttcatggagccgaggtaccacgtccgtcgagaagatctggacaagctccacagagctgcctggtggggtaaagtccccagaaaggatctcatcgtcatgctcaaggacactgacatgaacaagaaggacaagcaaaagaggactgctctacatctggcctctgccaatggaaattcagaagtagtaaaactcctgctggacagacgatgtcaacttaatatccttgacaacaaaaagaggacagctctgacaaaggccgtacaatgccaggaagatgaatgtgcgttaatgttgctggaacatggcactgatccgaatattccagatgagtatggaaataccgctctacactatgctatctacaatgaagataaattaatggccaaagcactgctcttatacggtgctgatatcgaatcaaaaaacaagattgagtctcactctgtttcccaggctggagtgcagtggtgtgatcacagctcactgcaacctcgacctcccgaagctcagatggtcctccaacctcaacctcagttttttttttctttctttctttttatttttatttttatttttatttttttttagtagagatgaggtttttgccatgtttctcaggctggtcttgaactcctgggctcaagcaattcatccccctcagcctcccaaagtgctaggattacagcatggcctcacaccactgttacttggtgtacatgagcaaaaacagcaagtggtgaaattcttaatcaagaaaaaagcaaatttaaatgcactggatagatatggaagaactgttctcatacttgctgtatgttgtggatcggcaagtatagtcagccttctacttgagcaaaacattgatgtatcttctcaagatctatctggacagacggccagagagtatgctgtttctagtcgtcataatgtaatttgccagttactttctgactacaaagaaaaacagatactaaaagtctcttctgaaaacagcaatccagaacaagacttaaagctgacatcagaggaagagtcacaaaggcttaaaggaagtgaaaatagccagccagaggaaatgtctcaagaaccagaaataaataagggtggtgatagaaaggttgaagaagaaatgaagaagcacggaagtactcatatgggattcccagaaaacctgcctaacggtgccactgctgacaatggtgatgatggattaattccaccaaggaaaagcagaacacctgaaagccagcaatttcctgacactgagaatgaacagtatcacagtgatgaacaaaatgatactcagaagcaactttctgaagaacagaacactggaatattacaagatgagattctgattcatgaagaaaagcagatagaagtggctgaaaatgaattctgagctttctcttagttataagaaagaaaaagacctcttgcatgaaaatagtacgttgcaggaagaaattgtcatgctaagactggaactagacgtaatgaaacatcagagccagctaagagaaaagaaatatttggaggaaattgaaagtgtggaaaaaaagaatgataatcttttaaagggtctacaactgaatgagctcaccatggatgatgatactgccgtgctcgtcattgacaac

SEQ ID NO: 168403 - DNA, 1975 bp, Homo sapiens
  Payload ID: 13147
  Gene Symbol: POTEM
  Gene Name: POTE ankyrin domain family, member M
  ENST ID: ENST00000616847
  CDS Start-End: 53-1513
ggtagacgcgatctgctggctactaccggcctcccctggctgttaaaagcagatggtggctgaggctggttcaatgccggctgcctcctctgtgaagaagccatttggtctcagaagcaagatgggcaagtggtgccgccactgcttcccctggtgcagggggagcggcaagagcaacgtgggcacttctggagaccacgatgattctgctatgaagacactcaggagcaagatgggcaagtggtgccgccactgcttcccctggtgcagggggagcggcaagagcaacgtgggcacttctggagaccacgacgactctgctatgaagacactcaggagcaagatgggcaagtggtgctgccactgcttcccctgctgcagggggagcggcaagagcaaagtgggcccctggggagactacgacgacagcgctttcatggagccgaggtaccacgtccgtcgagaagatctggacaagctccacagagctgcctggtggggtaaagtccccagaaaggatctcatcgtcatgctcaaggacactgacatgaacaagaaggacaagcaaaagaggactgctctacatctggcctctgccaatggaaattcagaagtagtaaaactcctgctggacagacgatgtcaacttaatatccttgacaacaaaaagaggacagctctgacaaaggccgtacaatgccaggaagatgaatgtgcgttaatgttgctggaacatggcactgatccgaatattccagatgagtatggaaataccgctctacactatgctatctacaatgaagataaattaatggccaaagcactgctcttatacggtgctgatatcgaatcaaaaaacaagcatggcctcacaccactgttacttggtgtacatgagcaaaaacagcaagtggtgaaattcttaatcaagaaaaaagcaaatttaaatgcactggatagatatggaagaactgttctcatacttgctgtatgttgtggatcggcaagtatagtcagccttctacttgagcaaaacattgatgtatcttctcaagatctatctggacagacggccagagagtatgctgtttctagtcgtcataatgtaatttgccagttactttctgactacaaagaaaaacagatactaaaagtctcttctgaaaacagcaatccagaacaagacttaaagctgacatcagaggaagagtcacaaaggcttaaaggaagtgaaaatagccagccagaggaaatgtctcaagaaccagaaataaataagggtggtgatagaaaggttgaagaagaaatgaagaagcacggaagtactcatatgggattcccagaaaacctgcctaacggtgccactgctgacaatggtgatgatggattaattccaccaaggaaaagcagaacacctgaaagccagcaatttcctgacactgagaatgaacagtatcacagggacttttctggccatcccaactttcccacgacccttcccatcaaacagtgatgaacaaaatgatactcagaagcaactttctgaagaacagaacactggaatattacaagatgagattctgattcatgaagaaaagcagatagaagtggctgaaaatgaattctgagctttctcttagttataagaaagaaaaagacctcttgcatgaaaatagtacgttgcaggaagaaattgtcatgctaagactggaactagacgtaatgaaacatcagagccagctaagagaaaagaaatatttggaggaaattgaaagtgtggaaaaaaagaatgataatcttttaaagggtctacaactgaatgagctcaccatggatgatgatactgccgtgctcgtcattgacaacggctctggcatgtgcaaggccggctttgcaggtgacgatgccccccgggctgtcttcccttccatcgtggggtgccccaggcaccagaacatgatggggggcatgcgtc

SEQ ID NO: 168404 - DNA, 1491 bp, Homo sapiens
  Payload ID: 13148
  Gene Symbol: POU1F1
  Gene Name: POU class 1 homeobox 1
  Uniprot ID: P28069
  ENST ID: ENST00000350375
  CDS Start-End: 126-1001
ctcagagccttcctgatgtatatatgcaggtagtgagaattgaatcggccctttgagacagtaatataataaaactctgatttggggagcagcggttctccttatttttctactctcttgtgggaatgagttgccaagcttttacttcggctgatacctttatacctctgaattctgacgcctctgcaactctgcctctgataatgcatcacagtgctgccgagtgtctaccagtctccaaccatgccaccaatgtgatgtctacagcaacaggacttcattattctgttccttcctgtcattatggaaaccagccatcaacctatggagtgatggcaggtagtttaaccccttgtctttataaatttcctgaccacaccttgagtcatggatttcctcctatacaccagcctcttctggcagaggaccccacagctgctgatttcaagcaggaactcaggcggaaaagtaaattggtggaagagccaatagacatggattctccagaaatcagagaacttgaaaagtttgccaatgaatttaaagtgagacgaattaaattaggatacacccagacaaatgttggggaggccctggcagctgtgcatggctctgaattcagtcaaacaacaatctgccgatttgaaaatctgcagctcagctttaaaaatgcatgcaaactgaaagcaatattatccaaatggctggaggaagctgagcaagtaggagctttgtacaatgaaaaagtgggagcaaatgaaaggaaaagaaaacgaagaacaactataagcattgctgctaaagatgctctggagagacactttggagaacagaataaaccttcttctcaagagatcatgaggatggctgaagaactgaatctggagaaagaagtagtaagagtttggttttgcaaccggaggcagagagaaaaacgggtgaaaacaagtctgaatcagagtttattttctatttctaaggaacatcttgagtgcagataagatttttctattgtataatagcctttttctcccgtttcattcctttctcttcctcaacaaaaacagaaattacttggttgacttaaaatcattttatatcaatagcttttacagaagctttacttttccacttttttttaaaaaaaagaaaccaacaatttaaattatattgatgttatttacttaaaataattattctcagaagccacattatctattttaagccaaatatattaacagtaataaaatgatctctctgtctctcccgctctctttctcacacacacgcagacatatgagtatgggtttataagttccttttccaaacatgtatattagctttttaacatgtaagtcagtaatgacacatatgtaaagcacatcaccagaaatatccaattcaaaaattaaccaatgttctgctttctaccaactctactaatttgtctgaactaaaagttttgaacttaagagctggaggtgtcttata

SEQ ID NO: 168405 - DNA, 1149 bp, Homo sapiens
  Payload ID: 13148
  Gene Symbol: POU1F1
  Gene Name: POU class 1 homeobox 1
  Uniprot ID: P28069
  ENST ID: ENST00000344265
  CDS Start-End: 43-996
ggggagcagcggttctccttatttttctactctcttgtgggaatgagttgccaagcttttacttcggctgatacctttatacctctgaattctgacgcctctgcaactctgcctctgataatgcatcacagtgctgccgagtgtctaccagtctccaaccatgccaccaatgtgatgtctacagtcccatctattttgtctttgatccaaactcctaaatgtttgtgcacacatttctcggtgacaacgttgggaaacacagcaacaggacttcattattctgttccttcctgtcattatggaaaccagccatcaacctatggagtgatggcaggtagtttaaccccttgtctttataaatttcctgaccacaccttgagtcatggatttcctcctatacaccagcctcttctggcagaggaccccacagctgctgatttcaagcaggaactcaggcggaaaagtaaattggtggaagagccaatagacatggattctccagaaatcagagaacttgaaaagtttgccaatgaatttaaagtgagacgaattaaattaggatacacccagacaaatgttggggaggccctggcagctgtgcatggctctgaattcagtcaaacaacaatctgccgatttgaaaatctgcagctcagctttaaaaatgcatgcaaactgaaagcaatattatccaaatggctggaggaagctgagcaagtaggagctttgtacaatgaaaaagtgggagcaaatgaaaggaaaagaaaacgaagaacaactataagcattgctgctaaagatgctctggagagacactttggagaacagaataaaccttcttctcaagagatcatgaggatggctgaagaactgaatctggagaaagaagtagtaagagtttggttttgcaaccggaggcagagagaaaaacgggtgaaaacaagtctgaatcagagtttattttctatttctaaggaacatcttgagtgcagataagatttttctattgtataatagcctttttctcccgtttcattcctttctcttcctcaacaaaaacagaaattacttggttgacttaaaatcattttatatcaatagcttttacagaagctttacttttccacttttttttaaaaaaaagaaacc

SEQ ID NO: 168406 - DNA, 647 bp, Homo sapiens
  Payload ID: 13148
  Gene Symbol: POU1F1
  Gene Name: POU class 1 homeobox 1
  ENST ID: ENST00000560656
  CDS Start-End: 1-510
atgagttgccaagcttttacttcggctgatacctttatacctctgaattctgacgcctctgcaactctgcctctgataatgcatcacagtgctgccgagtgtctaccagtctccaaccatgccaccaatgtgatgtctacagcaacaggacttcattattctgttccttcctgtcattatggaaaccagccatcaacctatggagtgatggcaggtagtttaaccccttgtctttataaatttcctgaccacaccttgagtcatggatttcctcctatacaccagcctcttctggcagaggaccccacagctgctgatttcaagcaggaactcaggcggaaaagtaaattggtggaagagccaatagacatggattctccagaaatcagagaacttgaaaagtttgccaatgaatttaaagtgagacgaattaaattagcattgctgctaaagatgctctggagagacactttggagaacagaataaaccttcttctcaagagatcatgaggatggctgaagaactgaatctggagaaagaagtagtaagagtttggttttgcaaccggaggcagagagaaaaacgggtgaaaacaagtctgaatcagagtttattttctatttctaaggaacatcttgagtgcaga

SEQ ID NO: 168407 - DNA, 650 bp, Homo sapiens
  Payload ID: 13148
  Gene Symbol: POU1F1
  Gene Name: POU class 1 homeobox 1
  ENST ID: ENST00000561167
  CDS Start-End: 1-650
atgagttgccaagcttttacttcggctgatacctttatacctctgaattctgacgcctctgcaactctgcctctgataatgcatcacagtgctgccgagtgtctaccagtctccaaccatgccaccaatgtgatgtctacagcaacaggacttcattattctgttccttcctgtcattatggaaaccagccatcaacctatggagtgatggcaggatacacccagacaaatgttggggaggccctggcagctgtgcatggctctgaattcagtcaaacaacaatctgccgatttgaaaatctgcagctcagctttaaaaatgcatgcaaactgaaagcaatattatccaaatggctggaggaagctgagcaagtaggagctttgtacaatgaaaaagtgggagcaaatgaaaggaaaagaaaacgaagaacaactataagcattgctgctaaagatgctctggagagacactttggagaacagaataaaccttcttctcaagagatcatgaggatggctgaagaactgaatctggagaaagaagtagtaagagtttggttttgcaaccggaggcagagagaaaaacgggtgaaaacaagtctgaatcagagtttattttctatttctaaggaacatcttgagtgcagata

SEQ ID NO: 168408 - DNA, 3295 bp, Homo sapiens
  Payload ID: 13149
  Gene Symbol: POU2AF1
  Gene Name: POU class 2 associating factor 1
  Uniprot ID: Q16633
  ENST ID: ENST00000393067
  CDS Start-End: 516-1286
gcaggcgcccatggcgggctgagtcctgcccatgccctggtggcctggaagcctgcatgggcgccgtgcaaagatcaacgttttccagaggagcttttgggctcatcactggcctggggagggcttgacacggggttcccacagcttgccccacaccaccttcacacccacacacagcaggtccccgcggggccggtgcaggctgtggctgcccgcgctgcgctgttgctctgtcccagctggctagctccgagtgtggagcgctctgggccggggccgctggggcgcgcacagtggggtgacaggcggcctggctgcagaaacgttgcaccggtgcctgaggtgggaggatgtgatgacgcggcccacgcagcgggaacccaggcctttaaaaagcccaggaaacagcctcagctcaagcggtggctccactggaggaaaacacaccccggtctcacattaaagaagccaaactgtcggcttcaaagagaaaaggcaacatcctgtcacaggccatgctctggcaaaaacccacagctccggagcaagccccagccccggcccggccataccagggcgtccgtgtgaaggagccagtgaaggaactgctgaggaggaagcgaggccacgccagcagtggggcagcacctgcacctacggcggtggtgctgccccatcagcccctggcgacctacaccacagtgggtccttcctgcctggacatggaaggttctgtgtctgcagtgacagaggaggctgccctgtgtgccggctggctctcccagcccaccccggccaccctgcagcccctggccccatggacaccttacaccgagtatgtgccccatgaagctgtcagctgcccctactcagctgacatgtatgtgcagcccgtgtgccccagctacacggtggtggggccctcctcagtgttgacctatgcctctccgccactcatcaccaatgtcacgacaagaagctccgccacgcccgcagtggggcccccgctggagggcccagagcaccaggcacccctcacctatttcccgtggcctcagcccctttccacactacccacctccaccctgcagtaccagcctccggccccagccctacctgggccccagtttgtccagctccccatctctatcccagagccagtccttcaggacatggaagaccccagaagagccgccagctcgttgaccatcgacaagctgcttttggaggaagaggatagcgacgcctatgcgcttaaccacactctctctgtggaaggcttttaggcgtggctcccacctgagtcctgttccctgaaactgggattttaaaatgagcctggaattgagccccaggttcatgcttgtttggagtagtcatttcatgactacactttctacgcacagctagaattgtagacctgtaaaccttccttcccttcttccttcccctccctccctcacttcctccctctcccccatccttccattcttcccctccctcccttcttcctttccaaccccttccttccttttcctccctcccttccttccctccttcccttctccctttccaaccccttccttccttttcctccctcccttccttccctccttcccttctccctttccttctttacctccctccctccctcgcttcttctctctttcttacttcttttttcaattctgttccattttgggaggtaattatagggattttagcaataacattttatgtcaaatgttgccaagtctgtggtccatgggctttcatttctgtcacatttcatttcttggaaaaggcctccttcctccagtgcctgctgaaccatcttagggtcactcacaccctctgtaattttaagatgtatgtggtggccggcgggaagaccagccccgacagcacctcctgagaaagtcagccaagggcctaccctgatgccagagtccttgagctgtcagttcccacagttgctcctttgtttgctcttctcagcctcggccagatttacagtccaggcagcaaaatctcaaggcctggggctcagagtagtaaggggtgggaagtgggtggcagggagaaaagaacatcagggtgggtggggacaggccagtgacgaagagagggacagaggagggatgggaacaggctgtgcatcttagttggagagaggggtgtgggaggaagcttgagtttgatgcagggaggaggaaggctgaggaatgacttggctccagattacttggttattaagaagaacaataaactaaaggaaagcattgcttgaagagatggttttgctgctctccttgaggatacgtgcaagggaagttgggctgttgtaaacagggtgaagggtgtgtttggtcggccatttctgtctcacctctaggccctctgctggtgctgtggaggccaagaccccattaagcctaaaggtgatgggtcctcgcctaggcttagtgctaccatgtgggttttgtttctttccttccttccttccttccttccttccttccttccttccttccttccttccttccttccttctttccttccttccttccttccttccttcctctctctttctttcttttttttggttttttttgggacggagtctcactccattgcccaggctggagtacaatggtgcgatcttggctcactgcacctctgtctcccaagttcaagtgattctcctgcctgagcctcccgagtagctgggattacaggtgcatgccaccatgcctggctaatttttgtatttttagtagagacggggtttcaccatgttggccaggctggtctcgaactcctgaccttgtgatccgcccgcctcagcctctcagagtgctgggatcacaggcgtgagccaccgcacccagccttttaccatgtgggtttctttagtgtcttaaaagcgtccataagccaccattctgtggaaccaaggccccctccacgcaaacaccctccctcctggggacctctggagcctcagccagaagtaccattaggtttaattttaatttgttttgctggagaaacatcaggtttgtaggagactgagttgttagcaggtgtgcttagctcttgatagtgaacgtgtaccttgggaactggctcacccacctgctaatagcaccatcgtcactattaagcagacatttcagttggtagaatccatgtagaagtcatggacttttctgggaaatgacttttctgggaaatgacagtttctttgacatattttctttgcccactttaaataaaaactctggagaaagtt

SEQ ID NO: 168409 - DNA, 524 bp, Homo sapiens
  Payload ID: 13149
  Gene Symbol: POU2AF1
  Gene Name: POU class 2 associating factor 1
  ENST ID: ENST00000531398
  CDS Start-End: 144-524
ataggcatgtcctgcatgctccctctttggaggcagaagtcacaggccctggctctgcatgagggaaacaattccaagaaaaaggacattcttcacccagcagctcctgccatattcactgagatgtgtttttgtattttcctatgtatttcttcatcagagatgccacagctccggagcaagccccagccccggcccggccataccagggcgtccgtgtgaaggagccagtgaaggaactgctgaggaggaagcgaggccacgccagcagtggggcagcacctgcacctacggcggtggtgctgccccatcagcccctggcgacctacaccacagtgggtccttcctgcctggacatggaaggttctgtgtctgcagtgacagaggaggctgccctgtgtgccggctggctctcccagcccaccccggccaccctgcagcccctggccccatggacaccttacaccgagtatgtgccccatgaagctgtcagctgcccctactcagctgacatgtatgtgcag

SEQ ID NO: 168410 - DNA, 13945 bp, Homo sapiens
  Payload ID: 13150
  Gene Symbol: POU2F1
  Gene Name: POU class 2 homeobox 1
  ENST ID: ENST00000271411
  CDS Start-End: 9-182
tattcaaaatggcggacggaggagcagcgagtcaagatgagagttcagccgcggcggcagcagcagcagactggaaaagtaagaagagctttcctgcctttttaattaccaaactactctcagttttcaatgaatcagttcaaagaaagaatgcagtctttctatacctgactcaagaatgaacaatccgtcagaaaccagtaaaccatctatggagagtggagatggcaacacaggcacacaaaccaatggtctggactttcagaagcagcctgtgcctgtaggaggagcaatctcaacagcccaggcgcaggctttccttggacatctccatcaggtccaactcgctggaacaagtttacaggctgctgctcagtctttaaatgtacagtctaaatctaatgaagaatcgggggattcgcagcagccaagccagccttcccagcagccttcagtgcaggcagccattccccagacccagcttatgctagctggaggacagataactgggcttactttgacgcctgcccagcaacagttactactccagcaggcacaggcacaggcacagctgctggctgctgcagtgcagcagcactccgccagccagcagcacagtgctgctggagccaccatctccgcctctgctgccacgcccatgacgcagatccccctgtctcagcccatacagatcgcacaggatcttcaacaactgcaacagcttcaacagcagaatctcaacctgcaacagtttgtgttggtgcatccaaccaccaatttgcagccagcgcagtttatcatctcacagacgccccagggccagcagggtctcctgcaagcgcaaaatcttctaacgcaactacctcagcaaagccaagccaacctcctacagtcgcagccaagcatcaccctcacctcccagccagcaaccccaacacgcacaatagcagcaaccccaattcagacacttccacagagccagtcaacaccaaagcgaattgatactcccagcttggaggagcccagtgaccttgaggagcttgagcagtttgccaagaccttcaaacaaagacgaatcaaacttggattcactcagggtgatgttgggctcgctatggggaaactatatggaaatgacttcagccaaactaccatctctcgatttgaagccttgaacctcagctttaagaacatgtgcaagttgaagccacttttagagaagtggctaaatgatgcagagaacctctcatctgattcgtccctctccagcccaagtgccctgaattctccaggaattgagggcttgagccgtaggaggaagaaacgcaccagcatagagaccaacatccgtgtggccttagagaagagtttcttggagaatcaaaagcctacctcggaagagatcactatgattgctgatcagctcaatatggaaaaagaggtgattcgtgtttggttctgtaaccgccgccagaaagaaaaaagaatcaacccaccaagcagtggtgggaccagcagctcacctattaaagcaattttccccagcccaacttcactggtggcgaccacaccaagccttgtgactagcagtgcagcaactaccctcacagtcagccctgtcctccctctgaccagtgctgctgtgacgaatctttcagttacaggcacttcagacaccacctccaacaacacagcaaccgtgatttccacagcgcctccagcttcctcagcagtcacgtccccctctctgagtccctccccttctgcctcagcctccacctccgaggcatccagtgccagtgagaccagcacaacacagaccacctccactcctttgtcctcccctcttgggaccagccaggtgatggtgacagcatcaggtttgcaaacagcagcagctgctgcccttcaaggagctgcacagttgccagcaaatgccagtcttgctgccatggcagctgctgcaggactaaacccaagcctgatggcaccctcacagtttgcggctggaggtgccttactcagtctgaatccagggaccctgagcggtgctctcagcccagctctaatgagcaacagtacactggcaactattcaagctcttgcttctggtggctctcttccaataacatcacttgatgcaactgggaacctggtatttgccaatgcgggaggagcccccaacatcgtgactgcccctctgttcctgaaccctcagaacctctctctgctcaccagcaaccctgttagcttggtctctgccgccgcagcatctgcagggaactctgcacctgtagccagccttcacgccacctccacctctgctgagtccatccagaactctctcttcacagtggcctctgccagcggggctgcgtccaccaccaccaccgcctccaaggcacagtgagctgggcagagctgggctgccagaagcctttttcactctgcagtgtgattggactgccagccaggttaataaactgaaaaatgtgattggcttcctctcgccgtgttgtgagggcaaaggagagaagggagaaaaaaaaaaaaaaaccacacacacccatacacacataccagaaaaagaaagaaaggatggagacggaacatttgcctaattttgtaataaaacactgtcttttcaggattgcttcatggattggagaactttctaaccaaaaattaaaaaaaaaaaaaaaaaaagaaacaaaaaaatcaaaaacaaacaaaaataagtgaaaggactacttatcatttccagcagtcatgatgacaagttaaggtgggttaccaattccaatataggaaggggatttcttgtttgtctaaatttctttttttcttaaaaaaaaaaaatcatttttatgggtctgttgtacaggccattaagtcataacaaggtgtttataatcgtatcaattgtgttgggggttcctttcttaactggtacaatttaggcaggcctgtattactgtattattattgttgttgttgttattgttttatatatatagtttggacatgtttattatctcttgctcctggatcctatttcagtgagctcccacactgtggggagggagggttttggggtaaggggagacttctgttcttaactgtggggaatgttcttgctggtttccttatccttgatgactcttacagaggtgctagaaaattattttcttttgccacttatgcaagaggcttggtgcagaagctgaaggcagtgtgtgcaaacactcccattccacacacgccccttcccctccccacatcaggtggtgcctttggagcacttttgtgtaggaaggaattcctgctgaactgtagctctcactcacccccaaatcattgaatgaccctgaggcccagttcctgtggtgcaacagtgctgctttctgctactttcaatgggaacagctgtacatgttgcagggcaggatttggttcccaagagcaaagactactgcagacacctgacttggtggttctcctgatttcttatctcctgaaaaatgctcctgctgttggtgtgtttgtttgtttgttccattttgtggaagtttttcatccaaactttaactaacttggcaaagaaaaaaaactgacttactgaaattgggaaacttttcccttcttttattttctaaaggaattctactagactattttccattgataatatatacaaaagaggtgtgatgagaagggtataaggttaccaccttttcctctagagagccacagacttcctttccactggatggtttataaattcctctaaccctgagattcttcttggttctctgactaaaggaggcacttattagccgggctgggatctgtagaacctttgaagaaggactttgagcaggaactttgcacacaccttaagtgtctccttggtttgttcatgatgctcctgctaggtaggtctaaatggcaatacacatctctttattcaatgtagaaagtaattagctctgtaattattttcagggtgtttgtagactatataaatgagcccattgaaaaggaagagtttgtgaaagtggatgaagaggaataagggtaacttggagattaaattcctttttttgtcagtgtactgttgttatgccatctgtaccaaaaaattttccaaaagactggatcactgcagtgcagctcatctaagttccccttcttattggagttaaaggttcccatttggtggctgtgggtgcttgcttaaatctctggtggtcccaagactgcactttttctccctttcgagctggggatgtagagagaacttacaggtgatttttattctgattgcttttgtttgtgtccacaagggagcttggattctgtgtacttgtctctttcccattgtccagtaaggcagtaaatacagacacaatgtgtacttttgtgtgtgattcaagtgggagacagtctgttaaaaggtcagaaacattttagtcccctttaaaatatttcttttagtttatttctatcgtgttttatttcacagatatttaattaccacccctaaatttcctcctcttacccttcaccttccctaaaatccttccaaaatcagtgaactgcaagcagggaaactaacaaatgtccattcaccctttttgtgtggtgtgtttttttatgttttgttttgttttttaactaagcttgaaccaaagtcaatttttagcaagctgctgtactaatggactagttgataacgtgcagttcagacacatcgaggagatagatgctactgacaatttctttttcatttgtctttattaattttatatgaaagttgctgcttgtttttaatcttttatgttggtaaattgtgatatcctctgggcagacattaacttgatgtttaactagtttattaggttggtgtgtaaatagaatgacaatgtcaattactaatttctctcctctccattcactttttctctgttgtagttaaatttaatcttctatcctgacttgacatctctacctttagtctgtggaaatgattttagggctatcagtaatgctgtagctgcccataataatgagtccctcccttgggagtggtgaaacttagaaggaaggattcagggagggaaatgctggtacccagtatactggattagaagttatagcattaatttctcaaaattgctaccaaaggaagtgtggagtcccaagggactcaagctcagtgaggtaagacaaagggcaaggaaaggctgtttgggtggtttttttttccccacatatggtttagaaaatgatccctttcccaaacaaaactcaccaacagactttaatattagaaaagatactaagctttaaatgtcaatacagtggtcttttattccctgccctgtctatattttctactcaatttgggataaggggattttatgtgaagcacttgatgagggtagaccagcataaaaaatctgtttaaaagaagaaataatctttaggaaaagataaatctttagataaaaataaatttttttctctttttttacttatttaaaaataagttgtgaaatgaaaggtacatttacacatgtacacacgaaacactaatatagctttttggtggttgtttagtttaaaatcaactccctatccatcatccctagatattctacttatcgtattgcttcatgaacaccttagtcattttttactttacgtatatatttttttatcatctcaagaaatgcattttgaattgaatgaactatcttctaagctaagatactcaaatttaacttttagccaccttatatgggagagcctggaaactaaaggggaccagggaccatttgaccaaaagaggtgtttggtggagtttctgcatttcaaagaagaaaggccagataggtcatcacaattcattgtattattctttttttttccccttaatgtttatgcaaattttattttatatttctgaatttggttagcacatactaagccaaagactattctaaatgcatttatagtgaatactatgtatgcccatggtaatgggtcctccctaaggagtggtgaatgtaattgtgtgaatcctgcttatcacaagtggtgcaatttggtcataaactttatttataccctgtatacatctgaataacagagcagaaagacctaaaaaagggcttctcacaggaacaatattactatgttgttctaagaaaaaataagttgagtgctgtattagtttaagtgtttctaaagttctataggcagcattttagaattaagaattgtgtatatccattaactgatataattcacatgtccttttatttgttatcagaaagatcaatactatcccaatttattcaacttgttacccaagaaatggaaccaaaggaatccaactttcattttgtgtagaatcatacctacttatacttaatgctagcactgtaagaaataagtcttttttgtttaaaaaagggaagataagattaaagattcttagtgagatcatcttgccaatttgttgtacatctctcattcattgttgggggaaaaaaaagcacaactatacctctttaatgttattttcttccattatccctcatttatttggaaagataagggaaaccttgtctgtattatccagaagcacagatatttgcttgacacaatatttaaattcagcccaatctttaacattaaaaaattttctttttaacttgctggaaaagttggatacattggcaaatatagggaattcatgtcttttttttttttttttttctggtcttgctctgttgcctaggctagagtgcaacggcatgatctcggctcactgcaacctctgcctcccgggttcaagcaattctcctgcttcagcctcccaagtagctgggattacaggcgcccaccaccgcacccggctaatttttgtatttttagtagggacgggatttctccgtgttggccaggctttttgaactcctgaccttaggtgatctgcctgccttggcctcccaaagtgctgggattacaggtatgagccactgtgcccatcctcatgtcaatttttaaagtgataaatcctgatattatacattgcaattagtgtagaataaacgcttggcttatagaactctctgttcttagtctaaagctgttcccaaaccaggtcatcctcacgaaacattcttgaccaagaaaaaagataaggtcattgagataggaagacagaggaaaagcctcttgctgttgtttcttcccaagaaaggagaagccctgccagggagaagtcagtagtattgctgactcactgtatcactgagtgtagggtgtggtagcaaggaggaggcaggggattcacgctgacaggtggctctggcctggctcttggggggccttctgaagaccagtctgcagtttgaggaagggccccaacaattcatttggagagcttggccaaatactttctcattaaatcagcacctaaacttgatgaacttaaagtttgtttattagagttgaaaacattaaaagatgactgatactaatgggagaaaaatactaaagacccaaaatttaaaattttccaaaatggacaagaattgatgggttaatttgctcataactgatatgagtttgcttttatgtgtgtgtggaaagcatttaatgtgtgatgctgttcatagtcctggctatttgatgtcattttcagttttacaacattttgaggatgacactttataaaatggtaaatctttctcagcgtttacaaacttggcttttgagaagggaaaaatcctctttgctatttctgtaagaagaataactgagatcagctattatataggtttgcatggatggtgtccacaatacaaatgtaaacttggacaggaataggataaataaattgctttcatcataaaggccaatcatccatttcttagtccaaggagattaaatataaataggacacccctgagatttccagtaaggtatttgaaaggattccactgggagggcagggaatatattttttctcagagcatccagtttgtacccagttttctatatggtttgtgaactgtagcttttaaaaaaaaattttgtagttttcttctaaccttattcattaagtagttccttgttttggcccttctactcttggccttagctaaaagcagtaaatgtgagtgaattttatgttgattatgtcacctggatctcctttccttcccttctttttctcattgaatggtggtaccttaatttgggtaacagctagcttctggcaccttcataaaatacctcagaatagcttagcattgttgcaaaactggttttaaactaaaaaccaaataaataagtgaaaaaattttataaatagtggaaataattctagctgtagcatttagttgaactaatgtttattatgatcgataaacaagattgatgctgtatgtatttgggatcctgtttataggttacaatttatagggttagggagggttgggtgggggaagaggagatgttgattatgttagaaggaaaacattgctcgtgtgtgtgtttgttttttcttatatctgtcttgccaaaggaaacttgattttccctgtgattggctttggcctctgtggtctggtctgcagcagtgtgtggtggcatgcaggtaacatatggggtgtccagtaggttcagggaccctgagggtgcatttacatcccttcctatggttgcccatgccccccagaccctgccaacctctcctaatgattcattacctctgtacatagcaaaagcataggcaaaggatgaatgcgtgaatgcctggatgtgcagttgagaaacagaggcagacatagacatgcaccaattaatttggagccaagaggtgagtgattgatgtatcttaaatctaggaaagttaaagtgaaacaggttctttgtgttgccctctgtcaagttactgaatgttgtgctaataacacaacactttaaaaccttacttacttttctcataccaaggctagttctttctagaccaaaaacacaaacaggataaaaagcaaaccaagaagttgaaagctaacctgcccacctcacccctgtgatacaaagtgtgaaccttaaggattagttggtgggattgaggagagaattattcttggtgggaacatgaatgagaaatgatgctggcttaggaaaaatcacaagccctttctgcccatactctgggacaaactttcttggctccctgagttcggatatagactgtatctctagaaaggctatttttttaaataaatgatcccacagaacttaagtgggatttggtttagataccaaagacactgctaatgtcattgcttatccttaagttttcaaaacaggcagagggaataggagcaaaaagccaaaatttggaaaagctttactttatctctttccttcccttttccccttttcccagtcccctgctttttgaaggaagtcttcttggttatcctggctttggaaaagagatttattttgttttgctctgctggctctttaaagatggatagttgctcaatctagcagtgatgttcttggaattgctgagaaatttggggagggcaaaagataggggtagaattttttcattatttccctttatctaatacttttaaatagaaccaacacagcctatatgagttcagacaatatttagatgtggtatctccatctgtctcctgtaaaagataagaattttcaagaacaggattacgtggaaaaccaaaagatcttcccttactctcctataaatgttttgttccaaatgtttttatatatgggctctagggagtcaggtagttcattgtttcggtgtactattgataggacacagaaagggagagagggtaaagaaatgtatcactctctgaatattgcatcaaaaatgattaggttgcagaacttcatgaaagctttactaataatcttattgttctgacattatgtaaaggtggtattaatattgtatgacttgtcaaagtgctagataggtttataagtaggtaatagggatgttgaagattagagcacttgaaacagaagttctgggaaaacaaggtgtgtgtaatggaacaccactttgagcacagaaacaaaggtcccttggacctggtagggaagatgtgatttatgattgtttctgtgtccctgtatctgcccaccctgcacagggctccaccacccagggccaccttctggtttaaacccaggacactgtcaaaaagttaagaccccaaaactaatttactgtaaaaaacattgaggactgctgcaaagttttcccttgttttctttgtgtacttgttcatcattgtataagttagccacagcttcacaagagcagcttaaggcttctttcataaattggcagtggcattgagttctcaaacattatatcccaaagtctgcaggcagacagctggatacagcgctgtgtataaatgagacgtccaaacacttgagtttcttaagattgggatctctttcaaatgaaaaaggacagagccaagtagagaaaagactttgtgctcccacccagccttaatgagtctcatggtctaaaagtataggaagaaatgaaatgcactttcagaagctaaaatgacagtgtctgctacaaaaggctgtagttgtaggcagtcggggatgccatgtccttggttccattcctgcgtgagtctgcagaaggcacacactttgtaagagtagagtggactagtgccagcctgaataggtttaaaactgcaaacagttggagaacatggaacaggttggtgcaggaagcctaagattttgcaatcatattataacattggcttttgacaacataaatgttgtatcttccctaaggtcaggtcggggaaagaaagacttccagcttcttacctctgcgtgcatgggcacgtgtgcattgctcagtccgcaggaggtctcactccgcaggaaacgctctcctcccgcataagtctgtacttccatcccctcatctgtggtagtagtgaaggctaggtgagtaagcgtgggctgttctacccaccagaagtccaggagctgttgtatacctcatttctaactcgtgaccgagtgacttgctttaactttctcgaaatcctacagagttgccaagtctgccctccctcctcagtcatgttaaactctggcctatagcatcatgggacctgtagcctagggtgggaccccctaaagcctctgaatgtcgctgcttaaaagctactgcaaactgagggcaaattgcaatcttctattcctttttgttgcaaggggtcttcacaggtctcttaacatctgctttccctgccaccctgcctttaggggctggccagctatccacacccctaacccaccctgtgtttctgacagctggccacacgtcaacttctgtacttgccttttccttggtggggtagaggccaaccccttctcctctgaggcctcagggttctgtttcttttcaggactttgggtagaagggaagacaccaaaggctcctttaagctgactgctgcatacacatttcactttttttcctttgacatgaccaaaaatatccaaatatttaagtttattattattattattattatttgacaatcttatatccaatgggctctctagaagctgcatccccagccctttcaccttttctttgaatgtagttcccaaccttcaattcccacccctaatgctgacaaaaagcttagccaggtcatgatactgctgctataagccaggggagggtggtttctttgttttgttttgttttgttttgtttttcaaatttccagccaaaaccaaagatttcttaatgattgtataaactcaaaacaaacaaaagaaccaaagaaaagggaagtcttcagcatcagtccagtctgtggtgtcctggcacttagaagagtgaggccagggaaggtggggcggggggaccctctgactggatcagaaagggcaggcaagctgcttaccaccttccagggtccagcacaggtgcatgcccctagctttggccctcacaaacttgtgagcatgccctgaaacaaattggcatttcagattttccaaaacaaaagtcaaaaaaccccatcaccaccatcatccaccctacaccaaccagggtcactatggggacttagcacagggcctagggagggtgggagctgctgctggactggcccgaggactccacagagtgggggacgttgaagacactggcgcacgattggctgctctgctgggtgctttaacctctggggctgggcgaatgcacgccacggtgcccttctgagcctttttttcttttcctgtactggaactgcttggaagtggctgtcctgtttgtgagaaaacatgcagaaagattatcaagcttttcatttctctttattgtagttttctttcctttttgcagcaccactgtgcaactatgcattgtacttcacaaccttttgtgctaggtagatgcctgtgactttttaacttggggggtggggggattgcaaatgaaggaactttttacatggatctttttaatctcagttggttgggggaggggggtacttggttcttgggtcacacaagctctatcccaaagcaaaatccaaatgttaataatattagcctgatgcagataccaaagataatttctttcctgcagaaccttagactcgtgtattaagtacgattacccagcacttgcattagtctaacctcagtaattccaaagcttagatgtatattttggtatatttctgggatattaaaaaaaaaatgtcgtttaacttcttgtttgtttcagtgtaatgctcttaaagtcatagcatgaaaataattgaactgtcctattcttagtagtttgaaataatagtatttttgtatgttttgggtgtgtctatgtatgtattaacataacagttttcactgcctaggtgttcataataaaaaagaaaatgaaaaaagttctgagtgtacataatattcaataataatctcccaccaggtgtcaatttagattgcatattcctcattactgttcccaactgggattttgttttcttttaaagagacagtgatcgtgtttttctaaagatgttttctttctctctttcaatatcttaactcactttttttttcttccttttttgtcttaattattaattcaggggtgtttgtccactgttgtcaaaggaggggcacaaggggaattggcccccggcctcctagaactttttgttttatgtactttaaaatgtgagtttgagttcttctttgtggaaacttaagatgtggtgtaaatgattctttccaaaattgtccagcagcttgaatgaggcagtgacaattctgaggtggtttattgggagtccttctacatttctcttagataactctgcactctgggtggctattgtgtagccttactgccccagagtgcctgttagccaaatatttcccctctgataggaatattttctaagaatcagctgataacttgcgtgctggaccttgttatctgtgcccctgggagacacacgttttcttggttttgaaaacctgaaacacaggcaactttacattttggggaattagctgatgcctcctgaagcctgaggaggtggcggggaatatgagcggtgctgtctctctcaaaagtgccctttagatgattccccctcctagggctgcctgcaggggctgtaggcttgggaaagattgtgtaggtgacagtgaatcagaatgaagtggtagattttgtgtagatgcatttgtctgctgtaattttttatatatatattaaacttactgtaactgtacagttcatttctgttgtaaaacatcattaaaccatcttccaagtgttttcacattg

SEQ ID NO: 168411 - DNA, 14038 bp, Homo sapiens
  Payload ID: 13150
  Gene Symbol: POU2F1
  Gene Name: POU class 2 homeobox 1
  Uniprot ID: P14859
  ENST ID: ENST00000367862
  CDS Start-End: 236-2503
aaactcctctgagcaactgaagtttccttattcagttgaagattgctatggtgtaacagaagttgtattttgcttttccccttaatccactttccaccctacgcaacccccctcttttcgcttaagaacatactgtagatttgttagaaatagtagtaccttctttccccaccccaaactgctacctgtttcttccttgtttggactctctgctcctctagaagatttcacagcaatgctggactgcagtgactatgttctagactcaagaatgaacaatccgtcagaaaccagtaaaccatctatggagagtggagatggcaacacaggcacacaaaccaatggtctggactttcagaagcagcctgtgcctgtaggaggagcaatctcaacagcccaggcgcaggctttccttggacatctccatcaggtccaactcgctggaacaagtttacaggctgctgctcagtctttaaatgtacagtctaaatctaatgaagaatcgggggattcgcagcagccaagccagccttcccagcagccttcagtgcaggcagccattccccagacccagcttatgctagctggaggacagataactgggcttactttgacgcctgcccagcaacagttactactccagcaggcacaggcacaggcacagctgctggctgctgcagtgcagcagcactccgccagccagcagcacagtgctgctggagccaccatctccgcctctgctgccacgcccatgacgcagatccccctgtctcagcccatacagatcgcacaggatcttcaacaactgcaacagcttcaacagcagaatctcaacctgcaacagtttgtgttggtgcatccaaccaccaatttgcagccagcgcagtttatcatctcacagacgccccagggccagcagggtctcctgcaagcgcaaaatcttctaacgcaactacctcagcaaagccaagccaacctcctacagtcgcagccaagcatcaccctcacctcccagccagcaaccccaacacgcacaatagcagcaaccccaattcagacacttccacagagccagtcaacaccaaagcgaattgatactcccagcttggaggagcccagtgaccttgaggagcttgagcagtttgccaagaccttcaaacaaagacgaatcaaacttggattcactcagggtgatgttgggctcgctatggggaaactatatggaaatgacttcagccaaactaccatctctcgatttgaagccttgaacctcagctttaagaacatgtgcaagttgaagccacttttagagaagtggctaaatgatgcagagaacctctcatctgattcgtccctctccagcccaagtgccctgaattctccaggaattgagggcttgagccgtaggaggaagaaacgcaccagcatagagaccaacatccgtgtggccttagagaagagtttcttggagaatcaaaagcctacctcggaagagatcactatgattgctgatcagctcaatatggaaaaagaggtgattcgtgtttggttctgtaaccgccgccagaaagaaaaaagaatcaacccaccaagcagtggtgggaccagcagctcacctattaaagcaattttccccagcccaacttcactggtggcgaccacaccaagccttgtgactagcagtgcagcaactaccctcacagtcagccctgtcctccctctgaccagtgctgctgtgacgaatctttcagttacaggcacttcagacaccacctccaacaacacagcaaccgtgatttccacagcgcctccagcttcctcagcagtcacgtccccctctctgagtccctccccttctgcctcagcctccacctccgaggcatccagtgccagtgagaccagcacaacacagaccacctccactcctttgtcctcccctcttgggaccagccaggtgatggtgacagcatcaggtttgcaaacagcagcagctgctgcccttcaaggagctgcacagttgccagcaaatgccagtcttgctgccatggcagctgctgcaggactaaacccaagcctgatggcaccctcacagtttgcggctggaggtgccttactcagtctgaatccagggaccctgagcggtgctctcagcccagctctaatgagcaacagtacactggcaactattcaagctcttgcttctggtggctctcttccaataacatcacttgatgcaactgggaacctggtatttgccaatgcgggaggagcccccaacatcgtgactgcccctctgttcctgaaccctcagaacctctctctgctcaccagcaaccctgttagcttggtctctgccgccgcagcatctgcagggaactctgcacctgtagccagccttcacgccacctccacctctgctgagtccatccagaactctctcttcacagtggcctctgccagcggggctgcgtccaccaccaccaccgcctccaaggcacagtgagctgggcagagctgggctgccagaagcctttttcactctgcagtgtgattggactgccagccaggttaataaactgaaaaatgtgattggcttcctctcgccgtgttgtgagggcaaaggagagaagggagaaaaaaaaaaaaaaaccacacacacccatacacacataccagaaaaagaaagaaaggatggagacggaacatttgcctaattttgtaataaaacactgtcttttcaggattgcttcatggattggagaactttctaaccaaaaattaaaaaaaaaaaaaaaaaaagaaacaaaaaaatcaaaaacaaacaaaaataagtgaaaggactacttatcatttccagcagtcatgatgacaagttaaggtgggttaccaattccaatataggaaggggatttcttgtttgtctaaatttctttttttcttaaaaaaaaaaaatcatttttatgggtctgttgtacaggccattaagtcataacaaggtgtttataatcgtatcaattgtgttgggggttcctttcttaactggtacaatttaggcaggcctgtattactgtattattattgttgttgttgttattgttttatatatatagtttggacatgtttattatctcttgctcctggatcctatttcagtgagctcccacactgtggggagggagggttttggggtaaggggagacttctgttcttaactgtggggaatgttcttgctggtttccttatccttgatgactcttacagaggtgctagaaaattattttcttttgccacttatgcaagaggcttggtgcagaagctgaaggcagtgtgtgcaaacactcccattccacacacgccccttcccctccccacatcaggtggtgcctttggagcacttttgtgtaggaaggaattcctgctgaactgtagctctcactcacccccaaatcattgaatgaccctgaggcccagttcctgtggtgcaacagtgctgctttctgctactttcaatgggaacagctgtacatgttgcagggcaggatttggttcccaagagcaaagactactgcagacacctgacttggtggttctcctgatttcttatctcctgaaaaatgctcctgctgttggtgtgtttgtttgtttgttccattttgtggaagtttttcatccaaactttaactaacttggcaaagaaaaaaaactgacttactgaaattgggaaacttttcccttcttttattttctaaaggaattctactagactattttccattgataatatatacaaaagaggtgtgatgagaagggtataaggttaccaccttttcctctagagagccacagacttcctttccactggatggtttataaattcctctaaccctgagattcttcttggttctctgactaaaggaggcacttattagccgggctgggatctgtagaacctttgaagaaggactttgagcaggaactttgcacacaccttaagtgtctccttggtttgttcatgatgctcctgctaggtaggtctaaatggcaatacacatctctttattcaatgtagaaagtaattagctctgtaattattttcagggtgtttgtagactatataaatgagcccattgaaaaggaagagtttgtgaaagtggatgaagaggaataagggtaacttggagattaaattcctttttttgtcagtgtactgttgttatgccatctgtaccaaaaaattttccaaaagactggatcactgcagtgcagctcatctaagttccccttcttattggagttaaaggttcccatttggtggctgtgggtgcttgcttaaatctctggtggtcccaagactgcactttttctccctttcgagctggggatgtagagagaacttacaggtgatttttattctgattgcttttgtttgtgtccacaagggagcttggattctgtgtacttgtctctttcccattgtccagtaaggcagtaaatacagacacaatgtgtacttttgtgtgtgattcaagtgggagacagtctgttaaaaggtcagaaacattttagtcccctttaaaatatttcttttagtttatttctatcgtgttttatttcacagatatttaattaccacccctaaatttcctcctcttacccttcaccttccctaaaatccttccaaaatcagtgaactgcaagcagggaaactaacaaatgtccattcaccctttttgtgtggtgtgtttttttatgttttgttttgttttttaactaagcttgaaccaaagtcaatttttagcaagctgctgtactaatggactagttgataacgtgcagttcagacacatcgaggagatagatgctactgacaatttctttttcatttgtctttattaattttatatgaaagttgctgcttgtttttaatcttttatgttggtaaattgtgatatcctctgggcagacattaacttgatgtttaactagtttattaggttggtgtgtaaatagaatgacaatgtcaattactaatttctctcctctccattcactttttctctgttgtagttaaatttaatcttctatcctgacttgacatctctacctttagtctgtggaaatgattttagggctatcagtaatgctgtagctgcccataataatgagtccctcccttgggagtggtgaaacttagaaggaaggattcagggagggaaatgctggtacccagtatactggattagaagttatagcattaatttctcaaaattgctaccaaaggaagtgtggagtcccaagggactcaagctcagtgaggtaagacaaagggcaaggaaaggctgtttgggtggtttttttttccccacatatggtttagaaaatgatccctttcccaaacaaaactcaccaacagactttaatattagaaaagatactaagctttaaatgtcaatacagtggtcttttattccctgccctgtctatattttctactcaatttgggataaggggattttatgtgaagcacttgatgagggtagaccagcataaaaaatctgtttaaaagaagaaataatctttaggaaaagataaatctttagataaaaataaatttttttctctttttttacttatttaaaaataagttgtgaaatgaaaggtacatttacacatgtacacacgaaacactaatatagctttttggtggttgtttagtttaaaatcaactccctatccatcatccctagatattctacttatcgtattgcttcatgaacaccttagtcattttttactttacgtatatatttttttatcatctcaagaaatgcattttgaattgaatgaactatcttctaagctaagatactcaaatttaacttttagccaccttatatgggagagcctggaaactaaaggggaccagggaccatttgaccaaaagaggtgtttggtggagtttctgcatttcaaagaagaaaggccagataggtcatcacaattcattgtattattctttttttttccccttaatgtttatgcaaattttattttatatttctgaatttggttagcacatactaagccaaagactattctaaatgcatttatagtgaatactatgtatgcccatggtaatgggtcctccctaaggagtggtgaatgtaattgtgtgaatcctgcttatcacaagtggtgcaatttggtcataaactttatttataccctgtatacatctgaataacagagcagaaagacctaaaaaagggcttctcacaggaacaatattactatgttgttctaagaaaaaataagttgagtgctgtattagtttaagtgtttctaaagttctataggcagcattttagaattaagaattgtgtatatccattaactgatataattcacatgtccttttatttgttatcagaaagatcaatactatcccaatttattcaacttgttacccaagaaatggaaccaaaggaatccaactttcattttgtgtagaatcatacctacttatacttaatgctagcactgtaagaaataagtcttttttgtttaaaaaagggaagataagattaaagattcttagtgagatcatcttgccaatttgttgtacatctctcattcattgttgggggaaaaaaaagcacaactatacctctttaatgttattttcttccattatccctcatttatttggaaagataagggaaaccttgtctgtattatccagaagcacagatatttgcttgacacaatatttaaattcagcccaatctttaacattaaaaaattttctttttaacttgctggaaaagttggatacattggcaaatatagggaattcatgtcttttttttttttttttttctggtcttgctctgttgcctaggctagagtgcaacggcatgatctcggctcactgcaacctctgcctcccgggttcaagcaattctcctgcttcagcctcccaagtagctgggattacaggcgcccaccaccgcacccggctaatttttgtatttttagtagggacgggatttctccgtgttggccaggctttttgaactcctgaccttaggtgatctgcctgccttggcctcccaaagtgctgggattacaggtatgagccactgtgcccatcctcatgtcaatttttaaagtgataaatcctgatattatacattgcaattagtgtagaataaacgcttggcttatagaactctctgttcttagtctaaagctgttcccaaaccaggtcatcctcacgaaacattcttgaccaagaaaaaagataaggtcattgagataggaagacagaggaaaagcctcttgctgttgtttcttcccaagaaaggagaagccctgccagggagaagtcagtagtattgctgactcactgtatcactgagtgtagggtgtggtagcaaggaggaggcaggggattcacgctgacaggtggctctggcctggctcttggggggccttctgaagaccagtctgcagtttgaggaagggccccaacaattcatttggagagcttggccaaatactttctcattaaatcagcacctaaacttgatgaacttaaagtttgtttattagagttgaaaacattaaaagatgactgatactaatgggagaaaaatactaaagacccaaaatttaaaattttccaaaatggacaagaattgatgggttaatttgctcataactgatatgagtttgcttttatgtgtgtgtggaaagcatttaatgtgtgatgctgttcatagtcctggctatttgatgtcattttcagttttacaacattttgaggatgacactttataaaatggtaaatctttctcagcgtttacaaacttggcttttgagaagggaaaaatcctctttgctatttctgtaagaagaataactgagatcagctattatataggtttgcatggatggtgtccacaatacaaatgtaaacttggacaggaataggataaataaattgctttcatcataaaggccaatcatccatttcttagtccaaggagattaaatataaataggacacccctgagatttccagtaaggtatttgaaaggattccactgggagggcagggaatatattttttctcagagcatccagtttgtacccagttttctatatggtttgtgaactgtagcttttaaaaaaaaattttgtagttttcttctaaccttattcattaagtagttccttgttttggcccttctactcttggccttagctaaaagcagtaaatgtgagtgaattttatgttgattatgtcacctggatctcctttccttcccttctttttctcattgaatggtggtaccttaatttgggtaacagctagcttctggcaccttcataaaatacctcagaatagcttagcattgttgcaaaactggttttaaactaaaaaccaaataaataagtgaaaaaattttataaatagtggaaataattctagctgtagcatttagttgaactaatgtttattatgatcgataaacaagattgatgctgtatgtatttgggatcctgtttataggttacaatttatagggttagggagggttgggtgggggaagaggagatgttgattatgttagaaggaaaacattgctcgtgtgtgtgtttgttttttcttatatctgtcttgccaaaggaaacttgattttccctgtgattggctttggcctctgtggtctggtctgcagcagtgtgtggtggcatgcaggtaacatatggggtgtccagtaggttcagggaccctgagggtgcatttacatcccttcctatggttgcccatgccccccagaccctgccaacctctcctaatgattcattacctctgtacatagcaaaagcataggcaaaggatgaatgcgtgaatgcctggatgtgcagttgagaaacagaggcagacatagacatgcaccaattaatttggagccaagaggtgagtgattgatgtatcttaaatctaggaaagttaaagtgaaacaggttctttgtgttgccctctgtcaagttactgaatgttgtgctaataacacaacactttaaaaccttacttacttttctcataccaaggctagttctttctagaccaaaaacacaaacaggataaaaagcaaaccaagaagttgaaagctaacctgcccacctcacccctgtgatacaaagtgtgaaccttaaggattagttggtgggattgaggagagaattattcttggtgggaacatgaatgagaaatgatgctggcttaggaaaaatcacaagccctttctgcccatactctgggacaaactttcttggctccctgagttcggatatagactgtatctctagaaaggctatttttttaaataaatgatcccacagaacttaagtgggatttggtttagataccaaagacactgctaatgtcattgcttatccttaagttttcaaaacaggcagagggaataggagcaaaaagccaaaatttggaaaagctttactttatctctttccttcccttttccccttttcccagtcccctgctttttgaaggaagtcttcttggttatcctggctttggaaaagagatttattttgttttgctctgctggctctttaaagatggatagttgctcaatctagcagtgatgttcttggaattgctgagaaatttggggagggcaaaagataggggtagaattttttcattatttccctttatctaatacttttaaatagaaccaacacagcctatatgagttcagacaatatttagatgtggtatctccatctgtctcctgtaaaagataagaattttcaagaacaggattacgtggaaaaccaaaagatcttcccttactctcctataaatgttttgttccaaatgtttttatatatgggctctagggagtcaggtagttcattgtttcggtgtactattgataggacacagaaagggagagagggtaaagaaatgtatcactctctgaatattgcatcaaaaatgattaggttgcagaacttcatgaaagctttactaataatcttattgttctgacattatgtaaaggtggtattaatattgtatgacttgtcaaagtgctagataggtttataagtaggtaatagggatgttgaagattagagcacttgaaacagaagttctgggaaaacaaggtgtgtgtaatggaacaccactttgagcacagaaacaaaggtcccttggacctggtagggaagatgtgatttatgattgtttctgtgtccctgtatctgcccaccctgcacagggctccaccacccagggccaccttctggtttaaacccaggacactgtcaaaaagttaagaccccaaaactaatttactgtaaaaaacattgaggactgctgcaaagttttcccttgttttctttgtgtacttgttcatcattgtataagttagccacagcttcacaagagcagcttaaggcttctttcataaattggcagtggcattgagttctcaaacattatatcccaaagtctgcaggcagacagctggatacagcgctgtgtataaatgagacgtccaaacacttgagtttcttaagattgggatctctttcaaatgaaaaaggacagagccaagtagagaaaagactttgtgctcccacccagccttaatgagtctcatggtctaaaagtataggaagaaatgaaatgcactttcagaagctaaaatgacagtgtctgctacaaaaggctgtagttgtaggcagtcggggatgccatgtccttggttccattcctgcgtgagtctgcagaaggcacacactttgtaagagtagagtggactagtgccagcctgaataggtttaaaactgcaaacagttggagaacatggaacaggttggtgcaggaagcctaagattttgcaatcatattataacattggcttttgacaacataaatgttgtatcttccctaaggtcaggtcggggaaagaaagacttccagcttcttacctctgcgtgcatgggcacgtgtgcattgctcagtccgcaggaggtctcactccgcaggaaacgctctcctcccgcataagtctgtacttccatcccctcatctgtggtagtagtgaaggctaggtgagtaagcgtgggctgttctacccaccagaagtccaggagctgttgtatacctcatttctaactcgtgaccgagtgacttgctttaactttctcgaaatcctacagagttgccaagtctgccctccctcctcagtcatgttaaactctggcctatagcatcatgggacctgtagcctagggtgggaccccctaaagcctctgaatgtcgctgcttaaaagctactgcaaactgagggcaaattgcaatcttctattcctttttgttgcaaggggtcttcacaggtctcttaacatctgctttccctgccaccctgcctttaggggctggccagctatccacacccctaacccaccctgtgtttctgacagctggccacacgtcaacttctgtacttgccttttccttggtggggtagaggccaaccccttctcctctgaggcctcagggttctgtttcttttcaggactttgggtagaagggaagacaccaaaggctcctttaagctgactgctgcatacacatttcactttttttcctttgacatgaccaaaaatatccaaatatttaagtttattattattattattattatttgacaatcttatatccaatgggctctctagaagctgcatccccagccctttcaccttttctttgaatgtagttcccaaccttcaattcccacccctaatgctgacaaaaagcttagccaggtcatgatactgctgctataagccaggggagggtggtttctttgttttgttttgttttgttttgtttttcaaatttccagccaaaaccaaagatttcttaatgattgtataaactcaaaacaaacaaaagaaccaaagaaaagggaagtcttcagcatcagtccagtctgtggtgtcctggcacttagaagagtgaggccagggaaggtggggcggggggaccctctgactggatcagaaagggcaggcaagctgcttaccaccttccagggtccagcacaggtgcatgcccctagctttggccctcacaaacttgtgagcatgccctgaaacaaattggcatttcagattttccaaaacaaaagtcaaaaaaccccatcaccaccatcatccaccctacaccaaccagggtcactatggggacttagcacagggcctagggagggtgggagctgctgctggactggcccgaggactccacagagtgggggacgttgaagacactggcgcacgattggctgctctgctgggtgctttaacctctggggctgggcgaatgcacgccacggtgcccttctgagcctttttttcttttcctgtactggaactgcttggaagtggctgtcctgtttgtgagaaaacatgcagaaagattatcaagcttttcatttctctttattgtagttttctttcctttttgcagcaccactgtgcaactatgcattgtacttcacaaccttttgtgctaggtagatgcctgtgactttttaacttggggggtggggggattgcaaatgaaggaactttttacatggatctttttaatctcagttggttgggggaggggggtacttggttcttgggtcacacaagctctatcccaaagcaaaatccaaatgttaataatattagcctgatgcagataccaaagataatttctttcctgcagaaccttagactcgtgtattaagtacgattacccagcacttgcattagtctaacctcagtaattccaaagcttagatgtatattttggtatatttctgggatattaaaaaaaaaatgtcgtttaacttcttgtttgtttcagtgtaatgctcttaaagtcatagcatgaaaataattgaactgtcctattcttagtagtttgaaataatagtatttttgtatgttttgggtgtgtctatgtatgtattaacataacagttttcactgcctaggtgttcataataaaaaagaaaatgaaaaaagttctgagtgtacataatattcaataataatctcccaccaggtgtcaatttagattgcatattcctcattactgttcccaactgggattttgttttcttttaaagagacagtgatcgtgtttttctaaagatgttttctttctctctttcaatatcttaactcactttttttttcttccttttttgtcttaattattaattcaggggtgtttgtccactgttgtcaaaggaggggcacaaggggaattggcccccggcctcctagaactttttgttttatgtactttaaaatgtgagtttgagttcttctttgtggaaacttaagatgtggtgtaaatgattctttccaaaattgtccagcagcttgaatgaggcagtgacaattctgaggtggtttattgggagtccttctacatttctcttagataactctgcactctgggtggctattgtgtagccttactgccccagagtgcctgttagccaaatatttcccctctgataggaatattttctaagaatcagctgataacttgcgtgctggaccttgttatctgtgcccctgggagacacacgttttcttggttttgaaaacctgaaacacaggcaactttacattttggggaattagctgatgcctcctgaagcctgaggaggtggcggggaatatgagcggtgctgtctctctcaaaagtgccctttagatgattccccctcctagggctgcctgcaggggctgtaggcttgggaaagattgtgtaggtgacagtgaatcagaatgaagtggtagattttgtgtagatgcatttgtctgctgtaattttttatatatatattaaacttactgtaactgtacagttcatttctgttgtaaaacatcattaaaccatcttccaagtgttttcacattg

SEQ ID NO: 168412 - DNA, 13905 bp, Homo sapiens
  Payload ID: 13150
  Gene Symbol: POU2F1
  Gene Name: POU class 2 homeobox 1
  Uniprot ID: P14859
  ENST ID: ENST00000367866
  CDS Start-End: 70-2370
gggaggggggaggggagccagagcgagggagggtttatcgaccgggcgattttggttaaaatattcaaaatggcggacggaggagcagcgagtcaagatgagagttcagccgcggcggcagcagcagcagactcaagaatgaacaatccgtcagaaaccagtaaaccatctatggagagtggagatggcaacacaggcacacaaaccaatggtctggactttcagaagcagcctgtgcctgtaggaggagcaatctcaacagcccaggcgcaggctttccttggacatctccatcaggtccaactcgctggaacaagtttacaggctgctgctcagtctttaaatgtacagtctaaatctaatgaagaatcgggggattcgcagcagccaagccagccttcccagcagccttcagtgcaggcagccattccccagacccagcttatgctagctggaggacagataactgggcttactttgacgcctgcccagcaacagttactactccagcaggcacaggcacaggcacagctgctggctgctgcagtgcagcagcactccgccagccagcagcacagtgctgctggagccaccatctccgcctctgctgccacgcccatgacgcagatccccctgtctcagcccatacagatcgcacaggatcttcaacaactgcaacagcttcaacagcagaatctcaacctgcaacagtttgtgttggtgcatccaaccaccaatttgcagccagcgcagtttatcatctcacagacgccccagggccagcagggtctcctgcaagcgcaaaatcttctaacgcaactacctcagcaaagccaagccaacctcctacagtcgcagccaagcatcaccctcacctcccagccagcaaccccaacacgcacaatagcagcaaccccaattcagacacttccacagagccagtcaacaccaaagcgaattgatactcccagcttggaggagcccagtgaccttgaggagcttgagcagtttgccaagaccttcaaacaaagacgaatcaaacttggattcactcagggtgatgttgggctcgctatggggaaactatatggaaatgacttcagccaaactaccatctctcgatttgaagccttgaacctcagctttaagaacatgtgcaagttgaagccacttttagagaagtggctaaatgatgcagagaacctctcatctgattcgtccctctccagcccaagtgccctgaattctccaggaattgagggcttgagccgtaggaggaagaaacgcaccagcatagagaccaacatccgtgtggccttagagaagagtttcttggagaatcaaaagcctacctcggaagagatcactatgattgctgatcagctcaatatggaaaaagaggtgattcgtgtttggttctgtaaccgccgccagaaagaaaaaagaatcaacccaccaagcagtggtgggaccagcagctcacctattaaagcaattttccccagcccaacttcactggtggcgaccacaccaagccttgtgactagcagtgcagcaactaccctcacagtcagccctgtcctccctctgaccagtgctgctgtgacgaatctttcagttacaggcacttcagacaccacctccaacaacacagcaaccgtgatttccacagcgcctccagcttcctcagcagtcacgtccccctctctgagtccctccccttctgcctcagcctccacctccgaggcatccagtgccagtgagaccagcacaacacagaccacctccactcctttgtcctcccctcttgggaccagccaggtgatggtgacagcatcaggtttgcaaacagcagcagctgctgcccttcaaggagctgcacagttgccagcaaatgccagtcttgctgccatggcagctgctgcaggactaaacccaagcctgatggcaccctcacagtttgcggctggaggtgccttactcagtctgaatccagggaccctgagcggtgctctcagcccagctctaatgagcaacagtacactggcaactattcaagctcttgcttctggtggctctcttccaataacatcacttgatgcaactgggaacctggtatttgccaatgcgggaggagcccccaacatcgtgactgcccctctgttcctgaaccctcagaacctctctctgctcaccagcaaccctgttagcttggtctctgccgccgcagcatctgcagggaactctgcacctgtagccagccttcacgccacctccacctctgctgagtccatccagaactctctcttcacagtggcctctgccagcggggctgcgtccaccaccaccaccgcctccaaggcacagtgagctgggcagagctgggctgccagaagcctttttcactctgcagtgtgattggactgccagccaggttaataaactgaaaaatgtgattggcttcctctcgccgtgttgtgagggcaaaggagagaagggagaaaaaaaaaaaaaaaccacacacacccatacacacataccagaaaaagaaagaaaggatggagacggaacatttgcctaattttgtaataaaacactgtcttttcaggattgcttcatggattggagaactttctaaccaaaaattaaaaaaaaaaaaaaaaaaagaaacaaaaaaatcaaaaacaaacaaaaataagtgaaaggactacttatcatttccagcagtcatgatgacaagttaaggtgggttaccaattccaatataggaaggggatttcttgtttgtctaaatttctttttttcttaaaaaaaaaaaatcatttttatgggtctgttgtacaggccattaagtcataacaaggtgtttataatcgtatcaattgtgttgggggttcctttcttaactggtacaatttaggcaggcctgtattactgtattattattgttgttgttgttattgttttatatatatagtttggacatgtttattatctcttgctcctggatcctatttcagtgagctcccacactgtggggagggagggttttggggtaaggggagacttctgttcttaactgtggggaatgttcttgctggtttccttatccttgatgactcttacagaggtgctagaaaattattttcttttgccacttatgcaagaggcttggtgcagaagctgaaggcagtgtgtgcaaacactcccattccacacacgccccttcccctccccacatcaggtggtgcctttggagcacttttgtgtaggaaggaattcctgctgaactgtagctctcactcacccccaaatcattgaatgaccctgaggcccagttcctgtggtgcaacagtgctgctttctgctactttcaatgggaacagctgtacatgttgcagggcaggatttggttcccaagagcaaagactactgcagacacctgacttggtggttctcctgatttcttatctcctgaaaaatgctcctgctgttggtgtgtttgtttgtttgttccattttgtggaagtttttcatccaaactttaactaacttggcaaagaaaaaaaactgacttactgaaattgggaaacttttcccttcttttattttctaaaggaattctactagactattttccattgataatatatacaaaagaggtgtgatgagaagggtataaggttaccaccttttcctctagagagccacagacttcctttccactggatggtttataaattcctctaaccctgagattcttcttggttctctgactaaaggaggcacttattagccgggctgggatctgtagaacctttgaagaaggactttgagcaggaactttgcacacaccttaagtgtctccttggtttgttcatgatgctcctgctaggtaggtctaaatggcaatacacatctctttattcaatgtagaaagtaattagctctgtaattattttcagggtgtttgtagactatataaatgagcccattgaaaaggaagagtttgtgaaagtggatgaagaggaataagggtaacttggagattaaattcctttttttgtcagtgtactgttgttatgccatctgtaccaaaaaattttccaaaagactggatcactgcagtgcagctcatctaagttccccttcttattggagttaaaggttcccatttggtggctgtgggtgcttgcttaaatctctggtggtcccaagactgcactttttctccctttcgagctggggatgtagagagaacttacaggtgatttttattctgattgcttttgtttgtgtccacaagggagcttggattctgtgtacttgtctctttcccattgtccagtaaggcagtaaatacagacacaatgtgtacttttgtgtgtgattcaagtgggagacagtctgttaaaaggtcagaaacattttagtcccctttaaaatatttcttttagtttatttctatcgtgttttatttcacagatatttaattaccacccctaaatttcctcctcttacccttcaccttccctaaaatccttccaaaatcagtgaactgcaagcagggaaactaacaaatgtccattcaccctttttgtgtggtgtgtttttttatgttttgttttgttttttaactaagcttgaaccaaagtcaatttttagcaagctgctgtactaatggactagttgataacgtgcagttcagacacatcgaggagatagatgctactgacaatttctttttcatttgtctttattaattttatatgaaagttgctgcttgtttttaatcttttatgttggtaaattgtgatatcctctgggcagacattaacttgatgtttaactagtttattaggttggtgtgtaaatagaatgacaatgtcaattactaatttctctcctctccattcactttttctctgttgtagttaaatttaatcttctatcctgacttgacatctctacctttagtctgtggaaatgattttagggctatcagtaatgctgtagctgcccataataatgagtccctcccttgggagtggtgaaacttagaaggaaggattcagggagggaaatgctggtacccagtatactggattagaagttatagcattaatttctcaaaattgctaccaaaggaagtgtggagtcccaagggactcaagctcagtgaggtaagacaaagggcaaggaaaggctgtttgggtggtttttttttccccacatatggtttagaaaatgatccctttcccaaacaaaactcaccaacagactttaatattagaaaagatactaagctttaaatgtcaatacagtggtcttttattccctgccctgtctatattttctactcaatttgggataaggggattttatgtgaagcacttgatgagggtagaccagcataaaaaatctgtttaaaagaagaaataatctttaggaaaagataaatctttagataaaaataaatttttttctctttttttacttatttaaaaataagttgtgaaatgaaaggtacatttacacatgtacacacgaaacactaatatagctttttggtggttgtttagtttaaaatcaactccctatccatcatccctagatattctacttatcgtattgcttcatgaacaccttagtcattttttactttacgtatatatttttttatcatctcaagaaatgcattttgaattgaatgaactatcttctaagctaagatactcaaatttaacttttagccaccttatatgggagagcctggaaactaaaggggaccagggaccatttgaccaaaagaggtgtttggtggagtttctgcatttcaaagaagaaaggccagataggtcatcacaattcattgtattattctttttttttccccttaatgtttatgcaaattttattttatatttctgaatttggttagcacatactaagccaaagactattctaaatgcatttatagtgaatactatgtatgcccatggtaatgggtcctccctaaggagtggtgaatgtaattgtgtgaatcctgcttatcacaagtggtgcaatttggtcataaactttatttataccctgtatacatctgaataacagagcagaaagacctaaaaaagggcttctcacaggaacaatattactatgttgttctaagaaaaaataagttgagtgctgtattagtttaagtgtttctaaagttctataggcagcattttagaattaagaattgtgtatatccattaactgatataattcacatgtccttttatttgttatcagaaagatcaatactatcccaatttattcaacttgttacccaagaaatggaaccaaaggaatccaactttcattttgtgtagaatcatacctacttatacttaatgctagcactgtaagaaataagtcttttttgtttaaaaaagggaagataagattaaagattcttagtgagatcatcttgccaatttgttgtacatctctcattcattgttgggggaaaaaaaagcacaactatacctctttaatgttattttcttccattatccctcatttatttggaaagataagggaaaccttgtctgtattatccagaagcacagatatttgcttgacacaatatttaaattcagcccaatctttaacattaaaaaattttctttttaacttgctggaaaagttggatacattggcaaatatagggaattcatgtcttttttttttttttttttctggtcttgctctgttgcctaggctagagtgcaacggcatgatctcggctcactgcaacctctgcctcccgggttcaagcaattctcctgcttcagcctcccaagtagctgggattacaggcgcccaccaccgcacccggctaatttttgtatttttagtagggacgggatttctccgtgttggccaggctttttgaactcctgaccttaggtgatctgcctgccttggcctcccaaagtgctgggattacaggtatgagccactgtgcccatcctcatgtcaatttttaaagtgataaatcctgatattatacattgcaattagtgtagaataaacgcttggcttatagaactctctgttcttagtctaaagctgttcccaaaccaggtcatcctcacgaaacattcttgaccaagaaaaaagataaggtcattgagataggaagacagaggaaaagcctcttgctgttgtttcttcccaagaaaggagaagccctgccagggagaagtcagtagtattgctgactcactgtatcactgagtgtagggtgtggtagcaaggaggaggcaggggattcacgctgacaggtggctctggcctggctcttggggggccttctgaagaccagtctgcagtttgaggaagggccccaacaattcatttggagagcttggccaaatactttctcattaaatcagcacctaaacttgatgaacttaaagtttgtttattagagttgaaaacattaaaagatgactgatactaatgggagaaaaatactaaagacccaaaatttaaaattttccaaaatggacaagaattgatgggttaatttgctcataactgatatgagtttgcttttatgtgtgtgtggaaagcatttaatgtgtgatgctgttcatagtcctggctatttgatgtcattttcagttttacaacattttgaggatgacactttataaaatggtaaatctttctcagcgtttacaaacttggcttttgagaagggaaaaatcctctttgctatttctgtaagaagaataactgagatcagctattatataggtttgcatggatggtgtccacaatacaaatgtaaacttggacaggaataggataaataaattgctttcatcataaaggccaatcatccatttcttagtccaaggagattaaatataaataggacacccctgagatttccagtaaggtatttgaaaggattccactgggagggcagggaatatattttttctcagagcatccagtttgtacccagttttctatatggtttgtgaactgtagcttttaaaaaaaaattttgtagttttcttctaaccttattcattaagtagttccttgttttggcccttctactcttggccttagctaaaagcagtaaatgtgagtgaattttatgttgattatgtcacctggatctcctttccttcccttctttttctcattgaatggtggtaccttaatttgggtaacagctagcttctggcaccttcataaaatacctcagaatagcttagcattgttgcaaaactggttttaaactaaaaaccaaataaataagtgaaaaaattttataaatagtggaaataattctagctgtagcatttagttgaactaatgtttattatgatcgataaacaagattgatgctgtatgtatttgggatcctgtttataggttacaatttatagggttagggagggttgggtgggggaagaggagatgttgattatgttagaaggaaaacattgctcgtgtgtgtgtttgttttttcttatatctgtcttgccaaaggaaacttgattttccctgtgattggctttggcctctgtggtctggtctgcagcagtgtgtggtggcatgcaggtaacatatggggtgtccagtaggttcagggaccctgagggtgcatttacatcccttcctatggttgcccatgccccccagaccctgccaacctctcctaatgattcattacctctgtacatagcaaaagcataggcaaaggatgaatgcgtgaatgcctggatgtgcagttgagaaacagaggcagacatagacatgcaccaattaatttggagccaagaggtgagtgattgatgtatcttaaatctaggaaagttaaagtgaaacaggttctttgtgttgccctctgtcaagttactgaatgttgtgctaataacacaacactttaaaaccttacttacttttctcataccaaggctagttctttctagaccaaaaacacaaacaggataaaaagcaaaccaagaagttgaaagctaacctgcccacctcacccctgtgatacaaagtgtgaaccttaaggattagttggtgggattgaggagagaattattcttggtgggaacatgaatgagaaatgatgctggcttaggaaaaatcacaagccctttctgcccatactctgggacaaactttcttggctccctgagttcggatatagactgtatctctagaaaggctatttttttaaataaatgatcccacagaacttaagtgggatttggtttagataccaaagacactgctaatgtcattgcttatccttaagttttcaaaacaggcagagggaataggagcaaaaagccaaaatttggaaaagctttactttatctctttccttcccttttccccttttcccagtcccctgctttttgaaggaagtcttcttggttatcctggctttggaaaagagatttattttgttttgctctgctggctctttaaagatggatagttgctcaatctagcagtgatgttcttggaattgctgagaaatttggggagggcaaaagataggggtagaattttttcattatttccctttatctaatacttttaaatagaaccaacacagcctatatgagttcagacaatatttagatgtggtatctccatctgtctcctgtaaaagataagaattttcaagaacaggattacgtggaaaaccaaaagatcttcccttactctcctataaatgttttgttccaaatgtttttatatatgggctctagggagtcaggtagttcattgtttcggtgtactattgataggacacagaaagggagagagggtaaagaaatgtatcactctctgaatattgcatcaaaaatgattaggttgcagaacttcatgaaagctttactaataatcttattgttctgacattatgtaaaggtggtattaatattgtatgacttgtcaaagtgctagataggtttataagtaggtaatagggatgttgaagattagagcacttgaaacagaagttctgggaaaacaaggtgtgtgtaatggaacaccactttgagcacagaaacaaaggtcccttggacctggtagggaagatgtgatttatgattgtttctgtgtccctgtatctgcccaccctgcacagggctccaccacccagggccaccttctggtttaaacccaggacactgtcaaaaagttaagaccccaaaactaatttactgtaaaaaacattgaggactgctgcaaagttttcccttgttttctttgtgtacttgttcatcattgtataagttagccacagcttcacaagagcagcttaaggcttctttcataaattggcagtggcattgagttctcaaacattatatcccaaagtctgcaggcagacagctggatacagcgctgtgtataaatgagacgtccaaacacttgagtttcttaagattgggatctctttcaaatgaaaaaggacagagccaagtagagaaaagactttgtgctcccacccagccttaatgagtctcatggtctaaaagtataggaagaaatgaaatgcactttcagaagctaaaatgacagtgtctgctacaaaaggctgtagttgtaggcagtcggggatgccatgtccttggttccattcctgcgtgagtctgcagaaggcacacactttgtaagagtagagtggactagtgccagcctgaataggtttaaaactgcaaacagttggagaacatggaacaggttggtgcaggaagcctaagattttgcaatcatattataacattggcttttgacaacataaatgttgtatcttccctaaggtcaggtcggggaaagaaagacttccagcttcttacctctgcgtgcatgggcacgtgtgcattgctcagtccgcaggaggtctcactccgcaggaaacgctctcctcccgcataagtctgtacttccatcccctcatctgtggtagtagtgaaggctaggtgagtaagcgtgggctgttctacccaccagaagtccaggagctgttgtatacctcatttctaactcgtgaccgagtgacttgctttaactttctcgaaatcctacagagttgccaagtctgccctccctcctcagtcatgttaaactctggcctatagcatcatgggacctgtagcctagggtgggaccccctaaagcctctgaatgtcgctgcttaaaagctactgcaaactgagggcaaattgcaatcttctattcctttttgttgcaaggggtcttcacaggtctcttaacatctgctttccctgccaccctgcctttaggggctggccagctatccacacccctaacccaccctgtgtttctgacagctggccacacgtcaacttctgtacttgccttttccttggtggggtagaggccaaccccttctcctctgaggcctcagggttctgtttcttttcaggactttgggtagaagggaagacaccaaaggctcctttaagctgactgctgcatacacatttcactttttttcctttgacatgaccaaaaatatccaaatatttaagtttattattattattattattatttgacaatcttatatccaatgggctctctagaagctgcatccccagccctttcaccttttctttgaatgtagttcccaaccttcaattcccacccctaatgctgacaaaaagcttagccaggtcatgatactgctgctataagccaggggagggtggtttctttgttttgttttgttttgttttgtttttcaaatttccagccaaaaccaaagatttcttaatgattgtataaactcaaaacaaacaaaagaaccaaagaaaagggaagtcttcagcatcagtccagtctgtggtgtcctggcacttagaagagtgaggccagggaaggtggggcggggggaccctctgactggatcagaaagggcaggcaagctgcttaccaccttccagggtccagcacaggtgcatgcccctagctttggccctcacaaacttgtgagcatgccctgaaacaaattggcatttcagattttccaaaacaaaagtcaaaaaaccccatcaccaccatcatccaccctacaccaaccagggtcactatggggacttagcacagggcctagggagggtgggagctgctgctggactggcccgaggactccacagagtgggggacgttgaagacactggcgcacgattggctgctctgctgggtgctttaacctctggggctgggcgaatgcacgccacggtgcccttctgagcctttttttcttttcctgtactggaactgcttggaagtggctgtcctgtttgtgagaaaacatgcagaaagattatcaagcttttcatttctctttattgtagttttctttcctttttgcagcaccactgtgcaactatgcattgtacttcacaaccttttgtgctaggtagatgcctgtgactttttaacttggggggtggggggattgcaaatgaaggaactttttacatggatctttttaatctcagttggttgggggaggggggtacttggttcttgggtcacacaagctctatcccaaagcaaaatccaaatgttaataatattagcctgatgcagataccaaagataatttctttcctgcagaaccttagactcgtgtattaagtacgattacccagcacttgcattagtctaacctcagtaattccaaagcttagatgtatattttggtatatttctgggatattaaaaaaaaaatgtcgtttaacttcttgtttgtttcagtgtaatgctcttaaagtcatagcatgaaaataattgaactgtcctattcttagtagtttgaaataatagtatttttgtatgttttgggtgtgtctatgtatgtattaacataacagttttcactgcctaggtgttcataataaaaaagaaaatgaaaaaagttctgagtgtacataatattcaataataatctcccaccaggtgtcaatttagattgcatattcctcattactgttcccaactgggattttgttttcttttaaagagacagtgatcgtgtttttctaaagatgttttctttctctctttcaatatcttaactcactttttttttcttccttttttgtcttaattattaattcaggggtgtttgtccactgttgtcaaaggaggggcacaaggggaattggcccccggcctcctagaactttttgttttatgtactttaaaatgtgagtttgagttcttctttgtggaaacttaagatgtggtgtaaatgattctttccaaaattgtccagcagcttgaatgaggcagtgacaattctgaggtggtttattgggagtccttctacatttctcttagataactctgcactctgggtggctattgtgtagccttactgccccagagtgcctgttagccaaatatttcccctctgataggaatattttctaagaatcagctgataacttgcgtgctggaccttgttatctgtgcccctgggagacacacgttttcttggttttgaaaacctgaaacacaggcaactttacattttggggaattagctgatgcctcctgaagcctgaggaggtggcggggaatatgagcggtgctgtctctctcaaaagtgccctttagatgattccccctcctagggctgcctgcaggggctgtaggcttgggaaagattgtgtaggtgacagtgaatcagaatgaagtggtagattttgtgtagatgcatttgtctgctgtaattttttatatatatattaaacttactgtaactgtacagttcatttctgttgtaaaacatcattaaaccatcttccaagtgttttcacattg

SEQ ID NO: 168413 - DNA, 13651 bp, Homo sapiens
  Payload ID: 13150
  Gene Symbol: POU2F1
  Gene Name: POU class 2 homeobox 1
  Uniprot ID: P14859
  ENST ID: ENST00000429375
  CDS Start-End: 8-2119
attcaaaatggcggacggaggagcagcgagtcaagatgagagttcagccgcggcggcagcagcagcagactcaagaatgaacaatccgtcagaaaccagtaaaccatctatggagagtggagatggcaacacaggcacacaaaccaatggtctggactttcagaagcagcctgtgcctgtaggaggagcaatctcaacagcccaggcgcaggctttccttggacatctccatcaggtccaactcgctggaacaagtttacaggctgctgctcagtctttaaatgtacagtctaaatctaatgaagaatcgggggattcgcagcagccaagccagccttcccagcagccttcagtgcaggcagccattccccagacccagcttatgctagctggaggacagataactggggatcttcaacaactgcaacagcttcaacagcagaatctcaacctgcaacagtttgtgttggtgcatccaaccaccaatttgcagccagcgcagtttatcatctcacagacgccccagggccagcagggtctcctgcaagcgcaaaatcttctaacgcaactacctcagcaaagccaagccaacctcctacagtcgcagccaagcatcaccctcacctcccagccagcaaccccaacacgcacaatagcagcaaccccaattcagacacttccacagagccagtcaacaccaaagcgaattgatactcccagcttggaggagcccagtgaccttgaggagcttgagcagtttgccaagaccttcaaacaaagacgaatcaaacttggattcactcagggtgatgttgggctcgctatggggaaactatatggaaatgacttcagccaaactaccatctctcgatttgaagccttgaacctcagctttaagaacatgtgcaagttgaagccacttttagagaagtggctaaatgatgcagagaacctctcatctgattcgtccctctccagcccaagtgccctgaattctccaggaattgagggcttgagccgtaggaggaagaaacgcaccagcatagagaccaacatccgtgtggccttagagaagagtttcttggagaatcaaaagcctacctcggaagagatcactatgattgctgatcagctcaatatggaaaaagaggtgattcgtgtttggttctgtaaccgccgccagaaagaaaaaagaatcaacccaccaagcagtggtgggaccagcagctcacctattaaagcaattttccccagcccaacttcactggtggcgaccacaccaagccttgtgactagcagtgcagcaactaccctcacagtcagccctgtcctccctctgaccagtgctgctgtgacgaatctttcagttacaggcacttcagacaccacctccaacaacacagcaaccgtgatttccacagcgcctccagcttcctcagcagtcacgtccccctctctgagtccctccccttctgcctcagcctccacctccgaggcatccagtgccagtgagaccagcacaacacagaccacctccactcctttgtcctcccctcttgggaccagccaggtgatggtgacagcatcaggtttgcaaacagcagcagctgctgcccttcaaggagctgcacagttgccagcaaatgccagtcttgctgccatggcagctgctgcaggactaaacccaagcctgatggcaccctcacagtttgcggctggaggtgccttactcagtctgaatccagggaccctgagcggtgctctcagcccagctctaatgagcaacagtacactggcaactattcaagctcttgcttctggtggctctcttccaataacatcacttgatgcaactgggaacctggtatttgccaatgcgggaggagcccccaacatcgtgactgcccctctgttcctgaaccctcagaacctctctctgctcaccagcaaccctgttagcttggtctctgccgccgcagcatctgcagggaactctgcacctgtagccagccttcacgccacctccacctctgctgagtccatccagaactctctcttcacagtggcctctgccagcggggctgcgtccaccaccaccaccgcctccaaggcacagtgagctgggcagagctgggctgccagaagcctttttcactctgcagtgtgattggactgccagccaggttaataaactgaaaaatgtgattggcttcctctcgccgtgttgtgagggcaaaggagagaagggagaaaaaaaaaaaaaaaccacacacacccatacacacataccagaaaaagaaagaaaggatggagacggaacatttgcctaattttgtaataaaacactgtcttttcaggattgcttcatggattggagaactttctaaccaaaaattaaaaaaaaaaaaaaaaaaagaaacaaaaaaatcaaaaacaaacaaaaataagtgaaaggactacttatcatttccagcagtcatgatgacaagttaaggtgggttaccaattccaatataggaaggggatttcttgtttgtctaaatttctttttttcttaaaaaaaaaaaatcatttttatgggtctgttgtacaggccattaagtcataacaaggtgtttataatcgtatcaattgtgttgggggttcctttcttaactggtacaatttaggcaggcctgtattactgtattattattgttgttgttgttattgttttatatatatagtttggacatgtttattatctcttgctcctggatcctatttcagtgagctcccacactgtggggagggagggttttggggtaaggggagacttctgttcttaactgtggggaatgttcttgctggtttccttatccttgatgactcttacagaggtgctagaaaattattttcttttgccacttatgcaagaggcttggtgcagaagctgaaggcagtgtgtgcaaacactcccattccacacacgccccttcccctccccacatcaggtggtgcctttggagcacttttgtgtaggaaggaattcctgctgaactgtagctctcactcacccccaaatcattgaatgaccctgaggcccagttcctgtggtgcaacagtgctgctttctgctactttcaatgggaacagctgtacatgttgcagggcaggatttggttcccaagagcaaagactactgcagacacctgacttggtggttctcctgatttcttatctcctgaaaaatgctcctgctgttggtgtgtttgtttgtttgttccattttgtggaagtttttcatccaaactttaactaacttggcaaagaaaaaaaactgacttactgaaattgggaaacttttcccttcttttattttctaaaggaattctactagactattttccattgataatatatacaaaagaggtgtgatgagaagggtataaggttaccaccttttcctctagagagccacagacttcctttccactggatggtttataaattcctctaaccctgagattcttcttggttctctgactaaaggaggcacttattagccgggctgggatctgtagaacctttgaagaaggactttgagcaggaactttgcacacaccttaagtgtctccttggtttgttcatgatgctcctgctaggtaggtctaaatggcaatacacatctctttattcaatgtagaaagtaattagctctgtaattattttcagggtgtttgtagactatataaatgagcccattgaaaaggaagagtttgtgaaagtggatgaagaggaataagggtaacttggagattaaattcctttttttgtcagtgtactgttgttatgccatctgtaccaaaaaattttccaaaagactggatcactgcagtgcagctcatctaagttccccttcttattggagttaaaggttcccatttggtggctgtgggtgcttgcttaaatctctggtggtcccaagactgcactttttctccctttcgagctggggatgtagagagaacttacaggtgatttttattctgattgcttttgtttgtgtccacaagggagcttggattctgtgtacttgtctctttcccattgtccagtaaggcagtaaatacagacacaatgtgtacttttgtgtgtgattcaagtgggagacagtctgttaaaaggtcagaaacattttagtcccctttaaaatatttcttttagtttatttctatcgtgttttatttcacagatatttaattaccacccctaaatttcctcctcttacccttcaccttccctaaaatccttccaaaatcagtgaactgcaagcagggaaactaacaaatgtccattcaccctttttgtgtggtgtgtttttttatgttttgttttgttttttaactaagcttgaaccaaagtcaatttttagcaagctgctgtactaatggactagttgataacgtgcagttcagacacatcgaggagatagatgctactgacaatttctttttcatttgtctttattaattttatatgaaagttgctgcttgtttttaatcttttatgttggtaaattgtgatatcctctgggcagacattaacttgatgtttaactagtttattaggttggtgtgtaaatagaatgacaatgtcaattactaatttctctcctctccattcactttttctctgttgtagttaaatttaatcttctatcctgacttgacatctctacctttagtctgtggaaatgattttagggctatcagtaatgctgtagctgcccataataatgagtccctcccttgggagtggtgaaacttagaaggaaggattcagggagggaaatgctggtacccagtatactggattagaagttatagcattaatttctcaaaattgctaccaaaggaagtgtggagtcccaagggactcaagctcagtgaggtaagacaaagggcaaggaaaggctgtttgggtggtttttttttccccacatatggtttagaaaatgatccctttcccaaacaaaactcaccaacagactttaatattagaaaagatactaagctttaaatgtcaatacagtggtcttttattccctgccctgtctatattttctactcaatttgggataaggggattttatgtgaagcacttgatgagggtagaccagcataaaaaatctgtttaaaagaagaaataatctttaggaaaagataaatctttagataaaaataaatttttttctctttttttacttatttaaaaataagttgtgaaatgaaaggtacatttacacatgtacacacgaaacactaatatagctttttggtggttgtttagtttaaaatcaactccctatccatcatccctagatattctacttatcgtattgcttcatgaacaccttagtcattttttactttacgtatatatttttttatcatctcaagaaatgcattttgaattgaatgaactatcttctaagctaagatactcaaatttaacttttagccaccttatatgggagagcctggaaactaaaggggaccagggaccatttgaccaaaagaggtgtttggtggagtttctgcatttcaaagaagaaaggccagataggtcatcacaattcattgtattattctttttttttccccttaatgtttatgcaaattttattttatatttctgaatttggttagcacatactaagccaaagactattctaaatgcatttatagtgaatactatgtatgcccatggtaatgggtcctccctaaggagtggtgaatgtaattgtgtgaatcctgcttatcacaagtggtgcaatttggtcataaactttatttataccctgtatacatctgaataacagagcagaaagacctaaaaaagggcttctcacaggaacaatattactatgttgttctaagaaaaaataagttgagtgctgtattagtttaagtgtttctaaagttctataggcagcattttagaattaagaattgtgtatatccattaactgatataattcacatgtccttttatttgttatcagaaagatcaatactatcccaatttattcaacttgttacccaagaaatggaaccaaaggaatccaactttcattttgtgtagaatcatacctacttatacttaatgctagcactgtaagaaataagtcttttttgtttaaaaaagggaagataagattaaagattcttagtgagatcatcttgccaatttgttgtacatctctcattcattgttgggggaaaaaaaagcacaactatacctctttaatgttattttcttccattatccctcatttatttggaaagataagggaaaccttgtctgtattatccagaagcacagatatttgcttgacacaatatttaaattcagcccaatctttaacattaaaaaattttctttttaacttgctggaaaagttggatacattggcaaatatagggaattcatgtcttttttttttttttttttctggtcttgctctgttgcctaggctagagtgcaacggcatgatctcggctcactgcaacctctgcctcccgggttcaagcaattctcctgcttcagcctcccaagtagctgggattacaggcgcccaccaccgcacccggctaatttttgtatttttagtagggacgggatttctccgtgttggccaggctttttgaactcctgaccttaggtgatctgcctgccttggcctcccaaagtgctgggattacaggtatgagccactgtgcccatcctcatgtcaatttttaaagtgataaatcctgatattatacattgcaattagtgtagaataaacgcttggcttatagaactctctgttcttagtctaaagctgttcccaaaccaggtcatcctcacgaaacattcttgaccaagaaaaaagataaggtcattgagataggaagacagaggaaaagcctcttgctgttgtttcttcccaagaaaggagaagccctgccagggagaagtcagtagtattgctgactcactgtatcactgagtgtagggtgtggtagcaaggaggaggcaggggattcacgctgacaggtggctctggcctggctcttggggggccttctgaagaccagtctgcagtttgaggaagggccccaacaattcatttggagagcttggccaaatactttctcattaaatcagcacctaaacttgatgaacttaaagtttgtttattagagttgaaaacattaaaagatgactgatactaatgggagaaaaatactaaagacccaaaatttaaaattttccaaaatggacaagaattgatgggttaatttgctcataactgatatgagtttgcttttatgtgtgtgtggaaagcatttaatgtgtgatgctgttcatagtcctggctatttgatgtcattttcagttttacaacattttgaggatgacactttataaaatggtaaatctttctcagcgtttacaaacttggcttttgagaagggaaaaatcctctttgctatttctgtaagaagaataactgagatcagctattatataggtttgcatggatggtgtccacaatacaaatgtaaacttggacaggaataggataaataaattgctttcatcataaaggccaatcatccatttcttagtccaaggagattaaatataaataggacacccctgagatttccagtaaggtatttgaaaggattccactgggagggcagggaatatattttttctcagagcatccagtttgtacccagttttctatatggtttgtgaactgtagcttttaaaaaaaaattttgtagttttcttctaaccttattcattaagtagttccttgttttggcccttctactcttggccttagctaaaagcagtaaatgtgagtgaattttatgttgattatgtcacctggatctcctttccttcccttctttttctcattgaatggtggtaccttaatttgggtaacagctagcttctggcaccttcataaaatacctcagaatagcttagcattgttgcaaaactggttttaaactaaaaaccaaataaataagtgaaaaaattttataaatagtggaaataattctagctgtagcatttagttgaactaatgtttattatgatcgataaacaagattgatgctgtatgtatttgggatcctgtttataggttacaatttatagggttagggagggttgggtgggggaagaggagatgttgattatgttagaaggaaaacattgctcgtgtgtgtgtttgttttttcttatatctgtcttgccaaaggaaacttgattttccctgtgattggctttggcctctgtggtctggtctgcagcagtgtgtggtggcatgcaggtaacatatggggtgtccagtaggttcagggaccctgagggtgcatttacatcccttcctatggttgcccatgccccccagaccctgccaacctctcctaatgattcattacctctgtacatagcaaaagcataggcaaaggatgaatgcgtgaatgcctggatgtgcagttgagaaacagaggcagacatagacatgcaccaattaatttggagccaagaggtgagtgattgatgtatcttaaatctaggaaagttaaagtgaaacaggttctttgtgttgccctctgtcaagttactgaatgttgtgctaataacacaacactttaaaaccttacttacttttctcataccaaggctagttctttctagaccaaaaacacaaacaggataaaaagcaaaccaagaagttgaaagctaacctgcccacctcacccctgtgatacaaagtgtgaaccttaaggattagttggtgggattgaggagagaattattcttggtgggaacatgaatgagaaatgatgctggcttaggaaaaatcacaagccctttctgcccatactctgggacaaactttcttggctccctgagttcggatatagactgtatctctagaaaggctatttttttaaataaatgatcccacagaacttaagtgggatttggtttagataccaaagacactgctaatgtcattgcttatccttaagttttcaaaacaggcagagggaataggagcaaaaagccaaaatttggaaaagctttactttatctctttccttcccttttccccttttcccagtcccctgctttttgaaggaagtcttcttggttatcctggctttggaaaagagatttattttgttttgctctgctggctctttaaagatggatagttgctcaatctagcagtgatgttcttggaattgctgagaaatttggggagggcaaaagataggggtagaattttttcattatttccctttatctaatacttttaaatagaaccaacacagcctatatgagttcagacaatatttagatgtggtatctccatctgtctcctgtaaaagataagaattttcaagaacaggattacgtggaaaaccaaaagatcttcccttactctcctataaatgttttgttccaaatgtttttatatatgggctctagggagtcaggtagttcattgtttcggtgtactattgataggacacagaaagggagagagggtaaagaaatgtatcactctctgaatattgcatcaaaaatgattaggttgcagaacttcatgaaagctttactaataatcttattgttctgacattatgtaaaggtggtattaatattgtatgacttgtcaaagtgctagataggtttataagtaggtaatagggatgttgaagattagagcacttgaaacagaagttctgggaaaacaaggtgtgtgtaatggaacaccactttgagcacagaaacaaaggtcccttggacctggtagggaagatgtgatttatgattgtttctgtgtccctgtatctgcccaccctgcacagggctccaccacccagggccaccttctggtttaaacccaggacactgtcaaaaagttaagaccccaaaactaatttactgtaaaaaacattgaggactgctgcaaagttttcccttgttttctttgtgtacttgttcatcattgtataagttagccacagcttcacaagagcagcttaaggcttctttcataaattggcagtggcattgagttctcaaacattatatcccaaagtctgcaggcagacagctggatacagcgctgtgtataaatgagacgtccaaacacttgagtttcttaagattgggatctctttcaaatgaaaaaggacagagccaagtagagaaaagactttgtgctcccacccagccttaatgagtctcatggtctaaaagtataggaagaaatgaaatgcactttcagaagctaaaatgacagtgtctgctacaaaaggctgtagttgtaggcagtcggggatgccatgtccttggttccattcctgcgtgagtctgcagaaggcacacactttgtaagagtagagtggactagtgccagcctgaataggtttaaaactgcaaacagttggagaacatggaacaggttggtgcaggaagcctaagattttgcaatcatattataacattggcttttgacaacataaatgttgtatcttccctaaggtcaggtcggggaaagaaagacttccagcttcttacctctgcgtgcatgggcacgtgtgcattgctcagtccgcaggaggtctcactccgcaggaaacgctctcctcccgcataagtctgtacttccatcccctcatctgtggtagtagtgaaggctaggtgagtaagcgtgggctgttctacccaccagaagtccaggagctgttgtatacctcatttctaactcgtgaccgagtgacttgctttaactttctcgaaatcctacagagttgccaagtctgccctccctcctcagtcatgttaaactctggcctatagcatcatgggacctgtagcctagggtgggaccccctaaagcctctgaatgtcgctgcttaaaagctactgcaaactgagggcaaattgcaatcttctattcctttttgttgcaaggggtcttcacaggtctcttaacatctgctttccctgccaccctgcctttaggggctggccagctatccacacccctaacccaccctgtgtttctgacagctggccacacgtcaacttctgtacttgccttttccttggtggggtagaggccaaccccttctcctctgaggcctcagggttctgtttcttttcaggactttgggtagaagggaagacaccaaaggctcctttaagctgactgctgcatacacatttcactttttttcctttgacatgaccaaaaatatccaaatatttaagtttattattattattattattatttgacaatcttatatccaatgggctctctagaagctgcatccccagccctttcaccttttctttgaatgtagttcccaaccttcaattcccacccctaatgctgacaaaaagcttagccaggtcatgatactgctgctataagccaggggagggtggtttctttgttttgttttgttttgttttgtttttcaaatttccagccaaaaccaaagatttcttaatgattgtataaactcaaaacaaacaaaagaaccaaagaaaagggaagtcttcagcatcagtccagtctgtggtgtcctggcacttagaagagtgaggccagggaaggtggggcggggggaccctctgactggatcagaaagggcaggcaagctgcttaccaccttccagggtccagcacaggtgcatgcccctagctttggccctcacaaacttgtgagcatgccctgaaacaaattggcatttcagattttccaaaacaaaagtcaaaaaaccccatcaccaccatcatccaccctacaccaaccagggtcactatggggacttagcacagggcctagggagggtgggagctgctgctggactggcccgaggactccacagagtgggggacgttgaagacactggcgcacgattggctgctctgctgggtgctttaacctctggggctgggcgaatgcacgccacggtgcccttctgagcctttttttcttttcctgtactggaactgcttggaagtggctgtcctgtttgtgagaaaacatgcagaaagattatcaagcttttcatttctctttattgtagttttctttcctttttgcagcaccactgtgcaactatgcattgtacttcacaaccttttgtgctaggtagatgcctgtgactttttaacttggggggtggggggattgcaaatgaaggaactttttacatggatctttttaatctcagttggttgggggaggggggtacttggttcttgggtcacacaagctctatcccaaagcaaaatccaaatgttaataatattagcctgatgcagataccaaagataatttctttcctgcagaaccttagactcgtgtattaagtacgattacccagcacttgcattagtctaacctcagtaattccaaagcttagatgtatattttggtatatttctgggatattaaaaaaaaaatgtcgtttaacttcttgtttgtttcagtgtaatgctcttaaagtcatagcatgaaaataattgaactgtcctattcttagtagtttgaaataatagtatttttgtatgttttgggtgtgtctatgtatgtattaacataacagttttcactgcctaggtgttcataataaaaaagaaaatgaaaaaagttctgagtgtacataatattcaataataatctcccaccaggtgtcaatttagattgcatattcctcattactgttcccaactgggattttgttttcttttaaagagacagtgatcgtgtttttctaaagatgttttctttctctctttcaatatcttaactcactttttttttcttccttttttgtcttaattattaattcaggggtgtttgtccactgttgtcaaaggaggggcacaaggggaattggcccccggcctcctagaactttttgttttatgtactttaaaatgtgagtttgagttcttctttgtggaaacttaagatgtggtgtaaatgattctttccaaaattgtccagcagcttgaatgaggcagtgacaattctgaggtggtttattgggagtccttctacatttctcttagataactctgcactctgggtggctattgtgtagccttactgccccagagtgcctgttagccaaatatttcccctctgataggaatattttctaagaatcagctgataacttgcgtgctggaccttgttatctgtgcccctgggagacacacgttttcttggttttgaaaacctgaaacacaggcaactttacattttggggaattagctgatgcctcctgaagcctgaggaggtggcggggaatatgagcggtgctgtctctctcaaaagtgccctttagatgattccccctcctagggctgcctgcaggggctgtaggcttgggaaagattgtgtaggtgacagtgaatcagaatgaagtggtagattttgtgtagatgcatttgtctgctgtaattttttatatatatattaaacttactgtaactgtacagttcatttctgttgtaaaacatcattaaaccatcttccaagtgttttcaca

SEQ ID NO: 168414 - DNA, 496 bp, Homo sapiens
  Payload ID: 13150
  Gene Symbol: POU2F1
  Gene Name: POU class 2 homeobox 1
  ENST ID: ENST00000442313
  CDS Start-End: 8-190
attcaaaatggcggacggaggagcagcgagtcaagatgagagttcagccgcggcggcagcagcagcagactggaaaagtaagaagagctttcctgcctttttaattaccaaactactctcagttttcaatgaatcagttcaaagaaagaatgcagtctttctatacctggttttcttccatcatctgtgacagcttcttgatctgtccccagactcaagaatgaacaatccgtcagaaaccagtaaaccatctatggagagtggagatggcaacacaggcacacaaaccaatggtctggactttcagaagcagcctgtgcctgtaggaggagcaatctcaacagcccaggcgcaggctttccttggacatctccatcaggtccaactcgctggaacaagtttacaggctgctgctcagtctttaaatgtacagtctaaatctaatgaagaatcgggggattcgcagcagccaagccagccttcccagcagccttca

SEQ ID NO: 168415 - DNA, 1896 bp, Homo sapiens
  Payload ID: 13150
  Gene Symbol: POU2F1
  Gene Name: POU class 2 homeobox 1
  ENST ID: ENST00000420254
  CDS Start-End: 114-1896
taagaacatactgtagatttgttagaaatagtagtaccttctttccccaccccaaactgctacctgtttcttccttgtttggactctctgctcctctagaagatttcacagcaatgctggactgcagtgactatgttctagactcaagaatgaacaatccgtcagaaaccagtaaaccatctatggagagtggagatggcaacacaggcacacaaaccaatggtctggactttcagaagcagcctgtgcctgtaggaggagcaatctcaacagcccaggcgcaggctttccttggacatctccatcaggtccaactcgctggaacaagtttacaggctgctgctcagtctttaaatgtacagtctaaatctaatgaagaatcgggggattcgcagcagccaagccagccttcccagcagccttcagtgcaggcagccattccccagacccagcttatgctagctggaggacagataactgggcttactttgacgcctgcccagcaacagttactactccagcaggcacaggcacaggcacagctgctggctgctgcagtgcagcagcactccgccagccagcagcacagtgctgctggagccaccatctccgcctctgctgccacgcccatgacgcagatccccctgtctcagcccatacagatcgcacaggatcttcaacaactgcaacagcttcaacagcagaatctcaacctgcaacagtttgtgttggtgcatccaaccaccaatttgcagccagcgcagtttatcatctcacagacgccccagggccagcagggtctcctgcaagcgcaaaatcttctaacgcaactacctcagcaaagccaagccaacctcctacagtcgcagccaagcatcaccctcacctcccagggtgatgttgggctcgctatggggaaactatatggaaatgacttcagccaaactaccatctctcgatttgaagccttgaacctcagctttaagaacatgtgcaagttgaagccacttttagagaagtggctaaatgatgcagagaacctctcatctgattcgtccctctccagcccaagtgccctgaattctccaggaattgagggcttgagccgtaggaggaagaaacgcaccagcatagagaccaacatccgtgtggccttagagaagagtttcttggagaatcaaaagcctacctcggaagagatcactatgattgctgatcagctcaatatggaaaaagaggtgattcgtgtttggttctgtaaccgccgccagaaagaaaaaagaatcaacccaccaagcagtggtgggaccagcagctcacctattaaagcaattttccccagcccaacttcactggtggcgaccacaccaagccttgtgactagcagtgcagcaactaccctcacagtcagccctgtcctccctctgaccagtgctgctgtgacgaatctttcagttacaggcacttcagacaccacctccaacaacacagcaaccgtgatttccacagcgcctccagcttcctcagcagtcacgtccccctctctgagtccctccccttctgcctcagcctccacctccgaggcatccagtgccagtgagaccagcacaacacagaccacctccactcctttgtcctcccctcttgggaccagccaggtgatggtgacagcatcaggtttgcaaacagcagcagctgctgcccttcaaggagctgcacagttgccagcaaatgccagtcttgctgccatggcagctgctgcaggactaaacccaagcctgatggcaccctcacagtttgcggctggaggtgccttactcagtctgaatccagggaccctgagcggtgctctcagcccagctctaatgagcaacagtacactggcaactattcaag

SEQ ID NO: 168416 - DNA, 12939 bp, Homo sapiens
  Payload ID: 13150
  Gene Symbol: POU2F1
  Gene Name: POU class 2 homeobox 1
  ENST ID: ENST00000443275
  CDS Start-End: 1-1686
gtgcaggcagccattccccagacccagcttatgctagctggaggacagataactgggcttactttgacgcctgcccagcaacagttactactccagcaggcacaggcacaggcacagctgctggctgctgcagtgcagcagcactccgccagccagcagcacagtgctgctggagccaccatctccgcctctgctgccacgcccatgacgcagatccccctgtctcagcccatacagatcgcacaggatcttcaacaactgcaacagcttcaacagcagaatctcaacctgcaacagtttgtgttggtgcatccaaccaccaatttgcagccagcgcagtttatcatctcacagacgccccagggccagcagggtctcctgcaagcgcaaaatcttctaacgcaactacctcagcaaagccaagccaacctcctacagtcgcagccaagcatcaccctcacctcccagccagcaaccccaacacgcacaatagcagcaaccccaattcagacacttccacagagccagtcaacaccaaagcgaattgatactcccagcttggaggagcccagtgaccttgaggagcttgagcagtttgccaagaccttcaaacaaagacgaatcaaacttggattcactcagggtgatgttgggctcgctatggggaaactatatggaaatgacttcagccaaactaccatctctcgatttgaagccttgaacctcagctttaagaacatgtgcaagttgaagccacttttagagaagtggctaaatgatgcagagaacctctcatctgattcgtccctctccagcccaagtgccctgaattctccaggaattgagggcttgagccgtaggaggaagaaacgcaccagcatagagaccaacatccgtgtggccttagagaagagtttcttggagaatcaaaagcctacctcggaagagatcactatgattgctgatcagctcaatatggaaaaagaggtgattcgtgtttggttctgtaaccgccgccagaaagaaaaaagaatcaacccaccaagcagtggtgggaccagcagctcacctattaaagcaattttccccagcccaacttcactggtggcgaccacaccaagccttgtgactagcagtgcagcaactaccctcacagtcagccctgtcctccctctgaccagtgctgctgtgacgaatctttcagttacaggcacttcagacaccacctccaacaacacagcaaccgtgatttccacagcgcctccagcttcctcagcagtcacgtccccctctctgagtccctccccttctgcctcagcctccacctccgaggcatccagtgccagtgagaccagcacaacacagaccacctccactcctttgtcctcccctcttgggaccagccaggtgatggtgacagcatcaggtttgcaaacagcagcagctgctgcccttcaaggagctgcacagttgccagcaaatgccagtcttgctgccatggcagctgctgcaggactaaacccaagcctgatggcaccctcacagtttgcggctggaggtgccttactcagtctgaatccagggaccctgagcggtgctctcagcccagctctaatgagcaacagtacactggcaactattcaaggattgcttcatggattggagaactttctaaccaaaaattaaaaaaaaaaaaaaaaaaagaaacaaaaaaatcaaaaacaaacaaaaataagtgaaaggactacttatcatttccagcagtcatgatgacaagttaaggtgggttaccaattccaatataggaaggggatttcttgtttgtctaaatttctttttttcttaaaaaaaaaaaatcatttttatgggtctgttgtacaggccattaagtcataacaaggtgtttataatcgtatcaattgtgttgggggttcctttcttaactggtacaatttaggcaggcctgtattactgtattattattgttgttgttgttattgttttatatatatagtttggacatgtttattatctcttgctcctggatcctatttcagtgagctcccacactgtggggagggagggttttggggtaaggggagacttctgttcttaactgtggggaatgttcttgctggtttccttatccttgatgactcttacagaggtgctagaaaattattttcttttgccacttatgcaagaggcttggtgcagaagctgaaggcagtgtgtgcaaacactcccattccacacacgccccttcccctccccacatcaggtggtgcctttggagcacttttgtgtaggaaggaattcctgctgaactgtagctctcactcacccccaaatcattgaatgaccctgaggcccagttcctgtggtgcaacagtgctgctttctgctactttcaatgggaacagctgtacatgttgcagggcaggatttggttcccaagagcaaagactactgcagacacctgacttggtggttctcctgatttcttatctcctgaaaaatgctcctgctgttggtgtgtttgtttgtttgttccattttgtggaagtttttcatccaaactttaactaacttggcaaagaaaaaaaactgacttactgaaattgggaaacttttcccttcttttattttctaaaggaattctactagactattttccattgataatatatacaaaagaggtgtgatgagaagggtataaggttaccaccttttcctctagagagccacagacttcctttccactggatggtttataaattcctctaaccctgagattcttcttggttctctgactaaaggaggcacttattagccgggctgggatctgtagaacctttgaagaaggactttgagcaggaactttgcacacaccttaagtgtctccttggtttgttcatgatgctcctgctaggtaggtctaaatggcaatacacatctctttattcaatgtagaaagtaattagctctgtaattattttcagggtgtttgtagactatataaatgagcccattgaaaaggaagagtttgtgaaagtggatgaagaggaataagggtaacttggagattaaattcctttttttgtcagtgtactgttgttatgccatctgtaccaaaaaattttccaaaagactggatcactgcagtgcagctcatctaagttccccttcttattggagttaaaggttcccatttggtggctgtgggtgcttgcttaaatctctggtggtcccaagactgcactttttctccctttcgagctggggatgtagagagaacttacaggtgatttttattctgattgcttttgtttgtgtccacaagggagcttggattctgtgtacttgtctctttcccattgtccagtaaggcagtaaatacagacacaatgtgtacttttgtgtgtgattcaagtgggagacagtctgttaaaaggtcagaaacattttagtcccctttaaaatatttcttttagtttatttctatcgtgttttatttcacagatatttaattaccacccctaaatttcctcctcttacccttcaccttccctaaaatccttccaaaatcagtgaactgcaagcagggaaactaacaaatgtccattcaccctttttgtgtggtgtgtttttttatgttttgttttgttttttaactaagcttgaaccaaagtcaatttttagcaagctgctgtactaatggactagttgataacgtgcagttcagacacatcgaggagatagatgctactgacaatttctttttcatttgtctttattaattttatatgaaagttgctgcttgtttttaatcttttatgttggtaaattgtgatatcctctgggcagacattaacttgatgtttaactagtttattaggttggtgtgtaaatagaatgacaatgtcaattactaatttctctcctctccattcactttttctctgttgtagttaaatttaatcttctatcctgacttgacatctctacctttagtctgtggaaatgattttagggctatcagtaatgctgtagctgcccataataatgagtccctcccttgggagtggtgaaacttagaaggaaggattcagggagggaaatgctggtacccagtatactggattagaagttatagcattaatttctcaaaattgctaccaaaggaagtgtggagtcccaagggactcaagctcagtgaggtaagacaaagggcaaggaaaggctgtttgggtggtttttttttccccacatatggtttagaaaatgatccctttcccaaacaaaactcaccaacagactttaatattagaaaagatactaagctttaaatgtcaatacagtggtcttttattccctgccctgtctatattttctactcaatttgggataaggggattttatgtgaagcacttgatgagggtagaccagcataaaaaatctgtttaaaagaagaaataatctttaggaaaagataaatctttagataaaaataaatttttttctctttttttacttatttaaaaataagttgtgaaatgaaaggtacatttacacatgtacacacgaaacactaatatagctttttggtggttgtttagtttaaaatcaactccctatccatcatccctagatattctacttatcgtattgcttcatgaacaccttagtcattttttactttacgtatatatttttttatcatctcaagaaatgcattttgaattgaatgaactatcttctaagctaagatactcaaatttaacttttagccaccttatatgggagagcctggaaactaaaggggaccagggaccatttgaccaaaagaggtgtttggtggagtttctgcatttcaaagaagaaaggccagataggtcatcacaattcattgtattattctttttttttccccttaatgtttatgcaaattttattttatatttctgaatttggttagcacatactaagccaaagactattctaaatgcatttatagtgaatactatgtatgcccatggtaatgggtcctccctaaggagtggtgaatgtaattgtgtgaatcctgcttatcacaagtggtgcaatttggtcataaactttatttataccctgtatacatctgaataacagagcagaaagacctaaaaaagggcttctcacaggaacaatattactatgttgttctaagaaaaaataagttgagtgctgtattagtttaagtgtttctaaagttctataggcagcattttagaattaagaattgtgtatatccattaactgatataattcacatgtccttttatttgttatcagaaagatcaatactatcccaatttattcaacttgttacccaagaaatggaaccaaaggaatccaactttcattttgtgtagaatcatacctacttatacttaatgctagcactgtaagaaataagtcttttttgtttaaaaaagggaagataagattaaagattcttagtgagatcatcttgccaatttgttgtacatctctcattcattgttgggggaaaaaaaagcacaactatacctctttaatgttattttcttccattatccctcatttatttggaaagataagggaaaccttgtctgtattatccagaagcacagatatttgcttgacacaatatttaaattcagcccaatctttaacattaaaaaattttctttttaacttgctggaaaagttggatacattggcaaatatagggaattcatgtcttttttttttttttttttctggtcttgctctgttgcctaggctagagtgcaacggcatgatctcggctcactgcaacctctgcctcccgggttcaagcaattctcctgcttcagcctcccaagtagctgggattacaggcgcccaccaccgcacccggctaatttttgtatttttagtagggacgggatttctccgtgttggccaggctttttgaactcctgaccttaggtgatctgcctgccttggcctcccaaagtgctgggattacaggtatgagccactgtgcccatcctcatgtcaatttttaaagtgataaatcctgatattatacattgcaattagtgtagaataaacgcttggcttatagaactctctgttcttagtctaaagctgttcccaaaccaggtcatcctcacgaaacattcttgaccaagaaaaaagataaggtcattgagataggaagacagaggaaaagcctcttgctgttgtttcttcccaagaaaggagaagccctgccagggagaagtcagtagtattgctgactcactgtatcactgagtgtagggtgtggtagcaaggaggaggcaggggattcacgctgacaggtggctctggcctggctcttggggggccttctgaagaccagtctgcagtttgaggaagggccccaacaattcatttggagagcttggccaaatactttctcattaaatcagcacctaaacttgatgaacttaaagtttgtttattagagttgaaaacattaaaagatgactgatactaatgggagaaaaatactaaagacccaaaatttaaaattttccaaaatggacaagaattgatgggttaatttgctcataactgatatgagtttgcttttatgtgtgtgtggaaagcatttaatgtgtgatgctgttcatagtcctggctatttgatgtcattttcagttttacaacattttgaggatgacactttataaaatggtaaatctttctcagcgtttacaaacttggcttttgagaagggaaaaatcctctttgctatttctgtaagaagaataactgagatcagctattatataggtttgcatggatggtgtccacaatacaaatgtaaacttggacaggaataggataaataaattgctttcatcataaaggccaatcatccatttcttagtccaaggagattaaatataaataggacacccctgagatttccagtaaggtatttgaaaggattccactgggagggcagggaatatattttttctcagagcatccagtttgtacccagttttctatatggtttgtgaactgtagcttttaaaaaaaaattttgtagttttcttctaaccttattcattaagtagttccttgttttggcccttctactcttggccttagctaaaagcagtaaatgtgagtgaattttatgttgattatgtcacctggatctcctttccttcccttctttttctcattgaatggtggtaccttaatttgggtaacagctagcttctggcaccttcataaaatacctcagaatagcttagcattgttgcaaaactggttttaaactaaaaaccaaataaataagtgaaaaaattttataaatagtggaaataattctagctgtagcatttagttgaactaatgtttattatgatcgataaacaagattgatgctgtatgtatttgggatcctgtttataggttacaatttatagggttagggagggttgggtgggggaagaggagatgttgattatgttagaaggaaaacattgctcgtgtgtgtgtttgttttttcttatatctgtcttgccaaaggaaacttgattttccctgtgattggctttggcctctgtggtctggtctgcagcagtgtgtggtggcatgcaggtaacatatggggtgtccagtaggttcagggaccctgagggtgcatttacatcccttcctatggttgcccatgccccccagaccctgccaacctctcctaatgattcattacctctgtacatagcaaaagcataggcaaaggatgaatgcgtgaatgcctggatgtgcagttgagaaacagaggcagacatagacatgcaccaattaatttggagccaagaggtgagtgattgatgtatcttaaatctaggaaagttaaagtgaaacaggttctttgtgttgccctctgtcaagttactgaatgttgtgctaataacacaacactttaaaaccttacttacttttctcataccaaggctagttctttctagaccaaaaacacaaacaggataaaaagcaaaccaagaagttgaaagctaacctgcccacctcacccctgtgatacaaagtgtgaaccttaaggattagttggtgggattgaggagagaattattcttggtgggaacatgaatgagaaatgatgctggcttaggaaaaatcacaagccctttctgcccatactctgggacaaactttcttggctccctgagttcggatatagactgtatctctagaaaggctatttttttaaataaatgatcccacagaacttaagtgggatttggtttagataccaaagacactgctaatgtcattgcttatccttaagttttcaaaacaggcagagggaataggagcaaaaagccaaaatttggaaaagctttactttatctctttccttcccttttccccttttcccagtcccctgctttttgaaggaagtcttcttggttatcctggctttggaaaagagatttattttgttttgctctgctggctctttaaagatggatagttgctcaatctagcagtgatgttcttggaattgctgagaaatttggggagggcaaaagataggggtagaattttttcattatttccctttatctaatacttttaaatagaaccaacacagcctatatgagttcagacaatatttagatgtggtatctccatctgtctcctgtaaaagataagaattttcaagaacaggattacgtggaaaaccaaaagatcttcccttactctcctataaatgttttgttccaaatgtttttatatatgggctctagggagtcaggtagttcattgtttcggtgtactattgataggacacagaaagggagagagggtaaagaaatgtatcactctctgaatattgcatcaaaaatgattaggttgcagaacttcatgaaagctttactaataatcttattgttctgacattatgtaaaggtggtattaatattgtatgacttgtcaaagtgctagataggtttataagtaggtaatagggatgttgaagattagagcacttgaaacagaagttctgggaaaacaaggtgtgtgtaatggaacaccactttgagcacagaaacaaaggtcccttggacctggtagggaagatgtgatttatgattgtttctgtgtccctgtatctgcccaccctgcacagggctccaccacccagggccaccttctggtttaaacccaggacactgtcaaaaagttaagaccccaaaactaatttactgtaaaaaacattgaggactgctgcaaagttttcccttgttttctttgtgtacttgttcatcattgtataagttagccacagcttcacaagagcagcttaaggcttctttcataaattggcagtggcattgagttctcaaacattatatcccaaagtctgcaggcagacagctggatacagcgctgtgtataaatgagacgtccaaacacttgagtttcttaagattgggatctctttcaaatgaaaaaggacagagccaagtagagaaaagactttgtgctcccacccagccttaatgagtctcatggtctaaaagtataggaagaaatgaaatgcactttcagaagctaaaatgacagtgtctgctacaaaaggctgtagttgtaggcagtcggggatgccatgtccttggttccattcctgcgtgagtctgcagaaggcacacactttgtaagagtagagtggactagtgccagcctgaataggtttaaaactgcaaacagttggagaacatggaacaggttggtgcaggaagcctaagattttgcaatcatattataacattggcttttgacaacataaatgttgtatcttccctaaggtcaggtcggggaaagaaagacttccagcttcttacctctgcgtgcatgggcacgtgtgcattgctcagtccgcaggaggtctcactccgcaggaaacgctctcctcccgcataagtctgtacttccatcccctcatctgtggtagtagtgaaggctaggtgagtaagcgtgggctgttctacccaccagaagtccaggagctgttgtatacctcatttctaactcgtgaccgagtgacttgctttaactttctcgaaatcctacagagttgccaagtctgccctccctcctcagtcatgttaaactctggcctatagcatcatgggacctgtagcctagggtgggaccccctaaagcctctgaatgtcgctgcttaaaagctactgcaaactgagggcaaattgcaatcttctattcctttttgttgcaaggggtcttcacaggtctcttaacatctgctttccctgccaccctgcctttaggggctggccagctatccacacccctaacccaccctgtgtttctgacagctggccacacgtcaacttctgtacttgccttttccttggtggggtagaggccaaccccttctcctctgaggcctcagggttctgtttcttttcaggactttgggtagaagggaagacaccaaaggctcctttaagctgactgctgcatacacatttcactttttttcctttgacatgaccaaaaatatccaaatatttaagtttattattattattattattatttgacaatcttatatccaatgggctctctagaagctgcatccccagccctttcaccttttctttgaatgtagttcccaaccttcaattcccacccctaatgctgacaaaaagcttagccaggtcatgatactgctgctataagccaggggagggtggtttctttgttttgttttgttttgttttgtttttcaaatttccagccaaaaccaaagatttcttaatgattgtataaactcaaaacaaacaaaagaaccaaagaaaagggaagtcttcagcatcagtccagtctgtggtgtcctggcacttagaagagtgaggccagggaaggtggggcggggggaccctctgactggatcagaaagggcaggcaagctgcttaccaccttccagggtccagcacaggtgcatgcccctagctttggccctcacaaacttgtgagcatgccctgaaacaaattggcatttcagattttccaaaacaaaagtcaaaaaaccccatcaccaccatcatccaccctacaccaaccagggtcactatggggacttagcacagggcctagggagggtgggagctgctgctggactggcccgaggactccacagagtgggggacgttgaagacactggcgcacgattggctgctctgctgggtgctttaacctctggggctgggcgaatgcacgccacggtgcccttctgagcctttttttcttttcctgtactggaactgcttggaagtggctgtcctgtttgtgagaaaacatgcagaaagattatcaagcttttcatttctctttattgtagttttctttcctttttgcagcaccactgtgcaactatgcattgtacttcacaaccttttgtgctaggtagatgcctgtgactttttaacttggggggtggggggattgcaaatgaaggaactttttacatggatctttttaatctcagttggttgggggaggggggtacttggttcttgggtcacacaagctctatcccaaagcaaaatccaaatgttaataatattagcctgatgcagataccaaagataatttctttcctgcagaaccttagactcgtgtattaagtacgattacccagcacttgcattagtctaacctcagtaattccaaagcttagatgtatattttggtatatttctgggatattaaaaaaaaaatgtcgtttaacttcttgtttgtttcagtgtaatgctcttaaagtcatagcatgaaaataattgaactgtcctattcttagtagtttgaaataatagtatttttgtatgttttgggtgtgtctatgtatgtattaacataacagttttcactgcctaggtgttcataataaaaaagaaaatgaaaaaagttctgagtgtacataatattcaataataatctcccaccaggtgtcaatttagattgcatattcctcattactgttcccaactgggattttgttttcttttaaagagacagtgatcgtgtttttctaaagatgttttctttctctctttcaatatcttaactcactttttttttcttccttttttgtcttaattattaattcaggggtgtttgtccactgttgtcaaaggaggggcacaaggggaattggcccccggcctcctagaactttttgttttatgtactttaaaatgtgagtttgagttcttctttgtggaaacttaagatgtggtgtaaatgattctttccaaaattgtccagcagcttgaatgaggcagtgacaattctgaggtggtttattgggagtccttctacatttctcttagataactctgcactctgggtggctattgtgtagccttactgccccagagtgcctgttagccaaatatttcccctctgataggaatattttctaagaatcagctgataacttgcgtgctggaccttgttatctgtgcccctgggagacacacgttttcttggttttgaaaacctgaaacacaggcaactttacattttggggaattagctgatgcctcctgaagcctgaggaggtggcggggaatatgagcggtgctgtctctctcaaaagtgccctttagatgattccccctcctagggctgcctgcaggggctgtaggcttgggaaagattgtgtaggtgacagtgaatcagaatgaagtggtagattttgtgtagatgcatttgtctgctgtaattttttatatatatattaaacttactgtaactgtacagttcatttctgttgtaaaacatcattaaaccatcttccaagtgttttcaca

SEQ ID NO: 168417 - DNA, 13937 bp, Homo sapiens
  Payload ID: 13150
  Gene Symbol: POU2F1
  Gene Name: POU class 2 homeobox 1
  Uniprot ID: P14859
  ENST ID: ENST00000541643
  CDS Start-End: 171-2402
atggcggacggaggagcagcgagtcaagatgagagttcagccgcggcggcagcagcagcagactggaaaagtaagaagagctttcctgcctttttaattaccaaactactctcagttttcaatgaatcagttcaaagaaagaatgcagtctttctatacctgactcaagaatgaacaatccgtcagaaaccagtaaaccatctatggagagtggagatggcaacacaggcacacaaaccaatggtctggactttcagaagcagcctgtgcctgtaggaggagcaatctcaacagcccaggcgcaggctttccttggacatctccatcaggtccaactcgctggaacaagtttacaggctgctgctcagtctttaaatgtacagtctaaatctaatgaagaatcgggggattcgcagcagccaagccagccttcccagcagccttcagtgcaggcagccattccccagacccagcttatgctagctggaggacagataactgggcttactttgacgcctgcccagcaacagttactactccagcaggcacaggcacaggcacagctgctggctgctgcagtgcagcagcactccgccagccagcagcacagtgctgctggagccaccatctccgcctctgctgccacgcccatgacgcagatccccctgtctcagcccatacagatcgcacaggatcttcaacaactgcaacagcttcaacagcagaatctcaacctgcaacagtttgtgttggtgcatccaaccaccaatttgcagccagcgcagtttatcatctcacagacgccccagggccagcagggtctcctgcaagcgcaaaatcttctaacgcaactacctcagcaaagccaagccaacctcctacagtcgcagccaagcatcaccctcacctcccagccagcaaccccaacacgcacaatagcagcaaccccaattcagacacttccacagagccagtcaacaccaaagcgaattgatactcccagcttggaggagcccagtgaccttgaggagcttgagcagtttgccaagaccttcaaacaaagacgaatcaaacttggattcactcagggtgatgttgggctcgctatggggaaactatatggaaatgacttcagccaaactaccatctctcgatttgaagccttgaacctcagctttaagaacatgtgcaagttgaagccacttttagagaagtggctaaatgatgcagagaacctctcatctgattcgtccctctccagcccaagtgccctgaattctccaggaattgagggcttgagccgtaggaggaagaaacgcaccagcatagagaccaacatccgtgtggccttagagaagagtttcttggagaatcaaaagcctacctcggaagagatcactatgattgctgatcagctcaatatggaaaaagaggtgattcgtgtttggttctgtaaccgccgccagaaagaaaaaagaatcaacccaccaagcagtggtgggaccagcagctcacctattaaagcaattttccccagcccaacttcactggtggcgaccacaccaagccttgtgactagcagtgcagcaactaccctcacagtcagccctgtcctccctctgaccagtgctgctgtgacgaatctttcagttacaggcacttcagacaccacctccaacaacacagcaaccgtgatttccacagcgcctccagcttcctcagcagtcacgtccccctctctgagtccctccccttctgcctcagcctccacctccgaggcatccagtgccagtgagaccagcacaacacagaccacctccactcctttgtcctcccctcttgggaccagccaggtgatggtgacagcatcaggtttgcaaacagcagcagctgctgcccttcaaggagctgcacagttgccagcaaatgccagtcttgctgccatggcagctgctgcaggactaaacccaagcctgatggcaccctcacagtttgcggctggaggtgccttactcagtctgaatccagggaccctgagcggtgctctcagcccagctctaatgagcaacagtacactggcaactattcaagctcttgcttctggtggctctcttccaataacatcacttgatgcaactgggaacctggtatttgccaatgcgggaggagcccccaacatcgtgactgcccctctgttcctgaaccctcagaacctctctctgctcaccagcaaccctgttagcttggtctctgccgccgcagcatctgcagggaactctgcacctgtagccagccttcacgccacctccacctctgctgagtccatccagaactctctcttcacagtggcctctgccagcggggctgcgtccaccaccaccaccgcctccaaggcacagtgagctgggcagagctgggctgccagaagcctttttcactctgcagtgtgattggactgccagccaggttaataaactgaaaaatgtgattggcttcctctcgccgtgttgtgagggcaaaggagagaagggagaaaaaaaaaaaaaaaccacacacacccatacacacataccagaaaaagaaagaaaggatggagacggaacatttgcctaattttgtaataaaacactgtcttttcaggattgcttcatggattggagaactttctaaccaaaaattaaaaaaaaaaaaaaaaaaagaaacaaaaaaatcaaaaacaaacaaaaataagtgaaaggactacttatcatttccagcagtcatgatgacaagttaaggtgggttaccaattccaatataggaaggggatttcttgtttgtctaaatttctttttttcttaaaaaaaaaaaatcatttttatgggtctgttgtacaggccattaagtcataacaaggtgtttataatcgtatcaattgtgttgggggttcctttcttaactggtacaatttaggcaggcctgtattactgtattattattgttgttgttgttattgttttatatatatagtttggacatgtttattatctcttgctcctggatcctatttcagtgagctcccacactgtggggagggagggttttggggtaaggggagacttctgttcttaactgtggggaatgttcttgctggtttccttatccttgatgactcttacagaggtgctagaaaattattttcttttgccacttatgcaagaggcttggtgcagaagctgaaggcagtgtgtgcaaacactcccattccacacacgccccttcccctccccacatcaggtggtgcctttggagcacttttgtgtaggaaggaattcctgctgaactgtagctctcactcacccccaaatcattgaatgaccctgaggcccagttcctgtggtgcaacagtgctgctttctgctactttcaatgggaacagctgtacatgttgcagggcaggatttggttcccaagagcaaagactactgcagacacctgacttggtggttctcctgatttcttatctcctgaaaaatgctcctgctgttggtgtgtttgtttgtttgttccattttgtggaagtttttcatccaaactttaactaacttggcaaagaaaaaaaactgacttactgaaattgggaaacttttcccttcttttattttctaaaggaattctactagactattttccattgataatatatacaaaagaggtgtgatgagaagggtataaggttaccaccttttcctctagagagccacagacttcctttccactggatggtttataaattcctctaaccctgagattcttcttggttctctgactaaaggaggcacttattagccgggctgggatctgtagaacctttgaagaaggactttgagcaggaactttgcacacaccttaagtgtctccttggtttgttcatgatgctcctgctaggtaggtctaaatggcaatacacatctctttattcaatgtagaaagtaattagctctgtaattattttcagggtgtttgtagactatataaatgagcccattgaaaaggaagagtttgtgaaagtggatgaagaggaataagggtaacttggagattaaattcctttttttgtcagtgtactgttgttatgccatctgtaccaaaaaattttccaaaagactggatcactgcagtgcagctcatctaagttccccttcttattggagttaaaggttcccatttggtggctgtgggtgcttgcttaaatctctggtggtcccaagactgcactttttctccctttcgagctggggatgtagagagaacttacaggtgatttttattctgattgcttttgtttgtgtccacaagggagcttggattctgtgtacttgtctctttcccattgtccagtaaggcagtaaatacagacacaatgtgtacttttgtgtgtgattcaagtgggagacagtctgttaaaaggtcagaaacattttagtcccctttaaaatatttcttttagtttatttctatcgtgttttatttcacagatatttaattaccacccctaaatttcctcctcttacccttcaccttccctaaaatccttccaaaatcagtgaactgcaagcagggaaactaacaaatgtccattcaccctttttgtgtggtgtgtttttttatgttttgttttgttttttaactaagcttgaaccaaagtcaatttttagcaagctgctgtactaatggactagttgataacgtgcagttcagacacatcgaggagatagatgctactgacaatttctttttcatttgtctttattaattttatatgaaagttgctgcttgtttttaatcttttatgttggtaaattgtgatatcctctgggcagacattaacttgatgtttaactagtttattaggttggtgtgtaaatagaatgacaatgtcaattactaatttctctcctctccattcactttttctctgttgtagttaaatttaatcttctatcctgacttgacatctctacctttagtctgtggaaatgattttagggctatcagtaatgctgtagctgcccataataatgagtccctcccttgggagtggtgaaacttagaaggaaggattcagggagggaaatgctggtacccagtatactggattagaagttatagcattaatttctcaaaattgctaccaaaggaagtgtggagtcccaagggactcaagctcagtgaggtaagacaaagggcaaggaaaggctgtttgggtggtttttttttccccacatatggtttagaaaatgatccctttcccaaacaaaactcaccaacagactttaatattagaaaagatactaagctttaaatgtcaatacagtggtcttttattccctgccctgtctatattttctactcaatttgggataaggggattttatgtgaagcacttgatgagggtagaccagcataaaaaatctgtttaaaagaagaaataatctttaggaaaagataaatctttagataaaaataaatttttttctctttttttacttatttaaaaataagttgtgaaatgaaaggtacatttacacatgtacacacgaaacactaatatagctttttggtggttgtttagtttaaaatcaactccctatccatcatccctagatattctacttatcgtattgcttcatgaacaccttagtcattttttactttacgtatatatttttttatcatctcaagaaatgcattttgaattgaatgaactatcttctaagctaagatactcaaatttaacttttagccaccttatatgggagagcctggaaactaaaggggaccagggaccatttgaccaaaagaggtgtttggtggagtttctgcatttcaaagaagaaaggccagataggtcatcacaattcattgtattattctttttttttccccttaatgtttatgcaaattttattttatatttctgaatttggttagcacatactaagccaaagactattctaaatgcatttatagtgaatactatgtatgcccatggtaatgggtcctccctaaggagtggtgaatgtaattgtgtgaatcctgcttatcacaagtggtgcaatttggtcataaactttatttataccctgtatacatctgaataacagagcagaaagacctaaaaaagggcttctcacaggaacaatattactatgttgttctaagaaaaaataagttgagtgctgtattagtttaagtgtttctaaagttctataggcagcattttagaattaagaattgtgtatatccattaactgatataattcacatgtccttttatttgttatcagaaagatcaatactatcccaatttattcaacttgttacccaagaaatggaaccaaaggaatccaactttcattttgtgtagaatcatacctacttatacttaatgctagcactgtaagaaataagtcttttttgtttaaaaaagggaagataagattaaagattcttagtgagatcatcttgccaatttgttgtacatctctcattcattgttgggggaaaaaaaagcacaactatacctctttaatgttattttcttccattatccctcatttatttggaaagataagggaaaccttgtctgtattatccagaagcacagatatttgcttgacacaatatttaaattcagcccaatctttaacattaaaaaattttctttttaacttgctggaaaagttggatacattggcaaatatagggaattcatgtcttttttttttttttttttctggtcttgctctgttgcctaggctagagtgcaacggcatgatctcggctcactgcaacctctgcctcccgggttcaagcaattctcctgcttcagcctcccaagtagctgggattacaggcgcccaccaccgcacccggctaatttttgtatttttagtagggacgggatttctccgtgttggccaggctttttgaactcctgaccttaggtgatctgcctgccttggcctcccaaagtgctgggattacaggtatgagccactgtgcccatcctcatgtcaatttttaaagtgataaatcctgatattatacattgcaattagtgtagaataaacgcttggcttatagaactctctgttcttagtctaaagctgttcccaaaccaggtcatcctcacgaaacattcttgaccaagaaaaaagataaggtcattgagataggaagacagaggaaaagcctcttgctgttgtttcttcccaagaaaggagaagccctgccagggagaagtcagtagtattgctgactcactgtatcactgagtgtagggtgtggtagcaaggaggaggcaggggattcacgctgacaggtggctctggcctggctcttggggggccttctgaagaccagtctgcagtttgaggaagggccccaacaattcatttggagagcttggccaaatactttctcattaaatcagcacctaaacttgatgaacttaaagtttgtttattagagttgaaaacattaaaagatgactgatactaatgggagaaaaatactaaagacccaaaatttaaaattttccaaaatggacaagaattgatgggttaatttgctcataactgatatgagtttgcttttatgtgtgtgtggaaagcatttaatgtgtgatgctgttcatagtcctggctatttgatgtcattttcagttttacaacattttgaggatgacactttataaaatggtaaatctttctcagcgtttacaaacttggcttttgagaagggaaaaatcctctttgctatttctgtaagaagaataactgagatcagctattatataggtttgcatggatggtgtccacaatacaaatgtaaacttggacaggaataggataaataaattgctttcatcataaaggccaatcatccatttcttagtccaaggagattaaatataaataggacacccctgagatttccagtaaggtatttgaaaggattccactgggagggcagggaatatattttttctcagagcatccagtttgtacccagttttctatatggtttgtgaactgtagcttttaaaaaaaaattttgtagttttcttctaaccttattcattaagtagttccttgttttggcccttctactcttggccttagctaaaagcagtaaatgtgagtgaattttatgttgattatgtcacctggatctcctttccttcccttctttttctcattgaatggtggtaccttaatttgggtaacagctagcttctggcaccttcataaaatacctcagaatagcttagcattgttgcaaaactggttttaaactaaaaaccaaataaataagtgaaaaaattttataaatagtggaaataattctagctgtagcatttagttgaactaatgtttattatgatcgataaacaagattgatgctgtatgtatttgggatcctgtttataggttacaatttatagggttagggagggttgggtgggggaagaggagatgttgattatgttagaaggaaaacattgctcgtgtgtgtgtttgttttttcttatatctgtcttgccaaaggaaacttgattttccctgtgattggctttggcctctgtggtctggtctgcagcagtgtgtggtggcatgcaggtaacatatggggtgtccagtaggttcagggaccctgagggtgcatttacatcccttcctatggttgcccatgccccccagaccctgccaacctctcctaatgattcattacctctgtacatagcaaaagcataggcaaaggatgaatgcgtgaatgcctggatgtgcagttgagaaacagaggcagacatagacatgcaccaattaatttggagccaagaggtgagtgattgatgtatcttaaatctaggaaagttaaagtgaaacaggttctttgtgttgccctctgtcaagttactgaatgttgtgctaataacacaacactttaaaaccttacttacttttctcataccaaggctagttctttctagaccaaaaacacaaacaggataaaaagcaaaccaagaagttgaaagctaacctgcccacctcacccctgtgatacaaagtgtgaaccttaaggattagttggtgggattgaggagagaattattcttggtgggaacatgaatgagaaatgatgctggcttaggaaaaatcacaagccctttctgcccatactctgggacaaactttcttggctccctgagttcggatatagactgtatctctagaaaggctatttttttaaataaatgatcccacagaacttaagtgggatttggtttagataccaaagacactgctaatgtcattgcttatccttaagttttcaaaacaggcagagggaataggagcaaaaagccaaaatttggaaaagctttactttatctctttccttcccttttccccttttcccagtcccctgctttttgaaggaagtcttcttggttatcctggctttggaaaagagatttattttgttttgctctgctggctctttaaagatggatagttgctcaatctagcagtgatgttcttggaattgctgagaaatttggggagggcaaaagataggggtagaattttttcattatttccctttatctaatacttttaaatagaaccaacacagcctatatgagttcagacaatatttagatgtggtatctccatctgtctcctgtaaaagataagaattttcaagaacaggattacgtggaaaaccaaaagatcttcccttactctcctataaatgttttgttccaaatgtttttatatatgggctctagggagtcaggtagttcattgtttcggtgtactattgataggacacagaaagggagagagggtaaagaaatgtatcactctctgaatattgcatcaaaaatgattaggttgcagaacttcatgaaagctttactaataatcttattgttctgacattatgtaaaggtggtattaatattgtatgacttgtcaaagtgctagataggtttataagtaggtaatagggatgttgaagattagagcacttgaaacagaagttctgggaaaacaaggtgtgtgtaatggaacaccactttgagcacagaaacaaaggtcccttggacctggtagggaagatgtgatttatgattgtttctgtgtccctgtatctgcccaccctgcacagggctccaccacccagggccaccttctggtttaaacccaggacactgtcaaaaagttaagaccccaaaactaatttactgtaaaaaacattgaggactgctgcaaagttttcccttgttttctttgtgtacttgttcatcattgtataagttagccacagcttcacaagagcagcttaaggcttctttcataaattggcagtggcattgagttctcaaacattatatcccaaagtctgcaggcagacagctggatacagcgctgtgtataaatgagacgtccaaacacttgagtttcttaagattgggatctctttcaaatgaaaaaggacagagccaagtagagaaaagactttgtgctcccacccagccttaatgagtctcatggtctaaaagtataggaagaaatgaaatgcactttcagaagctaaaatgacagtgtctgctacaaaaggctgtagttgtaggcagtcggggatgccatgtccttggttccattcctgcgtgagtctgcagaaggcacacactttgtaagagtagagtggactagtgccagcctgaataggtttaaaactgcaaacagttggagaacatggaacaggttggtgcaggaagcctaagattttgcaatcatattataacattggcttttgacaacataaatgttgtatcttccctaaggtcaggtcggggaaagaaagacttccagcttcttacctctgcgtgcatgggcacgtgtgcattgctcagtccgcaggaggtctcactccgcaggaaacgctctcctcccgcataagtctgtacttccatcccctcatctgtggtagtagtgaaggctaggtgagtaagcgtgggctgttctacccaccagaagtccaggagctgttgtatacctcatttctaactcgtgaccgagtgacttgctttaactttctcgaaatcctacagagttgccaagtctgccctccctcctcagtcatgttaaactctggcctatagcatcatgggacctgtagcctagggtgggaccccctaaagcctctgaatgtcgctgcttaaaagctactgcaaactgagggcaaattgcaatcttctattcctttttgttgcaaggggtcttcacaggtctcttaacatctgctttccctgccaccctgcctttaggggctggccagctatccacacccctaacccaccctgtgtttctgacagctggccacacgtcaacttctgtacttgccttttccttggtggggtagaggccaaccccttctcctctgaggcctcagggttctgtttcttttcaggactttgggtagaagggaagacaccaaaggctcctttaagctgactgctgcatacacatttcactttttttcctttgacatgaccaaaaatatccaaatatttaagtttattattattattattattatttgacaatcttatatccaatgggctctctagaagctgcatccccagccctttcaccttttctttgaatgtagttcccaaccttcaattcccacccctaatgctgacaaaaagcttagccaggtcatgatactgctgctataagccaggggagggtggtttctttgttttgttttgttttgttttgtttttcaaatttccagccaaaaccaaagatttcttaatgattgtataaactcaaaacaaacaaaagaaccaaagaaaagggaagtcttcagcatcagtccagtctgtggtgtcctggcacttagaagagtgaggccagggaaggtggggcggggggaccctctgactggatcagaaagggcaggcaagctgcttaccaccttccagggtccagcacaggtgcatgcccctagctttggccctcacaaacttgtgagcatgccctgaaacaaattggcatttcagattttccaaaacaaaagtcaaaaaaccccatcaccaccatcatccaccctacaccaaccagggtcactatggggacttagcacagggcctagggagggtgggagctgctgctggactggcccgaggactccacagagtgggggacgttgaagacactggcgcacgattggctgctctgctgggtgctttaacctctggggctgggcgaatgcacgccacggtgcccttctgagcctttttttcttttcctgtactggaactgcttggaagtggctgtcctgtttgtgagaaaacatgcagaaagattatcaagcttttcatttctctttattgtagttttctttcctttttgcagcaccactgtgcaactatgcattgtacttcacaaccttttgtgctaggtagatgcctgtgactttttaacttggggggtggggggattgcaaatgaaggaactttttacatggatctttttaatctcagttggttgggggaggggggtacttggttcttgggtcacacaagctctatcccaaagcaaaatccaaatgttaataatattagcctgatgcagataccaaagataatttctttcctgcagaaccttagactcgtgtattaagtacgattacccagcacttgcattagtctaacctcagtaattccaaagcttagatgtatattttggtatatttctgggatattaaaaaaaaaatgtcgtttaacttcttgtttgtttcagtgtaatgctcttaaagtcatagcatgaaaataattgaactgtcctattcttagtagtttgaaataatagtatttttgtatgttttgggtgtgtctatgtatgtattaacataacagttttcactgcctaggtgttcataataaaaaagaaaatgaaaaaagttctgagtgtacataatattcaataataatctcccaccaggtgtcaatttagattgcatattcctcattactgttcccaactgggattttgttttcttttaaagagacagtgatcgtgtttttctaaagatgttttctttctctctttcaatatcttaactcactttttttttcttccttttttgtcttaattattaattcaggggtgtttgtccactgttgtcaaaggaggggcacaaggggaattggcccccggcctcctagaactttttgttttatgtactttaaaatgtgagtttgagttcttctttgtggaaacttaagatgtggtgtaaatgattctttccaaaattgtccagcagcttgaatgaggcagtgacaattctgaggtggtttattgggagtccttctacatttctcttagataactctgcactctgggtggctattgtgtagccttactgccccagagtgcctgttagccaaatatttcccctctgataggaatattttctaagaatcagctgataacttgcgtgctggaccttgttatctgtgcccctgggagacacacgttttcttggttttgaaaacctgaaacacaggcaactttacattttggggaattagctgatgcctcctgaagcctgaggaggtggcggggaatatgagcggtgctgtctctctcaaaagtgccctttagatgattccccctcctagggctgcctgcaggggctgtaggcttgggaaagattgtgtaggtgacagtgaatcagaatgaagtggtagattttgtgtagatgcatttgtctgctgtaattttttatatatatattaaacttactgtaactgtacagttcatttctgttgtaaaacatcattaaaccatcttccaagtgttttcacattg

SEQ ID NO: 168418 - DNA, 1195 bp, Homo sapiens
  Payload ID: 13150
  Gene Symbol: POU2F1
  Gene Name: POU class 2 homeobox 1
  ENST ID: ENST00000560232
  CDS Start-End: 8-181
attcaaaatggcggacggaggagcagcgagtcaagatgagagttcagccgcggcggcagcagcagcagactggaaaagtaagaagagctttcctgcctttttaattaccaaactactctcagttttcaatgaatcagttcaaagaaagaatgcagtctttctatacctgactcaagaatgaacaatccgtcagaaaccagtaaaccatctatggagagtggagatggcaacacaggcacacaaaccaatggtctggactttcagaagcagcctgtgcctgtaggaggagcaatctcaacagcccaggcgcaggctttccttggacatctccatcaggtccaactcgctggaacaagtttacaggctgctgctcagtctttaaatgtacagtctaaatctaatgaagaatcgggggattcgcagcagccaagccagccttcccagcagccttcagtgcaggcagccattccccagacccagcttatgctagctggaggacagataactgggcttactttgacgcctgcccagcaacagttactactccagcaggcacaggcacaggcacagctgctggctgctgcagtgcagcagcactccgccagccagcagcacagtgctgctggagccaccatctccgcctctgctgccacgcccatgacgcagatccccctgtctcagcccatacagatcgcacaggatcttcaacaactgcaacagcttcaacagcagaatctcaacctgcaacagtttgtgttggtgcatccaaccaccaatttgcagccagcgcagtttatcatctcacagacgccccagggccagcagggtctcctgcaagcgcaaaatcttctaacgcaactacctcagcaaagccaagccaacctcctacagtcgcagccaagcatcaccctcacctcccagatctggcccagtccagcctgaggtttctggagctggggtaacttatctgtaaccaccccatctaaagccagcaaccccaacacgcacaatagcagcaaccccaattcagacacttccacagagccagtcaacaccaaagcgaattgatactcccagcttggaggagcccagtgaccttgaggagcttgagcagtttgccaagaccttcaaacaaagacgaatcaaacttggattcactcagggtgatgttgggctcgctatggggaaactatat

SEQ ID NO: 168419 - DNA, 3730 bp, Homo sapiens
  Payload ID: 13151
  Gene Symbol: POU2F2
  Gene Name: POU class 2 homeobox 2
  ENST ID: ENST00000342301
  CDS Start-End: 66-1826
ctcggcccccagagagggtggggagatgacacagttgttcccccagccctggcggggcgggcagcatggttcactccagcatgggggctccagaaataagaatgtctaagcccctggaggccgagaagcaaggtctggactccccatcagagcacacagacaccgaaagaaatggaccagacactaatcatcagaacccccaaaataagacctccccattctccgtgtccccaactggccccagtacaaagatcaaggctgaagaccccagtggcgattcagccccagcagcacccctgccccctcagccggcccagcctcatctgccccaggcccaactcatgttgacgggcagccagctagctggggacatacagcagctcctccagctccagcagctggtgcttgtgccaggccaccacctccagccacctgctcagttcctgctaccgcaggcccagcagagccagccaggcctgctaccgacaccaaatctattccagctacctcagcaaacccagggagctcttctgacctcccagccccgggccgggcttcccacacagccccccaaatgcttggagccaccatcccaccccgaggagcccagtgatctggaggagctggagcaattcgcccgcaccttcaagcaacgccgcatcaagctgggcttcacgcagggtgatgtgggcctggccatgggcaagctctacggcaacgacttcagccagacgaccatttcccgcttcgaggccctcaacctgagcttcaagaacatgtgcaaactcaagcccctcctggagaagtggctcaacgatgcagagactatgtctgtggactcaagcctgcccagccccaaccagctgagcagccccagcctgggtttcgacggcctgcccggccggagacgcaagaagaggaccagcatcgagacaaacgtccgcttcgccttagagaagagttttctagcgaaccagaagcctacctcagaggagatcctgctgatcgccgagcagctgcacatggagaaggaagtgatccgcgtctggttctgcaaccggcgccagaaggagaaacgcatcaacccctgcagtgcggcccccatgctgcccagcccagggaagccggccagctacagcccccatatggtcacaccccaagggggcgcggggaccttaccgttgtcccaagcttccagcagtctgagcacaacagttactaccttatcctcagctgtggggacgctccaccccagccggacagctggagggggtgggggcgggggcggggctgcgccccccctcaattccatcccctctgtcactcccccacccccggccaccaccaacagcacaaaccccagccctcaaggcagccactcggctatcggcttgtcaggcctgaaccccagcacgggaagcacaatggtggggttgagctccgggctgagtccagccctcatgagcaacaaccctttggccactatccaagccctggcctctggtggaaccctgccccttaccagccttgatggcagcgggaatctggtgctgggggcagccggtgcagccccggggagccctggcctggtgacctcgccgctcttcttgaatcatgctgggctgcccctgctcagcaccccgcctggtgtgggcctggtctcagcagcggctgcggctgtggcagcctccatctccagcaagtctcctggcctctcctcctcatcctcttcatcctcatcctcctcctcctccacttgcagcgagacggcagcacagacccctggaggtccaggggggcccgaggcagggtccaaacctgagtgagggccagccatgcctcccctcccattcctctggtccctgccttggtcccttgcctgggaagagggcgaggaggccagtggtggggacgcagagggtcctcagagcaggagtgacaagggaggaaagaccaaaaaaacaaccaaccaaaaaaaaaaaaaaaaaggaaagaaactaaccaacaaaagagaaaaccaaaaataatcacaacagaaaccagctgccccaaaggaaccagaggtgaaaaacaaacaaaaaaaaaccaaaaacaaaccaaaaaaaaaaaaaacccacaaaatcaaacaaaccaaaaaaccagtcgcgagccagacctcagcgtgctcaccctcactgctacgacgccaaataaaaaccccagccaggggcggagaagcctccagcaggtcagacctcatgccaccgagccctggctgtgggaccaacccccaaccctgcctcccccgtgggggctacagaaggaaaaagagaagatgccagcttcctaatcccagcccccagccctgggccagcgaagacagggcacagcctgggcagatgggctggggcttagcaccacccaccaaatgttcttttccagaaggtgaaagagaaagggcctgaacaaccttacaccaaatattcagtagcttcatccaaaggatgtacagaatttttagcattgtgctcaacagaatgtgtccctaccatgtgtccccttctcccctggcccccagctctccccacctgggcagggggtcttgctttaacctcctccctccccccagcaggggagagttcaagggaaggcctgcggacaacttttcatcccctgttcctccctcttttcccctttgaagggtgggctaggccattttgccaagttctagctctcacaagtccctcctcaaccctgtcaccctcctctgctctggaactgactccctccccagcctatgggaaggtggaaatttcaggcaagaggggatgaagacattcagttgagggcattcagttgtctttttccatcctgtctgtttccctgaaaaaaaaaaaaattcatattccagtgcctatccgtgggatccttcacgttctttgacattaaccagaaaccaaaaagagaactcacctcgcttttcccaccctgtgcccctctggtactggcgaatgcctctccctccccccacatgcacgcacgcacacaccccagtggtggggttcctcgagatggcatccccatcagggtccatgtggtggggacagtgccacagcctgtggtccccatctgagagggcgcggtggtggccaccactcccacaagacctccacaactcttggctggaccctgtgtttgaccagccccggacacgtctccactgacgacggacagaggagagacaccactgggagccaccctgccctcctgctattgtggaggccaacaaagttttgaaccgaaaaccaaaaaaacagaaacaaacaaacaataaatttaaactagaaaaaaaatttatatatatatataaacatatatatatatatatatataaaagggaaagaagatgaggactcttcaagaataagatggaaccgcgaggcggagccaagcccctgcaccggtggtccaggcccttgttccccaaggcggatggaaggacggatgcttctttctcttcacaaatacctcatggacgttgtctttgggaaagccggagggggcggctggggcagggcctgtccctcggccagggcagatggaagcgggtgggcggggctgagagagggtatcagggacaggggtgaagagccccaaactcccctcccaaatcaactgaaaaagctttaaaaaaagacaggaaaaaaaggagtaagaaagcaaaaagaacagatgaaggaaaacttaacaa

SEQ ID NO: 168420 - DNA, 6901 bp, Homo sapiens
  Payload ID: 13151
  Gene Symbol: POU2F2
  Gene Name: POU class 2 homeobox 2
  Uniprot ID: P09086
  ENST ID: ENST00000389341
  CDS Start-End: 68-1459
ggctcggcccccagagagggtggggagatgacacagttgttcccccagccctggcggggcgggcagcatggttcactccagcatgggggctccagaaataagaatgtctaagcccctggaggccgagaagcaaggtctggactccccatcagagcacacagacaccgaaagaaatggaccagacactaatcatcagaacccccaaaataagacctccccattctccgtgtccccaactggccccagtacaaagatcaaggctgaagaccccagtggcgattcagccccagcagcacccctgccccctcagccggcccagcctcatctgccccaggcccaactcatgttgacgggcagccagctagctggggacatacagcagctcctccagctccagcagctggtgcttgtgccaggccaccacctccagccacctgctcagttcctgctaccgcaggcccagcagagccagccaggcctgctaccgacaccaaatctattccagctacctcagcaaacccagggagctcttctgacctcccagccccgggccgggcttcccacacagccccccaaatgcttggagccaccatcccaccccgaggagcccagtgatctggaggagctggagcaattcgcccgcaccttcaagcaacgccgcatcaagctgggcttcacgcagggtgatgtgggcctggccatgggcaagctctacggcaacgacttcagccagacgaccatttcccgcttcgaggccctcaacctgagcttcaagaacatgtgcaaactcaagcccctcctggagaagtggctcaacgatgcagagactatgtctgtggactcaagcctgcccagccccaaccagctgagcagccccagcctgggtttcgacggcctgcccggccggagacgcaagaagaggaccagcatcgagacaaacgtccgcttcgccttagagaagagttttctagcgaaccagaagcctacctcagaggagatcctgctgatcgccgagcagctgcacatggagaaggaagtgatccgcgtctggttctgcaaccggcgccagaaggagaaacgcatcaacccctgcagtgcggcccccatgctgcccagcccagggaagccggccagctacagcccccatatggtcacaccccaagggggcgcggggaccttaccgttgtcccaagcttccagcagtctgagcacaacagttactaccttatcctcagctgtggggacgctccaccccagccggacagctggagggggtgggggcgggggcggggctgcgccccccctcaattccatcccctctgtcactcccccacccccggccaccaccaacagcacaaaccccagccctcaaggcagccactcggctatcggcttgtcaggcctgaaccccagcacgggccctggcctctggtggaaccctgccccttaccagccttgatggcagcgggaatctggtgctgggggcagccggtgcagccccggggagccctggcctggtgacctcgccgctcttcttgaatcatgctgggctgcccctgctcagcaccccgcctggtgtgggcctggtctcagcagcggctgcggctgtggcagcctccatctccagcaagtctcctggcctctcctcctcatcctcttcatcctcatcctcctcctcctccacttgcagcgagacggcagcacagacccctggaggtccaggggggcccgaggcagggtccaaacctgagtgagggccagccatgcctcccctcccattcctctggtccctgccttggtcccttgcctgggaagagggcgaggaggccagtggtggggacgcagagggtcctcagagcaggagtgacaagggaggaaagaccaaaaaaacaaccaaccaaaaaaaaaaaaaaaaaggaaagaaactaaccaacaaaagagaaaaccaaaaataatcacaacagaaaccagctgccccaaaggaaccagaggtgaaaaacaaacaaaaaaaaaccaaaaacaaaccaaaaaaaaaaaaaacccacaaaatcaaacaaaccaaaaaaccagtcgcgagccagacctcagcgtgctcaccctcactgctacgacgccaaataaaaaccccagccaggggcggagaagcctccagcaggtcagacctcatgccaccgagccctggctgtgggaccaacccccaaccctgcctcccccgtgggggctacagaaggaaaaagagaagatgccagcttcctaatcccagcccccagccctgggccagcgaagacagggcacagcctgggcagatgggctggggcttagcaccacccaccaaatgttcttttccagaaggtgaaagagaaagggcctgaacaaccttacaccaaatattcagtagcttcatccaaaggatgtacagaatttttagcattgtgctcaacagaatgtgtccctaccatgtgtccccttctcccctggcccccagctctccccacctgggcagggggtcttgctttaacctcctccctccccccagcaggggagagttcaagggaaggcctgcggacaacttttcatcccctgttcctccctcttttcccctttgaagggtgggctaggccattttgccaagttctagctctcacaagtccctcctcaaccctgtcaccctcctctgctctggaactgactccctccccagcctatgggaaggtggaaatttcaggcaagaggggatgaagacattcagttgagggcattcagttgtctttttccatcctgtctgtttccctgaaaaaaaaaaaaattcatattccagtgcctatccgtgggatccttcacgttctttgacattaaccagaaaccaaaaagagaactcacctcgcttttcccaccctgtgcccctctggtactggcgaatgcctctccctccccccacatgcacgcacgcacacaccccagtggtggggttcctcgagatggcatccccatcagggtccatgtggtggggacagtgccacagcctgtggtccccatctgagagggcgcggtggtggccaccactcccacaagacctccacaactcttggctggaccctgtgtttgaccagccccggacacgtctccactgacgacggacagaggagagacaccactgggagccaccctgccctcctgctattgtggaggccaacaaagttttgaaccgaaaaccaaaaaaacagaaacaaacaaacaataaatttaaactagaaaaaaaatttatatatatatataaacatatatatatatatatatataaaagggaaagaagatgaggactcttcaagaataagatggaaccgcgaggcggagccaagcccctgcaccggtggtccaggcccttgttccccaaggcggatggaaggacggatgcttctttctcttcacaaatacctcatggacgttgtctttgggaaagccggagggggcggctggggcagggcctgtccctcggccagggcagatggaagcgggtgggcggggctgagagagggtatcagggacaggggtgaagagccccaaactcccctcccaaatcaactgaaaaagctttaaaaaaagacaggaaaaaaaggagtaagaaagcaaaaagaacagatgaaggaaaacttaacaacttttgggtggtttgattcctcctttgatttctttttcggttctcttttgtctgacctctctcctcccctccttcctctctcctcccctccttcctctctcctctcctccttcctgtctcctctctctccctttgctctcctctcttctctctcaatcttgttctttctgtgtctctcctcaaaccaaagtgttgcagtgaaggacacgagccattgaaatcagggtggggcctgacagccgtagtgtggcccctgccccttgttgggcaggagcagagagagaggagagccctgagaccgcagggctttggcctgggcagcttccactttctgccggacactctgaggagaggcagatggagctccaggcctcagcgttctcttttttccttgtctcccttctcccacccgggaaatgaaactgttgggctgggcgacggaggcagcagagactcggccattgcaggggcctctgggtgccttgtccgggcagtggtgaagtagccgcccctcccaccccggcacgatggggcctggcacctcgtctacccaacctcaccggaatgtaagcatctccgctgaacgactccctgcccttaccctacctctgagtttgtccatgtttatttcctgaagagagaagggactggcaagagggcttgggccccagcccaagggtggagagggggccaagggctcctgaccaaataggaaggacatttgagcagagcaaaatgaaaggaattacaaccaaaaaccccctccgagaagacaggcagcatggaaggcatggtggagatgactcaaacaaaaactatgattctagaccaaaaaggaaaaaaaaaaaaaaaaaaggaaagaaaatccaggactcaccaccacccacttcatcctgcttcctccccatcaagtcccaccacctgggacctctccccaccccagtatgtgggagtggggtaaagaggagaggaggagcagggggcagggatggggcagatgccctgatgttggtggagggacccctgtgcagccgggggtgctggggaccctccccatccaaccctcacacctaggaaaagaaaaacaagaaaaaaaaattcctgggagggggaaaaataaccaaatcccaagctttaactacagctgtgaaaccaaatattgggaagggggtaggagggagggaggggcaggtgagccccaggtctccccctgggcccccctcccctgaggactcgagataaggcaccaaatacctcatagaactttaatgttaaaaaaaggaaaccaaatatcgttggctgggggccagccagggcaaggggctggggggctggagggagccagggttgggaaggtgatgggggaattcatgccccccacccccatctgccccttacactctggtcccccgtctcgactccgggaaacaaaactatctcatcgtttttattttgtggtctgtacagagcctgtgtccgtgtgtctgtgtatgagcgagagagttggagggctggggagctttatgtgggggatggggagggcaaccccaggctaggctatgggctaggttagatgtccgaggttgggggccaagggcctgggctagaaagagaggagagatgagtgggttggagcagtggggagccctctgaatttctcttctccccaaccctgacctcctacttaagggagggacagagactgggtctaccctaatggtgggccttttcattgtgccaaaaaaaaaaaaaaaaaaattgatgccagtaactaaaccacctctctctgttctcttctggggggtggggtgggtgtgtgtgtgggggtgggtagggatggggaacccaagccccagtaggagttggggctgagatcaggaggaggggaaggatatgagttttccatccatctccctggagaaggccatgacgggctctccaagccctggggagatctggcgagggactagccaagtcagggtgacctcttgacctgactagtttttctaacccacatgaacaccagggtgcctctctcttcctctagcccagggtagggggacctgagtgagagagagagtgagacagacagcaagattgagacacgcgggcccccactggtctctgagtgggaaaggcaagtgcgagagataaaggcctccaagagaaaaaagaaacaaaccaaagatttaaccatttaaaaaaaaaaaaaaacccacagacaactccgctacctttttatatgttggaaaaaaagtgaaaaaaaattaaaaataaaaataaaaaaaaatacacaaaaactccaagccgcaagtccttcatgcggtttaaactttgacctcagcagtctccaaagcaagacgacgatgacaaaggcggaaacaaagaaaaaataatgtatatttttaagtatttgtccttgaattgttagctccttgttaaacaaacaaaaggagagaaaaatccagagagaagtgttgctgggatggagacaactatttactatgtctgtgacccctcccttctgcctccctccccttcctctctttcctgtcctctatccttgctgcccctcccccaatatgtcccccaaacccaggggctcagtatttatttatttatataattgcagggtgactgggggcctctctcggcaactcgtagagagcctttggataatggcagggtggggaatgggcgaggagtctttgggaagagcaggggcctgaactttcaactcctttctggcctcttgtcccactgcttccaccatcaccttccaaatccagggctgcactagggcaaggtgaccaccctacttggtaaagacctgattggcgcagcccattctggtgtgggtgtctttcaccacccagaatgaccaggttggaatgggggtgggtgaagttggagggggtggcaagtacaaggcaagggtgcccaggaaccggcatccagaaatcagccctggagtagacctgcctttcctccatccttaccaagttagcctccctttcagttccgtctgacccctgtgttggtagccccttccttcccttcctgtaccccctccgtctcttctcgtggtagcgggttagtgtttcagtgttcttaactccaatctgcttgttcattgtacaatgtgcttcttttaaggccccatttttgtaacttgagtgtgtcattcatctgaacaacaaacatcaaaaaataaaaaattaaaaactgtacagagagaaatga

SEQ ID NO: 168421 - DNA, 3218 bp, Homo sapiens
  Payload ID: 13151
  Gene Symbol: POU2F2
  Gene Name: POU class 2 homeobox 2
  Uniprot ID: P09086
  ENST ID: ENST00000526816
  CDS Start-End: 17-1456
tggcggggcgggcagcatggttcactccagcatgggggctccagaaataagaatgtctaagcccctggaggccgagaagcaaggtctggactccccatcagagcacacagacaccgaaagaaatggaccagacactaatcatcagaacccccaaaataagacctccccattctccgtgtccccaactggccccagtacaaagatcaaggctgaagaccccagtggcgattcagccccagcagcacccctgccccctcagccggcccagcctcatctgccccaggcccaactcatgttgacgggcagccagctagctggggacatacagcagctcctccagctccagcagctggtgcttgtgccaggccaccacctccagccacctgctcagttcctgctaccgcaggcccagcagagccagccaggcctgctaccgacaccaaatctattccagctacctcagcaaacccagggagctcttctgacctcccagccccgggccgggcttcccacacaggccgtgacccgccctacgctgcccgacccgcacctctcgcacccgcagccccccaaatgcttggagccaccatcccaccccgaggagcccagtgatctggaggagctggagcaattcgcccgcaccttcaagcaacgccgcatcaagctgggcttcacgcagggtgatgtgggcctggccatgggcaagctctacggcaacgacttcagccagacgaccatttcccgcttcgaggccctcaacctgagcttcaagaacatgtgcaaactcaagcccctcctggagaagtggctcaacgatgcagagactatgtctgtggactcaagcctgcccagccccaaccagctgagcagccccagcctgggtttcgacggcctgcccggccggagacgcaagaagaggaccagcatcgagacaaacgtccgcttcgccttagagaagagttttctagcgaaccagaagcctacctcagaggagatcctgctgatcgccgagcagctgcacatggagaaggaagtgatccgcgtctggttctgcaaccggcgccagaaggagaaacgcatcaacccctgcagtgcggcccccatgctgcccagcccagggaagccggccagctacagcccccatatggtcacaccccaagggggcgcggggaccttaccgttgtcccaagcttccagcagtctgagcacaacagttactaccttatcctcagctgtggggacgctccaccccagccggacagctggagggggtgggggcgggggcggggctgcgccccccctcaattccatcccctctgtcactcccccacccccggccaccaccaacagcacaaaccccagccctcaaggcagccactcggctatcggcttgtcaggcctgaaccccagcacgggccctggcctctggtggaaccctgccccttaccagccttgatggcagcgggaatctggtgctgggggcagccggtgcagccccggggagccctggcctggtgacctcgccgctcttcttgaatcatgctgggctgcccctgctcagcaccccgcctggtgtgggcctggtctcagcagcggctgcggctgtggcagcctccatctccagcaagtctcctggcctctcctcctcatcctcttcatcctcatcctcctcctcctccacttgcagcgagacggcagcacagacccctggaggtccaggggggcccgaggcagggtccaaacctgagtgagggccagccatgcctcccctcccattcctctggtccctgccttggtcccttgcctgggaagagggcgaggaggccagtggtggggacgcagagggtcctcagagcaggagtgacaagggaggaaagaccaaaaaaacaaccaaccaaaaaaaaaaaaaaaaaggaaagaaactaaccaacaaaagagaaaaccaaaaataatcacaacagaaaccagctgccccaaaggaaccagaggtgaaaaacaaacaaaaaaaaaccaaaaacaaaccaaaaaaaaaaaaaacccacaaaatcaaacaaaccaaaaaaccagtcgcgagccagacctcagcgtgctcaccctcactgctacgacgccaaataaaaaccccagccaggggcggagaagcctccagcaggtcagacctcatgccaccgagccctggctgtgggaccaacccccaaccctgcctcccccgtgggggctacagaaggaaaaagagaagatgccagcttcctaatcccagcccccagccctgggccagcgaagacagggcacagcctgggcagatgggctggggcttagcaccacccaccaaatgttcttttccagaaggtgaaagagaaagggcctgaacaaccttacaccaaatattcagtagcttcatccaaaggatgtacagaatttttagcattgtgctcaacagaatgtgtccctaccatgtgtccccttctcccctggcccccagctctccccacctgggcagggggtcttgctttaacctcctccctccccccagcaggggagagttcaagggaaggcctgcggacaacttttcatcccctgttcctccctcttttcccctttgaagggtgggctaggccattttgccaagttctagctctcacaagtccctcctcaaccctgtcaccctcctctgctctggaactgactccctccccagcctatgggaaggtggaaatttcaggcaagaggggatgaagacattcagttgagggcattcagttgtctttttccatcctgtctgtttccctgaaaaaaaaaaaaattcatattccagtgcctatccgtgggatccttcacgttctttgacattaaccagaaaccaaaaagagaactcacctcgcttttcccaccctgtgcccctctggtactggcgaatgcctctccctccccccacatgcacgcacgcacacaccccagtggtggggttcctcgagatggcatccccatcagggtccatgtggtggggacagtgccacagcctgtggtccccatctgagagggcgcggtggtggccaccactcccacaagacctccacaactcttggctggaccctgtgtttgaccagccccggacacgtctccactgacgacggacagaggagagacaccactgggagccaccctgccctcctgctattgtggaggccaacaaagttttgaaccgaaaaccaaaaaaa

SEQ ID NO: 168422 - DNA, 2003 bp, Homo sapiens
  Payload ID: 13151
  Gene Symbol: POU2F2
  Gene Name: POU class 2 homeobox 2
  ENST ID: ENST00000534559
  CDS Start-End: 46-399
gggagatgacacagttgttcccccagccctggcggggcgggcagcatggttcactccagcatgggggctccagaaataagaatgtctaagcccctggaggccgagaagcaaggtctggactccccatcagagcacacagacaccgaaagaaatggaccagacactaatcatcagaacccccaaaataagacctccccattctccgtgtccccaactggccccagtacaaagatcaaggctgaagaccccagtggcgattcagccccagcagcacccctgccccctcagccggcccagcctcatctgccccaggcccaactcatgttgacgggcagccagctagctgggctccatgaagtaagacttattgtggtgtcacctgaggaaactgaggcttaaagaggttaaggaggctggggcccagagggaaagtggcttcccccaggcacacagcaagaagcaggacatacagcagctcctccagctccagcagctggtgcttgtgccaggccaccacctccagccacctgctcagttcctgctaccgcaggcccagcagagccagccaggcctgctaccgacaccaaatctattccagctacctcagcaaacccagggagctcttctgacctcccagccccgggccgggcttcccacacaggccgtgacccgccctacgctgcccgacccgcacctctcgcacccgcagccccccaaatgcttggagccaccatcccaccccgaggagcccagtgatctggaggagctggagcaattcgcccgcaccttcaagcaacgccgcatcaagctgggcttcacgcagggtgatgtgggcctggccatgggcaagctctacggcaacgacttcagccagacgaccatttcccgcttcgaggccctcaacctgagcttcaagaacatgtgcaaactcaagcccctcctggagaagtggctcaacgatgcagagactatgtctgtggactcaagcctgcccagccccaaccagctgagcagccccagcctgggtttcgacggcctgcccggccggagacgcaagaagaggaccagcatcgagacaaacgtccgcttcgccttagagaagagttttctagcgaaccagaagcctacctcagaggagatcctgctgatcgccgagcagctgcacatggagaaggaagtgatccgcgtctggttctgcaaccggcgccagaaggagaaacgcatcaacccctgcagtgcggcccccatgctgcccagcccagggaagccggccagctacagcccccatatggtcacaccccaagggggcgcggggaccttaccgttgtcccaagcttccagcagtctgagcacaacagttactaccttatcctcagctgtggggacgctccaccccagccggacagctggagggggtgggggcgggggcggggctgcgccccccctcaattccatcccctctgtcactcccccacccccggccaccaccaacagcacaaaccccagccctcaaggcagccactcggctatcggcttgtcaggcctgaaccccagcacgggccctggcctctggtggaaccctgccccttaccagccttgatggcagcgggaatctggtgctgggggcagccggtgcagccccggggagccctggcctggtgacctcgccgctcttcttgaatcatgctgggctgcccctgctcagcaccccgcctggtgtgggcctggtctcagcagcggctgcggctgtggcagcctccatctccagcaagtctcctggcctctcctcctcatcctcttcatcctcatcctcctcctcctccacttgcagcgagacggcagcacagacccctggaggtccaggggggcccgaggcagggtccaaacctgagtgagggccagccatgcctcccctcccattcctctggtccctgccttggtcccttgcctgggaagagggcgaggaggccagtggtggggacgcagagggtcctcagagcagg

SEQ ID NO: 168423 - DNA, 1716 bp, Homo sapiens
  Payload ID: 13151
  Gene Symbol: POU2F2
  Gene Name: POU class 2 homeobox 2
  Uniprot ID: P09086
  ENST ID: ENST00000529952
  CDS Start-End: 63-1466
ggcccccagagagggtggggagatgacacagttgttcccccagccctggcggggcgggcagcatggttcactccagcatgggggctccagaaataagaatgtctaagcccctggaggccgagaagcaaggtctggactccccatcagagcacacagacaccgaaagaaatggaccagacactaatcatcagaacccccaaaataagacctccccattctccgtgtccccaactggccccagtacaaagatcaaggctgaagaccccagtggcgattcagccccagcagcacccctgccccctcagccggcccagcctcatctgccccaggcccaactcatgttgacgggcagccagctagctggggacatacagcagctcctccagctccagcagctggtgcttgtgccaggccaccacctccagccacctgctcagttcctgctaccgcaggcccagcagagccagccaggcctgctaccgacaccaaatctattccagctacctcagcaaacccagggagctcttctgacctcccagccccgggccgggcttcccacacaggccgtgacccgccctacgctgcccgacccgcacctctcgcacccgcagccccccaaatgcttggagccaccatcccaccccgaggagcccagtgatctggaggagctggagcaattcgcccgcaccttcaagcaacgccgcatcaagctgggcttcacgcagggtgatgtgggcctggccatgggcaagctctacggcaacgacttcagccagacgaccatttcccgcttcgaggccctcaacctgagcttcaagaacatgtgcaaactcaagcccctcctggagaagtggctcaacgatgcagagactatgtctgtggactcaagcctgcccagccccaaccagctgagcagccccagcctgggtttcgacggcctgcccggccggagacgcaagaagaggaccagcatcgagacaaacgtccgcttcgccttagagaagagttttctagcgaaccagaagcctacctcagaggagatcctgctgatcgccgagcagctgcacatggagaaggaagtgatccgcgtctggttctgcaaccggcgccagaaggagaaacgcatcaacccctgcagtgcggcccccatgctgcccagcccagggaagccggccagctacagcccccatatggtcacaccccaagggggcgcggggaccttaccgttgtcccaagcttccagcagtctgagcacaacagttactaccttatcctcagctgtggggacgctccaccccagccggacagctggagggggtgggggcgggggcggggctgcgccccccctcaattccatcccctctgtcactcccccacccccggccaccaccaacagcacaaaccccagccctcaaggcagccactcggctatcggcttgtcaggcctgaaccccagcacggggtaagtgggtgcacgtgggaagctgtggggagaagcagggtcgctgctgcttctagggtggggagcggcaccccagttatgttggcaggtccctgcccctgctaatgcctctgctttgcctcttgcagaagcacaatggtggggttgagctccgggctgagtccagccctcatgagcaacaaccctttggccactatccaaggtgcgtgctgcctcatgtcacacccatcgtcaccagccctatcctctggggc

SEQ ID NO: 168424 - DNA, 2657 bp, Homo sapiens
  Payload ID: 13151
  Gene Symbol: POU2F2
  Gene Name: POU class 2 homeobox 2
  Uniprot ID: P09086
  ENST ID: ENST00000529067
  CDS Start-End: 55-1257
gagagggtggggagatgacacagttgttcccccagccctggcggggcgggcagcatggttcactccagcatgggggctccagaaataagaatgtctaagcccctggaggccgagaagcaaggtctggactccccatcagagcacacagacaccgaaagaaatggaccagacactaatcatcagaacccccaaaataagacctccccattctccgtgtccccaactggccccagtacaaagatcaaggctgaagaccccagtggcgattcagccccagcagcacccctgccccctcagccggcccagcctcatctgccccaggcccaactcatgttgacgggcagccagctagctggggacatacagcagctcctccagctccagcagctggtgcttgtgccaggccaccacctccagccacctgctcagttcctgctaccgcaggcccagcagagccagccaggcctgctaccgacaccaaatctattccagctacctcagcaaacccagggagctcttctgacctcccagccccgggccgggcttcccacacagccccccaaatgcttggagccaccatcccaccccgaggagcccagtgatctggaggagctggagcaattcgcccgcaccttcaagcaacgccgcatcaagctgggcttcacgcagggtgatgtgggcctggccatgggcaagctctacggcaacgacttcagccagacgaccatttcccgcttcgaggccctcaacctgagcttcaagaacatgtgcaaactcaagcccctcctggagaagtggctcaacgatgcagagactatgtctgtggactcaagcctgcccagccccaaccagctgagcagccccagcctgggtttcgacggcctgcccggccggagacgcaagaagaggaccagcatcgagacaaacgtccgcttcgccttagagaagagttttctagcgaaccagaagcctacctcagaggagatcctgctgatcgccgagcagctgcacatggagaaggaagtgatccgcgtctggttctgcaaccggcgccagaaggagaaacgcatcaacccctgcagtgcggcccccatgctgcccagcccagggaagccggccagctacagcccccatatggtcacaccccaagggggcgcggggaccttaccgttgtcccaagcttccagcagtctgagcacaacagcacaaaccccagccctcaaggcagccactcggctatcggcttgtcaggcctgaaccccagcacgggccctggcctctggtggaaccctgccccttaccagccttgatggcagcgggaatctggtgctgggggcagccggtgcagccccggggagccctggcctggtgacctcgccgctcttcttgaatcatgctgggctgcccctgctcagcaccccgcctggtgtgggcctggtctcagcagcggctgcggctgtggcagcctccatctccagcaagtctcctggcctctcctcctcatcctcttcatcctcatcctcctcctcctccacttgcagcgagacggcagcacagacccctggaggtccaggggggcccgaggcagggtccaaacctgagtgagggccagccatgcctcccctcccattcctctggtccctgccttggtcccttgcctgggaagagggcgaggaggccagtggtggggacgcagagggtcctcagagcaggagtgacaagggaggaaagaccaaaaaaacaaccaaccaaaaaaaaaaaaaaaaaggaaagaaactaaccaacaaaagagaaaaccaaaaataatcacaacagaaaccagctgccccaaaggaaccagaggtgaaaaacaaacaaaaaaaaaccaaaaacaaaccaaaaaaaaaaaaaacccacaaaatcaaacaaaccaaaaaaccagtcgcgagccagacctcagcgtgctcaccctcactgctacgacgccaaataaaaaccccagccaggggcggagaagcctccagcaggtcagacctcatgccaccgagccctggctgtgggaccaacccccaaccctgcctcccccgtgggggctacagaaggaaaaagagaagatgccagcttcctaatcccagcccccagccctgggccagcgaagacagggcacagcctgggcagatgggctggggcttagcaccacccaccaaatgttcttttccagaaggtgaaagagaaagggcctgaacaaccttacaccaaatattcagtagcttcatccaaaggatgtacagaatttttagcattgtgctcaacagaatgtgtccctaccatgtgtccccttctcccctggcccccagctctccccacctgggcagggggtcttgctttaacctcctccctccccccagcaggggagagttcaagggaaggcctgcggacaacttttcatcccctgttcctccctcttttcccctttgaagggtgggctaggccattttgccaagttctagctctcacaagtccctcctcaaccctgtcaccctcctctgctctggaactgactccctccccagcctatgggaaggtggaaatttcaggcaagaggggatgaagacattcagttgagggcattcagttgtctttttccatcctgtctgtttccctgaaaaaaaaaaaaa

SEQ ID NO: 168425 - DNA, 2269 bp, Homo sapiens
  Payload ID: 13151
  Gene Symbol: POU2F2
  Gene Name: POU class 2 homeobox 2
  ENST ID: ENST00000560804
  CDS Start-End: 1-1857
agcatgggggctccagaaataagaatgtctaagcccctggaggccgagaagcaaggtctggactccccatcagagcacacagacaccgaaagaaatggaccagacactaatcatcagaacccccaaaataagacctccccattctccgtgtccccaactggccccagtacaaaggtgggcattctctctggcctccacttaacattctggggtcccggaccctgcctctctcccccccagatcaaggctgaagaccccagtggcgattcagccccagcagcacccctgccccctcagccggcccagcctcatctgccccaggcccaactcatgttgacgggcagccagctagctggggacatacagcagctcctccagctccagcagctggtgcttgtgccaggccaccacctccagccacctgctcagttcctgctaccgcaggcccagcagagccagccaggcctgctaccgacaccaaatctattccagctacctcagcaaacccagggagctcttctgacctcccagccccgggccgggcttcccacacagccccccaaatgcttggagccaccatcccaccccgaggagcccagtgatctggaggagctggagcaattcgcccgcaccttcaagcaacgccgcatcaagctgggcttcacgcagggtgatgtgggcctggccatgggcaagctctacggcaacgacttcagccagacgaccatttcccgcttcgaggccctcaacctgagcttcaagaacatgtgcaaactcaagcccctcctggagaagtggctcaacgatgcagagactatgtctgtggactcaagcctgcccagccccaaccagctgagcagccccagcctgggtttcgacggcctgcccggccggagacgcaagaagaggaccagcatcgagacaaacgtccgcttcgccttagagaagagttttctagcgaaccagaagcctacctcagaggagatcctgctgatcgccgagcagctgcacatggagaaggaagtgatccgcgtctggttctgcaaccggcgccagaaggagaaacgcatcaacccctgcagtgcggcccccatgctgcccagcccagggaagccggccagctacagcccccatatggtcacaccccaagggggcgcggggaccttaccgttgtcccaagcttccagcagtctgagcacaacagttactaccttatcctcagctgtggggacgctccaccccagccggacagctggagggggtgggggcgggggcggggctgcgccccccctcaattccatcccctctgtcactcccccacccccggccaccaccaacagcacaaaccccagccctcaaggcagccactcggctatcggcttgtcaggcctgaaccccagcacgggaagcacaatggtggggttgagctccgggctgagtccagccctcatgagcaacaaccctttggccactatccaaggtgcgtgctgcctcatgtcacacccatcgtcaccagccctatcctctggggcctcgagccctgccattgctgctccagccatgccatcctgcccctgctcactgcattgcttgcctcttcatacccatctcacctttggggaaggtgtgaggggtgctgatgggggtcagtgggaccgatggggagatggggggcactctgggcaggatgctggaaggcaaaggtctcccctggcccggcatgcccttagcccagcctctctctctccccgccagccctggcctctggtggaaccctgccccttaccagccttgatggcagcgggaatctggtgctgggggcagccggtgcagccccggggagccctggcctggtgacctcgccgctcttcttgaatcatgctgggctgcccctgctcagcaccccgcctggtgtgggcctggtctcagcagcggctgcggctgtggcagcctccatctccagcaagtctcctggcctctcctcctcatcctcttcatcctcatcctcctcctcctccacttgcagcgagacggcagcacagacccctggaggtccaggggggcccgaggcagggtccaaacctgagtgagggccagccatgcctcccctcccattcctctggtccctgccttggtcccttgcctgggaagagggcgaggaggccagtggtggggacgcagagggtcctcagagcaggagtgacaagggaggaaagaccaaaaaaacaaccaaccaaaaaaaaaaaaaaaaaggaaagaaactaaccaa

SEQ ID NO: 168426 - DNA, 1788 bp, Homo sapiens
  Payload ID: 13151
  Gene Symbol: POU2F2
  Gene Name: POU class 2 homeobox 2
  ENST ID: ENST00000560398
  CDS Start-End: 9-1466
cgggcagcatggttcactccagcatgggggctccagaaataagaatgtctaagcccctggaggccgagaagcaaggtctggactccccatcagagcacacagacaccgaaagaaatggaccagacactaatcatcagaacccccaaaataagacctccccattctccgtgtccccaactggccccagtacaaaggtgggcattctctctggcctccacttaacattctggggtcccggaccctgcctctctcccccccagatcaaggctgaagaccccagtggcgattcagccccagcagcacccctgccccctcagccggcccagcctcatctgccccaggcccaactcatgttgacgggcagccagctagctggggacatacagcagctcctccagctccagcagctggtgcttgtgccaggccaccacctccagccacctgctcagttcctgctaccgcaggcccagcagagccagccaggcctgctaccgacaccaaatctattccagctacctcagcaaacccagggagctcttctgacctcccagccccgggccgggcttcccacacagccccccaaatgcttggagccaccatcccaccccgaggagcccagtgatctggaggagctggagcaattcgcccgcaccttcaagcaacgccgcatcaagctgggcttcacgcagggtgatgtgggcctggccatgggcaagctctacggcaacgacttcagccagacgaccatttcccgcttcgaggccctcaacctgagcttcaagaacatgtgcaaactcaagcccctcctggagaagtggctcaacgatgcagagactatgtctgtggactcaagcctgcccagccccaaccagctgagcagccccagcctgggtttcgacggcctgcccggccggagacgcaagaagaggaccagcatcgagacaaacgtccgcttcgccttagagaagagttttctagcgaaccagaagcctacctcagaggagatcctgctgatcgccgagcagctgcacatggagaaggaagtgatccgcgtctggttctgcaaccggcgccagaaggagaaacgcatcaacccctgcagtgcggcccccatgctgcccagcccagggaagccggccagctacagcccccatatggtcacaccccaagggggcgcggggaccttaccgttgtcccaagcttccagcagtctgagcacaacagttactaccttatcctcagctgtggggacgctccaccccagccggacagctggagggggtgggggcgggggcggggctgcgccccccctcaattccatcccctctgtcactcccccacccccggccaccaccaacagcacaaaccccagccctcaaggcagccactcggctatcggcttgtcaggcctgaaccccagcacgggccctggcctctggtggaaccctgccccttaccagccttgatggcagcgggaatctggtgctgggggcagccggtgcagccccggggagccctggcctggtgacctcgccgctcttcttgaatcatgctgggctgcccctgctcagcaccccgcctggtgtgggcctggtctcagcagcggctgcggctgtggcagcctccatctccagcaagtctcctggcctctcctcctcatcctcttcatcctcatcctcctcctcctccacttgcagcgagacggcagcacagacccctggaggtccaggggggcccgaggcagggtccaaacctgagtgagggccagccatgcctcccctcccattc

SEQ ID NO: 168427 - DNA, 693 bp, Homo sapiens
  Payload ID: 13151
  Gene Symbol: POU2F2
  Gene Name: POU class 2 homeobox 2
  ENST ID: ENST00000533548
  CDS Start-End: 1-596
aaggaagtgatccgcgtctggttctgcaaccggcgccagaaggagaaacgcatcaacccctgcagtgcggcccccatgctgcccagcccagggaagccggccagctacagcccccatatggtcacaccccaagggggcgcggggaccttaccgttgtcccaagcttccagcagtctgagcacaacagaagcacaatggtggggttgagctccgggctgagtccagccctcatgagcaacaaccctttggccactatccaagccctggcctctggtggaaccctgccccttaccagccttgatggcagcgggaatctggtgctgggggcagccggtgcagccccggggagccctggcctggtgacctcgccgctcttcttgaatcatgctgggctgcccctgctcagcaccccgcctggtgtgggcctggtctcagcagcggctgcggctgtggcagcctccatctccagcaagtctcctggcctctcctcctcatcctcttcatcctcatcctcctcctcctccacttgcagcgagacggcagcacagacccctggaggtccaggggggcccgaggcagggtccaaacctgagtgagggccagccatgcctcccctcccattcctctggtccctgccttggtcccttgcctgggaagagggcgaggaggccagtggtggggacgcagagggtc

SEQ ID NO: 168428 - DNA, 3282 bp, Homo sapiens
  Payload ID: 13151
  Gene Symbol: POU2F2
  Gene Name: POU class 2 homeobox 2
  ENST ID: ENST00000560558
  CDS Start-End: 9-1283
cgggcagcatggttcactccagcatgggggctccagaaataagaatgtctaagcccctggaggccgagaagcaaggtctggactccccatcagagcacacagacaccgaaagaaatggaccagacactaatcatcagaacccccaaaataagacctccccattctccgtgtccccaactggccccagtacaaaggacatacagcagctcctccagctccagcagctggtgcttgtgccaggccaccacctccagccacctgctcagttcctgctaccgcaggcccagcagagccagccaggcctgctaccgacaccaaatctattccagctacctcagcaaacccagggagctcttctgacctcccagccccgggccgggcttcccacacagccccccaaatgcttggagccaccatcccaccccgaggagcccagtgatctggaggagctggagcaattcgcccgcaccttcaagcaacgccgcatcaagctgggcttcacgcagggtgatgtgggcctggccatgggcaagctctacggcaacgacttcagccagacgaccatttcccgcttcgaggccctcaacctgagcttcaagaacatgtgcaaactcaagcccctcctggagaagtggctcaacgatgcagagactatgtctgtggactcaagcctgcccagccccaaccagctgagcagccccagcctgggtttcgacggcctgcccggccggagacgcaagaagaggaccagcatcgagacaaacgtccgcttcgccttagagaagagttttctagcgaaccagaagcctacctcagaggagatcctgctgatcgccgagcagctgcacatggagaaggaagtgatccgcgtctggttctgcaaccggcgccagaaggagaaacgcatcaacccctgcagtgcggcccccatgctgcccagcccagggaagccggccagctacagcccccatatggtcacaccccaagggggcgcggggaccttaccgttgtcccaagcttccagcagtctgagcacaacagttactaccttatcctcagctgtggggacgctccaccccagccggacagctggagggggtgggggcgggggcggggctgcgccccccctcaattccatcccctctgtcactcccccacccccggccaccaccaacagcacaaaccccagccctcaaggcagccactcggctatcggcttgtcaggcctgaaccccagcacgggccctggcctctggtggaaccctgccccttaccagccttgatggcagcgggaatctggtgctgggggcagccggtgcagccccggggagccctggcctggtgacctcgccgctcttcttgaatcatgctgggctgcccctgctcagcaccccgcctggtgtgggcctggtctcagcagcggctgcggctgtggcagcctccatctccagcaagtctcctggcctctcctcctcatcctcttcatcctcatcctcctcctcctccacttgcagcgagacggcagcacagacccctggaggtccaggggggcccgaggcagggtccaaacctgagtgagggccagccatgcctcccctcccattcctctggtccctgccttggtcccttgcctgggaagagggcgaggaggccagtggtggggacgcagagggtcctcagagcaggagtgacaagggaggaaagaccaaaaaaacaaccaaccaaaaaaaaaaaaaaaaaggaaagaaactaaccaacaaaagagaaaaccaaaaataatcacaacagaaaccagctgccccaaaggaaccagaggtgaaaaacaaacaaaaaaaaaccaaaaacaaaccaaaaaaaaaaaaaacccacaaaatcaaacaaaccaaaaaaccagtcgcgagccagacctcagcgtgctcaccctcactgctacgacgccaaataaaaaccccagccaggggcggagaagcctccagcaggtcagacctcatgccaccgagccctggctgtgggaccaacccccaaccctgcctcccccgtgggggctacagaaggaaaaagagaagatgccagcttcctaatcccagcccccagccctgggccagcgaagacagggcacagcctgggcagatgggctggggcttagcaccacccaccaaatgttcttttccagaaggtgaaagagaaagggcctgaacaaccttacaccaaatattcagtagcttcatccaaaggatgtacagaatttttagcattgtgctcaacagaatgtgtccctaccatgtgtccccttctcccctggcccccagctctccccacctgggcagggggtcttgctttaacctcctccctccccccagcaggggagagttcaagggaaggcctgcggacaacttttcatcccctgttcctccctcttttcccctttgaagggtgggctaggccattttgccaagttctagctctcacaagtccctcctcaaccctgtcaccctcctctgctctggaactgactccctccccagcctatgggaaggtggaaatttcaggcaagaggggatgaagacattcagttgagggcattcagttgtctttttccatcctgtctgtttccctgaaaaaaaaaaaaattcatattccagtgcctatccgtgggatccttcacgttctttgacattaaccagaaaccaaaaagagaactcacctcgcttttcccaccctgtgcccctctggtactggcgaatgcctctccctccccccacatgcacgcacgcacacaccccagtggtggggttcctcgagatggcatccccatcagggtccatgtggtggggacagtgccacagcctgtggtccccatctgagagggcgcggtggtggccaccactcccacaagacctccacaactcttggctggaccctgtgtttgaccagccccggacacgtctccactgacgacggacagaggagagacaccactgggagccaccctgccctcctgctattgtggaggccaacaaagttttgaaccgaaaaccaaaaaaacagaaacaaacaaacaataaatttaaactagaaaaaaaatttatatatatatataaacatatatatatatatatatataaaagggaaagaagatgaggactcttcaagaataagatggaaccgcgaggcggagccaagcccctgcaccggtggtccaggcccttgttccccaaggcggatggaaggacggatgcttctttctcttcacaaatacctcatggacgttgtctttgggaa

SEQ ID NO: 168429 - DNA, 673 bp, Homo sapiens
  Payload ID: 13151
  Gene Symbol: POU2F2
  Gene Name: POU class 2 homeobox 2
  ENST ID: ENST00000598842
  CDS Start-End: 1-373
gagacgcaagaagaggaccagcatcgagacaaacgtccgcttcgccttagagaagagttttctagcgaaccagaagcctacctcagaggagatcctgctgatcgccgagcagctgcacatggagaaggaagtgatccgcgtctggttctgcaaccggcgccagaaggagaaacgcatcaacccctgcagtgcggcccccatgctgcccagcccagggaagccggccagctacagcccccatatggtcacaccccaagggggcgcggggaccttaccgttgtcccaagcttccagcagtctgagcacaacaggtcagggagggcagaaaatggtgaggggggactgggaggatgtggcacaggctggagcctgaggttcccaagtggctctgggtgtccatgggcctcaagactgggcctggggagtgtgggtgggggaatgggagagacagtgggaagagggtaggactcacccctcctctgcaggagcaactcagctttaatctgcttcacgatttcatatgagaaaagcatgggcctggtaaaaggtgaggcacttgagttttgtgcctggcctctgtcatttttaagctgtgtgaattcaagcacttattttatccttctaagcctcagtttttattaaattattatgaatgtgtaaaacataaaaagat

SEQ ID NO: 168430 - DNA, 785 bp, Homo sapiens
  Payload ID: 13151
  Gene Symbol: POU2F2
  Gene Name: POU class 2 homeobox 2
  ENST ID: ENST00000528894
  CDS Start-End: 1-785
ggctccagaaataagaatgtctaagcccctggaggccgagaagcaaggtctggactccccatcagagcacacagacaccgaaagaaatggaccagacactaatcatcagaacccccaaaataagacctccccattctccgtgtccccaactggccccagtacaaagatcaaggctgaagaccccagtggcgattcagccccagcagcacccctgccccctcagccggcccagcctcatctgccccaggcccaactcatgttgacgggcagccagctagctggggacatacagcagctcctccagctccagcagctggtgcttgtgccaggccaccacctccagccacctgctcagttcctgctaccgcaggcccagcagagccagccaggcctgctaccgacaccaaatctattccagctacctcagcaaacccagggagctcttctgacctcccagccccgggccgggcttcccacacaggccgtgacccgccctacgctgcccgacccgcacctctcgcacccgcagccccccaaatgcttggagccaccatcccaccccgaggagcccagtgatctggaggagctggagcaattcgcccgcaccttcaagcaacgccgcatcaagctgggcttcacgcagggtgatgtgggcctggccatgggcaagctctacggcaacgacttcagccagacgaccatttcccgcttcgaggccctcaacctgagcttcaagaacatgtgcaaactcaagcccctcctggagaagtggctcaacgatgcag

SEQ ID NO: 168431 - DNA, 660 bp, Homo sapiens
  Payload ID: 13151
  Gene Symbol: POU2F2
  Gene Name: POU class 2 homeobox 2
  ENST ID: ENST00000526831
  CDS Start-End: 1-660
ccgccgccgcctccgcctcctcctctacttcctcctcctcctcctcctctgcctcctcctcgacctcacagcccccagcctcctctggggggggtgacctgccaccaccacagcctgccagccagccccctgggaccccacagctcaccttgtcccaacccatccagctcacagcacaggacatacagcagctcctccagctccagcagctggtgcttgtgccaggccaccacctccagccacctgctcagttcctgctaccgcaggcccagcagagccagccaggcctgctaccgacaccaaatctattccagctacctcagcaaacccagggagctcttctgacctcccagccccgggccgggcttcccacacaggccgtgacccgccctacgctgcccgacccgcacctctcgcacccgcagccccccaaatgcttggagccaccatcccaccccgaggagcccagtgatctggaggagctggagcaattcgcccgcaccttcaagcaacgccgcatcaagctgggcttcacgcagggtgatgtgggcctggccatgggcaagctctacggcaacgacttcagccagacgaccatttcccgcttcgaggccctcaacctgagcttcaagaacatgtgcaaactcaagcccctcctgg

SEQ ID NO: 168432 - DNA, 195 bp, Homo sapiens
  Payload ID: 13151
  Gene Symbol: POU2F2
  Gene Name: POU class 2 homeobox 2
  ENST ID: ENST00000558596
  CDS Start-End: 1-195
ccagaaataagaatgtctaagcccctggaggccgagaagcaaggtctggactccccatcagagcacacagacaccgaaagaaatggaccagacactaatcatcagaacccccaaaataagacctccccattctccgtgtccccaactggccccagtacaaaggtaagcacctgtcagaacagccagggaagtggg

SEQ ID NO: 168433 - DNA, 371 bp, Homo sapiens
  Payload ID: 13151
  Gene Symbol: POU2F2
  Gene Name: POU class 2 homeobox 2
  ENST ID: ENST00000625670
  CDS Start-End: 33-371
ctggcggggcgggcagcatggttcactccagcatgggggctccagaaataagaatgtctaagcccctggaggccgagaagcaaggtctggactccccatcagagcacacagacaccgaaagaaatggaccagacactaatcatcagaacccccaaaataagacctccccattctccgtgtccccaactggccccagtacaaagatcaaggctgaagaccccagtggcgattcagccccagcagcacccctgccccctcagccggcccagcctcatctgccccaggcccaactcatgttgacgggcagccagctagctgggctccatgaagtaagacttattgtggtgtcacctgaggaaactgaggcttaa

SEQ ID NO: 168434 - DNA, 2903 bp, Homo sapiens
  Payload ID: 13152
  Gene Symbol: POU2F3
  Gene Name: POU class 2 homeobox 3
  Uniprot ID: Q9UKI9
  ENST ID: ENST00000260264
  CDS Start-End: 35-1351
ctcactccagcccagagctcaaaaaaccggtttcatggagtctccaagaactgctaaaggaggaagggatatcaagatgagtggggatgtagccgattccacggatgctcgcagcactctcagccaggtggagccaggaaatgatcgaaatggcctagatttcaacaggcagattaaaaccgaagatctcagtgactccctgcagcagaccctctcccatcggccatgccacctgagtcaaggacctgccatgatgtccggaaaccaaatgtctgggctaaatgccagcccatgtcaggacatggcttccctccatccgctccagcagcttgtgctggttcccggccacttacagtctgtatcccagttcctgctatctcagacccagcctgggcagcaaggtctgcagccaaatctcctcccctttccacagcaacaaagcggtctcctcctcccacagactgggccgggactggcatcccaggcatttgggcaccctgggctgccaggatcctctttagaaccccacctggaagcatcccagcatctcccagtgcccaagcatctacccagctctggaggggccgatgagcccagtgacctcgaggagctggagaagtttgccaagaccttcaagcagaggcgcattaagctgggcttcacacagggagatgtggggctggcgatgggaaagctgtatggcaacgacttcagccagaccaccatctcacgatttgaggccctcaacctgagcttcaagaacatgtgcaagctcaagcccctgctggagaagtggctgaatgatgcagagtcctctccgtcagacccctcagtgagcacgcccagctcctaccccagcctcagtgaagtatttggtaggaagagaaagaaacggaccagcatcgagaccaacatccgcctgactctggagaagaggtttcaagataacccaaaacccagctcggaggagatctccatgattgcagagcagttgtccatggagaaggaggtggtgagggtctggttctgcaaccgacgccaaaaggagaagcgaatcaactgccctgtggccacacccatcaaaccacctgtctacaactcccggctggtatctccctcagggtctctgggccccctctctgtccctcctgtccacagtaccatgcctggaacagtaacgtcatcctgttcccctgggaacaacagcaggccttcatctcctggctcaggactccacgccagcagccccactgcatctcaaaataactccaaagcagcagtgaactccgcctccagttttaactcttcaggatcttggtaccgatggaatcattccacctacctccactgagaccaaaaagtttctcctactccagctggccctgtattccccctggaaggaagggaatcatgccttctatatacagacagattgccttcagaagagtggaagaaaatctccactatcaatgaacccagactcttgtcttcttcaagagcaagggcctccggagatccaaactgtgattgaaccaagtgcagactcctaatgctcttgaaatacacagcccctcctaggagcttaccattttcaccttccttgcctatgcccttgccttctagttccaaatattttagccagcttcactgtggcaatagtctttcagagaaaagacttcttgctgttattctccaactcatccgtgggcttctggggacagccatttggctggggtgccaaacaccagaaggggagataatagttttgactctgaacttggccacaacccctgaactgatcccaaaatctgtgaaaagatttgaatctgatatctccaccaaagccttgatgttttctctgtacagctaagttttctgatggaatcttcatctcaccccattttctttttaacctcgcccccttttctacaatcaaatccattcattattgcgccctccaggtcccctcctttttgcagaaggtgtaaaagagctgcccttggtgggtgccctgggcatgttgcaacgcctgctggtgcccttctgtctgtccacgtctgcctagggctcaggagtgcttgttctttcccttcctccctgtgtttctctttatcctgtcccctctcctttctcctggcagcagaaaaggaagaacacaagagcaaacacacaacaatgatggtggcaaagtacctgtatatagccctttcccattttttgcattatgttcttaactccttaatgtggaattttccagcaaaatgtttaactcaggtgtgatttttgaaaatgtctctgtaatattttatcttctttaaaaaaaagggggggaaataccaaagtgtgaaatactgtgctaccttccagagttcccacatgggctgggatttttttttctttttcttttttttttttttttttgagacagtcttgctccagcccaggctggagtgcagtggcatgatcttggctcactgcatgctctgccacttgggttcaagcgattctcctgcctcagcctctcaagtagcgggattacaggcgcccaccaccaaaaattagcccagctaatttttgtatttttagtagagatggggtttcaccatgttggtcaggctggtcttgaactcctgacctcctgatccacccacctcagcgtcccgaagtgctgggattacaggtgtgagccaccgcgcctggcctgggctgggaatctttgttgacttctttgggaacattatctctagagtctgcttttttgtgggccagtttgtagagatgtaacatgaagccattccagaaatggtaacttaaaaaaaaaaagactacatgtctaggaaactgttgagattcaaaggaatctcactgttcctaaataaatgtgtatagtgattatgaaaagt

SEQ ID NO: 168435 - DNA, 1488 bp, Homo sapiens
  Payload ID: 13152
  Gene Symbol: POU2F3
  Gene Name: POU class 2 homeobox 3
  ENST ID: ENST00000533620
  CDS Start-End: 84-464
agaccctggcttcgcaggggccccggctggggcagaggcgaggggcctgggggggcgctggctttggccccgcctggggcaggatggtgaatctggagtccatgcacacagatatcaagatgagtggggatgtagccgattccacggatgctcgcagcactctcagccaggtggagccaggaaatgatcgaaatggcctagatttcaacaggcagattaaaaccgaagatctcagtgactccctgcagcagaccctctcccatcggccatgccacctgagtcaaggacctgccatgatgtccggaaaccaaatgtctgggctaaatgccagcccatgtcaggacatggcttccctccatccgctccagcagcttgtgctggttcccggccacttacagtctgtatcccagttcctgctatctcagacccagcctgggcagcaagaagactggagagcgacatgaaaatggcccaggcttataaccacctaggtctgcagccaaatctcctcccctttccacagcaacaaagcggtctcctcctcccacagactgggccgggactggcatcccaggcatttgggcaccctgggctgccaggatcctctttagaaccccacctggaagcatcccagcatctcccagtgcccaagcatctacccagctctggaggggccgatgagcccagtgacctcgaggagctggagaagtttgccaagaccttcaagcagaggcgcattaagctgggcttcacacagggagatgtggggctggcgatgggaaagctgtatggcaacgacttcagccagaccaccatctcacgatttgaggccctcaacctgagcttcaagaacatgtgcaagctcaagcccctgctggagaagtggctgaatgatgcagagtcctctccgtcagacccctcagtgagcacgcccagctcctaccccagcctcagtgaagtatttggtaggaagagaaagaaacggaccagcatcgagaccaacatccgcctgactctggagaagaggtttcaagataacccaaaacccagctcggaggagatctccatgattgcagagcagttgtccatggagaaggaggtggtgagggtctggttctgcaaccgacgccaaaaggagaagcgaatcaactgccctgtggccacacccatcaaaccacctgtctacaactcccggctggtatctccctcagggtctctgggccccctctctgtccctcctgtccacagtaccatgcctggaacagtaacgtcatcctgttcccctgggaacaacagcaggccttcatctcctggctcaggactccacgccagcagccccactgcatctcaaaataactccaaagcagcagtgaactccgcctccagttttaactcttcaggatcttggtaccgatggaatcattccacctacctccactgagaccaaaaagtttctcctactccagctggccctgtattccccctgga

SEQ ID NO: 168436 - DNA, 1953 bp, Homo sapiens
  Payload ID: 13152
  Gene Symbol: POU2F3
  Gene Name: POU class 2 homeobox 3
  Uniprot ID: Q9UKI9
  ENST ID: ENST00000543440
  CDS Start-End: 151-1461
gcgacagtggcggcgacggctccggcagcggctcccgcggcggcggcggccgggaactggaggaaggagaccctggcttcgcaggggccccggctggggcagaggcgaggggcctgggggggcgctggctttggccccgcctggggcaggatggtgaatctggagtccatgcacacagatatcaagatgagtggggatgtagccgattccacggatgctcgcagcactctcagccaggtggagccaggaaatgatcgaaatggcctagatttcaacaggcagattaaaaccgaagatctcagtgactccctgcagcagaccctctcccatcggccatgccacctgagtcaaggacctgccatgatgtccggaaaccaaatgtctgggctaaatgccagcccatgtcaggacatggcttccctccatccgctccagcagcttgtgctggttcccggccacttacagtctgtatcccagttcctgctatctcagacccagcctgggcagcaaggtctgcagccaaatctcctcccctttccacagcaacaaagcggtctcctcctcccacagactgggccgggactggcatcccaggcatttgggcaccctgggctgccaggatcctctttagaaccccacctggaagcatcccagcatctcccagtgcccaagcatctacccagctctggaggggccgatgagcccagtgacctcgaggagctggagaagtttgccaagaccttcaagcagaggcgcattaagctgggcttcacacagggagatgtggggctggcgatgggaaagctgtatggcaacgacttcagccagaccaccatctcacgatttgaggccctcaacctgagcttcaagaacatgtgcaagctcaagcccctgctggagaagtggctgaatgatgcagagtcctctccgtcagacccctcagtgagcacgcccagctcctaccccagcctcagtgaagtatttggtaggaagagaaagaaacggaccagcatcgagaccaacatccgcctgactctggagaagaggtttcaagataacccaaaacccagctcggaggagatctccatgattgcagagcagttgtccatggagaaggaggtggtgagggtctggttctgcaaccgacgccaaaaggagaagcgaatcaactgccctgtggccacacccatcaaaccacctgtctacaactcccggctggtatctccctcagggtctctgggccccctctctgtccctcctgtccacagtaccatgcctggaacagtaacgtcatcctgttcccctgggaacaacagcaggccttcatctcctggctcaggactccacgccagcagccccactgcatctcaaaataactccaaagcagcagtgaactccgcctccagttttaactcttcaggatcttggtaccgatggaatcattccacctacctccactgagaccaaaaagtttctcctactccagctggccctgtattccccctggaaggaagggaatcatgccttctatatacagacagattgccttcagaagagtggaagaaaatctccactatcaatgaacccagactcttgtcttcttcaagagcaagggcctccggagatccaaactgtgattgaaccaagtgcagactcctaatgctcttgaaatacacagcccctcctaggagcttaccattttcaccttccttgcctatgcccttgccttctagttccaaatattttagccagcttcactgtggcaatagtctttcagagaaaagacttcttgctgttattctccaactcatccgtgggcttctggggacagccatttggctggggtgccaaacaccagaaggggagataatagttttgactctgaacttggccacaacccctgaactgatcccaaaatctgtgaaaagatttgaatctgatatctccaccaaa

SEQ ID NO: 168437 - DNA, 482 bp, Homo sapiens
  Payload ID: 13152
  Gene Symbol: POU2F3
  Gene Name: POU class 2 homeobox 3
  ENST ID: ENST00000532663
  CDS Start-End: 1-482
ggagatgtggggctggcgatgggaaagctgtatggcaacgacttcagccagaccaccatctcacgatttgaggccctcaacctgagcttcaagaacatgtgcaagctcaagcccctgctggagaagtggctgaatgatgcagagtcctctccgtcagacccctcagtgagcacgcccagctcctaccccagcctcagtgaagtatttggtaggaagagaaagaaacggaccagcatcgagaccaacatccgcctgactctggagaagaggtttcaagatgtatctccctcagggtctctgggccccctctctgtccctcctgtccacagtaccatgcctggaacagtaacgtcatcctgttcccctgggaacaacagcaggccttcatctcctggctcaggactccacgccagcagccccactgcatctcaaaataactccaaagcagcagtgaactccgcctccagttttaactcttcagg

SEQ ID NO: 168438 - DNA, 2968 bp, Homo sapiens
  Payload ID: 13153
  Gene Symbol: POU3F1
  Gene Name: POU class 3 homeobox 1
  Uniprot ID: Q03052
  ENST ID: ENST00000373012
  CDS Start-End: 52-1407
cgcagacggagcggagcggcggcggcggcgcggcgcagggcgcggggcggcatggccaccaccgcgcagtacctgccgcggggccccggtggcggagccgggggcaccgggccgcttatgcacccggacgccgcggcggcggcggcggcggcggcggccgcggagcgattgcatgcaggggccgcgtaccgcgaagtgcagaagctgatgcaccacgagtggctgggcgcgggcgcgggccaccccgtgggcctagcgcacccccagtggctacccacgggaggaggcggcggcggcgattgggccggcggcccgcacctagaacacggcaaggcaggcggcggcggcaccggccgagccgacgacggcggcggcggcggaggtttccacgcgcgcctggtgcaccagggggcggcccacgcgggcgcggcatgggcgcagggcagcacagcgcaccacttgggcccggccatgtcgccctcgcccggggccagcgggggccaccagccccagccgctcgggctgtacgcgcaggcggcctacccggggggcggcggcggcggcctggccgggatgctggcggcgggcggtggcggcgcggggccgggcctgcaccacgcgctgcacgaggatggccacgaggcgcagctggagccgtcgccgccgccgcatctgggcgcccacggacacgcacacggacatgcacacgcgggcggcctgcacgcggcggcggcgcacctgcacccgggcgcgggcggcggcggctcatcggtgggcgagcactcggacgaggatgcgcccagctcggacgacctggagcagttcgccaagcagttcaagcagcggcgcatcaagctgggctttacgcaggccgacgtggggctggcgctgggcacgctctacggtaacgtgttctcgcagaccaccatctgccgcttcgaggccctgcagctgagcttcaagaacatgtgcaagctcaagccgctgctcaacaagtggctggaggagaccgactcgtccagcggcagccccaccaacctggacaagatcgcggcgcagggccgcaagcgcaagaagcgcacgtccatcgaggtgggggtcaaaggcgcgctcgagagccactttctcaagtgccccaagccctcggcgcacgagatcaccggcttggcagacagcctgcagctggagaaggaggtggtgcgcgtctggttctgcaaccggcggcagaaggagaagcgcatgacccctgcggccggcgcgggccacccgcccatggacgatgtatacgcgcctggggagctagggcctggcgggggcggcgcatcgccaccctccgcgcccccaccgcccccgccggcggcgctgcaccaccaccaccaccacacactgcccggctcagtgcagtgaccccgcgggccgggcccccgccggcgcgctgcagggcgcgggcgcgcagcccgcccgcgcggcctggactctttttgttcggttgctttggattttacaaaaaaaaaaaaaagcccagaaactttcgaacaaaaccaaacacccggacgaccctctccggtgagcggcgaagacagcccggtaggctgcgtcgcccgagccccgggagagaggagcgaagatccggaactcgccaactcaccccgggcatcctgcccgccgcctgctctctgcccccatcccctcgacgacccccgcccctgcccccccgggctgttcggggccggatcccggcagcggcctccccaaagcgacaggtaacgcagtgcggggttagggattccccgggagagaggacgaagcgaggagagttctccatcccctctccccgcgtggactcctgagcctgcgggtccagggtggggggctgtcactttattcgctacacgcctcttctctcctataaggatgcgccccaccccgctttcccctttctccgggcttggttttttacggtttttatttattcgtggagcctctcggctcctggggtccttctaactccgcccgcgcccttaatttaaatcgcagtatactgtatttatcggggccccggaggggaggtcgcgagagccgcgtctgtgtataaaagcaggaaatagccaaagctttaatctagcctaatttatttttccccttatatttccctaccctaccctccccccaaaaaaaagcaaaaaaaaaaaaaaaaaactaacaaaaaaaattcgagtgttcatttttcgtttcgtttcatccgagccccggcttggttcccggccacgccggaggggtctgcgctcccacacacccagacgggaaggggcttctgccctgctgcagaccgaccgccgcatagcgcggcccctgctccccgcggggccctgccctcctggccacaccaaacgaaacttggaaaagttagagagattgttttttaaccagctgtagaaataagccgttccctgagaaccctccgcctgattccctgcagcttccctctgctccctttccagcccgccgggatgcgggatgccaggggaggccgggagagaaattccccaagtttggggtgaggtgggaaccatgtaaatatgtgagatatgtacacactggcggggagaagaaacattttgtgcttggtttttatttttggttttccgggttacccttccttcctaccctaaaggattttgtacactgactaatccgaaaaagatattttaatatgatttccgaatttctgacccatctctatttattttctggatgtgtttggagcttcccccttctccgtttcttcttctgtttgttaaggtttgaatttaaattttgttattttatttttattattttttgaaacaatgtttcggtgcattctctttgtatctttattgaaaaaaaaataatgtagactgggaagttccctttatatttatgttatagtaaatattttattactcacataaacatgtaccccagg

SEQ ID NO: 168439 - DNA, 4899 bp, Homo sapiens
  Payload ID: 13154
  Gene Symbol: POU3F2
  Gene Name: POU class 3 homeobox 2
  Uniprot ID: P20265
  ENST ID: ENST00000328345
  CDS Start-End: 283-1614
gggagaggggggagcgccgagctagtcagagagtgagcgagagcgagaaggagggagaggaggagaaagagagcgagggcgggcgggaggcggcggcggcggcagcagcagcagtaatagcaggagcagcaacagaaggcgtcggagcgggcgtcggagctgcccgctgtgggagagagaggagacagaaagagcgagcgaggagagggagcccgaggcgaaaaagtaactgtcaaatgcgcggctcctttaaccggagcgctcagtccggctccgagagtcatggcgaccgcagcgtctaaccactacagcctgctcacctccagcgcctccatcgtgcacgccgagccgcccggcggcatgcagcagggcgcggggggctaccgcgaagcgcagagcctggtgcagggcgactacggcgctctgcagagcaacggacacccgctcagccacgctcaccagtggatcaccgcgctgtcccacggcggcggcggcgggggcggtggcggcggcggggggggcgggggcggcggcgggggcggcggcgacggctccccgtggtccaccagccccctgggccagccggacatcaagccctcggtggtggtgcagcagggcggccgcggagacgagctgcacgggccaggcgccctgcagcagcagcatcagcagcagcaacagcaacagcagcagcaacagcagcaacagcagcagcagcagcagcaacagcggccgccgcatctggtgcaccacgccgctaaccaccacccgggacccggggcatggcggagcgcggcggctgcagcgcacctcccaccctccatgggagcgtccaacggcggcttgctctactcgcagcccagcttcacggtgaacggcatgctgggcgccggcgggcagccggccggtctgcaccaccacggcctgcgggacgcgcacgacgagccacaccatgccgaccaccacccgcacccgcactcgcacccacaccagcagccgccgcccccgccgcccccgcagggtccgcctggccacccaggcgcgcaccacgacccgcactcggacgaggacacgccgacctcggacgacctggagcagttcgccaagcagttcaagcagcggcggatcaaactgggatttacccaagcggacgtggggctggctctgggcaccctgtatggcaacgtgttctcgcagaccaccatctgcaggtttgaggccctgcagctgagcttcaagaacatgtgcaagctgaagcctttgttgaacaagtggttggaggaggcggactcgtcctcgggcagccccacgagcatagacaagatcgcagcgcaagggcgcaagcggaaaaagcggacctccatcgaggtgagcgtcaagggggctctggagagccatttcctcaaatgccccaagccctcggcccaggagatcacctccctcgcggacagcttacagctggagaaggaggtggtgagagtttggttttgtaacaggagacagaaagagaaaaggatgacccctcccggagggactctgccgggcgccgaggatgtgtacggggggagtagggacactccaccacaccacggggtgcagacgcccgtccagtgaactcgagctgggggaggggcagagcgcggggctccccctccccttcggtccttggccctttcccggccctcttgttccctctctaacttctgattgttcttttatttttaattattatttccccgtcccttaaaaagacaaaaaaaataaggcaaaaggaaagcaactaagacactggactatcctttaaaggtagcaggtgtaatgatgtgttttgacctttgcaggcgagtaaccaggcaatggagtggagtgtctcctggagagagtgaggagagtgtgtgatagctagaaagagagagagacagagagatggcaagcactgagataaatacctggcaaaactaaataaattaccaaaaaggaaaaaaaatccaccaaaccatgataaacacaaaatgcagcttcctgatgcttagagttggcacatgctgctgtgtttatttattgtggattcccatcaggaaagaggaaaaaatacacatgttctttcatataggcaaaatttaaccacataaatttgcactgcaagaaaattgaagtttacgtgaacaaattcatgagcatattttctctttctccccaccgttaatttgggagttgccgttttgggggattttgttttgctttgctttattcatcggagagagttgaagccagctcttggccactctccatttctaatgttcttgtgttgccccttcttcgtactgtttgtgaactttggttaccttcacattccccttacgagggtgtaacatctatttgttcctcttaccaaagcaaaaggattggcttcatacaaaatagacaattctctgatttcaggaaatgtgcatggtctacccgctttatcgaaggcaagaatccggtttggaatataaaaataagcattggttgttcttaccagccacaaagtaaacttcattttcaggcagtgtttctgggggaggttatggagggaagaaaaaagaaaaatcgatagtgagtgactgattgcttcattttatcaggcgggcccattgtgaaagagctcaggggaaatgtggaggttaaatatatttccagagttgtccagcagaaagaaagtggcactttgaagagaactagggaagtacatatcttcagatatccctatatagttctctaccttcagttttagtaacaattatgaagaattatttgtgctgacagcagcagttaaactttgtttctctaatagctttttttttacataaaaaaagacccaggaacttaatagtgtatgcataagactgtgttttttagcacacagatacccacagcatacactgacgatctccacgcagtagacaggttttgtcttcactagctcatttgtttatcaagtcatatttagggtcccacaccctcttttcctgtaatttattgcagaatacaccactttgacttggacagctttctgccccctctttcactaaggaaggcaaatgaagtgaaaaaaaaaaatgccattttcaatccttcctttctcccctttgttaatagttttaagtgaatttttgaccttatcttaatggaaaacggttaactccaaacacaaaagactctactggaaagtgtaggtgaaaaaacttgtaactgtattgaaaataaataccattaaactgtgatcagttaaaatttaaaagaaaaatcagcacaaaagggcgctaaaagggaaaacactttttattaatcttaaaagtttgggggtttttttccagttaggtattagataaatttttattttaaaaaatgaaagtctcactaccataaaattatggttcagcatcagattagcattgcactcagtagtctttaaggttttaggaaatatgctttatattgtcttttcaaacacctgtgattgtttcattttccatgtttttgcaagataaatggtgacttataatgggcatatttatttgcctgtatttcatttcccccaatgaatgtcacaaggagatgggcacggagctgcttcgggtgcatcacgctgctcgttcctgaggtatgggaactggcctttagtgaagctatccagagcagggcaaatagccactggtaaagggaggaaatgaatttccagatacttattaccaagtaggtaaggtcagaagctggagttcagagaatgtgtctacagcttctctgactcttataggtttactaagatgaaagttaccactgaaccttaccactatgtatatatgtttaatatctgtcttttgaaatgcagaaatagtttaaatgtttctttgtctatttttctttttttttaatgctacccagggaaatattttcatatcatttttaagtggcctgcctcaatgtatatttatttcttttgaaacaaaaaggttctggaaactgtttttctgtagctttaaatgaataggtgagcaaaatctatatgggatgtaatttttttgttcagtctcttaaaaaatactttgttttggtacatttggttgtgcttgtggggaaaataaaaacgcagagatccttatatatttatgttaaagtaatattttattatctacataaaacagaaatgcacaataccttcatagtttgttctaattattgaaatatctttattttatttttaaagatagtgccaagttttaaggggggaaaaccctagaccttaaattgactgagttgagttgtgtgtaaaacacttcccttcctttatacttcataaagttttggaataaattttatgcatatactgccagatttgatgttcataactttcagaggctttttttttttttaatggagactactggtctaattcactttactttgcaaaaactatcagtcccaaatctttcagtcactatgcctgtagcattaaattgaaatggtcattgggtttgagcttcaatttgcttgccatttcatggtcctacaaagagatgtttgtcccctttaaacatatgcagatatgcctgcatcttctttccaggttaactataccttattcgattgtgctgttttggagaacatcagtggaactaggtggactttgatctctacccataggtcctcaaataatttgggatctacagaaaagcaggatttagtagattattatttttaataatttacaaatatctcttaacaaagaataaccctgatagtatactattgtgagtttactaaatgattagaagtagatcctatacattattcctgtttggtttgcataaaaagatgaattttacaatggtttatacaattgtgtctatttttcat

SEQ ID NO: 168440 - DNA, 4961 bp, Homo sapiens
  Payload ID: 13155
  Gene Symbol: POU3F3
  Gene Name: POU class 3 homeobox 3
  Uniprot ID: P20264
  ENST ID: ENST00000361360
  CDS Start-End: 1-1503
atggccacggcggcttctaacccctacctgccggggaacagcctgctcgcggccggctctattgtgcactcggacgcggcaggggctggcggcggcgggggtggcggcggcggcggcggcgggggcggcgcagggggcgggggcggcggcatgcagccgggcagcgccgccgtgacctcgggcgcctaccggggggacccgtcctctgtcaagatggtccagagcgacttcatgcagggggccatggccgccagcaacggcggccatatgctgagccacgcgcaccagtgggtcacagccctgccccacgccgccgccgccgccgccgctgccgccgccgccgccgtggaggcgagctcgccgtggtcgggcagcgccgtgggcatggctggcagcccccagcagccaccgcagccgccgccgccaccgccgcagggccccgacgtgaagggcggcgccgggcgcgacgacctgcacgcgggcacagcgctgcaccaccgcgggccgccgcacctcggacccccgccgccgcccccacaccagggccaccctgggggctggggggcggccgccgctgccgcagccgcagccgccgccgccgccgccgccgcgcacctcccgtccatggccgggggccagcagccgccgccgcagagtctgctctactcgcagcccggaggcttcacggtgaacggcatgctgagcgcgccaccggggcccggcggcggcggcggcggcgcgggcggtggagcccagagcttggtgcacccggggctggtgcgcggggacacgccagagctggccgagcaccaccaccaccaccaccaccacgcgcatcctcacccgccgcacccgcaccacgcgcagggacccccgcaccacggcggcggcggcggcggcgcggggcctggactcaacagccacgacccgcactcggacgaggacacgccgacgtcggacgacctggagcagttcgccaagcagttcaagcagcggcgcatcaagctgggcttcacgcaggccgacgtggggttggcgctgggcacactctacggcaacgtgttctcgcagaccaccatctgccgcttcgaggccctgcagctgagcttcaagaacatgtgcaagctcaagccgctgctgaacaagtggctggaggaggcggactcaagcaccggcagccccacaagcatcgacaagatcgcggcgcagggccgcaagcgcaagaagcggacctctatcgaggtgagcgtcaagggcgcgctggagagccacttcctcaagtgccccaagccctccgcgcaggagatcaccaacctggccgacagcctgcagctcgagaaggaggtggtgcgggtctggttctgcaatcggcgccaaaaggagaagcgcatgacgccgcccgggatccaacagcagacgcccgacgacgtctactcgcaggtgggcaccgtgagcgccgacacgccgccgcctcaccacgggctgcagacgagcgttcagtgaagccagggcgcagagcgaagagggccgccgccgccgccgcctccgcagccgccgtcagcaccgccgccgcccctgccgccgccgccgccgccgccgccgccgctgccgccgccgcgccgaccctgcacctgggccgctccgggctccagcccaggcccatccgccgccctcccctccacccagagacaggcatgcccgcccttggaggagaaaacgcgggagaaacggaccaaggaggcatttttgcagtccaaggaaggaggggccaaaaaataaaaagcataataaacacccagactgttttgtatacatatataacaaacaaaaccggaagagaaaaagggggcgatcatgagatctcgttcatactgtggtggtgtttcgtttttgtttttgtttttaaagaagggtgaagatgcctgacgcacgaaaactgcactcgtgaggtttttccaccctgagatgacctacacggcagcggtggacagcacctgcctcgtcttctcctctttgaaaaaaagagagagagagagtcccctttcctttcactttctccctccaaaacagctgcctaaagagatccacggaaactttatttcctgggagcgacctgagagaaaacagaggcaccaggttccatcaggggacgacaccgtgctctgggaccctgtttttcttggccatattaaagtcatttggaaacaaatcaactctgaaatgggaaggaggggggaaaaacagtctccaagaaaaaaataattatattgacagcttctgaaactaacagactgaatagcaaagccaaaagaaaagtatcctcaaagtaaccttggaaataaaaggatcgggaaggagcagagggagagggggaacgtccgctgaggagtggcgagaggccccggccgagtcgggtcgcgggcgggcgggcgaactgggagcagagcgggggcccagccagcgaggccgccgagccaggcccggccgcgtacccaggctttgacggctgccattcagggtggacgatgcctaaagattccaccgctaatattttttttattaatattttttattttttatttctggactgactcagataaaggaatttagaaagactgagcaccagccgctgcacttctctggacttctctcctcaatccgttgccaactttgattgaatgggtgctgtggatgtgattatataatactgccatttccaagcagtgtttttggtaggttttaataaacagacttttcaaaagacggcaatatagaattgttagatccgttgttgatctaaaaatatttgctttatattttcattaaatgacttcttttaatattttattcagaatacttatgaactgctgcaaaacggtaatttatttttccccagatcttgtattacgtgtttttttcagacgagcacaaatcaaaatgaaatgaaaatatggacagttgttaggtaataagggtatcttttgatgtgatcatttgattgtaatttaatttgagtagtgattccgtaagagctgatcgagaaaataaatttgttagaatgaaatagtctgtgtctgatgcgtaaacactgtgtgggaagaaaagagttctttaagaaatatttttttactaatgaaaatccctaagtaatagcgttgaggaagtagagcctgctccacttaaggtacttttggaaatctagagtaaagcataggcattgctgagacagctagtattttaacatagtagtcactcctcgataatccataaattcacaatatttttctctcccttaattttagtggatgtctttagtgttttcaggtgagattgcctaaatattaacccttttcttggcgatacctgtgtttcttatcgaaagattgaacgatatcaccagtaaaaatgagccaactggctattaatggttaatacagcccctccccccaagttcagcttcttttttcttctcctgtccccctcccaacatgttcctgtctcttttctctttttctcaagactatagttgttaggagtcgcttataagtcttataaaatattttgatatcaattacttcccatcaataactatatgtaattaaatttaaattattaagctttttgggttttttccccccgtaataaaagaatatagttctaaaatcctgattatggtccacactgcataccatctgtgcaattaccaactcagacttaaggttctatatttctgtgtttttgtctctccccagtatgattctatatcttctttactggtgctgggggttttaggtcaccttttacataaaccctgcagagtggtcacattgatcaagttaatgtttcaatatttacaatgtgggaaaatgaaagtgtaatgcctcaggttgtgagtacttaagacgctaaaggctcggcttagttgagtccctatatattgtacttaaaagtatttagcagtggtagagcaacgattttatagacaaattccccccaatctcacttagctgtcactcactttttttcctccttctctcatcttcactccctctccctgtgatatcaatgcaggggttaaaaaacccggaaaactgtgagagcaacaaggcacagttatttctcccagacaggccctgtgtcactttcataaatcaaacccagccagatggccatgtattgggttgcattattttaaacaccaaatcgtactaaaaatcacaatcattttgatttgtgaaatctgaaaaaggccacatatattaaacagagagaagaaaaaaatgaagacaagaaaccacaatttacttttctttgccttcttgttccctatttctcttgctgctgtaatccctatgcccagcaaatttacaacctggagtgggggtgggggagaagttcaccattttgggggtgtctagagaggcaagcaaagaagtcctcattggaaagctgaggactggtcaggttgtttttatgtggtggatactactggcacgtgagatggaatcttgtttttcctatgggaatggtggtggttgattagacaagtaataggtctattaaaaaaatttcaggaggtatctacttagttgatttagctgacaacaaaagagctaacattagatttcacactgttttctattaaaaagcaaactttgctgattactttggaagaatccctgatttgggggtagcagagtaacttttaattggagaagctgggaaagcaaacccattttgtttcattatttgcattttataaagtgagctaatgcttgcactccattttttttaatcaaccctttcaatgtaattacaaaatgaaattcatggttgaaaaacaaaagagggcagatataactgagaggttttgtgctaaggcttatattgttacacatgtaaataatgaaaatattgttatatatcaccagatctttttaatgaatttggtcattgtgttc

SEQ ID NO: 168441 - DNA, 3878 bp, Homo sapiens
  Payload ID: 13156
  Gene Symbol: POU3F4
  Gene Name: POU class 3 homeobox 4
  Uniprot ID: P49335
  ENST ID: ENST00000373200
  CDS Start-End: 76-1161
ccccgcaccgtagatgtcaaaggctgaagctgctccctttgccacattataactagtaggggatcctcaccgaccatggccacagctgcctcgaatccctacagcattctcagttccacctccctagtccatgcggactctgcgggcatgcagcaggggagtcctttccgcaaccctcagaaacttctccaaagtgattacttgcagggagttcccagcaatgggcatcccctcgggcatcactgggtgaccagtctgagcgacgggggcccatggtcctccacactggccaccagccccctggaccagcaggacgtgaagcccgggcgcgaagacctgcaactgggtgcgatcatccatcaccgctcgccacacgtagcccaccactcaccgcacactaaccaccccaacgcctggggggccagcccggcaccgaacccgtctatcacgtcaagcggccaacccctcaacgtgtactcgcagcctggcttcaccgtgagcggcatgctggaacacgggggactcaccccacctccagctgccgcctctgcacagagcctgcacccggtgctccgagagcccccggatcacggcgaactgggctcgcaccattgccaggatcactccgacgaggagacgccaacctctgatgagttggaacagttcgccaaacaattcaaacaaagaagaatcaagttgggcttcacgcaggccgacgtggggttggcgctgggcacactgtatggtaacgtgttctcgcagaccaccatctgcaggttcgaggccttgcagctgagcttcaaaaatatgtgcaagctgaagcccctgctgaacaagtggctggaggaggcggattcgtccacagggagcccgaccagcattgacaagatcgctgcacagggccgcaagcgcaagaagcggacctccatcgaggtgagtgtcaagggcgtactggagacgcatttcctcaagtgtcccaagcctgccgcgcaggagatctcctcgctggcagacagcctccagttggagaaggaagtggtgcgtgtctggttctgtaatcgaagacaaaaagagaaaagaatgactccgccaggggatcagcagccgcatgaggtttattcgcacaccgtgaaaacagacacatcttgccatgatctctgactggaggaagcgaggaggcggccggccgcactgggagcagcgcggatttctctttctctctcactctcttcctttcattctagtattctttattatttttctctctctctcgttcgctcgctctctcgtactctctctcttttccctcctttcctttttctttcctttcccctttttctttcccttctttttccctttcctttcctttcattttctttcctttccccttcccttcccttcccttccatctcttcctttcctttcctttcttttcttttgctttcctttcctttttttcccttttctttccttttcataagaggttctaacttctgttgacaaaggaaacacatactctctcattcaggcttctcaatgctgatacacagttacattaagcagtccaagctgggatctcatattcctggctccccgggcaacagttccctttagccttttctgctgatcaatacatattgtttactcagagtaaggtttgtttggtcgctcctctctaggaagaacaaggagtgggataacgtgggggcggggtggggcgggggagggattgggaagacagatgtgtgcctctgaataacctttcagcgccttggttatagcagctgtatttcaggtgaaatttgttttacaatagactagttttgcatttttaaaaacttctatagcgtttctaaatgtctgcggtgttttactacaatctgtacacaatatttgtgagataatttgtatctaatcgaccactccatgttattattgctattattattactacttcgttgagctgatggctttttaattgcttagaaaagggaggagatgaatgggaataggcggggagagagatgcctatctactcaccgcccccccccttcccaaatctctatgaggaggagaggatacaacgaagagagttattgatgatgatattggttatattttttttccggggtggagtgcctaggaagggcagaatagggaagcctattaggtttgcaaactagtgcgaagtagcagcggcgatttcgcagctttctgccctccctcctggaagtgtggagcccgcgcaggctaccgcagcatagatcgaggtatctgagaaggattcggcggcaactctgggccaaagaggtggcctgacagtctgggagggctccgcactcaccggactccaggattcctgcgcgcagaaatccaggcccccagcctcgctagggcgaccttccgcgcgacctcacttcggccctcctagaggaaagactttgccttcacacgcgattactttcactggagatcacgacccggagacgctggcgactgggccagcgcctcccatttcggttcacctccagttcaccgccccctctgagtaagaaacccttggggaggggtggcgagggagtgggggataggcattctctgctcagtgcagaacggcaatgaaatgattggcaaaggtcacagggattctggtccatccgcgtaccacctctccccccatgtatataccgctgtctgtgtgtgggctcgtggggagctgtctcggcgtttctgataagcacagctggtggaagcccacagcgacgatccagcgagctagcgagcgcccgggaggctgggttcctgctttttaaaatataaatatatatatatttttaaatctctgtgtgtatgtgtctctgtgcgtgtgtgtgtgtgcgtgcgcgtgcaaacgtgtgtgtgtagatagctgtgtgtatcgcgttactatgtacaaaaacaaaaagtacaaaaaaaaaaaaaaacctggctaggctgtgtagagatcccaaaaatatgcagttgctgtggctttattgctagctagtatccacacaccaggtccacaggcgaacctcattcccaaggagcacacacgtgtgaggccggccaagcacccaacacccagccgccgccggccagacctggctgggggcgctgcacgccactgctggccgcctagtccggcctttaggcgcagctgctgtagacaaagcttcaaactacctaaggaccagaaagcccggcccggttgtcgaggatgcgttagtatgagttgccaggcctctggtccaccacactgtgtctccctcagctgcaggtcgaagagcatgtgttaattcaaatcccggacccttctacttttttgtcaagtctctgcattctgttggtagttaggttttagttctgggattttatttttttttcccccacactgagttcatgttttacaactgttgggagttttttgtttgtttcgattttttttctttgcagttaattgctatggttcgaacctgagttaacccaaatatttctgccgactttataactgtacagttttgtatattaaacgtttttgaagttattaatttaaagaaagatcatttagtttattcatttagtaactgatgtataataaacgctattttcattaagagttgctttttcaactattttattcaaattgcctattgcagttgccaacaattatttattttcaataaattctgcattgtgtttaaaaggaaattctttcacagataagttggatgtcaaaaagaaaacaattcgctgtaatgtttgatgtgaagttttagtcaaggggtttatattgacgcaatattttattgttgtaaaagattaaaaaggtttaaataaaacatttttccaaaaaaaaa

SEQ ID NO: 168442 - DNA, 4547 bp, Homo sapiens
  Payload ID: 13157
  Gene Symbol: POU4F1
  Gene Name: POU class 4 homeobox 1
  Uniprot ID: Q01851
  ENST ID: ENST00000377208
  CDS Start-End: 235-1494
gcggggctagagctgtcggagaagcgggaccgcgaggccggcgcgcggcgctctgcgcggtcagagggagcgcctggcagcagcaggagcagcagcagcagcccgcggcggggccgccgccagccgccgcgaccgccgcggctgcagcctccgaagggaggccgggtgagccggcgtacgcactttcccgcggactttcggagtgtttgtggatatacatgccaagccgccacgatgatgtccatgaacagcaagcagcctcactttgccatgcatcccaccctccctgagcacaagtacccgtcgctgcactccagctccgaggccatccggcgggcctgcctgcccacgccgccgctgcagagcaacctcttcgccagcctggacgagacgctgctggcgcgggccgaggcgctggcggccgtggacatcgccgtgtcccagggcaagagccatcctttcaagccggacgccacgtaccacacgatgaacagcgtgccgtgcacgtccacttccacggtgcctctggcgcaccaccaccaccaccaccaccaccaccaggcgctcgaacccggcgatctgctggaccacatctcctcgccgtcgctcgcgctcatggccggcgcgggcggcgcgggcgcggcggccggcggcggcggcgcccacgacggcccggggggcggtggcggcccgggcggcggcggcggcccgggcggcggccccgggggaggcggcggtggcggcccggggggcggcggcggcggcccgggcggcgggctcctgggcggctccgcgcaccctcacccgcatatgcacagcctgggccacctgtcgcaccccgcggcggcggccgccatgaacatgccgtccgggctgccgcaccccgggctggtggcggcggcggcgcaccacggcgcggcagcggcagcggcggcggcggcggccgggcaggtggcagcggcatcggcggcggcggccgtggtgggcgcagcgggcctggcgtccatctgcgactcggacacggacccgcgcgagctcgaggcgttcgcggagcgcttcaagcagcggcgcatcaagctgggcgtgacgcaggccgacgtgggctcggcgctggccaacctcaagatcccgggcgtgggctcactcagccagagcaccatctgcaggttcgagtcgctcacgctctcgcacaacaacatgatcgcgctcaagcccatcctgcaggcgtggctcgaggaggccgagggcgcccagcgcgagaaaatgaacaagcctgagctcttcaacggcggcgagaagaagcgcaagcggacttccatcgccgcgcccgagaagcgctccctcgaggcctacttcgccgtgcagccccggccctcgtccgagaagatcgccgccatcgccgagaaactggacctcaaaaagaacgtggtgcgggtgtggttttgcaaccagagacagaagcagaagcggatgaaattctctgccacttactgagggggctgggaggtgtcgggcgggacagaatggggagctgaggaggcatttttggggggctttcctctgcttgcctcccctcggatttggagtgtccgttatcctgcctgcatttggggagtcccttctcgctctctttcctccacccattctctgattttcctgcctttgctgtcccctagccttgaggactggggtgctgggtgtggggattggagtatagggtaggggagaagggggggagcattcgggggagtggggagtggggggaaggaaagcggagacccgagcaggggttttaaggagcaggatggttctggggtttgggtggggggagacgcgggaagggtaggaaaatggactgtttctgaccagagacacttacctaaatatcctggggaccaaggaactatgtacaaaaacaaacctaccaaccaccaaaaactagacaaataaagacaaactaaaacaaaacagaacaaaagcaaaggaaaatgctttagaaattttaactccggggagccataatctgcaacttcattttcccccatagaagagaaaaaagagcaccaccattattaccacctccccaaccctacacgcacgaactgagtcgaaaaacgaaaaccaaacgagcgagaagttgaagttctgggtatcaaagctagttgttctgtctgcgtgtttaatttttccctctctcacctccaccccatccatatcctctttatttcctccgttccaatgagaggcctatggctgctctccaatcccgggaagtgagtgggagcacagctgaaaagagagggtcagggggaggctggctgcttgcttaggtggaatccaagttttcccgtggccctgcctatactctggtggcctggtcctgttggggtgggggtctttggagagaagggcatagtctttgagctactaaaaagcagaattccggagcttcgagatatcttattctaggaaaatgaaacaattttaacaacagttttttttcctcttatgtcgaagatctagttttagacaatttcaaaataagcttttcccactcatagaactttaacttgccctttcagttttatcttttttttagagagaggtttaaactactgatttttcctgttgattcaaatagactaatggggtgaaagttattaggagagatactctctcctgttttctccactgaacgagactcatcttgctcttctaggtcccgtttcttcctctcttggaggacatgaaattatagaaatgttgagaagttcctgctttcttttgcggtaggacttggctgtgagaaaatcacctaaatcccagaaaagaggaagacagatttaaagtgcccccacccccatttgtttcaaagaggtctgcatgttgggcgaaaacagaacaactgtgtttccttttacttgttcttattattcaagagtcatttattacaggggataaatgttgggtagcaagaactttaatttgcactaccagtctcccaaatagaaaatcatgtatagtatttcatagtaataatcaggtaccttacaagctgctggtggattttaaaaaattaagatagttgaaggtggttaggtaaaatgcctgctttgtgtacaagatactctttggatctctcgtagagatggtttgttaccatcctttaatcataactaaaacattgaaaacagaacaaatgagaaaagaaaaaaaacctgccgattaacaagactgaaatcatgcatgatctgaaaggtgtggaaagaaacacaattaggtctcactctggttaggcattatttatttaattatgttgtatatcattgtttgcagggcaaacattctatgcatttgaaactgagcactaaactgggctagctttctggtagaccgttttgtggctagtgcgatttcacagtctactgcctgtttccactgaaaacatttttgtcatattcttgtattcaaagaaaaaggaaaaaagattattgtaaatattttatttaatgcacacattcacacagtggtaacagactgccagtgttcatcctgaaatgtctcacggattgatctacctgtccatgtatgtctgctgagctttctccttggttatgttttttctcttttacctttctcctcccttacttctatcagaaccaattctatgcgccaaaatacaacagggggatgtgtcccagtacacttacaaataaaacataactgaaagaagagcagttttatgatttgggtgcgtttttgtgtttatactgggccaggtcctggtagaacctttcaacaaacaaccaaacaaaaagaaaacacaaagaaatggggggagggtagggtgttgaagggggacaaaaaggggagagattgagaatgatgtatttttttgctgaatcagaattcactttcagataactcatgaaaagtggtgctctaaataaaatgaattctatattagttgcctgtgtttataaaagttattattttttaactgcagaaactcttaaaccacagcacttgatccagagtggtgaaaaccaataaataaccaggcacccaaaaaacatttaaatttagggtcagggacagaggaatttggaggtttagatgtgatattctaccctaaaaacacctagtaactgaatggcttttctttggagggtaatacattttaaaacatttagtgtgccacctactgctccacagtgactagagagcctctatttcttggtgacttgggactagatcagatgccaaatgtacaaagtttcttaagagttgagattatatcatctgaagtcatcttattttagccaaatctttttaatttcaccggcaaatctgtgaaggaaaacacttgatgttcaaaaagaatagtacattttaaaagctgcgattttaaacagttgttaatgttaaaaaaaaaaagcactagaggtatttttaaacatagaactcttccataaaaagttgatttgtttttgctgttattgacttgaaacatcatcagttttaaataaaatgcatttgtaaaaaaa

SEQ ID NO: 168443 - DNA, 3144 bp, Homo sapiens
  Payload ID: 13158
  Gene Symbol: POU4F2
  Gene Name: POU class 4 homeobox 2
  Uniprot ID: Q12837
  ENST ID: ENST00000281321
  CDS Start-End: 249-1478
agtttcgggtgccgaggtctgcagctagcggcaagcggagtcaggcatccgttcagactgacagcagaggcggcgaaggagcgcgtagccgagatcaggcgtacagagtccggaggcggcggcgggtgagctcaacttcgcacagcccttcccagctccagccccggctggcccggcacttctcggagggtcccggcagccgggaccagtgagtgcctctacggaccagcgccccggcgggcgggaagatgatgatgatgtccctgaacagcaagcaggcgtttagcatgccgcacggcggcagcctgcacgtggagcccaagtactcggcactgcacagcacctcgccgggctcctcggctcccatcgcgccctcggccagctcccccagcagctcgagcaacgctggtggtggcggcggcggcggcggcggcggcggcggcggcggaggccgaagcagcagctccagcagcagtggcagcagcggcggcgggggctcggaggctatgcggagagcctgtcttccaaccccaccgagcaatatattcggcgggctggatgagagtctgctggcccgcgccgaggctctggcagccgtggacatcgtctcccagagcaagagccaccaccaccatccaccccaccacagccccttcaaaccggacgccacctaccacactatgaataccatcccgtgcacgtcggccgcctcttcttcatcggtgcccatctcgcacccttccgcgttggcgggcacgcaccaccaccaccaccatcaccaccaccaccaccaccaaccgcaccaggcgctggagggcgagctgctggagcacctgagtcccgggctggccctgggcgctatggcgggccccgacggcgctgtggtgtccacgccggctcacgcgccgcacatggccaccatgaaccccatgcaccaagcagcgctcagcatggcccacgcgcacgggctgccgtcgcacatgggctgcatgagcgacgtggacgccgacccgcgggacctggaggcattcgccgagcgcttcaagcagcgacgcatcaagctgggggtgacccaggcagatgtgggctccgcgctggccaacctcaagatccccggcgtgggctcgcttagccagagcaccatctgcaggttcgagtccctcacactgtcccacaataatatgatcgcgctcaaacccatcctgcaggcatggctcgaggaggccgagaagtcccaccgcgagaagctcaccaagcctgaactcttcaatggcgcggagaagaagcgcaagcgcacgtccatcgctgcgccagagaagcgctcgctcgaagcctactttgccattcagcctcggccctcctctgaaaagatcgccgccatcgcggagaagctggacctgaagaaaaacgtggtgcgcgtctggttctgcaaccagaggcagaaacagaaaagaatgaaatattccgccggcatttagaagactcttggcctctccagagacgcccctttcctcgtccgctcttttctctcctctcttctgcctcttttcacttttggcgactagaaacaattccagtaaatgtgaatctcgacaaatcgaggactgaagagggagcgaacgagcgaacaactgagcccaagccggtgagaatgtgaaacagtttctcaaaggaaagaataacaaaagatggtatttgtctgttgtagcaaagttgtccctttgaaccccacctcggcttcttcagaggaagtgtggagatggctgtttgcaggaaggcagacgagacagtgtttaaaaagtccacaagaatgatcaagtaagatttgtttttattcttacagacatcacccgtgttcaagtttaaaagtacactttgcaactatttttcagaaatagaaattgattcaggactaaaactttaaactagagttgatgcttaatgtgatagagacatctctaaagtattttgaattttaaaaaaagatggcagattttctgcatttacactgtatattatatatatatttttattgtggttcttacccccttttccttctctgaagtgttaatgcttaagaaaagagttgcgcctgctgtgttcactgatcttgaaagctattattagattattgcagaacaaccctctgtaaattattaatttatctctctagcaacttaattttgtgcacattctaattaattaaacttcttccgtctaaaaaaagtgggggaaatgtatagctagtaacgttcaaaaaattttgtttgatgagtttaccgaatttttacagctttcctcctatactgtgttccttttgacccatttgtatattctcacttgaatgaagattgtttttttctttgtttttactggtagtgttctgatttgtgagtcgacactcagtaatggatgtcttaatcgtgtagacctgattcactgtctgaagtattgtttacttcgttacatatttaatggggattcccacattgtccccatgacacatgagcgctctcacttacccttacacacacacacacacacacacacacctctaacagaagggaagaagcagttggaagcatgaccgatgcaccattttctagttttaggtgcatttgccacttggtgtttgcccttcagattttagatttcaccaaggtatttcagtcttccagttttcaattgctttgttggctacatgttaatatttataggaatacttcagtttttccttttggaggtttgtttgtagaaaaactaatttgaactataagaaagacagtgcactgcttgtaaattcacattgtttggaaaaattcttttggaacaaaaaattaggtacatgataactggtaccttatctactgtaaatatttcattaaaaatgatgcacacatagatatattcttacaaattttgctgtattgctgttctctttgaggctctccaaagtcttgagttctgtatatggcctggtttcttgtttttattaatagatggtttatttactatggtaatgtattaatttatttttggtgttgttcgattgtctttcattgaagagataattttaatgttttattggcaacgtatgctgctttttcattaaaatatgctattaaaattaaatggcttttaaaa

SEQ ID NO: 168444 - DNA, 1182 bp, Homo sapiens
  Payload ID: 13159
  Gene Symbol: POU4F3
  Gene Name: POU class 4 homeobox 3
  Uniprot ID: Q15319
  ENST ID: ENST00000230732
  CDS Start-End: 90-1106
cgctgagcagcgctcacttggagagcggcaagcaagctagacaagcctgattccatgtcacccgctgccaccctgccaggagcgcgaagatgatggccatgaactccaagcagcctttcggcatgcacccggtgctgcaagaacccaaattctccagtctgcactctggctccgaggccatgcgccgagtctgtctcccagccccgcagctgcagggtaatatatttggaagctttgatgagagcctgctggcacgcgccgaagctctggcggcggtggatatcgtctcccacggcaagaaccatccgttcaagcccgacgccacctaccataccatgagcagcgtgccctgcacgtccacttcgtccaccgtgcccatctcccacccagctgcgctcacctcacaccctcaccacgccgtgcaccagggcctcgaaggcgacctgctggagcacatctcgcccacgctgagtgtgagcggcctgggcgctccggaacactcggtgatgcccgcacagatccatccacaccacctgggcgccatgggccacctgcaccaggccatgggcatgagtcacccgcacaccgtggcccctcatagcgccatgcctgcatgcctcagcgacgtggagtcagacccgcgcgagctggaagccttcgccgagcgcttcaagcagcggcgcatcaagctgggggtgacccaggcggacgtgggcgcggctctggctaatctcaagatccccggcgtgggctcgctgagccaaagcaccatctgcaggttcgagtctctcactctctcgcacaacaacatgatcgctctcaagccggtgctccaggcctggttggaggaggccgaggccgcctaccgagagaagaacagcaagccagagctcttcaacggcagcgaacggaagcgcaaacgcacgtccatcgcggcgccggagaagcgttcactcgaggcctatttcgctatccagccacgtccttcatctgagaagatcgcggccatcgctgagaaactggaccttaaaaagaacgtggtgagagtctggttctgcaaccagagacagaaacagaaacgaatgaagtattcggctgtccactgattgcggcagggcgcagcgtcgggagccgggagagcctagtgctcatccctcccgggttcgggggatggttatcggg

SEQ ID NO: 168445 - DNA, 1420 bp, Homo sapiens
  Payload ID: 13160
  Gene Symbol: POU5F1
  Gene Name: POU class 5 homeobox 1
  Uniprot ID: Q01860
  ENST ID: ENST00000259915
  CDS Start-End: 74-1156
agagaggggttgagtagtcccttcgcaagccctcatttcaccaggcccccggcttggggcgccttccttccccatggcgggacacctggcttcggatttcgccttctcgccccctccaggtggtggaggtgatgggccaggggggccggagccgggctgggttgatcctcggacctggctaagcttccaaggccctcctggagggccaggaatcgggccgggggttgggccaggctctgaggtgtgggggattcccccatgccccccgccgtatgagttctgtggggggatggcgtactgtgggccccaggttggagtggggctagtgccccaaggcggcttggagacctctcagcctgagggcgaagcaggagtcggggtggagagcaactccgatggggcctccccggagccctgcaccgtcacccctggtgccgtgaagctggagaaggagaagctggagcaaaacccggaggagtcccaggacatcaaagctctgcagaaagaactcgagcaatttgccaagctcctgaagcagaagaggatcaccctgggatatacacaggccgatgtggggctcaccctgggggttctatttgggaaggtattcagccaaacgaccatctgccgctttgaggctctgcagcttagcttcaagaacatgtgtaagctgcggcccttgctgcagaagtgggtggaggaagctgacaacaatgaaaatcttcaggagatatgcaaagcagaaaccctcgtgcaggcccgaaagagaaagcgaaccagtatcgagaaccgagtgagaggcaacctggagaatttgttcctgcagtgcccgaaacccacactgcagcagatcagccacatcgcccagcagcttgggctcgagaaggatgtggtccgagtgtggttctgtaaccggcgccagaagggcaagcgatcaagcagcgactatgcacaacgagaggattttgaggctgctgggtctcctttctcagggggaccagtgtcctttcctctggccccagggccccattttggtaccccaggctatgggagccctcacttcactgcactgtactcctcggtccctttccctgagggggaagcctttccccctgtctccgtcaccactctgggctctcccatgcattcaaactgaggtgcctgcccttctaggaatgggggacagggggaggggaggagctagggaaagaaaacctggagtttgtgccagggtttttgggattaagttcttcattcactaaggaaggaattgggaacacaaagggtgggggcaggggagtttggggcaactggttggagggaaggtgaagttcaatgatgctcttgattttaatcccacatcatgtatcacttttttcttaaataaagaagcctgggacacagtagatagacacactta

SEQ ID NO: 168446 - DNA, 1163 bp, Homo sapiens
  Payload ID: 13160
  Gene Symbol: POU5F1
  Gene Name: POU class 5 homeobox 1
  Uniprot ID: Q01860
  ENST ID: ENST00000376243
  CDS Start-End: 102-899
gtagtcctttgttacatgcatgagtcagtgaacagggaatgggtgaatgacatttgtgggtaggttatttctagaagttaggtgggcagcttggaaggcagatgcacttctacagactattccttggggccacacgtaggttcttgaatcccgaatggaaaggggagattgataactggtgtgtttatgttcttacaagtcttctgccttttaaaatccagtcccaggacatcaaagctctgcagaaagaactcgagcaatttgccaagctcctgaagcagaagaggatcaccctgggatatacacaggccgatgtggggctcaccctgggggttctatttgggaaggtattcagccaaacgaccatctgccgctttgaggctctgcagcttagcttcaagaacatgtgtaagctgcggcccttgctgcagaagtgggtggaggaagctgacaacaatgaaaatcttcaggagatatgcaaagcagaaaccctcgtgcaggcccgaaagagaaagcgaaccagtatcgagaaccgagtgagaggcaacctggagaatttgttcctgcagtgcccgaaacccacactgcagcagatcagccacatcgcccagcagcttgggctcgagaaggatgtggtccgagtgtggttctgtaaccggcgccagaagggcaagcgatcaagcagcgactatgcacaacgagaggattttgaggctgctgggtctcctttctcagggggaccagtgtcctttcctctggccccagggccccattttggtaccccaggctatgggagccctcacttcactgcactgtactcctcggtccctttccctgagggggaagcctttccccctgtctctgtcaccactctgggctctcccatgcattcaaactgaggtgcctgcccttctaggaatgggggacagggggaggggaggagctagggaaagaaaacctggagtttgtgccagggtttttgggattaagttcttcattcactaaggaaggaattgggaacacaaagggtgggggcaggggagtttggggcaactggttggagggaaggtgaagttcaatgatgctcttgattttaatcccacatcatgtatcacttttttcttaaataaagaagcctgggacacagtagatagacacactta

SEQ ID NO: 168447 - DNA, 1420 bp, Homo sapiens
  Payload ID: 13160
  Gene Symbol: POU5F1
  Gene Name: POU class 5 homeobox 1
  Uniprot ID: Q01860
  ENST ID: ENST00000383524
  CDS Start-End: 74-1156
agagaggggttgagtagtcccttcgcaagccctcatttcaccaggcccccggcttggggcgccttccttccccatggcgggacacctggcttcggatttcgccttctcgccccctccaggtggtggaggtgatgggccaggggggccggagccgggctgggttgatcctcggacctggctaagcttccaaggccctcctggagggccaggaatcgggccgggggttgggccaggctctgaggtgtgggggattcccccatgccccccgccgtatgagttctgtggggggatggcgtactgtgggccccaggttggagtggggctagtgccccaaggcggcttggagacctctcagcctgagggcgaagcaggagtcggggtggagagcaactccgatggggcctccccggagccctgcaccgtcacccctggtgccgtgaagctggagaaggagaagctggagcaaaacccggaggagtcccaggacatcaaagctctgcagaaagaactcgagcaatttgccaagctcctgaagcagaagaggatcaccctgggatatacacaggccgatgtggggctcaccctgggggttctatttgggaaggtattcagccaaacgaccatctgccgctttgaggctctgcagcttagcttcaagaacatgtgtaagctgcggcccttgctgcagaagtgggtggaggaagctgacaacaatgaaaatcttcaggagatatgcaaagcagaaaccctcgtgcaggcccgaaagagaaagcgaaccagtatcgagaaccgagtgagaggcaacctggagaatttgttcctgcagtgcccgaaacccacactgcagcagatcagccacatcgcccagcagcttgggctcgagaaggatgtggtccgagtgtggttctgtaaccggcgccagaagggcaagcgatcaagcagcgactatgcacaacgagaggattttgaggctgctgggtctcctttctcagggggaccagtgtcctttcctctggccccagggccccattttggtaccccaggctatgggagccctcacttcactgcactgtactcctcggtccctttccctgagggggaagcctttccccctgtctctgtcaccactctgggctctcccatgcattcaaactgaggtgcctgcccttctaggaatgggggacagggggaggggaggagctagggaaagaaaacctggagtttgtgccagggtttttgggattaagttcttcattcactaaggaaggaattgggaacacaaagggtgggggcaggggagtttggggcaactggttggagggaaggtgaagttcaatgatgctcttgattttaatcccacatcatgtatcacttttttcttaaataaagaagcctgggacacagtagatagacacactta

SEQ ID NO: 168448 - DNA, 1163 bp, Homo sapiens; identical to SEQ ID NO: 168446
  Payload ID: 13160
  Gene Symbol: POU5F1
  Gene Name: POU class 5 homeobox 1
  Uniprot ID: Q01860
  ENST ID: ENST00000429314
  CDS Start-End: 102-899

SEQ ID NO: 168449 - DNA, 1163 bp, Homo sapiens
  Payload ID: 13160
  Gene Symbol: POU5F1
  Gene Name: POU class 5 homeobox 1
  Uniprot ID: Q01860
  ENST ID: ENST00000412166
  CDS Start-End: 102-899
gtagtcctttgttacatgcatgagtcagtgaacagggaatgggtgaatgacatttgtgggtaggttatttctagaagttaggtgggcagcttggaaggcagatgcacttctacagactattccttggggccacacgtaggttcttgaatcccgaatggaaaggggagattgataactggtgtgtttatgttcttacaagtcttctgccttttaaaatccagtcccaggacatcaaagctctgcagaaagaactcgagcaatttgccaagctcctgaagcagaagaggatcaccctgggatatacacaggccgatgtggggctcaccctgggggttctatttgggaaggtattcagccaaacgaccatctgccgctttgaggctctgcagcttagcttcaagaacatgtgtaagctgcggcccttgctgcagaagtgggtggaggaagctgacaacaatgaaaatcttcaggagatatgcaaagcagaaaccctcgtgcaggcccgaaagagaaagcgaaccagtatcgagaaccgagtgagaggcaacctggagaatttgttcctgcagtgcccgaaacccacactgcagcagatcagccacatcgcccagcagcttgggctcgagaaggatgtggtccgagtgtggttctgtaaccggcgccagaagggcaagcgatcaagcagcgactatgcacaacgagaggattttgaggctgctgggtctcctttctcagggggaccagtgtcctttcctctggccccagggccccattttggtaccccaggctatgggagccctcacttcactgcactgtactcctcggtccctttccctgagggggaagcctttccccctgtctctgtcaccactctgggctctcccatgcattcaaactgaggtgcctgcccttctaggaatgggggacagggggaggggaggagctagggaaagaaaacctggagtttgtgccagggtttttgggattaagttcttcattcactaaggaaggaattgggaacacaaagggtgggggcaggggagtttggggcaactggttggagggaaggtgaagttcaatgatgctcttgattttaatcccacatcatgtatcacttttttcttaaataaagaagcttgggacacagtagatagacacactta

SEQ ID NO: 168450 - DNA, 1420 bp, Homo sapiens
  Payload ID: 13160
  Gene Symbol: POU5F1
  Gene Name: POU class 5 homeobox 1
  Uniprot ID: Q01860
  ENST ID: ENST00000434616
  CDS Start-End: 74-1156
agagaggggttgagtagtcccttcgcaagccctcatttcaccaggcccccggcttggggcgccttccttccccatggcgggacacctggcttcagatttcgccttctcgccccctccaggtggtggaggtgatgggccaggggggccggagccgggctgggttgatcctcggacctggctaagcttccaaggccctcctggagggccaggaatcgggccgggggttgggccaggctctgaggtgtgggggattcccccatgccccccgccgtatgagttctgtggggggatggcgtactgtgggccccaggttggagtggggctagtgccccaaggcggcttggagacctctcagcctgagggtgaagcaggagtcggggtggagagcaactccgatggggcctccccggagccctgcaccgtcacccctggtgccgtgaagctggagaaggagaagctggagcaaaacccggaggagtcccaggacatcaaagctctgcagaaagaactcgagcaatttgccaagctcctgaagcagaagaggatcaccctgggatatacacaggccgatgtggggctcaccctgggggttctatttgggaaggtattcagccaaacgaccatctgccgctttgaggctctgcagcttagcttcaagaacatgtgtaagctgcggcccttgctgcagaagtgggtggaggaagctgacaacaatgaaaatcttcaggagatatgcaaagcagaaaccctcgtgcaggcccgaaagagaaagcgaaccagtatcgagaaccgagtgagaggcaacctggagaatttgttcctgcagtgcccgaaacccacactgcagcagatcagccacatcgcccagcagcttgggctcgagaaggatgtggtccgagtgtggttctgtaaccggcgccagaagggcaagcgatcaagcagcgactatgcacaacgagaggattttgaggctgctgggtctcctttctcagggggaccagtgtcctttcctctggccccagggccccattttggtaccccaggctatgggagccctcacttcactgcactgtactcctcggtccctttccctgagggggaagcctttccccctgtctctgtcaccactctgggctctcccatgcattcaaactgaggtgcctgcccttctaggaatgggggacagggggaggggaggagctagggaaagaaaacctggagtttgtgccagggtttttgggattaagttcttcattcactaaggaaggaattgggaacacaaagggtgggggcaggggagtttggggcaactggttggagggaaggtgaagttcaatgatgctcttgattttaatcccacatcatgtatcacttttttcttaaataaagaagcttgggacacagtagatagacacactta

SEQ ID NO: 168451 - DNA, 1055 bp, Homo sapiens
  Payload ID: 13160
  Gene Symbol: POU5F1
  Gene Name: POU class 5 homeobox 1
  ENST ID: ENST00000441888
  CDS Start-End: 297-791
ggttgccgggaatctggacctgagcgagaagcacgatccccggccgcccccgctcttgcatccccctggtcctactgctgtgcttgctggcgacggttcgttccggaagtcagtcccaggacatcaaagctctgcagaaagaactcgagcaatttgccaagctcctgaagcagaagaggatcaccctgggatatacacaggccgatgtggggctcaccctgggggttctatttgggaaggtattcagccaaacgaccatctgccgctttgaggctctgcagcttagcttcaagaacatgtgtaagctgcggcccttgctgcagaagtgggtggaggaagctgacaacaatgaaaatcttcaggagatatgcaaagcagaaaccctcgtgcaggcccgaaagagaaagcgaaccagtatcgagaaccgagtgagaggcaacctggagaatttgttcctgcagtgcccgaaacccacactgcagcagatcagccacatcgcccagcagcttgggctcgagaaggatgtggtccgagtgtggttctgtaaccggcgccagaagggcaagcgatcaagcagcgactatgcacaacgagaggattttgaggctgctgggtctcctttctcagggggaccagtgtcctttcctctggccccagggccccattttggtaccccaggctatgggagccctcacttcactgcactgtactcctcggtccctttccctgagggggaagcctttccccctgtctccgtcaccactctgggctctcccatgcattcaaactgaggtgcctgcccttctaggaatgggggacagggggaggggaggagctagggaaagaaaacctggagtttgtgccagggtttttgggattaagttcttcattcactaaggaaggaattgggaacacaaagggtgggggcaggggagtttggggcaactggttggagggaaggtgaagttcaatgatgctcttgattttaatcccacatcatgtatcacttttttcttaaataaagaagcctgggacacagtagatagacacactta

SEQ ID NO: 168452 - DNA, 1163 bp, Homo sapiens; identical to SEQ ID NO: 168449
  Payload ID: 13160
  Gene Symbol: POU5F1
  Gene Name: POU class 5 homeobox 1
  Uniprot ID: Q01860
  ENST ID: ENST00000451077
  CDS Start-End: 102-899

SEQ ID NO: 168453 - DNA, 1420 bp, Homo sapiens; identical to SEQ ID NO: 168447
  Payload ID: 13160
  Gene Symbol: POU5F1
  Gene Name: POU class 5 homeobox 1
  Uniprot ID: Q01860
  ENST ID: ENST00000437747
  CDS Start-End: 74-1156

SEQ ID NO: 168454 - DNA, 1420 bp, Homo sapiens; identical to SEQ ID NO: 168450
  Payload ID: 13160
  Gene Symbol: POU5F1
  Gene Name: POU class 5 homeobox 1
  Uniprot ID: Q01860
  ENST ID: ENST00000429603
  CDS Start-End: 74-1156

SEQ ID NO: 168455 - DNA, 1420 bp, Homo sapiens
  Payload ID: 13160
  Gene Symbol: POU5F1
  Gene Name: POU class 5 homeobox 1
  Uniprot ID: Q01860
  ENST ID: ENST00000454714
  CDS Start-End: 74-1156
agagaggggttgagtagtcccttcgcaagccctcatttcaccaggcccccggcttggggcgccttccttccccatggcgggacacctggcttcagattttgccttctcgccccctccaggtggtggaggtgatgggccaggggggccggagccgggctgggttgatcctcggacctggctaagcttccaaggccctcctggagggccaggaatcgggccgggggttgggccaggctctgaggtgtgggggattcccccatgccccccgccgtatgagttctgtggggggatggcgtactgtgggccccaggttggagtggggctagtgccccaaggcggcttggagacctctcagcctgagggcgaagcaggagtcggggtggagagcaactccgatggggcctccccggagccctgcaccgtcacccctggtgccgtgaagctggagaaggagaagctggagcaaaacccggaggagtcccaggacatcaaagctctgcagaaagaactcgagcaatttgccaagctcctgaagcagaagaggatcaccctgggatatacacaggccgatgtggggctcaccctgggggttctatttgggaaggtattcagccaaacgaccatctgccgctttgaggctctgcagcttagcttcaagaacatgtgtaagctgcggcccttgctgcagaagtgggtggaggaagctgacaacaatgaaaatcttcaggagatatgcaaagcagaaaccctcgtgcaggcccgaaagagaaagcgaaccagtatcgagaaccgagtgagaggcaacctggagaatttgttcctgcagtgcccgaaacccacactgcagcagatcagccacatcgcccagcagcttgggctcgagaaggatgtggtccgagtgtggttctgtaaccggcgccagaagggcaagcgatcaagcagcgactatgcacaacgagaggattttgaggctgctgggtctcctttctcagggggaccagtgtcctttcctctggccccagggccccattttggtaccccaggctatgggagccctcacttcactgcactgtactcctcggtccctttccctgagggggaagcctttccccctgtctctgtcaccactctgggctctcccatgcattcaaactgaggtgcctgcccttctaggaatgggggacagggggaggggaggagctagggaaagaaaacctggagtttgtgccagggtttttgggattaagttcttcattcactaaggaaggaattgggaacacaaagggtgggggcaggggagtttggggcaactggttggagggaaggtgaagttcaatgatgctcttgattttaatcccacatcatgtatcacttttttcttaaataaagaagcttgggacacagtagatagacacactta

SEQ ID NO: 168456 - DNA, 1420 bp, Homo sapiens; identical to SEQ ID NO: 168455
  Payload ID: 13160
  Gene Symbol: POU5F1
  Gene Name: POU class 5 homeobox 1
  Uniprot ID: Q01860
  ENST ID: ENST00000433063
  CDS Start-End: 74-1156

SEQ ID NO: 168457 - DNA, 1163 bp, Homo sapiens; identical to SEQ ID NO: 168449
  Payload ID: 13160
  Gene Symbol: POU5F1
  Gene Name: POU class 5 homeobox 1
  Uniprot ID: Q01860
  ENST ID: ENST00000433348
  CDS Start-End: 102-899

SEQ ID NO: 168458 - DNA, 1163 bp, Homo sapiens; identical to SEQ ID NO: 168449
  Payload ID: 13160
  Gene Symbol: POU5F1
  Gene Name: POU class 5 homeobox 1
  Uniprot ID: Q01860
  ENST ID: ENST00000419095
  CDS Start-End: 102-899

SEQ ID NO: 168459 - DNA, 1723 bp, Homo sapiens
  Payload ID: 13160
  Gene Symbol: POU5F1
  Gene Name: POU class 5 homeobox 1
  ENST ID: ENST00000471529
  CDS Start-End: 975-1469
ctggggagagtatatactgaatttagcttctgagacatgatgctcttcctttttaattaacccagaacttagcagcttatctatttctctaatctcaaaacatccttaaactgggggtgatacttgagtgagagaattttgcaggtattaaatgaactatcttcttttttttttttctttgagacagagtcttgctctgtcacccaggctggagtgcagtggcgtgatctcagctcactgcaacctccgcctcccgggttcaagtgattctcctgcctcagcctcctgagtagctgggattacaggtgcgtgccaccgtgcccagctaatttttgtgtttttagtagagacggggtttcaccatgttggccatgctggtcttgaactcctgacctcgtgatctgcccacctcggcctcccaaagtgctggaattataggcgtgagccaccgcgcccagcaaagaacttctaaccttcataacctgacaggtgttctcgaggccagggtctctctttctgtcctttcacgatgctctgcatcccttggatgtgccagtttctgggggaagagtagtcctttgttacatgcatgagtcagtgaacagggaatgggtgaatgacatttgtgggtaggttatttctagaagttaggtgggcagcttggaaggcagaggcacttctacagactattccttggggccacacgtaggttcttgaatcccgaatggaaaggggagattgataactggtgtgtttatgttcttacaagtcttctgccttttaaaatccagtcccaggacatcaaagctctgcagaaagaactcgagcaatttgccaagctcctgaagcagaagaggatcaccctgggatatacacaggccgatgtggggctcaccctgggggttctatttgggaaggtattcagccaaacgaccatctgccgctttgaggctctgcagcttagcttcaagaacatgtgtaagctgcggcccttgctgcagaagtgggtggaggaagctgacaacaatgaaaatcttcaggagatatgcaaagcagaaaccctcgtgcaggcccgaaagagaaagcgaaccagtatcgagaaccgagtgagaggcaacctggagaatttgttcctgcagtgcccgaaacccacactgcagcagatcagccacatcgcccagcagcttgggctcgagaaggatgtggtccgagtgtggttctgtaaccggcgccagaagggcaagcgatcaagcagcgactatgcacaacgagaggattttgaggctgctgggtctcctttctcagggggaccagtgtcctttcctctggccccagggccccattttggtaccccaggctatgggagccctcacttcactgcactgtactcctcggtccctttccctgagggggaagcctttccccctgtctccgtcaccactctgggctctcccatgcattcaaactgaggtgcctgcccttctaggaatgggggacagggggaggggaggagctagggaaagaaaacctggagtttgtgccagggtttttgggattaagttcttcattcactaaggaaggaattgggaacacaaagggtgggggcaggggagtttggggcaactggttggagggaaggtgaagttcaatgatgctcttgattttaatcccacatcatgtatcacttttttcttaaataaagaagcctgggacacagtagata

SEQ ID NO: 168460 - DNA, 1233 bp, Homo sapiens
  Payload ID: 13160
  Gene Symbol: POU5F1
  Gene Name: POU class 5 homeobox 1
  ENST ID: ENST00000512818
  CDS Start-End: 489-983
ctggggagagtatatactgaatttagcttctgagacatgatgctcttcctttttaattaacccagaacttagcagcttatctatttctctaatctcaaaacatccttaaactgggggtgatacttgagtgagagaattttgcaggtattaaatgaactatcttcttttttttttttctttgagacagagtcttgctctgtcacccaggctggagtgcagtggcgtgatctcagctcactgcaacctccgcctcccgggttcaagtgattctcctgcctcagcctcctgagtagctgggattacagtcccaggacatcaaagctctgcagaaagaactcgagcaatttgccaagctcctgaagcagaagaggatcaccctgggatatacacaggccgatgtggggctcaccctgggggttctatttgggaaggtattcagccaaacgaccatctgccgctttgaggctctgcagcttagcttcaagaacatgtgtaagctgcggcccttgctgcagaagtgggtggaggaagctgacaacaatgaaaatcttcaggagatatgcaaagcagaaaccctcgtgcaggcccgaaagagaaagcgaaccagtatcgagaaccgagtgagaggcaacctggagaatttgttcctgcagtgcccgaaacccacactgcagcagatcagccacatcgcccagcagcttgggctcgagaaggatgtggtccgagtgtggttctgtaaccggcgccagaagggcaagcgatcaagcagcgactatgcacaacgagaggattttgaggctgctgggtctcctttctcagggggaccagtgtcctttcctctggccccagggccccattttggtaccccaggctatgggagccctcacttcactgcactgtactcctcggtccctttccctgagggggaagcctttccccctgtctccgtcaccactctgggctctcccatgcattcaaactgaggtgcctgcccttctaggaatgggggacagggggaggggaggagctagggaaagaaaacctggagtttgtgccagggtttttgggattaagttcttcattcactaaggaaggaattgggaacacaaagggtgggggcaggggagtttggggcaactggttggagggaaggtgaagttcaatgatgctcttgattttaatcccacatcatgtatcacttttttcttaaataaagaagcctgggacacagta

SEQ ID NO: 168461 - DNA, 1084 bp, Homo sapiens
  Payload ID: 13160
  Gene Symbol: POU5F1
  Gene Name: POU class 5 homeobox 1
  ENST ID: ENST00000549294
  CDS Start-End: 2-562
catggcgggacacctggcttcagattttgccttctcgccccctccaggtggtggaggtgatgggccaggggggccggagccgggctgggttgatcctcggacctggctaagcttccaaggccctcctggagggccaggaatcgggccgggggttgggccaggctctgaggtgtgggggattcccccatgccccccgccgtatgagttctgtggggggatggcgtactgtgggccccaggttggagtggggctagtgccccaaggcggcttggagacctctcagcctgagggcgaagcaggagtcggggtggagagcaactccgatggggcctccccggagccctgcaccgtcacccctggtgccgtgaagctggagaaggagaagctggagcaaaacccggaggagtcccaggacatcaaagctctgcagaaagaactcgagcaatttgccaagctcctgaagcagaagaggatcaccctgggatatacacaggccgatgtggctcaccctgggggttctatttgggaaggtattcagccaaacgaccatctgccgctttgaggctctgcagcttagcttcaagaacatgtgtaagctgcggcccttgctgcagaagtgggtggaggaagctgacaacaatgaaaatcttcaggagatatgcaaagcagaaaccctcgtgcaggcccgaaagagaaagcgaaccagtatcgagaaccgagtgagaggcaacctggagaatttgttcctgcagtgcccgaaacccacactgcagcagatcagccacatcgcccagcagcttgggctcgagaaggatgtggtccgagtgtggttctgtaaccggcgccagaagggcaagcgatcaagcagcgactatgcacaacgagaggattttgaggctgctgggtctcctttctcagggggaccagtgtcctttcctctggccccagggccccattttggtaccccaggctatgggagccctcacttcactgcactgtactcctcggtccctttccctgagggggaagcctttccccctgtctctgtcaccactctgggctctcccatgcattcaaactgagg

SEQ ID NO: 168462 - DNA, 1084 bp, Homo sapiens; identical to SEQ ID NO: 168461
  Payload ID: 13160
  Gene Symbol: POU5F1
  Gene Name: POU class 5 homeobox 1
  ENST ID: ENST00000548682
  CDS Start-End: 2-562

SEQ ID NO: 168463 - DNA, 1084 bp, Homo sapiens
  Payload ID: 13160
  Gene Symbol: POU5F1
  Gene Name: POU class 5 homeobox 1
  ENST ID: ENST00000548685
  CDS Start-End: 2-562
catggcgggacacctggcttcggatttcgccttctcgccccctccaggtggtggaggtgatgggccaggggggccggagccgggctgggttgatcctcggacctggctaagcttccaaggccctcctggagggccaggaatcgggccgggggttgggccaggctctgaggtgtgggggattcccccatgccccccgccgtatgagttctgtggggggatggcgtactgtgggccccaggttggagtggggctagtgccccaaggcggcttggagacctctcagcctgagggcgaagcaggagtcggggtggagagcaactccgatggggcctccccggagccctgcaccgtcacccctggtgccgtgaagctggagaaggagaagctggagcaaaacccggaggagtcccaggacatcaaagctctgcagaaagaactcgagcaatttgccaagctcctgaagcagaagaggatcaccctgggatatacacaggccgatgtggctcaccctgggggttctatttgggaaggtattcagccaaacgaccatctgccgctttgaggctctgcagcttagcttcaagaacatgtgtaagctgcggcccttgctgcagaagtgggtggaggaagctgacaacaatgaaaatcttcaggagatatgcaaagcagaaaccctcgtgcaggcccgaaagagaaagcgaaccagtatcgagaaccgagtgagaggcaacctggagaatttgttcctgcagtgcccgaaacccacactgcagcagatcagccacatcgcccagcagcttgggctcgagaaggatgtggtccgagtgtggttctgtaaccggcgccagaagggcaagcgatcaagcagcgactatgcacaacgagaggattttgaggctgctgggtctcctttctcagggggaccagtgtcctttcctctggccccagggccccattttggtaccccaggctatgggagccctcacttcactgcactgtactcctcggtccctttccctgagggggaagcctttccccctgtctctgtcaccactctgggctctcccatgcattcaaactgagg

SEQ ID NO: 168464 - DNA, 1084 bp, Homo sapiens
  Payload ID: 13160
  Gene Symbol: POU5F1
  Gene Name: POU class 5 homeobox 1
  ENST ID: ENST00000550521
  CDS Start-End: 2-562
catggcgggacacctggcttcagatttcgccttctcgccccctccaggtggtggaggtgatgggccaggggggccggagccgggctgggttgatcctcggacctggctaagcttccaaggccctcctggagggccaggaatcgggccgggggttgggccaggctctgaggtgtgggggattcccccatgccccccgccgtatgagttctgtggggggatggcgtactgtgggccccaggttggagtggggctagtgccccaaggcggcttggagacctctcagcctgagggtgaagcaggagtcggggtggagagcaactccgatggggcctccccggagccctgcaccgtcacccctggtgccgtgaagctggagaaggagaagctggagcaaaacccggaggagtcccaggacatcaaagctctgcagaaagaactcgagcaatttgccaagctcctgaagcagaagaggatcaccctgggatatacacaggccgatgtggctcaccctgggggttctatttgggaaggtattcagccaaacgaccatctgccgctttgaggctctgcagcttagcttcaagaacatgtgtaagctgcggcccttgctgcagaagtgggtggaggaagctgacaacaatgaaaatcttcaggagatatgcaaagcagaaaccctcgtgcaggcccgaaagagaaagcgaaccagtatcgagaaccgagtgagaggcaacctggagaatttgttcctgcagtgcccgaaacccacactgcagcagatcagccacatcgcccagcagcttgggctcgagaaggatgtggtccgagtgtggttctgtaaccggcgccagaagggcaagcgatcaagcagcgactatgcacaacgagaggattttgaggctgctgggtctcctttctcagggggaccagtgtcctttcctctggccccagggccccattttggtaccccaggctatgggagccctcacttcactgcactgtactcctcggtccctttccctgagggggaagcctttccccctgtctctgtcaccactctgggctctcccatgcattcaaactgagg

SEQ ID NO: 168465 - DNA, 1084 bp, Homo sapiens; identical to SEQ ID NO: 168463
  Payload ID: 13160
  Gene Symbol: POU5F1
  Gene Name: POU class 5 homeobox 1
  ENST ID: ENST00000550572
  CDS Start-End: 2-562

SEQ ID NO: 168466 - DNA, 1084 bp, Homo sapiens; identical to SEQ ID NO: 168464
  Payload ID: 13160
  Gene Symbol: POU5F1
  Gene Name: POU class 5 homeobox 1
  ENST ID: ENST00000547234
  CDS Start-End: 2-562

SEQ ID NO: 168467 - DNA, 2276 bp, Homo sapiens
  Payload ID: 13160
  Gene Symbol: POU5F1
  Gene Name: POU class 5 homeobox 1
  ENST ID: ENST00000513407
  CDS Start-End: 1532-2026
ggaaaaaaggaaagtgcacttggaagagatccaagtgggcaacttgaagaacaagtgccaaatagcacttctgtcatgctggatgtcagggctctttgtccactttgtatagccgctggcttatagaaggtgctcgataaatctcttgaatttaaaaatcaattaggatgcctctatagtgaaaaagatacagtaaagatgagggataatcaatttaaaaaatgagtaagtacacacaaagcactttatccattcttatgacacctgttacttttttgctgtgtttgtgtgtatgcatgccatgttatagtttgtgggaccctcaaagcaagctggggagagtatatactgaatttagcttctgagacatgatgctcttcctttttaattaacccagaacttagcagcttatctatttctctaatctcaaaacatccttaaactgggggtgatacttgagtgagagaattttgcaggtattaaatgaactatcttcttttttttttttctttgagacagagtcttgctctgtcacccaggctggagtgcagtggcgtgatctcagctcactgcaacctccgcctcccgggttcaagtgattctcctgcctcagcctcctgagtagctgggattacaggtgcgtgccaccgtgcccagctaatttttgtgtttttagtagagacggggtttcaccatgttggccatgctggtcttgaactcctgacctcgtgatctgcccacctcggcctcccaaagtgctggaattataggcgtgagccaccgcgcccagcaaagaacttctaaccttcataacctgacaggtgttctcgaggccagggtctctctttctgtcctttcacgatgctctgcatcccttggatgtgccagtttctgggggaagagtagtcctttgttacatgcatgagtcagtgaacagggaatgggtgaatgacatttgtgggtaggttatttctagaagttaggtgggcagcttggaaggcagaggcacttctacagactattccttggggccacacgtaggttcttgaatcccgaatggaaaggggagattgataactggtgtgtttatgttcttacaagtcttctgccttttaaaatccagtcccaggacatcaaagctctgcagaaagaactcgagcaatttgccaagctcctgaagcagaagaggatcaccctgggatatacacaggccgatgtggggctcaccctgggggttctatttggtgggttcccctctgcagattctgaccgcatctcccctctaaggagtatccctgaacctagtggggaggggcaggggcagactaccctcacccatgaagaggagtagggagagggagaagatgctttgagctccctctgggaagaggtggtaagcttggatctcagggtcacaagggccctgcgtgctccctcactttgcttctcttttgactggcctcccccagggaaggtattcagccaaacgaccatctgccgctttgaggctctgcagcttagcttcaagaacatgtgtaagctgcggcccttgctgcagaagtgggtggaggaagctgacaacaatgaaaatcttcaggagatatgcaaagcagaaaccctcgtgcaggcccgaaagagaaagcgaaccagtatcgagaaccgagtgagaggcaacctggagaatttgttcctgcagtgcccgaaacccacactgcagcagatcagccacatcgcccagcagcttgggctcgagaaggatgtggtccgagtgtggttctgtaaccggcgccagaagggcaagcgatcaagcagcgactatgcacaacgagaggattttgaggctgctgggtctcctttctcagggggaccagtgtcctttcctctggccccagggccccattttggtaccccaggctatgggagccctcacttcactgcactgtactcctcggtccctttccctgagggggaagcctttccccctgtctccgtcaccactctgggctctcccatgcattcaaactgaggtgcctgcccttctaggaatgggggacagggggaggggaggagctagggaaagaaaacctggagtttgtgccagggtttttgggattaagttcttcattcactaaggaaggaattgggaacacaaagggtgggggcaggggagtttggggcaactggttggagggaaggtgaagttcaatgatgctcttgattttaatcccacatcatgtatcacttttttcttaaataaagaagcctgggacacagta

SEQ ID NO: 168468 - DNA, 1236 bp, Homo sapiens
  Payload ID: 13160
  Gene Symbol: POU5F1
  Gene Name: POU class 5 homeobox 1
  ENST ID: ENST00000606567
  CDS Start-End: 411-983
ctggggagagtatatactgaatttagcttctgagacatgatgctcttcctttttaattaacccagaacttagcagcttatctatttctctaatctcaaaacatccttaaactgggggtgatacttgagtgagagaattttgcaggtattaaatgaactatcttcttttttttttttctttgagacagagtcttgctctgtcacccaggctggagtgcagtggcgtgatctcagctcactgcaacctccgcctcccgggttcaagtgattctcctgcctcagcctcctgagtagctgggattacagtcccaggacatcaaagctctgcagaaagaactcgagcaatttgccaagctcctgaagcagaagaggatcaccctgggatatacacaggccgatgtggggctcaccctgggggttctatttgggaaggtattcagccaaacgaccatctgccgctttgaggctctgcagcttagcttcaagaacatgtgtaagctgcggcccttgctgcagaagtgggtggaggaagctgacaacaatgaaaatcttcaggagatatgcaaagcagaaaccctcgtgcaggcccgaaagagaaagcgaaccagtatcgagaaccgagtgagaggcaacctggagaatttgttcctgcagtgcccgaaacccacactgcagcagatcagccacatcgcccagcagcttgggctcgagaaggatgtggtccgagtgtggttctgtaaccggcgccagaagggcaagcgatcaagcagcgactatgcacaacgagaggattttgaggctgctgggtctcctttctcagggggaccagtgtcctttcctctggccccagggccccattttggtaccccaggctatgggagccctcacttcactgcactgtactcctcggtccctttccctgagggggaagcctttccccctgtctccgtcaccactctgggctctcccatgcattcaaactgaggtgcctgcccttctaggaatgggggacagggggaggggaggagctagggaaagaaaacctggagtttgtgccagggtttttgggattaagttcttcattcactaaggaaggaattgggaacacaaagggtgggggcaggggagtttggggcaactggttggagggaaggtgaagttcaatgatgctcttgattttaatcccacatcatgtatcacttttttcttaaataaagaagcctgggacacagtagat

SEQ ID NO: 168469 - DNA, 1084 bp, Homo sapiens
  Payload ID: 13160
  Gene Symbol: POU5F1
  Gene Name: POU class 5 homeobox 1
  ENST ID: ENST00000619340
  CDS Start-End: 2-562
catggcgggacacctggcttcggatttcgccttctcgccccctccaggtggtggaggtgatgggccaggggggccggagccgggctgggttgatcctcggacctggctaagcttccaaggccctcctggagggccaggaatcgggccgggggttgggccaggctctgaggtgtgggggattcccccatgccccccgccgtatgagttctgtggggggatggcgtactgtgggccccaggttggagtggggctagtgccccaaggcggcttggagacctctcagcctgagggcgaagcaggagtcggggtggagagcaactccgatggggcctccccggagccctgcaccgtcacccctggtgccgtgaagctggagaaggagaagctggagcaaaacccggaggagtcccaggacatcaaagctctgcagaaagaactcgagcaatttgccaagctcctgaagcagaagaggatcaccctgggatatacacaggccgatgtggctcaccctgggggttctatttgggaaggtattcagccaaacgaccatctgccgctttgaggctctgcagcttagcttcaagaacatgtgtaagctgcggcccttgctgcagaagtgggtggaggaagctgacaacaatgaaaatcttcaggagatatgcaaagcagaaaccctcgtgcaggcccgaaagagaaagcgaaccagtatcgagaaccgagtgagaggcaacctggagaatttgttcctgcagtgcccgaaacccacactgcagcagatcagccacatcgcccagcagcttgggctcgagaaggatgtggtccgagtgtggttctgtaaccggcgccagaagggcaagcgatcaagcagcgactatgcacaacgagaggattttgaggctgctgggtctcctttctcagggggaccagtgtcctttcctctggccccagggccccattttggtaccccaggctatgggagccctcacttcactgcactgtactcctcggtccctttccctgagggggaagcctttccccctgtctccgtcaccactctgggctctcccatgcattcaaactgagg

SEQ ID NO: 168470 - DNA, 1578 bp, Homo sapiens
  Payload ID: 13160
  Gene Symbol: POU5F1
  Gene Name: POU class 5 homeobox 1
  ENST ID: ENST00000620031
  CDS Start-End: 743-1315
ggaaaaaaggaaagtgcacttggaagagatccaagtgggcaacttgaagaacaagtgccaaatagcacttctgtcatgctggatgtcagggctctttgtccactttgtatagccgctggcttatagaaggtgctcgataaatctcttgaatttaaaaatcaattaggatgcctctatagtgaaaaagatacagtaaagatgagggataatcaatttaaaaaatgagtaagtacacacaaagcactttatccattcttatgacacctgttacttttttgctgtgtttgtgtgtatgcatgccatgttatagtttgtgggaccctcaaagcaagctggggagagtatatactgaatttagcttctgagacatgatgctcttcctttttaattaacccagaacttagcagcttatctatttctctaatctcaaaacatccttaaactgggggtgatacttgagtgagagaattttgcaggtattaaatgaactatcttcttttttttttttctttgagacagagtcttgctctgtcacccaggctggagtgcagtggcgtgatctcagctcactgcaacctccgcctcccgggttcaagtgattctcctgcctcagcctcctgagtagctgggattacagtcccaggacatcaaagctctgcagaaagaactcgagcaatttgccaagctcctgaagcagaagaggatcaccctgggatatacacaggccgatgtggggctcaccctgggggttctatttgggaaggtattcagccaaacgaccatctgccgctttgaggctctgcagcttagcttcaagaacatgtgtaagctgcggcccttgctgcagaagtgggtggaggaagctgacaacaatgaaaatcttcaggagatatgcaaagcagaaaccctcgtgcaggcccgaaagagaaagcgaaccagtatcgagaaccgagtgagaggcaacctggagaatttgttcctgcagtgcccgaaacccacactgcagcagatcagccacatcgcccagcagcttgggctcgagaaggatgtggtccgagtgtggttctgtaaccggcgccagaagggcaagcgatcaagcagcgactatgcacaacgagaggattttgaggctgctgggtctcctttctcagggggaccagtgtcctttcctctggccccagggccccattttggtaccccaggctatgggagccctcacttcactgcactgtactcctcggtccctttccctgagggggaagcctttccccctgtctccgtcaccactctgggctctcccatgcattcaaactgaggtgcctgcccttctaggaatgggggacagggggaggggaggagctagggaaagaaaacctggagtttgtgccagggtttttgggattaagttcttcattcactaaggaaggaattgggaacacaaagggtgggggcaggggagtttggggcaactggttggagggaaggtgaagttcaatgatgctcttgattttaatcccacatcatgtatcacttttttcttaaataaagaagcctgggacacagtagatagacacactt

SEQ ID NO: 168471 - DNA, 5360 bp, Homo sapiens
  Payload ID: 13161
  Gene Symbol: POU5F1B
  Gene Name: POU class 5 homeobox 1B
  Uniprot ID: Q06416
  ENST ID: ENST00000465342
  CDS Start-End: 1158-2237
aactggcagcatggcatgatggaaatggaatagaatcaggaattgttttgtacctgtgtgtgtgtgactttggtgttctgactcagacacatatttgagaggtagagaggggagaagagggttgccacattatgtaacagaaaggagcccactgcttaaacacttaccttgtgccagacattgcactaggactttattacctgcaacccatcctgcaaaactgtgaagatttgatatgatcattctcattttatggttgagaaacaagggttaaggacattaaaaatttactcaatgtttaaacatttgcctgtcttattctaaagccccttctcttttcacaatccctttaagaaatggacatccaatatttgagtggcagaggcaaaaacatggcctaccagaaccattatgatagctttacaatatgcccaccaattatttgatagtcctcctgccaaatggtgaaggctaattaccctcctacagaatgtgactcacttctaatgaataaaatatggcacaagtaaaagtgtgcgatttcagagactaggtcataaagaacgcagtggcttcttccctgctctctctttcttaggtcattctctctgggtgaatccagctgacatgttgtgaggacactcaagcagctttatggaaaagcccacatggtgagcaactgaggcctcctaccaacagccaacaagaaaccggggcctttgccaacagccaagaaataagaatcagaaagaaggacacaccattccatagcacagaacacaagtagatggctcccatgaagaatctagcatcatggtatggcagaagcagaatggactcaggaatcatggtgcctacactggaatttcagatcggccactgacacaatggacacattattcaacatttccaaatcttggcattcttatccacaaagtgaagataataattgtcaattcacaggtgattatgatttaaagagattacttttgaagagttcctaacacattcagtcaacatttaatgatgcttcaggcactgtgttcattgctagtgagcgtatgacacacacagccatacggtcacagagctttcaatgaaaagtaacataattgctcatttcaccaggcccccggcttggggcgccttccttccccatggcgggacacctggcttcggatttcgccttctcgccccctccaggcggtgggggtgatgggccatggggggcggagccgggctgggttgatcctctgacctggctaagcttccaaggccctcctggagggccaggaatcgggccgggggttgggccaggctctgaggtgtgggggattcccccttgccccccgccgtatgagttatgtggggggatggcgtactgtgggcctcaggttggagtggggctagtgccccaaggcggcttggagacctctcagcctgagagcgaagcaggagtcggggtggagagcaactccaatggggcctccccggaaccctgcaccgtcccccctggtgccgtgaagctggagaaggagaagctagagcaaaacccggagaagtcccaggacatcaaagctctgcagaaagaactcgagcaatttgccaagctcctgaagcagaagaggatcaccctgggatatacacaggccgatgtggggctcatcctgggggttctatttgggaaggtgttcagccaaaagaccatctgccgctttgaggctctgcagcttagcttcaagaacatgtgtaagctgcggcccttgctgcagaagtgggtggaggaagctgacaacaatgaaaatcttcaggagatatgcaaagcagaaaccctcatgcaggcccgaaagagaaagcgaaccagtatcgagaaccgagtgagaggcaacctggagaatttgttcctgcagtgcccgaaacccacactgcagatcagccacatcgcccagcagcttgggctcgagaaggatgtggtccgagtgtggttctgtaaccggcgccagaagggcaagcgatcaagcagcgactatgcacaacgagaggattttgaggctgctgggtctcctttctcagggggaccagtgtcctttcctccggccccagggccccattttggtaccccaggctatgggagccctcacttcactgcactgtactcctcagtccctttccctgagggggaagtctttcccccagtctccgtcatcactctgggctctcccatgcattcaaactgaggtgcctgcccttctaggaatggggaacaggggaggggaggagctagggaaagagaacctggagtttgtggcagggcttttgggattaagttcttcattcactaaggaaggaattgggaacactaagggtgggggcaggggagtttggggcaactggttggagggaaggtgaagttcaatgatgctcttgattttaatcccacatcatgtatcacttttttcttaaataaagaagcctgggacacagtaaaaaaaaaaaaaaaagaaagaaaagaaaagtaacataattgagtaataattttttaagtgtggtaaaatgtgtggcacgtagtaggtattcaataaatacttgcttttttcctcctttttaccttttcctagagtgctacttgatggtagctgtagtttttcttcaagacatcctatttgtcctgatacaaaacctcttttgaccgctaacggcatagttcggccctcaccattccctcacatattccacaaaaatgtgagcattaaccattccccatgatacagataattcattttttaatttaattttttaaaattttatttatttacttatttattttgagaccaggttatgagactggctaatttttgtatttttggtggagatggggttttgccatattgtctaggctggtctcaaactcctgagctcaagggatcctcctgcctgggcctcccaaagtactgggattacaggcatgagccattgcacctggcccggataattttttttctttttttgaggtagtgccttcctttatagctcaggctggagtgcagtggtgtgatctcggctcactgcaacctctgcctcccaggttcaagtaattctcctgcctcaacctcctgagtagctgggattacaggcgcccactaccacgcccggctaatttttgtatttttagtagagatggggtttcaccatgttggccaggctggtctcgaactcttgacctcaggtgatctgcctgccttggcctcccaaagtattgggattgtaggcgtgaaccaccacgcccggccctgaaaattcatttttaaaagaacatcatatctaccttaaatgcattaagatttcacattagactcattattcatagtgaacattaggaacttaagtccactcagtaataatgcacctattcatgactcttgattcaaagatgtgcacctatttaccctggaccagctccttggaaggacatgaaatagagggtaataatcacatctttccaaatttgctatgaaactgcatcgccaaaaactgagactcattttccgattgatgaatcaaatgacaacaaaatctccagggcattctgaaacccaacagggattaatgattaggcataccagtggtagttaggagacttgcccaaatttccagttttctgcagatggcatctaagttagaagactgtcataaatttattcatggcttggctttctgctatttgctcattggtgacacttttatatacaatggtgtttctatggctaggaaatcccagtggagatcaagaaacctgggttctacaaactaatggggtgacctttgattagtcctaactcccttcctaagcctcagtttctttagacatgaaatgaaagcaatggattacattgccttagactttttcctagatcgaaaatgtgataattgtgcctttccaacaataattgataccactagtgaacattctttcttaagcacatctattaaggacttcatttatattatttttctaatctttaagcaaactctgagataagtgactatgatgtttattccataggtgcaaaagatttgtcaagtaactctccaaagtaaaagagagggctggagtttagactcatgactgttctgctctaacccaagtgattctggatcccagactccccaaatgacaagttattccagaaatactcagaaaaaggagggtgccgtatgtcgcacatggaaaaatagaaaaagtaacagaatccagccaaaggattcccagaaattgaggctcttctgttcttggcatttgcatctttggatgtgtgttttttacattgctctatgcaaaaggtatgtttcaatgtgattttttttttctcctcccatcctaccactgaggaatcacagggaatagactcgacacctgtgaactcaatttaccctagaaaaatgtttcagtcacacttaaaataaaaagggcatcaattagaataagaaggacactttgttgcctaggaggactgaacttttttggacctggggcaccttatcagcttcatttttagctctagtataatcaaaaggtcaggatctccactggaccttagaaattttttatttttcgataagattttctgaatgcctgccatgtgtgaagggaaatgcctggacttctatgcatatgtatttcattgtctccccacatctacccaggaagacaggcacagtgagccttgcatgttgtagataaggaagctaagtctcaaagacagagaaggaatttctcaaggtcacactgtaagtaaaaggcaaaggagggattagaaccctggatcctctttattacaccaagcctgcctcacaaggatgccaatctctcatcacttactgggaaagacccactcctcccattcatgataaggtaatgctatccaataaaaaccccaaagcaggcataaaatatgaagtagcgaaactcaggcaggcagaaagcagagtggtttagacatggctgctgtctgcagcagggagaagttcctggcaacatgaccctgaaaataacaatgagtgactgaagctaagaaggaagaatcttccaaggactctgaaactagatattttctcaagccccacctatggacaaacacaaatcatggagaaataaagatgccagtctccaggaagcaccagagttaaattcattctggaatttaactcctggcattaacagttagctgggagattaaaacaaaccaacacacaaacacaaaaaaataatcagtggaaaaaagttaaaaaaaatcaatggacagtggtttcatagcagatggcaaagaggaatattaaaagctgtattttatttggaactc

SEQ ID NO: 168472 - DNA, 2474 bp, Homo sapiens
  Payload ID: 13162
  Gene Symbol: POU6F1
  Gene Name: POU class 6 homeobox 1
  Uniprot ID: Q14863
  ENST ID: ENST00000333640
  CDS Start-End: 483-1388
aggatcaagggaatcgtggctgcctgccccactgagcccactgccccaaccccctctccttcttgtgccagatcccttgggattggagccgctgtgagcagtggctaggcatttgagcacctctgtctctgccttgctccatagcagctgctgtgctgaacaccgctcttccggcaccggtacaagctgccgcaccagtacaggcctcctcgacggcccaaccccggccaccagcccagccccagacgctgttccagacccagccgctgctgcagaccacacctgccatcctcccgcagcccactgctgccaccgctgctgcccctacccccaagccagtggacacccccccacagatcaccgtccagcctgcaggcttcgcatttagcccaggaatcatcagtgctgcttccctcgggggacagacccagatcctggggtccctcactacagctccagtcattaccagcgccattcccagcatgccagggatcagcagtcagatcctcaccaatgctcagggacaggttattggaacccttccatgggtagtgaactcagctagtgtggcggccccagcaccagcccaaagcctgcaggtccaggccgtgaccccccagctgttgttgaacgcccagggccaggtgattgcgaccctggctagcagccccctgcctccacctgtggctgtccggaagccaagcacacctgagtcccctgctaagagtgaggtgcagcccatccagcccacaccaaccgtgccccagcctgctgtggtcattgccagcccagctccagccgccaagccatctgcctctgctcctatcccaattacctgctcagagacccccaccgtcagccagttggtgtccaagccacatactccaagtctggatgaggatgggatcaacttagaagagatccgggagtttgccaagaactttaagatccggcggctctcgctgggccttacacagacccaggtgggtcaggctctgactgcaacggaaggtccagcctacagccagtcagccatctgccggttcgagaagctagacatcacacccaagagtgcccagaagctaaagccggtgctggaaaagtggctaaacgaagctgaactgcggaaccaggaaggccagcagaacctgatggagtttgtgggaggcgagccctccaagaaacgcaaacgccgcacctccttcaccccccaggccatagaggctctcaatgcctattttgagaagaacccactgcccacaggccaggagatcactgaaattgctaaggagctcaactacgaccgtgaggtagtgcgggtctggttctgcaatcggcgccagacgctcaagaacaccagcaagctgaacgtctttcagatcccttagggctcagcccctggccctgtgttctagcactttgtccatttcccgtggcatccggctgcagccactgccatgacagcacctgtcattttgccacgtgcagctgtgctcaccccaggtcatcagactccaccgtgtgcatgtgcatcaatgtccctcttttctcccacacatctcacatcatggggaggccagagggggccacacgagagctccaggctctgggctggtcactccgaagaagaggatttgtgacgtcacttagagaagcaccttgctagcatggtttctgaagggtgaattctggtggggaaccagaaactccctgtctttggggcagggctaaagcagctcctaaggaccactggccattagctcttgcttttgatggcattctctttccaccttgtcttctcctttgctcctctgtgttagtgtggcaggtatgacaactcatccagtggaaacacagcctcacactgcccttccgccccccacactttgcctgcaggtgcaccgaaaggacctgggagataaaattcaaaaaagtgtgatgtgctgctcagaaggtcagactccatgtctgccttgacctcaaggtcagaaggttcccaaacccctggggctggaacatgggatctcctcttccacctcttcctggttcctttgcggggaaaattgcactaaaacagaaccttttcttaatccatgttggaaggaagcaacagtgaactctacctgttctggagttctcctgggtctgcagaaggttgggaatttagaaaataaggctgttctttcatattttaatttaatctctgtcaatggccatccctcccacaaaaaaacgtgggttaagagaacttgcagactggatatgcaagcaaacgggcaactctggagaaaaataaggaaaggaatgctgactttctctttctttctcttgtccccacacccattcccaacccaatactggggccttctcaaaaggagcaaattaaacaataaaccagacagcaaggccctgggggaaaggacaacatcctgaaataaatgatggagcccaggaaggtctcttgtggaagttga

SEQ ID NO: 168473 - DNA, 5157 bp, Homo sapiens
  Payload ID: 13162
  Gene Symbol: POU6F1
  Gene Name: POU class 6 homeobox 1
  Uniprot ID: Q14863
  ENST ID: ENST00000389243
  CDS Start-End: 941-1846
aatcggtggccgccagacacccgcggcgaaggcggctcgggctcgggctccggatgtgctaggtgtgggccggcccccacccgaccctgacaagtgaccatggatcctggagccgggtcagagacatctctgactgtcaatgagcaggtcatcgtgatgtcaggtcatgagaccatccgagtgctggaagtcggagtggatgcccaactccctgctgaggaagagagcaaaggactggagggtgtggccgccgagggctcccagagcggagaccctgctgaagccagtcaagctgctggtgaagctgggccagacaacctgggctcctctgcagaggcaactgtgaagtcacccccggggatccctccgagccctgccactgccattgccaccttcagccaagccccaagccagcctcaggcatcgcagaccctgacgccactggctgtacaagctgccccccagtattgcaggtcaagtggctggtcagcaggggctggccgtgtggacaattcctacagcaactgtggctgccctcccaggactgaccgctgcttctcctacggggggagtgttcaagccacctttagccggtctccaagcagctgctgtgctgaacaccgctcttccggcaccggtacaagctgccgcaccagtacaggcctcctcgacggcccaaccccggccaccagcccagccccagacgctgttccagacccagccgctgctgcagaccacacctgccatcctcccgcagcccactgctgccaccgctgctgcccctacccccaagccagtggacacccccccacagatcaccgtccagcctgcaggcttcgcatttagcccaggaatcatcagtgctgcttccctcgggggacagacccagatcctggggtccctcactacagctccagtcattaccagcgccattcccagcatgccagggatcagcagtcagatcctcaccaatgctcagggacaggttattggaacccttccatgggtagtgaactcagctagtgtggcggccccagcaccagcccaaagcctgcaggtccaggccgtgaccccccagctgttgttgaacgcccagggccaggtgattgcgaccctggctagcagccccctgcctccacctgtggctgtccggaagccaagcacacctgagtcccctgctaagagtgaggtgcagcccatccagcccacaccaaccgtgccccagcctgctgtggtcattgccagcccagctccagccgccaagccatctgcctctgctcctatcccaattacctgctcagagacccccaccgtcagccagttggtgtccaagccacatactccaagtctggatgaggatgggatcaacttagaagagatccgggagtttgccaagaactttaagatccggcggctctcgctgggccttacacagacccaggtgggtcaggctctgactgcaacggaaggtccagcctacagccagtcagccatctgccggttcgagaagctagacatcacacccaagagtgcccagaagctaaagccggtgctggaaaagtggctaaacgaagctgaactgcggaaccaggaaggccagcagaacctgatggagtttgtgggaggcgagccctccaagaaacgcaaacgccgcacctccttcaccccccaggccatagaggctctcaatgcctattttgagaagaacccactgcccacaggccaggagatcactgaaattgctaaggagctcaactacgaccgtgaggtagtgcgggtctggttctgcaatcggcgccagacgctcaagaacaccagcaagctgaacgtctttcagatcccttagggctcagcccctggccctgtgttctagcactttgtccatttcccgtggcatccggctgcagccactgccatgacagcacctgtcattttgccacgtgcagctgtgctcaccccaggtcatcagactccaccgtgtgcatgtgcatcaatgtccctcttttctcccacacatctcacatcatggggaggccagagggggccacacgagagctccaggctctgggctggtcactccgaagaagaggatttgtgacgtcacttagagaagcaccttgctagcatggtttctgaagggtgaattctggtggggaaccagaaactccctgtctttggggcagggctaaagcagctcctaaggaccactggccattagctcttgcttttgatggcattctctttccaccttgtcttctcctttgctcctctgtgttagtgtggcaggtatgacaactcatccagtggaaacacagcctcacactgcccttccgccccccacactttgcctgcaggtgcaccgaaaggacctgggagataaaattcaaaaaagtgtgatgtgctgctcagaaggtcagactccatgtctgccttgacctcaaggtcagaaggttcccaaacccctggggctggaacatgggatctcctcttccacctcttcctggttcctttgcggggaaaattgcactaaaacagaaccttttcttaatccatgttggaaggaagcaacagtgaactctacctgttctggagttctcctgggtctgcagaaggttgggaatttagaaaataaggctgttctttcatattttaatttaatctctgtcaatggccatccctcccacaaaaaaacgtgggttaagagaacttgcagactggatatgcaagcaaacgggcaactctggagaaaaataaggaaaggaatgctgactttctctttctttctcttgtccccacacccattcccaacccaatactggggccttctcaaaaggagcaaattaaacaataaaccagacagcaaggccctgggggaaaggacaacatcctgaaataaatgatggagcccaggaaggtctcttgtggaagttgacttaactctaattttctttgtaactttaagccttggatacgggaggagaaatctcattttgtcgagtctcagaccatgtctgtgtgtaagcaatccccacagtgtcctctgagccaaggacacccccagatcagattgagttttgcttctagacggggtagctatggtaccttgggggttagctctcatccaagctgttaagtgagtttccagcctcactgtggctggaaagcccctaaaattcagtatgtaactccaggaagtcaggagagaactgagatttgcctagatgaccacaggcttgcggtgtagattatccctaaagggccccaagtcacgggggtcaaccacccctgtcttcagtactcttatccttacagaggctggtctctaacagctgcctccagtggacctcccatgatccaccctgagggaaggaccgtcagctggggacacatcaccacctctgtcagtcactggtgcagagccacctcctagcctagcttcctctggtgtcctgtttcctttcccacttactgttggtgcctcccaggccctgcagtgccagcgtggccaccctcttggtagcctggccagtaagaggaggacagttgtgtgctgaattagcacacgcacgtgcagcgcgcacagacgcgcgcacacacacacacatacacgctctgctgcatttggacaaaccatgcctgccagagtgtagcagaggtgaggaagcaggtgggcagcttgcctgacccagcttttcaggagagcgtgtctccaacagagagtctccacactctagttcagggttatcgacctgcctcaatgagatgacagactcatttgggaggggtgttgcaaacaagttttcagtgagaatagttaagttccagagcttgtaaaggattcagtgactgacacttcagtaaattaggccaggcacattggcttatgcctgtaattccaacactttggaaggccgaggtgggcggatcatttgaggtctggagttcgagaccagcctgaccaacatggtgaaaccccgtctctactaaaaatacaaaaattagccaggtgtggtagtgcacatctgtaatcccagctacttgggaggtggaggcaggagaattgcttgaaccctggaggttgcaatgagctgagatcacactacttcactccagcctgggtgacagagcaagactcggtctcaaacaaacaaaaacttatggcgatgcaggttttcatgctcagacgcttgcattcaggtatgctttcttttttgagagagacaaatgggtcacagctggcaccctgggaatagcacataatccagggtgtgtctgtggtggtggacgtgcaggggaacaccatctgtcctgtgtcatgatgggaaaacaatcatgaaccactggtctaaattaggcctggccatgctttctcagcccctccctcatttaaatttgtcttcccaaagctgagctaaaactaaaccatttctcctctgctggaatgatggattggtcattcagaggaacaataccaggggtgggaggtttgcaggctgagttccccaggcatgggggtgcagggtgtccctgaggtttacccaaagcacagctcgctggcctgtgacctctgcccttcctcccacagtgtaagaccccccaggaagcagctggggcctgaacctctcacctaggaggtaggtttattttattttttgttagcatcaggctctgaaggagttggtatacattttgttttgaaaacatcttctggacttacaccagagcttagtgtcgtctttactatggaaagagaggagaatggacagaaatggtttaactgtgtggagttttgtttgttttgttttaaatggaagaaagaccaaaactttcctggtggatcagctagggcctttgaccctgcattaccacggcattttatccaggtgaagtccagggaaagaactcagccaaatggactaaggaacacacgagtttggaatgcgagactctgacatttttgtgttcttggaaatccaattaccttcccatgcccagatttccttcctgcctcttggaccaggctctggcactgaggttctcactgttcccaacacagacaaagcttcctgagggctggaggggcagcaaggggagaggagaatggggaagaagcgcttgatgtagttgtgtggaataaacagtattttttcttttgta

SEQ ID NO: 168474 - DNA, 207 bp, Homo sapiens
  Payload ID: 13162
  Gene Symbol: POU6F1
  Gene Name: POU class 6 homeobox 1
  ENST ID: ENST00000547855
  CDS Start-End: 120-207
atttagcccaggaatcgctcttcctccacccacagatcagtgctgcttccctcgggggacagacccagatcctggggtccctcactacagctccagtcattaccagcgccattcccagcatgccagggatcagcagtcagatcctcaccaatgctcagggacaggttattggaacccttccatgggtagtgaactcagctagtgtgg

SEQ ID NO: 168475 - DNA, 2184 bp, Homo sapiens
  Payload ID: 13162
  Gene Symbol: POU6F1
  Gene Name: POU class 6 homeobox 1
  Uniprot ID: Q14863
  ENST ID: ENST00000550824
  CDS Start-End: 193-1098
gaagcccacattcacatctacccaccccaatgccctctgtcctcttccctctgcccggggttcttctcaccccttggcttctgagcaaggctcttcctccacccacagatcagtgctgcttccctcgggggacagacccagatcctggggtccctcactacagctccagtcattaccagcgccattcccagcatgccagggatcagcagtcagatcctcaccaatgctcagggacaggttattggaacccttccatgggtagtgaactcagctagtgtggcggccccagcaccagcccaaagcctgcaggtccaggccgtgaccccccagctgttgttgaacgcccagggccaggtgattgcgaccctggctagcagccccctgcctccacctgtggctgtccggaagccaagcacacctgagtcccctgctaagagtgaggtgcagcccatccagcccacaccaaccgtgccccagcctgctgtggtcattgccagcccagctccagccgccaagccatctgcctctgctcctatcccaattacctgctcagagacccccaccgtcagccagttggtgtccaagccacatactccaagtctggatgaggatgggatcaacttagaagagatccgggagtttgccaagaactttaagatccggcggctctcgctgggccttacacagacccaggtgggtcaggctctgactgcaacggaaggtccagcctacagccagtcagccatctgccggttcgagaagctagacatcacacccaagagtgcccagaagctaaagccggtgctggaaaagtggctaaacgaagctgaactgcggaaccaggaaggccagcagaacctgatggagtttgtgggaggcgagccctccaagaaacgcaaacgccgcacctccttcaccccccaggccatagaggctctcaatgcctattttgagaagaacccactgcccacaggccaggagatcactgaaattgctaaggagctcaactacgaccgtgaggtagtgcgggtctggttctgcaatcggcgccagacgctcaagaacaccagcaagctgaacgtctttcagatcccttagggctcagcccctggccctgtgttctagcactttgtccatttcccgtggcatccggctgcagccactgccatgacagcacctgtcattttgccacgtgcagctgtgctcaccccaggtcatcagactccaccgtgtgcatgtgcatcaatgtccctcttttctcccacacatctcacatcatggggaggccagagggggccacacgagagctccaggctctgggctggtcactccgaagaagaggatttgtgacgtcacttagagaagcaccttgctagcatggtttctgaagggtgaattctggtggggaaccagaaactccctgtctttggggcagggctaaagcagctcctaaggaccactggccattagctcttgcttttgatggcattctctttccaccttgtcttctcctttgctcctctgtgttagtgtggcaggtatgacaactcatccagtggaaacacagcctcacactgcccttccgccccccacactttgcctgcaggtgcaccgaaaggacctgggagataaaattcaaaaaagtgtgatgtgctgctcagaaggtcagactccatgtctgccttgacctcaaggtcagaaggttcccaaacccctggggctggaacatgggatctcctcttccacctcttcctggttcctttgcggggaaaattgcactaaaacagaaccttttcttaatccatgttggaaggaagcaacagtgaactctacctgttctggagttctcctgggtctgcagaaggttgggaatttagaaaataaggctgttctttcatattttaatttaatctctgtcaatggccatccctcccacaaaaaaacgtgggttaagagaacttgcagactggatatgcaagcaaacgggcaactctggagaaaaataaggaaaggaatgctgactttctctttctttctcttgtccccacacccattcccaacccaatactggggccttctcaaaaggagcaaattaaacaataaaccagacagcaaggccctgggggaaaggacaacatcctgaaataaatgatggagcccaggaaggtctcttgtggaagttga

SEQ ID NO: 168476 - DNA, 2335 bp, Homo sapiens
  Payload ID: 13163
  Gene Symbol: POU6F2
  Gene Name: POU class 6 homeobox 2
  Uniprot ID: P78424
  ENST ID: ENST00000403058
  CDS Start-End: 155-2230
gatggattgctatctctcagcgcagcaggacacggggaccatgcaagctgtaattggtcaggcatgaactctcttgggttgtgttaccctgtttgctgtttactgtcaagatgctgaaagaatgttcttataatgatccaagaggaagtggcaaatgagtgctcttcttcaggatccaatgatagctggacaagtcagtaagcccttgctgtcagtgcggagtgaaatgaatgcggagttgagaggtgaggacaaggctgctacttcagacagcgagctgaatgagcccctgcttgcgcctgtggaatcaaatgacagcgaggacactcccagcaagctcttcggggctagaggaaacccagcattatcagacccaggcactcctgaccaacaccaggccagtcagacccaccccccatttccagttgggccacagccacttctgacggcacagcagttagcttctgctgtggccggcgtgatgccgggaggccccccagccctcaaccagccaatcctcattcccttcaacatggcgggacagctaggaggccagcaaggactggttctcacactgccaacagcgaatctcaccaacatccaagggctggtggcagcagctgcagccggaggcattatgactctgccactgcaaaatctacaagctacctcatccctgaactcccagctccagcagctccagctccagctccagcagcagcagcagcagcagcagcagcagcctcccccgtcaaccaaccagcacccgcaaccagccccacaggcgccctcgcagtcccagcagcagccgctgcagcccaccccaccccagcagccaccacccgcctctcagcagccgccagctcctacatctcagctgcaacaggcgcctcagccccagcagcaccaaccccactcccactcccagaaccagaaccaaccatctccaacccagcagagctccagccccccgcagaaacctagtcagtctccaggacatggcctgccttcaccgctcacgccacccaatcctctacagctggttaataatccactagcaagtcaggctgcagcggctgcagcagccatgagctccatagcaagctcacaggcctttggcaatgccctctccagtcttcagggggtcacaggtcaactagttactaatgcacaaggacagattatcgggaccattccactgatgcctaatccagggccatcgagccaagcagcaagcggcactcagggcttgcaagtgcagccaatcaccccccagctcctcacaaacgcccagggccagatcatcgccacagtcattgggaaccagatcctgcccgtgatcaacacccagggcatcacgctgtcacccatcaagcccggccagcagctccaccaaccctcccagacgtcagtgggtcaagcagcctcccaaggcaaccttctgcacctggctcacagccaagcatccatgtctcaaagtcccgtccggcaggcttcctcttcttcctcctcatcctcctcttcttcagctttgagcgtgggccagttagtcagcaatcctcaaacggcagcgggtgaggtggatggggttaatctggaggagatccgagaatttgccaaagcttttaaaatccggcgcctgtcccttggcctgacccagactcaggtgggacaggctctcagtgctacagagggccccgcgtacagccagtcggccatctgcagacacaccatcctgagaagccactttttcctaccacaggaagcccaagagaacactatagctagcagtctgacagccaaactgaaccctggccttttgtatcctgccaggtttgaaaagctggacatcacccctaaaagtgcccagaagatcaagccggtgcttgagcggtggatggctgaggctgaggcccgccatcgagcaggtatgcagaacctgaccgagtttatcgggagtgaaccatccaaaaagcgcaagcggcgcacctccttcacaccccaggcccttgagatcctcaatgcccactttgagaagaacacacacccttctgggcaggaaatgaccgaaattgctgagaagctgaactatgaccgagaagtagttagagtttggttctgcaataagaggcaagccctgaagaacacaattaaacgcttaaaacagcacgagccggccacggcagtccctttggagcccttaacagactctctggaagaaaactcctaaagagatgcccacccataatcagaagcaaaattcacagaaactaaactccacccttgggactccacaacaacaacaacaacaaaatttaatttaatttaaaaatag

SEQ ID NO: 168477 - DNA, 1028 bp, Homo sapiens
  Payload ID: 13163
  Gene Symbol: POU6F2
  Gene Name: POU class 6 homeobox 2
  ENST ID: ENST00000416452
  CDS Start-End: 1-429
gcaagtcaggctgcagcggctgcagcagccatgagctccatagcaagctcacaggcctttggcaatgccctctccagtcttcagggggtcacaggtcaactagttactaatgcacaaggacagattatcgggaccattccactgatgcctaatccagggccatcgagccaagcagcaagcggcactcagggcttgcaagtgcagccaatcaccccccagctcctcacaaacgcccagggccagatcatcgccacagtcattgggaaccagatcctgcccgtgatcaacacccagggcatcacgctgtcacccatcaagcccggccagcagatcctcaaacggcagcgggtgaggtggatggggttaatctggaggagatccgagaatttgccaaagcttttaaaatccggcgcctgtcccttggcctgacccagactcaggtgggacaggctctcagtgctacagagggccccgcgtacagccagtcggccatctgcagacacaccatcctgagaagccactttttcctaccacaggaagcccaagagaacactatagctagcagtctgacagccaaactgaaccctggccttttgtatcctgccaggtttgaaaagctggacatcacccctaaaagtgcccagaagatcaagccggtgcttgagcggtggatggctgaggctgaggcccgccatcgagcaggtatgcagaacctgaccgagtttatcgggagtgaaccatccaaaaagcgcaagcggcgcacctccttcacaccccaggcccttgagatcctcaatgcccactttgagaagaacacacacccttctgggcaggaaatgaccgaaattgctgagaagctgaactatgaccgagaagtagttagagtttggttctgcaataagaggcaagccctgaagaacacaattaaacgcttaaaacagcacgagccggccacggcagtccctttggagcccttaacagactctctggaagaaaactcctaaagagatgcccacccataatcagaa

SEQ ID NO: 168478 - DNA, 570 bp, Homo sapiens
  Payload ID: 13163
  Gene Symbol: POU6F2
  Gene Name: POU class 6 homeobox 2
  ENST ID: ENST00000451021
  CDS Start-End: 137-570
tatactggtaggaggagagtgtgtatgtgtttgcatgcaagagtaggagagaggggggaggcagatagagaagaaaatgacgtgcacctgaagtgttctcggcaggagcagttctagaatactttattacatatctatggagacaatggcatggactgatccaatgatagctggacaagtcagtaagcccttgctgtcagtgcggagtgaaatgaatgcggagttgagaggtgaggacaaggctgctacttcagacagcgagctgaatgagcccctgcttgcgcctgtggaatcaaatgacagcgaggacactcccagcaagctcttcggggctagaggaaacccagcattatcagacccaggcactcctgaccaacaccaggccagtcagacccaccccccatttccagttgggccacagccacttctgacggcacagcagttagcttctgctgtggccggcgtgatgccgggaggccccccagccctcaaccagccaatcctcattcccttcaacatggcgggacagctaggaggccagcaaggactggttctcacactgccaacagc

SEQ ID NO: 168479 - DNA, 5925 bp, Homo sapiens
  Payload ID: 13163
  Gene Symbol: POU6F2
  Gene Name: POU class 6 homeobox 2
  Uniprot ID: P78424
  ENST ID: ENST00000518318
  CDS Start-End: 43-2010
gctgaaagaatgttcttataatgatccaagaggaagtggcaaatgagtgctcttcttcaggatccaatgatagctggacaagtcagtaagcccttgctgtcagtgcggagtgaaatgaatgcggagttgagaggtgaggacaaggctgctacttcagacagcgagctgaatgagcccctgcttgcgcctgtggaatcaaatgacagcgaggacactcccagcaagctcttcggggctagaggaaacccagcattatcagacccaggcactcctgaccaacaccaggccagtcagacccaccccccatttccagttgggccacagccacttctgacggcacagcagttagcttctgctgtggccggcgtgatgccgggaggccccccagccctcaaccagccaatcctcattcccttcaacatggcgggacagctaggaggccagcaaggactggttctcacactgccaacagcgaatctcaccaacatccaagggctggtggcagcagctgcagccggaggcattatgactctgccactgcaaaatctacaagctacctcatccctgaactcccagctccagcagctccagctccagctccagcagcagcagcagcagcagcagcagcagcctcccccgtcaaccaaccagcacccgcaaccagccccacaggcgccctcgcagtcccagcagcagccgctgcagcccaccccaccccagcagccaccacccgcctctcagcagccgccagctcctacatctcagctgcaacaggcgcctcagccccagcagcaccaaccccactcccactcccagaaccagaaccaaccatctccaacccagcagagctccagccccccgcagaaacctagtcagtctccaggacatggcctgccttcaccgctcacgccacccaatcctctacagctggttaataatccactagcaagtcaggctgcagcggctgcagcagccatgagctccatagcaagctcacaggcctttggcaatgccctctccagtcttcagggggtcacaggtcaactagttactaatgcacaaggacagattatcgggaccattccactgatgcctaatccagggccatcgagccaagcagcaagcggcactcagggcttgcaagtgcagccaatcaccccccagctcctcacaaacgcccagggccagatcatcgccacagtcattgggaaccagatcctgcccgtgatcaacacccagggcatcacgctgtcacccatcaagcccggccagcagctccaccaaccctcccagacgtcagtgggtcaagcagcctcccaaggcaaccttctgcacctggctcacagccaagcatccatgtctcaaagtcccgtccggcaggcttcctcttcttcctcctcatcctcctcttcttcagctttgagcgtgggccagttagtcagcaatcctcaaacggcagcgggtgaggtggatggggttaatctggaggagatccgagaatttgccaaagcttttaaaatccggcgcctgtcccttggcctgacccagactcaggtgggacaggctctcagtgctacagagggccccgcgtacagccagtcggccatctgcaggtttgaaaagctggacatcacccctaaaagtgcccagaagatcaagccggtgcttgagcggtggatggctgaggctgaggcccgccatcgagcaggtatgcagaacctgaccgagtttatcgggagtgaaccatccaaaaagcgcaagcggcgcacctccttcacaccccaggcccttgagatcctcaatgcccactttgagaagaacacacacccttctgggcaggaaatgaccgaaattgctgagaagctgaactatgaccgagaagtagttagagtttggttctgcaataagaggcaagccctgaagaacacaattaaacgcttaaaacagcacgagccggccacggcagtccctttggagcccttaacagactctctggaagaaaactcctaaagagatgcccacccataatcagaagcaaaattcacagaaactaaactccacccttgggactccacaacaacaacaacaacaaaatttaatttaatttaaaaatagccccagtcgtcatcacccttgtaagtaaatgactaagaaaactaccaagtggacagaatggtttctacatgtccgttggttttccaaaaaggaaagaagaaaatttttagaaaatttttaaacaaggaatacaccacactgaaggtgtgtgtggtaggatagttcccttcccccacctgtctcccccaaagccagttttttaatggacttaaagcaaaccaaataaccacgtacttttttctgtatattatgaaaatgtgaacacattttaaggaaaaagaaaaaaaaaaactaaaccaaaaaccaacaacgaaggaacaaaaactttgatctgttcaaagcgaatacaagcctgccacctggaggaaggactgcaccccttcaggtactaagtgctgattcactatgaaacctattaaccaaagtcagaaacatggcattgcaacgcgatcgttcgtctacgcttctccgcacgtaaagttgtgttacgaatttttacatttgtactaacagaacaataggaagcctgatttctcccatctttcccatctactgtctccacccatggggtgggtaccattgttgaagccattctgtgaggctcactattgggtttttttgtgggggtggtagggagggtggtcttttttctttgtctttctttttgacgggagggcatcctggatcgtgtgccaaagcatttgttgcttttttctcactatgacttgtgggtttgagaaaagaaaatggagctcgcatttctctcttttcctccatttctccatctccctcgcgcgtggctcctggggtctgctggaaggccacagaagtggggagaagcagtgtcttttccactcagatcctagtgaaatgcaggagagactccaaaataactagggctttgctcgatgaactgtcaacactggcataagctgtaattgtgctcactgtccacaccagagcttgggatttttctcagtctgttggccacgtacatggagagctgaccaaaactaattttgtaatataaacataagctgcacatttggttcaatacttacatctatgttatgcttctgtgcaaagcaatttctctcagaagtctgatagccaaagaaatgtctcaagatttcagtcaaatacacacatgacatgcacacacccataaacacacacacaaagaaacaggctaaaaagaaagtgatagcaactggatcattaaaggccatcgtgtatcctgttaatctcatcttttctgctacttctttcattccaatagcgatggcagacttttttcagggggaataattactcttcgggatatataaatggagcagaaaggtggcgggcaaatttaaacaactggaattgggggccaggttcttcaggggaaaggaagtttgaagaagctttcaccaaaagaaaaaaatatagaaggggcttatctaacaatcagaatagcctgcaatatgagaactagaggattatttcctttaaaaaaaataacttaaaagatctgtgggccacaataacctaataagcaaggacatgttgggatgtgaggacggctgtgcaggtgagcacttggcagctgccactggtgttttcacccaggtacaggcagacggtgttccattaaaggagcaggcaaaagagagctgtcaatttgcttgctgttgaaatgtacatatttatgcataatttataatcatgctaatgtattatctagaagtaagttgtgaaagaaaaaagagaaacccaatctcaagttgcccaactgattagaaatgccatctccttcccctaatacactccctctccctggggagtttgagtttcttctgttggctcctttgctgtttgtgtaaatgctacagtataattgtcccctccaatgattcatgcagcaatcaagagactaccagcaaggaaactctaaaaggaatcctggaagtggaacaagtcactcgtaaaggtgtttccattttaccagtcaatgctaactggaccacagctaacttgatcttcaatgccaacatcacagagcccctttcgccacctcaaaaactgcacaaacatggacaacccagaaacccaaaactttattgattaaaacagattttggattctcctaggacctgctccaaattccatcaagaaaagctccctgcgaagagaagttaacaagataacatatgatggatgctaaatatttaaatatatgccggcagcggttacataaggcctgctcagttctgagatctataattgggagggtctaactaggacagggaaaatataaaataaaagtaatcttccagagtggaacaaaaaagaaatatattcatccgacagtcgtaacaccattcatgtgcagtgatttttttatagttttataattttgtattgttttataaattatttataaggtgttgtaatgcttcttatattaattttttacagataaattttttgctacaaggcataaaaaggtgcctgaaccgattcttaggaatataaattatactgtgtaactcataagtctttgggaccacacctaatgcttaattttatgatgacatttctcatgtctacttgtaaacaacttcatatgccaatggcgtttaagtgtcttttatgtttccatgaactgaaggttaaggttgccacccacaaaaaataaaagccactttgggcatatgtgattgtatttcaagcttcagtatttttctcacataatttttaattattgttatctgcattttcattacttcatgaaaaaatgacagtggatattacattttacacttgtttatagattttctttctttttcaaccaagaaaatattttgaacaattgaaacttttaattgcatttgcaaggttttggcttctttatgttgtcatcacacagatgcacacacacatacacatacaacacaaaagagagaacaaaaaagcaaaaggagctaggaaaaaaacaaaacaaaacaagtagaggtgtatcaaagaactcaagctataaccaaaaagaaatcgtaaaatgcctttgctcgtttctctacgctggaccaaagctcaatatttgtaggtatatgcacattgtatagatatggctaaatgttgctgacaatctcgcaatactaaactgttcctattttaagaaaaaaaaaagaaatacaaactgttcatcaatgttttacctcagcactctacttgtacccagttaatgaccaagcttaaaaaaaaattgagataaaggaaattgattttcatttcaatgtttgactgtaaaatctgtttggataacattttgtaatgagctttttgtcatgtgatttgcttgtcttcaacttgaaattatgtgaggcacatttgtttatttgttgttaagaaagtgatttttttttttttttgtcctatgtgctgtgatctagactggtcaccggggtcacttatgaggcaccacaaagagatctgcttctccgtgcccggagcaggcagcaggagggagggcaggaaacaggactgggttgctttggaaaaatcatcatgacaagaagttgacatgatagacttgtgaccaagaagccaaactgaatatttaaaagctccttacttgctctgacattgaaaccaaagctgattttatctgcacaggttgcttaatatttaaaaaaaaaaaaaactgtacttaatctagagcaatatctgtatggtcagtaaagctgcactttgtgtatttcttaacagcttcagatctgtcacttttaatttgtaccataaaaaataaataattgtttgacatga

SEQ ID NO: 168480 - DNA, 2403 bp, Homo sapiens
  Payload ID: 13163
  Gene Symbol: POU6F2
  Gene Name: POU class 6 homeobox 2
  ENST ID: ENST00000559001
  CDS Start-End: 102-2012
agagagagaagagagagggagagggagagagaggacacgcactctaaatctgccactttttttttcctccccttcactcttttcgcccatcctaggatccaatgatagctggacaagtcagtaagcccttgctgtcagtgcggagtgaaatgaatgcggagttgagaggtgaggacaaggctgctacttcagacagcgagctgaatgagcccctgcttgcgcctgtggaatcaaatgacagcgaggacactcccagcaagctcttcggggctagaggaaacccagcattatcagacccaggcactcctgaccaacaccaggccagtcagacccaccccccatttccagttgggccacagccacttctgacggcacagcagttagcttctgctgtggccggcgtgatgccgggaggccccccagccctcaaccagccaatcctcattcccttcaacatggcgggacagctaggaggccagcaaggactggttctcacactgccaacagcgaatctcaccaacatccaagggctggtggcagcagctgcagccggaggcattatgactctgccactgcaaaatctacaagctacctcatccctgaactcccagctccagcagctccagctccagctccagcagcagcagcagcagcagcagcagcagcctcccccgtcaaccaaccagcacccgcaaccagccccacaggcgccctcgcagtcccagcagcagccgctgcagcccaccccaccccagcagccaccacccgcctctcagcagccgccagctcctacatctcagctgcaacaggcgcctcagccccagcagcaccaaccccactcccactcccagaaccagaaccaaccatctccaacccagcagagctccagccccccgcagaaacctagtcagtctccaggacatggcctgccttcaccgctcacgccacccaatcctctacagattatcgggaccattccactgatgcctaatccagggccatcgagccaagcagcaagcggcactcagggcttgcaagtgcagccaatcaccccccagctcctcacaaacgcccagggccagatcatcgccacagtcattgggaaccagatcctgcccgtgatcaacacccagggcatcacgctgtcacccatcaagcccggccagcagctccaccaaccctcccagacgtcagtgggtcaagcagcctcccaaggcaaccttctgcacctggctcacagccaagcatccatgtctcaaagtcccgtccggcaggcttcctcttcttcctcctcatcctcctcttcttcagctttgagcgtgggccagttagtcagcaatcctcaaacggcagcgggtgaggtggatggggttaatctggaggagatccgagaatttgccaaagcttttaaaatccggcgcctgtcccttggcctgacccagactcaggtgggacaggctctcagtgctacagagggccccgcgtacagccagtcggccatctgcagacacaccatcctgagaagccactttttcctaccacaggaagcccaagagaacactatagctagcagtctgacagccaaactgaaccctggccttttgtatcctgccaggtttgaaaagctggacatcacccctaaaagtgcccagaagatcaagccggtgcttgagcggtggatggctgaggctgaggcccgccatcgagcaggtatgcagaacctgaccgagtttatcgggagtgaaccatccaaaaagcgcaagcggcgcacctccttcacaccccaggcccttgagatcctcaatgcccactttgagaagaacacacacccttctgggcaggaaatgaccgaaattgctgagaagctgaactatgaccgagaagtagttagagtttggttctgcaataagaggcaagccctgaagaacacaattaaacgcttaaaacagcacgagccggccacggcagtccctttggagcccttaacagactctctggaagaaaactcctaaagagatgcccacccataatcagaagcaaaattcacagaaactaaactccacccttgggactccacaacaacaacaacaacaaaatttaatttaatttaaaaatagccccagtcgtcatcacccttgtaagtaaatgactaagaaaactaccaagtggacagaatggtttctacatgtccgttggttttccaaaaaggaaagaagaaaatttttagaaaatttttaaacaaggaatacaccacactgaaggtgtgtgtggtaggatagttcccttcccccacctgtctcccccaaagccagttttttaatggacttaaagcaaaccaaataaccacgtacttttttctgtatattatgaaaatgtgaacacattttaaggaaaaagaaaaaa

SEQ ID NO: 168481 - DNA, 1485 bp, Homo sapiens
  Payload ID: 13163
  Gene Symbol: POU6F2
  Gene Name: POU class 6 homeobox 2
  ENST ID: ENST00000524147
  CDS Start-End: 249-1485
agagatccagagaaatcttgagaattgtgtgtctcttttcccttctgcctgcctcccccatctaccccaagtttcaagcgctccaaatcccagcaacaagacccagtaaacaaaatgcaaatctatcactagcaaattcaagctgacaatactgtgaatcgaccgcattgattacattgattatatttcaaatatttacaatatggtgagacaagtctaatttcttttctaaagagttcaaggatccaatgatagctggacaagtcagtaagcccttgctgtcagtgcggagtgaaatgaatgcggagttgagaggtgaggacaaggctgctacttcagacagcgagctgaatgagcccctgcttgcgcctgtggaatcaaatgacagcgaggacactcccagcaagctcttcggggctagaggaaacccagcattatcagacccaggcactcctgaccaacaccaggccagtcagacccaccccccatttccagttgggccacagccacttctgacggcacagcagttagcttctgctgtggccggcgtgatgccgggaggccccccagccctcaaccagccaatcctcattcccttcaacatggcgggacagctaggaggccagcaaggactggttctcacactgccaacagcgaatctcaccaacatccaagggctggtggcagcagctgcagccggaggcattatgactctgccactgcaaaatctacaagctacctcatccctgaactcccagctccagcagctccagctccagctccagcagcagcagcagcagcagcagcagcagcctcccccgtcaaccaaccagcacccgcaaccagccccacaggcgccctcgcagtcccagcagcagccgctgcagcccaccccaccccagcagccaccacccgcctctcagcagccgccagctcctacatctcagctgcaacaggcgcctcagccccagcagcaccaaccccactcccactcccagaaccagaaccaaccatctccaacccagcagagctccagccccccgcagaaacctagtcagtctccaggacatggcctgccttcaccgctcacgccacccaatcctctacagattatcgggaccattccactgatgcctaatccagggccatcgagccaagcagcaagcggcactcagggcttgcaagtgcagccaatcaccccccagctcctcacaaacgcccagggccagatcatcgccacagtcattgggaaccagatcctgcccgtgatcaacacccagggcatcacgctgtcacccatcaagcccggccagcagctccaccaaccctcccagacgtcagtgggtcaagcagcctcccaaggcaaccttctgcacctggctcacagccaagcatccatgtctcaaagtcccgtccggcaggcttcctcttcttcctcctcatcctcctcttcttcagctttgagcgtgggccagttagtcagca

SEQ ID NO: 168482 - DNA, 1290 bp, Homo sapiens
  Payload ID: 13163
  Gene Symbol: POU6F2
  Gene Name: POU class 6 homeobox 2
  ENST ID: ENST00000520104
  CDS Start-End: 82-1290
gcgatttttgttttctttttctttaatgctctgggtgtacgatgctctaggtatccgaattattgaacacagtttgatccaatgatagctggacaagtcagtaagcccttgctgtcagtgcggagtgaaatgaatgcggagttgagaggtgaggacaaggctgctacttcagacagcgagctgaatgagcccctgcttgcgcctgtggaatcaaatgacagcgaggacactcccagcaagctcttcggggctagaggaaacccagcattatcagacccaggcactcctgaccaacaccaggccagtcagacccaccccccatttccagttgggccacagccacttctgacggcacagcagttagcttctgctgtggccggcgtgatgccgggaggccccccagccctcaaccagccaatcctcattcccttcaacatggcgggacagctaggaggccagcaaggactggttctcacactgccaacagcgaatctcaccaacatccaagggctggtggcagcagctgcagccggaggcattatgactctgccactgcaaaatctacaagctacctcatccctgaactcccagctccagcagctccagctccagctccagcagcagcagcagcagcagcagcagcagcctcccccgtcaaccaaccagcacccgcaaccagccccacaggcgccctcgcagtcccagcagcagccgctgcagcccaccccaccccagcagccaccacccgcctctcagcagccgccagctcctacatctcagctgcaacaggcgcctcagccccagcagcaccaaccccactcccactcccagaaccagaaccaaccatctccaacccagcagagctccagccccccgcagaaacctagtcagtctccaggacatggcctgccttcaccgctcacgccacccaatcctctacagctggttaataatccactagcaagtcaggctgcagcggctgcagcagccatgagctccatagcaagctcacaggcctttggcaatgccctctccagtcttcagggggtcacaggtcaactagttactaatgcacaaggacagattatcgggaccattccactgatgcctaatccagggccatcgagccaagcagcaagcggcactcagggcttgcaagtgcagccaatcaccccccagctcctcacaaacgcccagggccagatcatcgccacagtcattgggaaccagatcctgcccgtgatcaacacccagggcatcacgctgtcacccatcaagcccggccagcag

SEQ ID NO: 168483 - DNA, 1330 bp, Homo sapiens
  Payload ID: 13164
  Gene Symbol: POU5F2
  Gene Name: POU domain class 5, transcription factor 2
  Uniprot ID: Q8N7G0
  ENST ID: ENST00000510627
  CDS Start-End: 75-1061
gggggccggtggctgttctgaagcctcgagggccatcagttcctaccagagccgctgcgggtgccattccacccatggccggacacaggccctcaaaccacttctgcccccttccaggcagtggtgggggcggccccagagggccgatgcccctgcgggttgacactctgacctggttgagcacccaggcggcccctggcagggtgatggtctggccggcagtcaggccagggatctgcccaggccctgacgtgtggaggattcccctgggtcccctgccacacgaattccggggctggatagcaccctgcaggccccgtcttggagctagtgaggcaggggactggttgcgacgcccctccgaaggcgccctcccggggccctacattgccctgcggagcattccgaagttgccgccgccagaggacatctcgggcatactgaaagagttgcagcaattggccaaggagttgaggcagaagaggttgagcctagggtactcgcaggccgatgtggggatcgctgtgggagctctgtttgggaaggtgcttagccagacgaccatctgccgcttcgaggcccagcagctaagcgtcgccaacatgtggaagctgcgaccactgctgaaaaagtggctgaaggaagtggaagcagagaaccttctgggcttatgcaaaatggagatgatcctgcaacagtctgggaagtggagacgggcaagcagagagcgacgaatcggaaacagcctggagaaattcttccagcggtgccctaagcccacaccccagcaaatcagccacattgctgggtgcctccagctgcagaaggatgtggttcgagtttggttctataaccgcagcaagatgggcagtcgaccaaccaatgatgcttccccacgggagattgtggggacagccgggcctccttgcccaggagcaccagtgtgctttcacctgggactggggctcccagtggatatcccccactatacacgtctctactctgcaggggtagcccactcctctgccccagccaccactctgggcctcctcagattttagggctgaggggcttgcccttcacggcacggttggagaggggagaagaagggaaaacccaggaaatgtccctagggttcatttgagggcttttagtattaatttctcattcactgtctaaagaagttaaggatacatagtagggaatgggggtgggaattgttcaagaaaaacctgggagagaagatgaagtttattgcagttttgtgttttccctttgtttttccctagcattggtttaaaggtacattacagtatatagatggtttcga

SEQ ID NO: 168484 - DNA, 2516 bp, Homo sapiens
  Payload ID: 13165
  Gene Symbol: PATZ1
  Gene Name: POZ (BTB) and AT hook containing zinc finger 1
  Uniprot ID: Q9HBE1
  ENST ID: ENST00000215919
  CDS Start-End: 175-1788
agtctgatccgggctgggggcgtgtacactcggcgcacctgcgagactacagagcctcgggccggcacgtgtggggagtgtggacacgtctgctgcgccccgcttctcgctgctgaggggaagggagggggcgggcaggtgcagcggccgggctagtgggagggggcggcggccatggagcgggtgaacgacgcttcgtgcggcccgtctggctgctacacataccaggtgagcagacacagcacggagatgctgcacaacctgaaccagcagcgcaaaaacggcgggcgcttctgcgacgtgctcttgcgggtaggcgacgagagcttcccagcgcaccgcgccgtgctggccgcctgcagcgagtactttgagtcggtgttcagcgcccagttgggcgacggcggagctgcggacgggggtccggctgatgtagggggcgcgacggcagcaccaggcggcggggccgggggcagccgggagctggagatgcacactatcagctccaaggtatttggggacattctggacttcgcctacacttcccgcatcgtggtgcgcttggagagctttcccgaactcatgacggccgccaagttcctgctgatgaggtcggttatcgagatctgccaggaagtcatcaaacagtccaacgtacagatcctggtaccccctgcccgcgccgatataatgctctttcgcccccctgggacctcggacttgggcttccctttggacatgaccaacggggcagccttggcagccaacagcaatggcatcgccggcagcatgcagccagaggaggaggcagctcgggcggctggtgcagccattgcaggccaagcctctttgcctgtgttacctggggtggaccgcttgcccatggtggctggacccctatccccccaactgctgacttccccattccccagtgtggcatccagtgcccctcccctgactggcaagcgaggccggggccgcccaaggaaggccaacctgctggactcaatgtttgggtccccagggggcctgagggaggcaggcatccttccatgcggtctatgtggtaaggtgttcactgatgccaaccggctccggcagcacgaggcccagcacggtgtcaccagcctccagctgggctacatcgaccttcctcctccgaggctgggtgagaatgggctacccatctctgaagaccccgacggcccccgaaagaggagccggaccaggaagcaggtggcttgtgagatctgcggcaagatcttccgtgatgtgtatcatcttaaccggcacaagctgtcccactctggggagaagccctactcctgccctgtgtgtgggttgcggttcaagagaaaagaccgcatgtcctaccatgtgcggtcccatgatgggtccgtgggcaagccttacatctgccagagctgtgggaaaggcttctccaggcctgatcacttgaacggacatatcaagcaggtgcacacttctgagcggcctcacaagtgtcaggtgtgggttgggagcagcagcggcctgccgcccctggaacctcttcctagcgacctgccatcatgggactttgcccagcctgctttgtggaggtcgtcccattcggttcctgacaccgccttttccctttctctaaaaaaatcattcccagcccttgaaaacctgggcccagcacactccagcaacactctcttctgcccagccccgccgggatatctgaggcagggctggaccaccccagagggcagcagggcctttacccagtggcctgttggctagcctgggcctccctggagagggttgacagtggaagggaacaggaggggcatttggcctgagacccctgcttttgggagaggctagcagggtggttcctgcccagcatgcccagctcctccctgggtgactcggagtctttcccatgtcagagcccccaaatgggggtagcaaggagcacctttctggaaccccctatagcatccaagtttctttctgggctctcttgccttttcccccctttcacagatggcacccctgggcatctgtccttgcctaggtgattttggaggttggtgccttcctgggaactagccaccagcttatctgcttcccttcccctggcatcacttcccataggcctggggtttctagactggggcctggccacccctttccccactccacgagtgagtcggcctccagagaagactggcacaattccaactagagtcaacccatgctgccctctgcccttcccactcagatctagatcctgctttcatttctggctagtgaagtagacttttgtgtttttgaggtttattagcaggtctgctcaggaaccaaactaatgagtagctttatattgggccaccccaatatatggctttgggggctgaaaaagcagatgtagaccccctccctcggatccttattggtgtgccctttagcactccgcagactctgcggggtgaacaggagtgatgataaaatttttcattctaaca

SEQ ID NO: 168485 - DNA, 3781 bp, Homo sapiens
  Payload ID: 13165
  Gene Symbol: PATZ1
  Gene Name: POZ (BTB) and AT hook containing zinc finger 1
  Uniprot ID: Q9HBE1
  ENST ID: ENST00000266269
  CDS Start-End: 631-2694
gctccagccgccgccgccgccgccaccgccctccaggctccgggacccggcccgcgccaccgcccccgtgcgcgccccgccgccgccgccttcgccttcgccttttgtttcctccgctccggcgcccccgccccggctcgcgctttgcaggggacgcagcgcgcgcccccagcgggcccgggaaaagccgcggcgcgcgcgcgcgcctgcgcggcggacccctccttctcctccccgcgtgcgcgtgcccttcttggctgcgcgccggcgccgcctggcgggcgggaggggaggtggcaggcgcgtttgcaggaggggcgcacctcttcgctcgcgcacccccccggaaggtagaccgggaaggggaggcgggcgggcggagaggagagagtggcgcgcagtccagcgagggcgggggttggctatgtggggggtggtgcaccccgcagtctagacagtctgatccgggctgggggcgtgtacactcggcgcacctgcgagactacagagcctcgggccggcacgtgtggggagtgtggacacgtctgctgcgccccgcttctcgctgctgaggggaagggagggggcgggcaggtgcagcggccgggctagtgggagggggcggcggccatggagcgggtgaacgacgcttcgtgcggcccgtctggctgctacacataccaggtgagcagacacagcacggagatgctgcacaacctgaaccagcagcgcaaaaacggcgggcgcttctgcgacgtgctcttgcgggtaggcgacgagagcttcccagcgcaccgcgccgtgctggccgcctgcagcgagtactttgagtcggtgttcagcgcccagttgggcgacggcggagctgcggacgggggtccggctgatgtagggggcgcgacggcagcaccaggcggcggggccgggggcagccgggagctggagatgcacactatcagctccaaggtatttggggacattctggacttcgcctacacttcccgcatcgtggtgcgcttggagagctttcccgaactcatgacggccgccaagttcctgctgatgaggtcggttatcgagatctgccaggaagtcatcaaacagtccaacgtacagatcctggtaccccctgcccgcgccgatataatgctctttcgcccccctgggacctcggacttgggcttccctttggacatgaccaacggggcagccttggcagccaacagcaatggcatcgccggcagcatgcagccagaggaggaggcagctcgggcggctggtgcagccattgcaggccaagcctctttgcctgtgttacctggggtggaccgcttgcccatggtggctggacccctatccccccaactgctgacttccccattccccagtgtggcatccagtgcccctcccctgactggcaagcgaggccggggccgcccaaggaaggccaacctgctggactcaatgtttgggtccccagggggcctgagggaggcaggcatccttccatgcggtctatgtggtaaggtgttcactgatgccaaccggctccggcagcacgaggcccagcacggtgtcaccagcctccagctgggctacatcgaccttcctcctccgaggctgggtgagaatgggctacccatctctgaagaccccgacggcccccgaaagaggagccggaccaggaagcaggtggcttgtgagatctgcggcaagatcttccgtgatgtgtatcatcttaaccggcacaagctgtcccactctggggagaagccctactcctgccctgtgtgtgggttgcggttcaagagaaaagaccgcatgtcctaccatgtgcggtcccatgatgggtccgtgggcaagccttacatctgccagagctgtgggaaaggcttctccaggcctgatcacttgaacggacatatcaagcaggtgcacacttctgagcggcctcacaagtgtcagacctgcaatgcttcttttgccacccgagaccgtctgcgctcccacctggcctgtcatgaagacaaggtgccctgccaggtgtgtgggaagtacttgcgggcagcatacatggcagaccacctgaagaagcacagcgaggggcccagcaacttctgcagtatctgtaaccgaggtttctcctctgcctcctacttaaaggtccatgttaaaacccaccacggtgttccccttccccaggtctccaggcaccaggagcccatcctgaatgggggagcagcgttccactgcgccaggacctatggcaacaaagaaggccagaaatgctcacatcaggatccgattgagagctctgactcctatggtgacctctcagatgccagcgacctgaagacgccagagaagcagagtgccaatggctctttctcctgcgacatggcagtccccaaaaacaaaatggagtctgatggggagaagaagtacccatgccctgaatgtgggagcttcttccgctctaagtcctacttgaacaaacacatccagaaggtgcatgtccgggctctcgggggccccctgggggacctgggccctgcccttggctcacctttctctcctcagcagaacatgtctctcctcgagtcctttgggtttcagattgttcagtcggcatttgcgtcatctttagtagatcctgaggttgaccagcagcccatggggcctgaagggaaatgaggcagctgctgtgtccccacggaaacaaccatctggggactgctgggaaatgctgtgaatgcggagggaagtgatgtttgggttctgtagctgagagatttttattcatttttaactgccccccaaccccactccaactccttctccaccacccattctcccaatggtctttagaaatagattttcatctgatattctgcagaaatatcaatgagacttggtatgggacaggggcagaaaacactacataggcctccaaggcaaaaccagtcccagtttctttaatgggaagaagctggaattcctggtgctcaattcttagtgaccccaatcctatacccaaatctatgatattctgggacctcagtgattttggtcccctcccacttctctagttcgtcatcctcccttcccatatccttcaaaagaaccacactagggtctccacctacttatacaatgcggatgcccaactgtttttaaggaagccagaagcatcccatggaccatggggtgagtgtcctccaagagccccctgagctcagccctctgcctggagggctccagacctttctgagccctgcttggaggcgagcattttcactgctaggacaagctcagctgttgaggacacccccaccccaaatttcagttcttacgtgattttaaccattcaacatgctgttgggttttaattctctaattattattattattgttattattttttaggaccagttgtagtgaattgctactgaaagctatcccaggtgatacagagctctttgtaaaccgcagtcacacattagggttagtattaaactttgtttagatgtaccataattaacttggctagttgattgtttgaagtctatggaagaaatagttttatgcaaaattttaaaaaatgccagtctggtcagggaagtagggggtttcaatgctgttgggaaccaggaaggtgggacagccggcaggtagggacattgtgtacctcagttgtgtcacatgtgagcaagcccaggttgaccttgtgatgtgaattgatctgatcagactgtattaaaaatgttagtacattactcta

SEQ ID NO: 168486 - DNA, 3638 bp, Homo sapiens
  Payload ID: 13165
  Gene Symbol: PATZ1
  Gene Name: POZ (BTB) and AT hook containing zinc finger 1
  Uniprot ID: Q9HBE1
  ENST ID: ENST00000351933
  CDS Start-End: 631-2556
gctccagccgccgccgccgccgccaccgccctccaggctccgggacccggcccgcgccaccgcccccgtgcgcgccccgccgccgccgccttcgccttcgccttttgtttcctccgctccggcgcccccgccccggctcgcgctttgcaggggacgcagcgcgcgcccccagcgggcccgggaaaagccgcggcgcgcgcgcgcgcctgcgcggcggacccctccttctcctccccgcgtgcgcgtgcccttcttggctgcgcgccggcgccgcctggcgggcgggaggggaggtggcaggcgcgtttgcaggaggggcgcacctcttcgctcgcgcacccccccggaaggtagaccgggaaggggaggcgggcgggcggagaggagagagtggcgcgcagtccagcgagggcgggggttggctatgtggggggtggtgcaccccgcagtctagacagtctgatccgggctgggggcgtgtacactcggcgcacctgcgagactacagagcctcgggccggcacgtgtggggagtgtggacacgtctgctgcgccccgcttctcgctgctgaggggaagggagggggcgggcaggtgcagcggccgggctagtgggagggggcggcggccatggagcgggtgaacgacgcttcgtgcggcccgtctggctgctacacataccaggtgagcagacacagcacggagatgctgcacaacctgaaccagcagcgcaaaaacggcgggcgcttctgcgacgtgctcttgcgggtaggcgacgagagcttcccagcgcaccgcgccgtgctggccgcctgcagcgagtactttgagtcggtgttcagcgcccagttgggcgacggcggagctgcggacgggggtccggctgatgtagggggcgcgacggcagcaccaggcggcggggccgggggcagccgggagctggagatgcacactatcagctccaaggtatttggggacattctggacttcgcctacacttcccgcatcgtggtgcgcttggagagctttcccgaactcatgacggccgccaagttcctgctgatgaggtcggttatcgagatctgccaggaagtcatcaaacagtccaacgtacagatcctggtaccccctgcccgcgccgatataatgctctttcgcccccctgggacctcggacttgggcttccctttggacatgaccaacggggcagccttggcagccaacagcaatggcatcgccggcagcatgcagccagaggaggaggcagctcgggcggctggtgcagccattgcaggccaagcctctttgcctgtgttacctggggtggaccgcttgcccatggtggctggacccctatccccccaactgctgacttccccattccccagtgtggcatccagtgcccctcccctgactggcaagcgaggccggggccgcccaaggaaggccaacctgctggactcaatgtttgggtccccagggggcctgagggaggcaggcatccttccatgcggtctatgtggtaaggtgttcactgatgccaaccggctccggcagcacgaggcccagcacggtgtcaccagcctccagctgggctacatcgaccttcctcctccgaggctgggtgagaatgggctacccatctctgaagaccccgacggcccccgaaagaggagccggaccaggaagcaggtggcttgtgagatctgcggcaagatcttccgtgatgtgtatcatcttaaccggcacaagctgtcccactctggggagaagccctactcctgccctgtgtgtgggttgcggttcaagagaaaagaccgcatgtcctaccatgtgcggtcccatgatgggtccgtgggcaagccttacatctgccagagctgtgggaaaggcttctccaggcctgatcacttgaacggacatatcaagcaggtgcacacttctgagcggcctcacaagtgtcagacctgcaatgcttcttttgccacccgagaccgtctgcgctcccacctggcctgtcatgaagacaaggtgccctgccaggtgtgtgggaagtacttgcgggcagcatacatggcagaccacctgaagaagcacagcgaggggcccagcaacttctgcagtatctgtaaccgagaaggccagaaatgctcacatcaggatccgattgagagctctgactcctatggtgacctctcagatgccagcgacctgaagacgccagagaagcagagtgccaatggctctttctcctgcgacatggcagtccccaaaaacaaaatggagtctgatggggagaagaagtacccatgccctgaatgtgggagcttcttccgctctaagtcctacttgaacaaacacatccagaaggtgcatgtccgggctctcgggggccccctgggggacctgggccctgcccttggctcacctttctctcctcagcagaacatgtctctcctcgagtcctttgggtttcagattgttcagtcggcatttgcgtcatctttagtagatcctgaggttgaccagcagcccatggggcctgaagggaaatgaggcagctgctgtgtccccacggaaacaaccatctggggactgctgggaaatgctgtgaatgcggagggaagtgatgtttgggttctgtagctgagagatttttattcatttttaactgccccccaaccccactccaactccttctccaccacccattctcccaatggtctttagaaatagattttcatctgatattctgcagaaatatcaatgagacttggtatgggacaggggcagaaaacactacataggcctccaaggcaaaaccagtcccagtttctttaatgggaagaagctggaattcctggtgctcaattcttagtgaccccaatcctatacccaaatctatgatattctgggacctcagtgattttggtcccctcccacttctctagttcgtcatcctcccttcccatatccttcaaaagaaccacactagggtctccacctacttatacaatgcggatgcccaactgtttttaaggaagccagaagcatcccatggaccatggggtgagtgtcctccaagagccccctgagctcagccctctgcctggagggctccagacctttctgagccctgcttggaggcgagcattttcactgctaggacaagctcagctgttgaggacacccccaccccaaatttcagttcttacgtgattttaaccattcaacatgctgttgggttttaattctctaattattattattattgttattattttttaggaccagttgtagtgaattgctactgaaagctatcccaggtgatacagagctctttgtaaaccgcagtcacacattagggttagtattaaactttgtttagatgtaccataattaacttggctagttgattgtttgaagtctatggaagaaatagttttatgcaaaattttaaaaaatgccagtctggtcagggaagtagggggtttcaatgctgttgggaaccaggaaggtgggacagccggcaggtagggacattgtgtacctcagttgtgtcacatgtgagcaagcccaggttgaccttgtgatgtgaattgatctgatcagactgtattaaaaatgttagtacatta

SEQ ID NO: 168487 - DNA, 3711 bp, Homo sapiens
  Payload ID: 13165
  Gene Symbol: PATZ1
  Gene Name: POZ (BTB) and AT hook containing zinc finger 1
  Uniprot ID: Q9HBE1
  ENST ID: ENST00000405309
  CDS Start-End: 631-2244
gctccagccgccgccgccgccgccaccgccctccaggctccgggacccggcccgcgccaccgcccccgtgcgcgccccgccgccgccgccttcgccttcgccttttgtttcctccgctccggcgcccccgccccggctcgcgctttgcaggggacgcagcgcgcgcccccagcgggcccgggaaaagccgcggcgcgcgcgcgcgcctgcgcggcggacccctccttctcctccccgcgtgcgcgtgcccttcttggctgcgcgccggcgccgcctggcgggcgggaggggaggtggcaggcgcgtttgcaggaggggcgcacctcttcgctcgcgcacccccccggaaggtagaccgggaaggggaggcgggcgggcggagaggagagagtggcgcgcagtccagcgagggcgggggttggctatgtggggggtggtgcaccccgcagtctagacagtctgatccgggctgggggcgtgtacactcggcgcacctgcgagactacagagcctcgggccggcacgtgtggggagtgtggacacgtctgctgcgccccgcttctcgctgctgaggggaagggagggggcgggcaggtgcagcggccgggctagtgggagggggcggcggccatggagcgggtgaacgacgcttcgtgcggcccgtctggctgctacacataccaggtgagcagacacagcacggagatgctgcacaacctgaaccagcagcgcaaaaacggcgggcgcttctgcgacgtgctcttgcgggtaggcgacgagagcttcccagcgcaccgcgccgtgctggccgcctgcagcgagtactttgagtcggtgttcagcgcccagttgggcgacggcggagctgcggacgggggtccggctgatgtagggggcgcgacggcagcaccaggcggcggggccgggggcagccgggagctggagatgcacactatcagctccaaggtatttggggacattctggacttcgcctacacttcccgcatcgtggtgcgcttggagagctttcccgaactcatgacggccgccaagttcctgctgatgaggtcggttatcgagatctgccaggaagtcatcaaacagtccaacgtacagatcctggtaccccctgcccgcgccgatataatgctctttcgcccccctgggacctcggacttgggcttccctttggacatgaccaacggggcagccttggcagccaacagcaatggcatcgccggcagcatgcagccagaggaggaggcagctcgggcggctggtgcagccattgcaggccaagcctctttgcctgtgttacctggggtggaccgcttgcccatggtggctggacccctatccccccaactgctgacttccccattccccagtgtggcatccagtgcccctcccctgactggcaagcgaggccggggccgcccaaggaaggccaacctgctggactcaatgtttgggtccccagggggcctgagggaggcaggcatccttccatgcggtctatgtggtaaggtgttcactgatgccaaccggctccggcagcacgaggcccagcacggtgtcaccagcctccagctgggctacatcgaccttcctcctccgaggctgggtgagaatgggctacccatctctgaagaccccgacggcccccgaaagaggagccggaccaggaagcaggtggcttgtgagatctgcggcaagatcttccgtgatgtgtatcatcttaaccggcacaagctgtcccactctggggagaagccctactcctgccctgtgtgtgggttgcggttcaagagaaaagaccgcatgtcctaccatgtgcggtcccatgatgggtccgtgggcaagccttacatctgccagagctgtgggaaaggcttctccaggcctgatcacttgaacggacatatcaagcaggtgcacacttctgagcggcctcacaagtgtcagacctgcaatgcttcttttgccacccgagaccgtctgcgctcccacctggcctgtcatgaagacaaggtgccctgccaggtgtgtgggaagtacttgcgggcagcatacatggcagaccacctgaagaagcacagcgaggggcccagcaacttctgcagtatctgtaaccgaggtctccaggcaccaggagcccatcctgaatgggggagcagcgttccactgcgccaggacctatggcaacaaagaaggccagaaatgctcacatcaggatccgattgagagctctgactcctatggtgacctctcagatgccagcgacctgaagacgccagagaagcagagtgccaatggctctttctcctgcgacatggcagtccccaaaaacaaaatggagtctgatggggagaagaagtacccatgccctgaatgtgggagcttcttccgctctaagtcctacttgaacaaacacatccagaaggtgcatgtccgggctctcgggggccccctgggggacctgggccctgcccttggctcacctttctctcctcagcagaacatgtctctcctcgagtcctttgggtttcagattgttcagtcggcatttgcgtcatctttagtagatcctgaggttgaccagcagcccatggggcctgaagggaaatgaggcagctgctgtgtccccacggaaacaaccatctggggactgctgggaaatgctgtgaatgcggagggaagtgatgtttgggttctgtagctgagagatttttattcatttttaactgccccccaaccccactccaactccttctccaccacccattctcccaatggtctttagaaatagattttcatctgatattctgcagaaatatcaatgagacttggtatgggacaggggcagaaaacactacataggcctccaaggcaaaaccagtcccagtttctttaatgggaagaagctggaattcctggtgctcaattcttagtgaccccaatcctatacccaaatctatgatattctgggacctcagtgattttggtcccctcccacttctctagttcgtcatcctcccttcccatatccttcaaaagaaccacactagggtctccacctacttatacaatgcggatgcccaactgtttttaaggaagccagaagcatcccatggaccatggggtgagtgtcctccaagagccccctgagctcagccctctgcctggagggctccagacctttctgagccctgcttggaggcgagcattttcactgctaggacaagctcagctgttgaggacacccccaccccaaatttcagttcttacgtgattttaaccattcaacatgctgttgggttttaattctctaattattattattattgttattattttttaggaccagttgtagtgaattgctactgaaagctatcccaggtgatacagagctctttgtaaaccgcagtcacacattagggttagtattaaactttgtttagatgtaccataattaacttggctagttgattgtttgaagtctatggaagaaatagttttatgcaaaattttaaaaaatgccagtctggtcagggaagtagggggtttcaatgctgttgggaaccaggaaggtgggacagccggcaggtagggacattgtgtacctcagttgtgtcacatgtgagcaagcccaggttgaccttgtgatgtgaattgatctgatcagactgtattaaaaatgttagtacatta

SEQ ID NO: 168488 - DNA, 2385 bp, Homo sapiens
  Payload ID: 13166
  Gene Symbol: PPAN-P2RY11
  Gene Name: PPAN-P2RY11 readthrough
  ENST ID: ENST00000393796
  CDS Start-End: 1-2385
atgggacagtcagggaggtcccggcaccagaagcgcgcccgcgcccaggcgcagctccgcaacctcgaggcctatgccgcgaacccgcactcgttcgtgttcacgcgaggctgcacgggtcgcaacatccggcagctcagcctggacgtgcggcgggtcatggagccgctcactgccagccgtctgcaggttcgtaagaagaactcgctgaaggactgcgtggcagtggctgggcccctcggggtcacacactttctgatcctgagcaaaacagagaccaatgtctactttaagctgatgcgcctcccaggaggccccaccttgaccttccaggtcaagaagtactcgctggtgcgtgatgtggtctcctcactgcgccggcaccgcatgcacgagcagcagtttgcccacccacccctcctggtactcaacagctttggcccccatggtatgcatgtgaagctcatggccaccatgttccagaacctgttcccctccatcaacgtgcacaaggtgaacctgaacaccatcaagcgctgcctcctcatcgactacaaccccgactcccaggagctggacttccgccactatagcatcaaagttgttcctgtgggcgcgagtcgcgggatgaagaagctgctccaggagaagttccccaacatgagccgcctgcaggacatcagcgagctgctggccacgggcgcggggctgtcggagagcgaggcagagcctgacggcgaccacaacatcacagagctgcctcaggctgtcgctggccgtggcaacatgcgggcccagcagagtgcagtgcggctcaccgagatcggcccgcggatgacactgcagctcatcaaggtccaggagggcgtcggggagggcaaagtgatgttccacagttttgtgagcaagacggaggaggagctgcaggccatcctggaagccaaggagaagaagctgcggctgaaggcgcagaggcaggcccagcaggcccagaatgtgcagcgcaagcaggagcagcgggaggcccacagaaagaagagcctggagggcatgaagaaggcacgggtcgggggtagtgatgaagaggcctctgggatcccttcaaggacggcgagcctggagttgggtgaggacgatgatgaacaggaagatgatgacatcgagtatttctgccaggcggtgggcgaggcgcccagtgaggacctgttccccgaggccaagcagaaacggcttgccaagtctccagggcggaagcggaagcggtgggaaatggatcgaggtgccaagtcctgccctgccaacttcttggcagctgccgacgacaaactcagtgggttccagggggacttcctgtggcccatactggtggttgagttcctggtggccgtggccagcaatggcctggccctgtaccgcttcagcatccggaagcagcgcccatggcaccccgccgtggtcttctctgtccagctggcagtcagcgacctgctctgcgccctgacgctgcccccgctggccgcctacctctatccccccaagcactggcgctatggggaggccgcgtgccgcctggagcgcttcctcttcacctgcaacctgctgggcagcgtcatcttcatcacctgcatcagcctcaaccgctacctgggcatcgtgcaccccttcttcgcccgaagccacctgcgacccaagcacgcctgggccgtgagcgctgccggctgggtcctggccgccctgctggccatgcccacactcagcttctcccacctgaagaggccgcagcagggggcgggcaactgcagcgtggccaggcccgaggcctgcatcaagtgtctggggacagcagaccacgggctggcggcctacagagcgtatagcctggtgctggcggggttgggctgcggcctgccgctgctgctcacgctggcagcctacggcgccctcgggcgggccgtgctacgcagcccaggcatgactgtggccgagaagctgcgtgtggcagcgttggtggccagtggtgtggccctctacgccagctcctatgtgccctaccacatcatgcgggtgctcaacgtggatgctcggcggcgctggagcacccgctgcccgagctttgcagacatagcccaggccacagcagccctggagctggggccctacgtgggctaccaggtgatgcggggcctcatgcccctggccttctgtgtccaccctctactctacatggccgcagtgcccagcctgggctgctgctgccgacactgccccggctacagggacagctggaacccagaggacgccaagagcactggccaagccctgcccctcaatgccacagccgcccctaaaccgtcagagccccagtcccgtgagctgagccaatga

SEQ ID NO: 168489 - DNA, 2661 bp, Homo sapiens
  Payload ID: 13166
  Gene Symbol: PPAN-P2RY11
  Gene Name: PPAN-P2RY11 readthrough
  ENST ID: ENST00000428358
  CDS Start-End: 173-1735
gtgtctccatagcaaccgctccatctgattgcccctccccgctcccagaggccacctagtgcgcaggcccgcctgatgtcgtcccacgccgtgccggctctcaggcgccggaagtgagctgcgcagcgccggaagcggcggacgcaggaggcctcgtggaggacacagcagcatgggacagtcagggaggtcccggcaccagaagcgcgcccgcgcccaggcgcagctccgcaacctcgaggcctatgccgcgaacccgcactcgttcgtgttcacgcgaggctgcacgggtcgcaacatccggcagctcagcctggacgtgcggcgggtcatggagccgctcactgccagccgtctgcaggttcgtaagaagaactcgctgaaggactgcgtggcagtggctgggcccctcggggtcacacactttctgatcctgagcaaaacagagaccaatgtctactttaagctgatgcgcctcccaggaggccccaccttgaccttccaggtcaagaagtactcgctggtgcgtgatgtggtctcctcactgcgccggcaccgcatgcacgagcagcagtttgcccacccacccctcctggtactcaacagctttggcccccatggtatgcatgtgaagctcatggccaccatgttccagaacctgttcccctccatcaacgtgcacaaggtgaacctgaacaccatcaagcgctgcctcctcatcgactacaaccccgactcccaggagctggacttccgccactatagcatcaaagttgttcctgtgggcgcgagtcgcgggatgaagaagctgctccaggagaagttccccaacatgagccgcctgcaggacatcagcgagctgctggccacgggcgcggggctgtcggagagcgaggcagagcctgacggcgaccacaacatcacagagctgcctcaggctgtcgctggccgtggcaacatgcgggcccagcagagtgcagtgcggctcaccgagatcggcccgcggatgacactgcagctcatcaaggtccaggagggcgtcggggagggcaaagtgatgttccacagttttgtgagcaagacggaggaggagctgcaggccatcctggaagccaaggagaagaagctgcggctgaaggcgcagaggcaggcccagcaggcccagaatgtgcagcgcaagcaggagcagcgggaggcccacagaaagaagagcctggagggcatgaagaaggcacgggtcgggggtagtgatgaagaggcctctgggatcccttcaaggacggcgagcctggagttgggtgaggacgatgatgaacaggaagatgatgacatcgagtatttctgccaggcggtgggcgaggcgcccagtgaggacctgttccccgaggccaagcagaaacggcttgccaagtctccagggcggaagcggaagcggtgggaaatggatcgaggcaggggtcgcctttgtgaccagaagtttcccaagaccaaggacaagtcccagggagcccaggtgccaagtcctgccctgccaacttcttggcagctgccgacgacaaactcagtgggttccagggggacttcctgtggcccatactggtggttgagttcctggtggccgtggccagcaatggcctggccctgtaccgcttcagcatccggaagcagcgcccatggcaccccgccgtggtcttctctgtccagctggcagtcagcgacctgctctgcgccctgacgctgcccccgctggccgcctacctctatccccccaagcactggcgctatggggaggccgcgtgccgcctggagcgcttcctcttcacctgcaacctgctgggcagcgtcatcttcatcacctgcatcagcctcaaccgctacctgggcatcgtgcaccccttcttcgcccgaagccacctgcgacccaagcacgcctgggccgtgagcgctgccggctgggtcctggccgccctgctggccatgcccacactcagcttctcccacctgaagaggccgcagcagggggcgggcaactgcagcgtggccaggcccgaggcctgcatcaagtgtctggggacagcagaccacgggctggcggcctacagagcgtatagcctggtgctggcggggttgggctgcggcctgccgctgctgctcacgctggcagcctacggcgccctcgggcgggccgtgctacgcagcccaggcatgactgtggccgagaagctgcgtgtggcagcgttggtggccagtggtgtggccctctacgccagctcctatgtgccctaccacatcatgcgggtgctcaacgtggatgctcggcggcgctggagcacccgctgcccgagctttgcagacatagcccaggccacagcagccctggagctggggccctacgtgggctaccaggtgatgcggggcctcatgcccctggccttctgtgtccaccctctactctacatggccgcagtgcccagcctgggctgctgctgccgacactgccccggctacagggacagctggaacccagaggacgccaagagcactggccaagccctgcccctcaatgccacagccgcccctaaaccgtcagagccccagtcccgtgagctgagccaatgatgtggcctagcggaagctgcctcctcaccctaggtgttgctg

SEQ ID NO: 168490 - DNA, 3035 bp, Homo sapiens
  Payload ID: 13167
  Gene Symbol: PERM1
  Gene Name: PPARGC1 and ESRR induced regulator, muscle 1
  Uniprot ID: Q5SV97
  ENST ID: ENST00000341290
  CDS Start-End: 37-2067
agacgcccagctcggccgccgggacccagggcatggatggagccccgaggcggtgggagctcccagttctcatcctgccctggtccggcgtcttctggagaccagatgcagaggcttctgcagggccctgccccacggccccctggtgagccccctgggagtcccaagtcccctggccacagcactggctcccagaggccccccgatagccctggagccccaccacggagccccagccgaaagaagaggcgagctgtgggtgccaaggggggtgggcacacaggagcctctgcttctgcccagacgggctccccgctgctccctgcggccagtcctgagacggcaaagctgatggccaaagccgggcaggaggagttggggccaggtcctgcaggagctcctgagcctggccccaggtcccctgtgcaggaagacagaccagggccaggtttgggcctgtctacacctgtccctgtgacagagcaaggcacagaccaaatcagaaccccgcgccgagccaagctgcacacagtgtccacgactgtctgggaagccctcccagatgtctcaagggctaagtcagacatggctgtgtctacacctgcctccgagccgcaacctgacagggacatggctgtgtctacacctgcctccgagccgcaatctgacagggacatggctgtgtctacacctgcctctgagccgcaacctgacacggacatggctgtgtctacacctgcctctgagccgcaacctgacagggacatggctgtgtctatacctgcctccaagccgcaatctgacacggctgtgtctacaccagcttctgagcctcagtccagtgtggctctgtctacacccatctccaagccacaattggacacggacgtggctgtgtccacacctgcctccaaacatggcctggatgtggccttgcctacagcaggcccagtggctaagctagaggtggcttcatctccacctgtctcggaggctgtgccgaggatgaccgagtccagcgggcttgtgtctacacctgttcccagagccgacgccgctggcctcgcctggcctcccacccgcagagctgggcctgatgtggtggagatggaggcggttgtgtctgagccctcagcaggggcccccggatgctgctctggggcacccgcactgggtctcacccaagtccccaggaagaagaaagtgcgcttctccgtggctgggcccagccccaataagccaggctcaggacaggcctcagcccggccctcagccccccagacagcaactggggcccacggggggcccggagcctgggaggctgtggctgtcgggccccggccccaccagcctcggatcctcaagcacctgcctcgcccccctccctctgccgtgacgagggtcgggcccgggagcagctttgccgtgaccctcccggaggcctacgagttcttcttctgtgacaccatcgaggagaacgaagaggctgaggcggcagcggccggtcaggatccggcaggcgtccagtggccggacatgtgcgagttcttcttcccagacgttggagcccagaggtcgaggcggcgggggtccccggagccgctcccgagagctgatcctgtgccggcccccatacctggagaccccgtgcccatctccatccctgaggtctatgaacacttcttcttcggggaggacaggcttgagggcgtgctggggccggctgtcccgctcccactgcaggccctggagcctccccggtcggcctccgagggggcggggcctgggacccccctcaagccagccgtggtagagcggctccacctggctcttagacgggcaggggagctccgggggcctgtcccatcatttgccttcagccagaatgacatgtgcctggtgtttgtagcttttgccacctgggctgtgaggacgtcagatccgcataccccagacgcctggaaaacagccttgctggccaacgtcggcaccatctctgccatccgctacttccgccggcaggtggggcaagggcgccgcagccacagccccagccccagctcctaggagccaggcccgggccagggagatgcaggatgaggagacgaccacaggcgcccagggcaggacgaggtgccgccctcgcccgggccctctgacccctctcttctaccgcgtccaggaggggggcgtgtcctggtgctgctccctccgactcacctgaggatccagccagtgaccacggccactccccacgcctgggagggaggtgctaaagtctgggtgggtggagggcaggcaggtggctgggtaggagggtggccagattcacagatgagaacacagggcattcggttaatttcagacaggcaatagtggggaggtcattttactaagaagttgttgtttatctgaaatcaaatgcaaccgcaccctgcgtttcttctggggtgcagggggagctgagtggcaggacaggacttggacctcggaggggtctgagcagcaagacactccggctggagctctgggcagaggcaggggagaggacacagggtggcctcaaagaggggatgggcagcctcctcacaggtgggctgggctggcaagggctccaaggcccatcactcttgatcctcaaaggactgtggccaaggcctctgcgggctctggcctgagacagcgaaggctctgcctgcccctccccagtgcagcagcccctgcagggtgggggtctgtggcagagccgcgagcccctccccgggagccctgggtgcaggtgcagagggagaattcggtggcctcagatggagggctgggctcctggggttgtcccgggggctcctgtggggcagctggggacccacagccaagaggagtcagagatgaggtgggaaggtcggtgaggggcccgaggtggcagaggaagggggctgcctggctgggtgctgggtgggggtcctcaagactgtgggagaccctggctgctgagcagagaacacatggatgcagcaccaataaaattctatcttttc

SEQ ID NO: 168491 - DNA, 3340 bp, Homo sapiens
  Payload ID: 13167
  Gene Symbol: PERM1
  Gene Name: PPARGC1 and ESRR induced regulator, muscle 1
  Uniprot ID: Q5SV97
  ENST ID: ENST00000433179
  CDS Start-End: 1-2373
atggaaaatttccagtacagcgtccagctgagtgaccaggactgggccgagttctcagccaccgccgatgagtgtggcctcctgcaggccggcctggcctctggggacgagctcttgtccagtgacattgaccaaggggacagcagtggcagcagtccccccagggccccacctctcccaactgggcagctagctgcaggagggcggagccggcggggctgcgaggaggaggacgtggccacacagcagccggtcagcaggtctcagggtgagcctgtcttggccctggggaccggtcagcagacacccagcacgtccgcacgggcagaagctccaccgtccctcggccccggcgccagccctcccagccagttctcatcctgccctggtccggcgtcttctggagaccagatgcagaggcttctgcagggccctgccccacggccccctggtgagccccctgggagtcccaagtcccctggccacagcactggctcccagaggccccccgatagccctggagccccaccacggagccccagccgaaagaagaggcgagctgtgggtgccaaggggggtgggcacacaggagcctctgcttctgcccagacgggctccccgctgctccctgcggccagtcctgagacggcaaagctgatggccaaagccgggcaggaggagttggggccaggtcctgcaggagctcctgagcctggccccaggtcccctgtgcaggaagacagaccagggccaggtttgggcctgtctacacctgtccctgtgacagagcaaggcacagaccaaatcagaaccccgcgccgagccaagctgcacacagtgtccacgactgtctgggaagccctcccagatgtctcaagggctaagtcagacatggctgtgtctacacctgcctccgagccgcaacctgacagggacatggctgtgtctacacctgcctccgagccgcaatctgacagggacatggctgtgtctacacctgcctctgagccgcaacctgacacggacatggctgtgtctacacctgcctctgagccgcaacctgacagggacatggctgtgtctatacctgcctccaagccgcaatctgacacggctgtgtctacaccagcttctgagcctcagtccagtgtggctctgtctacacccatctccaagccacaattggacacggacgtggctgtgtccacacctgcctccaaacatggcctggatgtggccttgcctacagcaggcccagtggctaagctagaggtggcttcatctccacctgtctcggaggctgtgccgaggatgaccgagtccagcgggcttgtgtctacacctgttcccagagccgacgccgctggcctcgcctggcctcccacccgcagagctgggcctgatgtggtggagatggaggcggttgtgtctgagccctcagcaggggcccccggatgctgctctggggcacccgcactgggtctcacccaagtccccaggaagaagaaagtgcgcttctccgtggctgggcccagccccaataagccaggctcaggacaggcctcagcccggccctcagccccccagacagcaactggggcccacggggggcccggagcctgggaggctgtggctgtcgggccccggccccaccagcctcggatcctcaagcacctgcctcgcccccctccctctgccgtgacgagggtcgggcccgggagcagctttgccgtgaccctcccggaggcctacgagttcttcttctgtgacaccatcgaggagaacgaagaggctgaggcggcagcggccggtcaggatccggcaggcgtccagtggccggacatgtgcgagttcttcttcccagacgttggagcccagaggtcgaggcggcgggggtccccggagccgctcccgagagctgatcctgtgccggcccccatacctggagaccccgtgcccatctccatccctgaggtctatgaacacttcttcttcggggaggacaggcttgagggcgtgctggggccggctgtcccgctcccactgcaggccctggagcctccccggtcggcctccgagggggcggggcctgggacccccctcaagccagccgtggtagagcggctccacctggctcttagacgggcaggggagctccgggggcctgtcccatcatttgccttcagccagaatgacatgtgcctggtgtttgtagcttttgccacctgggctgtgaggacgtcagatccgcataccccagacgcctggaaaacagccttgctggccaacgtcggcaccatctctgccatccgctacttccgccggcaggtggggcaagggcgccgcagccacagccccagccccagctcctaggagccaggcccgggccagggagatgcaggatgaggagacgaccacaggcgcccagggcaggacgaggtgccgccctcgcccgggccctctgacccctctcttctaccgcgtccaggaggggggcgtgtcctggtgctgctccctccgactcacctgaggatccagccagtgaccacggccactccccacgcctgggagggaggtgctaaagtctgggtgggtggagggcaggcaggtggctgggtaggagggtggccagattcacagatgagaacacagggcattcggttaatttcagacaggcaatagtggggaggtcattttactaagaagttgttgtttatctgaaatcaaatgcaaccgcaccctgcgtttcttctggggtgcagggggagctgagtggcaggacaggacttggacctcggaggggtctgagcagcaagacactccggctggagctctgggcagaggcaggggagaggacacagggtggcctcaaagaggggatgggcagcctcctcacaggtgggctgggctggcaagggctccaaggcccatcactcttgatcctcaaaggactgtggccaaggcctctgcgggctctggcctgagacagcgaaggctctgcctgcccctccccagtgcagcagcccctgcagggtgggggtctgtggcagagccgcgagcccctccccgggagccctgggtgcaggtgcagagggagaattcggtggcctcagatggagggctgggctcctggggttgtcccgggggctcctgtggggcagctggggacccacagccaagaggagtcagagatgaggtgggaaggtcggtgaggggcccgaggtggcagaggaagggggctgcctggctgggtgctgggtgggggtcctcaagactgtgggagaccctggctgctgagcagagaacacatggatgcagcaccaataaaattctatctttt

SEQ ID NO: 168492 - DNA, 1882 bp, Homo sapiens
  Payload ID: 13168
  Gene Symbol: PPP5D1
  Gene Name: PPP5 tetratricopeptide repeat domain containing 1
  Uniprot ID: E7EU14
  ENST ID: ENST00000414155
  CDS Start-End: 232-747
atccctccgcgccccgctccacacctacgggcccgcgaatctctcgtccccaccctgcacaggaattgggtttgccgccgggcgcgcgcgcgctcgctcccgtcgccggactactttccctcgccgcgcgccccgcctcccgggcccacttcactttcttcggcggaggggcacagctcggcggtgcgtgacgcgtccctctgtgagccgcgtcactattgggcctggcccatggcggaaatgagagcttggcgcccattggtccgaccttccctgcaatgcgtcaaactggggcgagccactgcaaggtggtggtgggtggtcaaggtgaagccccacgacaaggatgccaaaatgaaataccaggagtgcaacaagatcgtgaagcagaaggcctttgagcgggccatcgcaggcgacgagcacaagcgctccgtggtggactcgctggacatcgagagcatgaccatcgagggtgagtacagcggacccaagcttgaggacgacaaagtgacaatcaccttcatgaaggggctcatgcagtggtacaaggaccagaagaaactgcaccagaaatgcgcctaccagggtcttgctctatcacccaggctgaagtgcagtggtacgatcacagctcactgcagcctcaacctcctgggcccacgtgatcctcccacctcagcatcccaagtagctgtgaccgaaggcatgcaccaccacacctggctaatttttttatttttatagagatgggtctccctatgttgcgcaggctgatttcaaactcttggcctcaagcaatcctcccaccttggcctggggattacaggcgtgagccaccatgcccagcctccgtgtctttacatttgagaacaatttgtaggttagctttgtctttgtttttttagagatgggggtcttgctgtgtagcccaggctggactcaaactacagggctcaaggcattcttcatctcagcctcttgagtaggtttgactacagtcatgtgccactgtgcccaactacctttgtccgggttcctaggaattctccagaaggcagaatgagtacaaagaaaacacaggcaagtttctgttaaagagttacctgtggccacagttcctctggaagtttaacatagagttaccatatactatgctatcgccatccccaaattcatatgttgaagtcttaactcccagcacctctgaatgtgactgtatttggagatgggggtctttaaagaggtaattaaggtaaaatgaggccgggtgctttggtggctcacagctgtaatcccagcactttgggaagctgaggcgggcagatacctgaggtcaggagttcgagaccagcctgcccaacatggtgaaaccctatctctactaaaaatacaaaatttgcctggcgtggcggcatatgcctgtgatcccagctccttgggaggctgaggcaggagaactgtttgaactagggaggaggaggttgcagtgagccgagatcatgccattgcactccagcctgggcaacaagagcgaaactttggttcaaaaacaaacaaaaaaaaagtaaaatgaggtcccatgtgtgggcccttaatccaacctgactggtgtctttatgagaaaaggggaccaggacacagccccatgcagagggaagaccatgtgaggatacagggagaagacggccgtctgcacagccaaggagagaggcctcaggagacaccaacctatccaacaccttgattttggacttctggcctccagaattgtgaaaaagttaatttctgtcattgaagccacccattctgtgatagtttgttacagcagtcctcagcgcgtagaatacgatgccatttgtatggcagacagtctcattgt

SEQ ID NO: 168493 - DNA, 965 bp, Homo sapiens
  Payload ID: 13168
  Gene Symbol: PPP5D1
  Gene Name: PPP5 tetratricopeptide repeat domain containing 1
  ENST ID: ENST00000602017
  CDS Start-End: 1-377
cttccctgcaatgcgtcaaactggggcgagccactgcaaggtggtggtgggtggtcaaggtgaagccccacgacaaggatgccaaaatgaaataccaggagtgcaacaagatcgtgaagcagaaggcctttgagcgggccatcgcaggcgacgagcacaagcgctccgtggtggactcgctggacatcgagagcatgaccatcgagggtgagtacagcggacccaagcttgaggacgacaaagtgacaatcaccttcatgaaggggctcatgcagtggtacaaggaccagaagaaactgcaccagaaatgcgcctaccaggatttcagacaaaaatcaggaatcatcaccagccaagactgtgttcagaccacgtgacgtcttccaggcaccaggaagaaatacgaccaacctccgtaacaaatgagagaaacttcacctgactgtgttttgtgcatttggtttatgagtcgttttaaaaacgtgtacttttactgctgcgttcaggttttcagccatagaatattctagaaaaaaatagtgataacatttatttcaccgctataaccctgaatgtgtagctgtgttttttaaaaaaacatttttttacaattgtagaatatgtaacatgcctccagaaacgtgccctaaacacaaatatataatttggcaaataattacatagcaagtcctatgttactgtcatctgatctagaaatcatcgtcctcccagaagcccctcatgtgctctggccatctcaaatccctccctgccccagggataaataacatcctgttttgtgataaacgctgccttttctatacacgtgtatgcttattaacaaactatgaatttctccacacggtagatttgattatgtttgaatcttacatgaatgtaatcctattggtggattgtttttaatgtatgtgtgtgtgtgtttcagaaaaaatacattaagaaaa

SEQ ID NO: 168494 - DNA, 506 bp, Homo sapiens
  Payload ID: 13168
  Gene Symbol: PPP5D1
  Gene Name: PPP5 tetratricopeptide repeat domain containing 1
  ENST ID: ENST00000593359
  CDS Start-End: 1-394
ttccctgcaatgcgtcaaactggggcgagccactgcaaggtggtggtgggtggtcaaggtgaagccccacgacaaggatgccaaaatgaaataccaggagtgcaacaagatcgtgaagcagaaggcctttgagcgggccatcgcaggcgacgagcacaagcgctccgtggtggactcgctggacatcgagagcatgaccatcgagggtgagtacagcggacccaagcttgaggacgacaaagtgacaatcaccttcatgaaggggctcatgcagtggtacaaggaccagaagaaactgcaccagaaatgcgcctaccaggtaatgcacctgtcaggtaccgggcacccgggaaccctgggatggcatcacagcactgccaggcgcgggcactgagcaaaatgacaggagaagggcagccacaacagccaacaccaaacaggagtcgtggtcattatggattggcagtaatccctcccaatattcagatacaataaactatctctac

SEQ ID NO: 168495 - DNA, 999 bp, Homo sapiens
  Payload ID: 13169
  Gene Symbol: PPT2-EGFL8
  Gene Name: PPT2-EGFL8 readthrough (NMD candidate)
  ENST ID: ENST00000421600
  CDS Start-End: 1-389
atccccaccacgatgacttgtacctcaatgccagcagcttcctggccctgatcaatggggaaagagaccatcccaatgccacagtatggcggaagaactttctgcgtgtgggccacctggtgctgattgggggccctgatgatggtgttattactccctggcagtccagcttctttggtttctatgatgcaaatgagaccgtcctggagatggaggagcaactgcctgccaggcccacccaccagtctgagctgcttctgctgaggctggtctgcttgaagcctcccaggagaaagaagccaggtgggaatggagagagagaggaagcctgtagggtccagcgtcaaagcgaatcatggggtccagggctgagctgtgcactctcttaggcggattctccttcctcctgctactgataccaggcgagggggccaagggtggatccctcagagagaggtgacaacagagggggtagggcccggggtgagctcttctcaggagccttctgctgggggtggggcttcacaggaggcaaaacataactgtaagtttagaatgggggtgagaggctgtcatctggagggagagcggggggcctcagtagcctcttgagggaagtgggactcctggctccccagggcctggcctactcaatctctcccacctcatcctctggcatggacgcagtcagggagtctgctccaagcagacactggtggtcccgctccactacaacgagtcctacagccaaccagtgtacaagccctacctgaccttgtgcgctgggaggcgcatctgcagcacttacaggaccatgtaccgcgttatgtggcgggaggtgaggcgggaggttcagcagacccatgcagtgtgctgccagggctggaagaagcggcacccgggggcgctcacctgtgaagccatctgcgccaagccttgcctgaacggaggcgtctgcgttaggcctgaccagtgcgagtgcgcccccggctggggagg

SEQ ID NO: 168496 - DNA, 2878 bp, Homo sapiens
  Payload ID: 13169
  Gene Symbol: PPT2-EGFL8
  Gene Name: PPT2-EGFL8 readthrough (NMD candidate)
  ENST ID: ENST00000428388
  CDS Start-End: 569-1474
ggaagtggggagaatcaaggcggggaaatcggacttttgggtcgctgggggcaacgaagcctggagaggccttctttccattcccagaatatgtttgctgctttttcctctccccactggcctaaatggatcgctccgcctgtttcctccccagcacctagggcgcaatggaatattccattgcccctcctgtcctgggtctgtgttgcggggaacgctcgcgcggttgccagagaaagccccggacgtgacggatttgcgcgaccccaagcagcccgcccttccccctcccatccgtcattcccctgcgctctctttcctcacccttccccccgccaccgtgggttccagacttgggataagtaaacagcgggtggagcgaggcctacggacccaggccaggtgggagtctgcactcttcaaggggcctgggctgctgctcacgggtattaaagaactccgcgttgttcatggctgaggcgatgcattaggaagatcctggacctagagaacaagtcccccgaacgctgagttggaggcgggacttcgggtgcgcgttggcgggagcatgctggggctctgcgggcagcggctccccgcggcgtgggtcctgcttctgttgcctttcctgccgctgctgctgcttgcagcccccgcgccccaccgcgcgtcctacaagccggtcatcgtggtgcatgggctcttcgacagctcgtacagcttccgccacctgctggaatacatcaatgagacacaccccgggactgtggtgacagtgctcgatctcttcgatgggagagagagcttgcgacccctgtgggaacaggtgcaagggttccgagaggctgtggtccccatcatggcaaaggcccctcaaggggtgcatctcatctgctactcgcaggggggccttgtgtgccgggctctgctttctgtcatggatgatcacaacgtggattctttcatctccctctcctctccacagatgggacagtatggagacacggactacttgaagtggctgttccccacctccatgcggtctaacctctatcggatctgctatagcccctggggccaggaattctccatctgcaactactggcatgatccccaccacgatgacttgtacctcaatgccagcagcttcctggccctgatcaatggggaaagagaccatcccaatgccacagtatggcggaagaactttctgcgtgtgggccacctggtgctgattgggggccctgatgatggtgttattactccctggcagtccagcttctttggtttctatgatgcaaatgagaccgtcctggagatggaggagcaactgcctgccaggcccacccaccagtctgagctgcttctgctgaggctggtctgcttgaagcctcccaggagaaagaagccagcctgtagggtccagcgtcaaagcgaatcatggggtccagggctgagctgtgcactctcttaggcggattctccttcctcctgctactgataccaggcgagggggccaagggtggatccctcagagagaggtgacaacagagggggtagggcccggggtgagctcttctcaggagccttctgctgggggtggggcttcacaggaggcaaaacataactgtaagtttagaatgggggtgagaggctgtcatctggagggagagcggggggcctcagtagcctcttgagggaagtgggactcctggctccccagggcctggcctactcaatctctcccacctcatcctctggcatggacgcagtcagggagtctgctccaagcagacactggtggtcccgctccactacaacgagtcctacagccaaccagtgtacaagccctacctgaccttgtgcgctgggaggcgcatctgcagcacttacaggaccatgtaccgcgttatgtggcgggaggtgaggcgggaggttcagcagacccatgcagtgtgctgccagggctggaagaagcggcacccgggggcgctcacctgtgaagccatctgcgccaagccttgcctgaacggaggcgtctgcgttaggcctgaccagtgcgagtgcgcccccggctggggagggaagcactgtcatgtggacgtggatgaatgtaggaccagcatcaccctctgctcgcaccattgttttaatacggcaggcagcttcacctgcggctgcccccatgacctagtgctaggcgtggacgggcgcacctgcatggaggggtccccagagcccccaaccagtgccagcatactcagcgtggccgttcgggaggcggaaaaagatgagcgcgctctgaagcaggagattcacgagctgcgagggcgcctggagcggctggagcagtgggccggtcaggctggggcctgggtcagagcggtgctgcccgtgccgcctgaagagctgcagccagaacaggtggctgagctgtggggccggggtgaccggatcgaatctctcagcgaccaggtgctgctgctggaggagaggctaggtgcctgctcctgtgaggacaacagcctgggcctcggcgtcaatcatcgataagaagcctctacagcacccctgccccctaatttatacagaaaccggacccactaatcctctgggattggccgactgtgagctgcagataaggctatcagccaccaaagagcaatgaacaatggaaacttcagagagctgaagaaagggggaggcctgtgttcttggcctgcccctgagtcttctggctgggggcaggttgcctgggcaagaactgcttcttcaattccttaacaaatgcaaccaccaacacccagatctctctctctctttattttcagtttttttgctgttatccagataattaataaaaaccaaccacgcaaaa

SEQ ID NO: 168497 - DNA, 4181 bp, Homo sapiens
  Payload ID: 13169
  Gene Symbol: PPT2-EGFL8
  Gene Name: PPT2-EGFL8 readthrough (NMD candidate)
  ENST ID: ENST00000422437
  CDS Start-End: 192-1097
agcgaggcctacggacccaggccaggtgggagtctgcactcttcaaggggcctgggctgctgctcacgggtattaaagaactccgcgttgttcatggctgaggcgatgcattaggaagatcctggacctagagaacaagtcccccgaacgctgagttggaggcgggacttcgggtgcgcgttggcgggagcatgctggggctctgcgggcagcggctccccgcggcgtgggtcctgcttctgttgcctttcctgccgctgctgctgcttgcagcccccgcgccccaccgcgcgtcctacaagccggtcatcgtggtgcatgggctcttcgacagctcgtacagcttccgccacctgctggaatacatcaatgagacacaccccgggactgtggtgacagtgctcgatctcttcgatgggagagagagcttgcgacccctgtgggaacaggtgcaagggttccgagaggctgtggtccccatcatggcaaaggcccctcaaggggtgcatctcatctgctactcgcaggggggccttgtgtgccgggctctgctttctgtcatggatgatcacaacgtggattctttcatctccctctcctctccacagatgggacagtatggagacacggactacttgaagtggctgttccccacctccatgcggtctaacctctatcggatctgctatagcccctggggccaggaattctccatctgcaactactggcatgatccccaccacgatgacttgtacctcaatgccagcagcttcctggccctgatcaatggggaaagagaccatcccaatgccacagtatggcggaagaactttctgcgtgtgggccacctggtgctgattgggggccctgatgatggtgttattactccctggcagtccagcttctttggtttctatgatgcaaatgagaccgtcctggagatggaggagcaactgcctgccaggcccacccaccagtctgagctgcttctgctgaggctggtctgcttgaagcctcccaggagaaagaagccagcctgtagggtccagcgtcaaagcgaatcatggggtccagggctgagctgtgcactctcttaggcggattctccttcctcctgctactgataccagtcagggagtctgctccaagcagacactggtggtcccgctccactacaacgagtcctacagccaaccagtgtacaagccctacctgaccttgtgcgctgggaggcgcatctgcagcacttacaggaccatgtaccgcgttatgtggcgggaggtgaggcgggaggttcagcagacccatgcagtgtgctgccagggctggaagaagcggcacccgggggcgctcacctgtgaagccatctgcgccaagccttgcctgaacggaggcgtctgcgttaggcctgaccagtgcgagtgcgcccccggctggggagggaagcactgtcatgtgggaccagcatcaccctctgctcgcaccattgttttaatacggcaggcagcttcacctgcggctgcccccatgacctagtgctaggcgtggacgggcgcacctgcatggaggggtccccagagcccccaaccagtgccagcatactcagcgtggccgttcgggaggcggaaaaagatgagcgcgctctgaagcaggagattcacgagctgcgagggcgcctggagcggctggagcagtgggccggtcaggctggggcctgggtcagagcggtgctgcccgtgccgcctgaagagctgcagccagaacaggtggctgagctgtggggccggggtgaccggatcgaatctctcagcgaccaggtgctgctgctggaggagaggctaggtgcctgctcctgtgaggacaacagcctgggcctcggcgtcaatcatcgataagaagcctctacagcacccctgccccctaatttatacagaaaccggacccactaatcctctgggattggccgactgtgagctgcagataaggctatcagccaccaaagagcaatgaacaatggaaacttcagagagctgaagaaagggggaggcctgtgttcttggcctgcccctgagtcttctggctgggggcaggttgcctgggcaagaactgcttcttcaattccttaacaaatgcaaccaccaacacccagatctctctctctctttattttcagtttttttgctgttatccagataattaataaaaaccaaccacgcaaaactgggtcccaccctctccttttgctcccagcctacctccccagttgtgggaacaggtctggagtgagaggcagggagtggctaatgccaccaggaagaaatgaaaactggctcagagagggggaagcctcaacagaaaaagaaataaattaaaagccctcctatcccctccagccagggttcgttcctttccccaactccccagggggcagaagtgagtgcagcacctgatgtctgcttcttccccttgtgtctggcttcttcagatagtcaccaccaccccggccatcagtggagatttcccggaaaacagtgagcatggagtgccggactctgtcagccagagctgggacgtcatctggtgtcagcccttccgtgggcactgggggcagcacccgcacctgacattgtcctggggcaaggggagcaccatcatggcctgtccacccaggtctttgcccacagggatgtcctcccagcctctccggacacaccctaccccagaactgctcaaagccctcacccgaggtgaagcgacgctccttcttgcagtagaagtcttggatgactcacgtcctgggtgagcagggtctgggcgacctcagacatgacactgatggcatcccccgtgcgcttccggtcgatgaagatgactcctgccagccagcaggccagcccggcagagccagcccacagtagctcgcgcttggcaatgggcacacagcggcctggcagtacctccatcatcccttgggcagggtgggagtgggtgaggatcggggtggaggcagagtgtcacagaaggcaacccacctcacccagctcatcaccctctggtagggactggaggtgaaggaggagactaggcagggaggggggccccaagtgaaggaaagggtgaccaaaagtatatgtaacctgcttatgagggcagttctacccagggaatgaaggcctgagtgggaggcaagggggcaatgtcccagaggaaggggaattgaggatctctaggagaagatattctagggaaggtttcaggaggggaggcatggctgggggaggtgtgccctgtggtggggtctcaccaagcagatcgagagagctctggtggttggagacaacaacatagggctgcgagggagggaagtggtgagcccctcgcacctccactcggatcccgtacaggtatttgatgtggagcagcattagacgcaagatcctgtggggtcatggcaaggggtcccagtgggatccattgatgtccatctgcatgcctcagctccccccaccttactgtctttctgaccacctttgcagtcctctccccattccctgtctctggtctctctcagtcttttctacacacaccatgcccccttcccccaatccactactcactttgtacccttaggttccctcattgcccaagaccccttgcccctcacttcatgttctcgacgttgcgtcctcgcacggcacacacagggatggcgagcacagccaggaagaggatccagccattgtagaaggccatcttgaagaagtacttggcactggggctgcagaaccacagggtgggcagcaggaagagcagcagcaggaagagcagcagcagcagcatccatgcccctggccacaaatccattctggccacctgcaggggatggggcaagggacaatcagcctggtttctggaggagagtggggctccggatatattcagacaagagacacaagacacagacatctacaattcacagatacctgataataaatgacaacaagaataatagctaacacttgtagctggtaagggtcttataatggtctatacttgtgctgtccgagaaagtagccaccacctacatgtggctacttgaaatgcagctagtctgaactgagatgtgctggaaatgtaaaatacacatcagatttcaaagactgaataaaaaacaaaatgtg

SEQ ID NO: 168498 - DNA, 1540 bp, Homo sapiens
  Payload ID: 13169
  Gene Symbol: PPT2-EGFL8
  Gene Name: PPT2-EGFL8 readthrough (NMD candidate)
  ENST ID: ENST00000583227
  CDS Start-End: 9-302
gcgggagcatgctggggctctgcgggcagcggctccccgcggcgtgggtcctgcttctgttgcctttcctgccgctgctgctgcttgcagcccccgcgccccaccgcgcgtcctacaagccggtcatcgtggtgcatgggctcttcgacagctcgtacagcttccgccacctgctggaatacatcaatgagggggccttgtgtgccgggctctgctttctgtcatggatgatcacaacgtggattctttcatctccctctcctctccacagatgggacagtatggagacacggactacttgaagtggctgttccccacctccatgcggtctaacctctatcggatctgctatagcccctggggccaggaattctccatctgcaactactggcatgatccccaccacgatgacttgtacctcaatgccagcagcttcctggccctgatcaatggggaaagagaccatcccaatgccacagtatggcggaagaactttctgcgtgtgggccacctggtgctgattgggggccctgatgatggtgttattactccctggcagtccagcttctttggtttctatgatgcaaatgagaccgtcctggagatggaggagcaactgcctgccaggcccacccaccagtctgagctgcttctgctgaggctggtctgcttgaagcctcccaggagaaagaagccagcctgtagggtccagcgtcaaagcgaatcatggggtccagggctgagctgtgcactctcttaggcggattctccttcctcctgctactgataccaggcgagggggccaagggtggatccctcagagagaggtgacaacagagggggtagggcccggggtgagctcttctcaggagccttctgctgggggtggggcttcacaggaggcaaaacataactgtaagtttagaatgggggtgagaggctgtcatctggagggagagcggggggcctcagtagcctcttgagggaagtgggactcctggctccccagggcctggcctactcaatctctcccacctcatcctctggcatggacgcagtcagggagtctgctccaagcagacactggtggtcccgctccactacaacgagtcctacagccaaccagtgtacaagccctacctgaccttgtgcgctgggaggcgcatctgcagcacttacaggaccatgtaccgcgttatgtggcgggaggtgaggcgggaggttcagcagacccatgcagtgtgctgccagggctggaagaagcggcacccgggggcgctcacctgtgaagccatctgcgccaagccttgcctgaacggaggcgtctgcgttaggcctgaccagtgcgagtgcgcccccggctggggagggaagcactgtcatgtggacgtggatgaatgtaggaccagcatcaccctctgctcgcaccattgttttaatacggcaggcagcttcacctgcggctgcccccatgacctagtgctaggcgtggacgggcgcacctgcatggaggggtccccagagcccccaaccagtgcca

SEQ ID NO: 168499 - DNA, 1051 bp, Homo sapiens
  Payload ID: 13169
  Gene Symbol: PPT2-EGFL8
  Gene Name: PPT2-EGFL8 readthrough (NMD candidate)
  ENST ID: ENST00000585246
  CDS Start-End: 344-637
gttgccagagaaagccccggacgtgacggatttgcgcgaccccaagcagcccgcccttccccctcccatccgtcattcccctgcgctctctttcctcacccttccccccgccaccgtgggttccagacttgggataagtaaacagcgggtggagcgaggcctacggacccaggccaggtgggagtctgcactcttcaaggggcctgggctgctgctcacgggtattaaagaactccgcgttgttcatggctgaggcgatgcattaggaagatcctggacctagagaacaagtcccccgaacgctgagttggaggcgggacttcgggtgcgcgttggcgggagcatgctggggctctgcgggcagcggctccccgcggcgtgggtcctgcttctgttgcctttcctgccgctgctgctgcttgcagcccccgcgccccaccgcgcgtcctacaagccggtcatcgtggtgcatgggctcttcgacagctcgtacagcttccgccacctgctggaatacatcaatgagggggccttgtgtgccgggctctgctttctgtcatggatgatcacaacgtggattctttcatctccctctcctctccacagatgggacagtatggagacacggactacttgaagtggctgttccccacctccatgcggtctaacctctatcggatctgctatagcccctggggccaggaattctccatctgcaactactggcatgatccccaccacgatgacttgtacctcaatgccagcagcttcctggccctgatcaatggggaaagagaccatcccaatgccacagtatggcggaagaactttctgcgtgtgggccacctggtgctgattgggggccctgatgatggtgttattactccctggcagtccagcttctttggtttctatgatgcaaatgagaccgtcctggagatggaggagcaactgcctgtagggtccagcgtcaaagcgaatcatggggtccagggctgagctgtgcactctcttaggcggattctccttcctcctgctactgataccaggc

SEQ ID NO: 168500 - DNA, 2414 bp, Homo sapiens
  Payload ID: 13170
  Gene Symbol: PQLC1
  Gene Name: PQ loop repeat containing 1
  ENST ID: ENST00000351365
  CDS Start-End: 1-224
atcgggacattcgcaggacgcagaacgccgacggcttctccacctacgtgtgcctggtgctgctggtggccaacattttgcggatactcttctgcctctctgtccgggcagattggaaggtgtctgctgctcttcctatgaagagggcctggtggaggggtggagagaaggagtccaggcagctggtgtcaagaactctgcttctgactctggtcactgagtaatcacgtacctgcttctttgcctgtttggaaggcgctttgagtccccgctgctgtggcagagcgccatcatgatcctgaccatgctgctgatgctgaagctgtgcaccgaggtccgtgtggccaacgagctcaacgccaggcgccgctcctttacagctgcagatagcaaggatgaagaagtcaaggttgcccccaggcggtccttcctggacttcgacccccaccacttctggcagtggagcagcttctcggactacgtgcagtgcgtcctggccttcacgggcgtggcgggctacatcacctacctgtccattgactccgccctgtttgtggagaccctgggcttcctggctgtgctgaccgaagccatgctgggtgtgccccagctttaccgcaaccaccgccaccagtccacggagggcatgagcatcaagatggtgctcatgtggaccagtggtgacgccttcaagacggcctacttcctgctgaagggtgcccctctgcagttctccgtgtgcggcctgctgcaggtgctggtggacctggccatcctggggcaggcctacgccttcgcccgccacccccagaagccggcgccccacgccgtgcaccccactggcaccaaggccctctgacagtggggaggacgaggatgtgggaccgccagccgcgggcactggtgggccctgacctccccgcggggagggtgggtgctgtggcccctgcaggtgtggcagagatggggcatgggcattggggtctccatcagcctctgtggggtgtctcagggtgggcagtgggggtggggctgggacgctgtttgtgctcagcggggacagccagggttgatctggccccgagggttttggatgtttttaggatgacataaaaagcaagtgttttccccatttcctcttatgaaacaccgtctgagcccaaggtacacattgggcggcctgcaggaacctgctccaggtggacacacgggccagcagccgcgaaccttgaagctggggtgaccgcaggagaccctgtaaggcctgtgagcggagccctcgaccccgtgacaccctggccagacaccctgcttggactggggtggcctctgctacccaggggtctggcacgggggagggctggggctttctctgcctggtacacacggaaaggcggctgtgcggacgcagggtcaccgtgctccgggttttctgacagtcggtgtttcctgggcctttggagtggctgcgaggcctgaacgccttgtggatccgctgtgtccagcccggctgagcatcgccagggctagctcatgctgctcttgtcagcctctggttctcctcgagtccttggggacgtggcagatgccagcgaccatcagacaacgtggaggccctcatgggcaatggctgagggggccgggctgaggctgtgcacatgcagtctgcacgccactcttgggctctgctggcggagatccccttccttctgggtgcagactgcacctccggatgcagttttgatgtccatcttccaggagagacggtctcgggtccagggagtggagggggctgcccctgccgtgcaggtcctggccgatggcgccttaccctgctgccctgggcttttggcctgaagcaaattcctgagtggggggtactggggcctgccgcatcctgtcctgtccactgcccacccccgtgtgctggctccctcacttctggctgcagtgggagccgccagtctgacccttgtcaccgcacgctctgcccccaccccgttgcaagaggtcacaccatgtcagcagccttgcactgaccgcagccggcccccaggcctcagagttctggatgcttccgtgcggctccaacaggcatcgtcttcccttccgcaggtggaggggccgcttcccgcaggcatctgagctctgtgccggggccgtggccatgggaagatgttccacgctgcctcctcctcgagttttcctcggaaacactcttgaatgtctgagtgagggtcctgcttagctctttggcctgtgagatgctttgaaaatttttatttttttaagatgaagcaagatgtctgtagcggtaattgcctcacattaaactgtcgccgactgcaggcgcagtgactgctgaatgtaccctgtgtggcgacttggaatcaataaaccatttgtggatcctg

SEQ ID NO: 168501 - DNA, 2475 bp, Homo sapiens
  Payload ID: 13170
  Gene Symbol: PQLC1
  Gene Name: PQ loop repeat containing 1
  Uniprot ID: Q8N2U9
  ENST ID: ENST00000357575
  CDS Start-End: 158-919
cgcgcgcgggtcagcggcgcggggacgcggggcgctgggcgcggggctgggggcgcaggccccgaggccgcaggagcgcgcggagcggcgatgagcaggcggccggtggcccgcggggcgcggagcccgtgacagcctcggccaggcgggcgctgcgatggaggccgagggcctggactggctcctggtgccactgcaccagctggtgtcctggggcgcggccgcggccatggtcttcggaggggtggtgccctacgtcccgcagtatcgggacattcgcaggacgcagaacgccgacggcttctccacctacgtgtgcctggtgctgctggtggccaacattttgcggatactcttctggtttggaaggcgctttgagtccccgctgctgtggcagagcgccatcatgatcctgaccatgctgctgatgctgaagctgtgcaccgaggtccgtgtggccaacgagctcaacgccaggcgccgctcctttacagacttcgacccccaccacttctggcagtggagcagcttctcggactacgtgcagtgcgtcctggccttcacgggcgtggcgggctacatcacctacctgtccattgactccgccctgtttgtggagaccctgggcttcctggctgtgctgaccgaagccatgctgggtgtgccccagctttaccgcaaccaccgccaccagtccacggagggcatgagcatcaagatggtgctcatgtggaccagtggtgacgccttcaagacggcctacttcctgctgaagggtgcccctctgcagttctccgtgtgcggcctgctgcaggtgctggtggacctggccatcctggggcaggcctacgccttcgcccgccacccccagaagccggcgccccacgccgtgcaccccactggcaccaaggccctctgacagtggggaggacgaggatgtgggaccgccagccgcgggcactggtgggccctgacctccccgcggggagggtgggtgctgtggcccctgcaggtgtggcagagatggggcatgggcattggggtctccatcagcctctgtggggtgtctcagggtgggcagtgggggtggggctgggacgctgtttgtgctcagcggggacagccagggttgatctggccccgagggttttggatgtttttaggatgacataaaaagcaagtgttttccccatttcctcttatgaaacaccgtctgagcccaaggtacacattgggcggcctgcaggaacctgctccaggtggacacacgggccagcagccgcgaaccttgaagctggggtgaccgcaggagaccctgtaaggcctgtgagcggagccctcgaccccgtgacaccctggccagacaccctgcttggactggggtggcctctgctacccaggggtctggcacgggggagggctggggctttctctgcctggtacacacggaaaggcggctgtgcggacgcagggtcaccgtgctccgggttttctgacagtcggtgtttcctgggcctttggagtggctgcgaggcctgaacgccttgtggatccgctgtgtccagcccggctgagcatcgccagggctagctcatgctgctcttgtcagcctctggttctcctcgagtccttggggacgtggcagatgccagcgaccatcagacaacgtggaggccctcatgggcaatggctgagggggccgggctgaggctgtgcacatgcagtctgcacgccactcttgggctctgctggcggagatccccttccttctgggtgcagactgcacctccggatgcagttttgatgtccatcttccaggagagacggtctcgggtccagggagtggagggggctgcccctgccgtgcaggtcctggccgatggcgccttaccctgctgccctgggcttttggcctgaagcaaattcctgagtggggggtactggggcctgccgcatcctgtcctgtccactgcccacccccgtgtgctggctccctcacttctggctgcagtgggagccgccagtctgacccttgtcaccgcacgctctgcccccaccccgttgcaagaggtcacaccatgtcagcagccttgcactgaccgcagccggcccccaggcctcagagttctggatgcttccgtgcggctccaacaggcatcgtcttcccttccgcaggtggaggggccgcttcccgcaggcatctgagctctgtgccggggccgtggccatgggaagatgttccacgctgcctcctcctcgagttttcctcggaaacactcttgaatgtctgagtgagggtcctgcttagctctttggcctgtgagatgctttgaaaatttttatttttttaagatgaagcaagatgtctgtagcggtaattgcctcacattaaactgtcgccgactgcaggcgcagtgactgctgaatgtaccctgtgtggcgacttggaatcaataaaccatttgtggatcctga

SEQ ID NO: 168502 - DNA, 2555 bp, Homo sapiens
  Payload ID: 13170
  Gene Symbol: PQLC1
  Gene Name: PQ loop repeat containing 1
  Uniprot ID: Q8N2U9
  ENST ID: ENST00000397778
  CDS Start-End: 184-999
ggcgcctgagcggactgacgccgagacgcgcgcgggtcagcggcgcggggacgcggggcgctgggcgcggggctgggggcgcaggccccgaggccgcaggagcgcgcggagcggcgatgagcaggcggccggtggcccgcggggcgcggagcccgtgacagcctcggccaggcgggcgctgcgatggaggccgagggcctggactggctcctggtgccactgcaccagctggtgtcctggggcgcggccgcggccatggtcttcggaggggtggtgccctacgtcccgcagtatcgggacattcgcaggacgcagaacgccgacggcttctccacctacgtgtgcctggtgctgctggtggccaacattttgcggatactcttctggtttggaaggcgctttgagtccccgctgctgtggcagagcgccatcatgatcctgaccatgctgctgatgctgaagctgtgcaccgaggtccgtgtggccaacgagctcaacgccaggcgccgctcctttacagctgcagatagcaaggatgaagaagtcaaggttgcccccaggcggtccttcctggacttcgacccccaccacttctggcagtggagcagcttctcggactacgtgcagtgcgtcctggccttcacgggcgtggcgggctacatcacctacctgtccattgactccgccctgtttgtggagaccctgggcttcctggctgtgctgaccgaagccatgctgggtgtgccccagctttaccgcaaccaccgccaccagtccacggagggcatgagcatcaagatggtgctcatgtggaccagtggtgacgccttcaagacggcctacttcctgctgaagggtgcccctctgcagttctccgtgtgcggcctgctgcaggtgctggtggacctggccatcctggggcaggcctacgccttcgcccgccacccccagaagccggcgccccacgccgtgcaccccactggcaccaaggccctctgacagtggggaggacgaggatgtgggaccgccagccgcgggcactggtgggccctgacctccccgcggggagggtgggtgctgtggcccctgcaggtgtggcagagatggggcatgggcattggggtctccatcagcctctgtggggtgtctcagggtgggcagtgggggtggggctgggacgctgtttgtgctcagcggggacagccagggttgatctggccccgagggttttggatgtttttaggatgacataaaaagcaagtgttttccccatttcctcttatgaaacaccgtctgagcccaaggtacacattgggcggcctgcaggaacctgctccaggtggacacacgggccagcagccgcgaaccttgaagctggggtgaccgcaggagaccctgtaaggcctgtgagcggagccctcgaccccgtgacaccctggccagacaccctgcttggactggggtggcctctgctacccaggggtctggcacgggggagggctggggctttctctgcctggtacacacggaaaggcggctgtgcggacgcagggtcaccgtgctccgggttttctgacagtcggtgtttcctgggcctttggagtggctgcgaggcctgaacgccttgtggatccgctgtgtccagcccggctgagcatcgccagggctagctcatgctgctcttgtcagcctctggttctcctcgagtccttggggacgtggcagatgccagcgaccatcagacaacgtggaggccctcatgggcaatggctgagggggccgggctgaggctgtgcacatgcagtctgcacgccactcttgggctctgctggcggagatccccttccttctgggtgcagactgcacctccggatgcagttttgatgtccatcttccaggagagacggtctcgggtccagggagtggagggggctgcccctgccgtgcaggtcctggccgatggcgccttaccctgctgccctgggcttttggcctgaagcaaattcctgagtggggggtactggggcctgccgcatcctgtcctgtccactgcccacccccgtgtgctggctccctcacttctggctgcagtgggagccgccagtctgacccttgtcaccgcacgctctgcccccaccccgttgcaagaggtcacaccatgtcagcagccttgcactgaccgcagccggcccccaggcctcagagttctggatgcttccgtgcggctccaacaggcatcgtcttcccttccgcaggtggaggggccgcttcccgcaggcatctgagctctgtgccggggccgtggccatgggaagatgttccacgctgcctcctcctcgagttttcctcggaaacactcttgaatgtctgagtgagggtcctgcttagctctttggcctgtgagatgctttgaaaatttttatttttttaagatgaagcaagatgtctgtagcggtaattgcctcacattaaactgtcgccgactgcaggcgcagtgactgctgaatgtaccctgtgtggcgacttggaatcaataaaccatttgtggatcctga

SEQ ID NO: 168503 - DNA, 1247 bp, Homo sapiens
  Payload ID: 13170
  Gene Symbol: PQLC1
  Gene Name: PQ loop repeat containing 1
  Uniprot ID: Q8N2U9
  ENST ID: ENST00000590381
  CDS Start-End: 173-571
ggactgacgccgagacgcgcgcgggtcagcggcgcggggacgcggggcgctgggcgcggggctgggggcgcaggccccgaggccgcaggagcgcgcggagcggcgatgagcaggcggccggtggcccgcggggcgcggagcccgtgacagcctcggccaggcgggcgctgcgatggaggccgagggcctggactggctcctggtgccactgcaccagctggtgtcctggggcgcggccgcggccatggtcttcggaggggtggtgccctacgtcccgcagtatcgggacattcgcaggacgcagaacgccgacggcttctccacctacgtgtgcctggtgctgctggtggccaacattttgcggatactcttctggtttggaaggcgctttgagtccccgctgctgtggcagagcgccatcatgatcctgaccatgctgctgatgctgaagctgtgcaccgaggtccgtgtggccaacgagctcaacgccaggcgccgctcctttacagcatcaagatggtgctcatgtggaccagtggtgacgccttcaagacggcctacttcctgctgaagggtgcccctctgcagttctccgtgtgcggcctgctgcaggtgctggtggacctggccatcctggggcaggcctacgccttcgcccgccacccccagaagccggcgccccacgccgtgcaccccactggcaccaaggccctctgacagtggggaggacgaggatgtgggaccgccagccgcgggcactggtgggccctgacctccccgcggggagggtgggtgctgtggcccctgcaggtgtggcagagatggggcatgggcattggggtctccatcagcctctgtggggtgtctcagggtgggcagtgggggtggggctgggacgctgtttgtgctcagcggggacagccagggttgatctggccccgagggttttggatgtttttaggatgacataaaaagcaagtgttttccccatttcctcttatgaaacaccgtctgagcccaaggtacacattgggcggcctgcaggaacctgctccaggtggacacacgggccagcagccgcgaaccttgaagctggggtgaccgcaggagaccctgtaaggcctgtgagcggagccctcgaccccgtgacaccctggccagacaccctgcttggactggggtggcctctgctacccaggggtctggcacgggggagggctggggctttctctgcctggtacacacgg

SEQ ID NO: 168504 - DNA, 2319 bp, Homo sapiens
  Payload ID: 13170
  Gene Symbol: PQLC1
  Gene Name: PQ loop repeat containing 1
  ENST ID: ENST00000474967
  CDS Start-End: 177-380
gagcggactgacgccgagacgcgcgcgggtcagcggcgcggggacgcggggcgctgggcgcggggctgggggcgcaggccccgaggccgcaggagcgcgcggagcggcgatgagcaggcggccggtggcccgcggggcgcggagcccgtgacagcctcggccaggcgggcgctgcgatggaggccgagggcctggactggctcctggtgccactgcaccagctggtgtcctggggcgcggccgcggccatggtcttcggaggggtggtgccctacgtcccgcagtatcgggacattcgcaggacgcagaacgccgacggcttctccacctacgtgtgcctggtgctgctggtggccaacattttgcggatactcttctgagtcttgctctgtcgccaggctggagtgcagtggtacaatctcggctcactgcagcctctgactcctgggttcaagtgattctcctgcctcagcctcctgagtagctgggactacaggtgcctgccaccatacccaggtttggaaggcgctttgagtccccgctgctgtggcagagcgccatcatgatcctgaccatgctgctgatgctgaagctgtgcaccgaggtccgtgtggccaacgagctcaacgccaggcgccgctcctttacagcatcaagatggtgctcatgtggaccagtggtgacgccttcaagacggcctacttcctgctgaagggtgcccctctgcagttctccgtgtgcggcctgctgcaggtgctggtggacctggccatcctggggcaggcctacgccttcgcccgccacccccagaagccggcgccccacgccgtgcaccccactggcaccaaggccctctgacagtggggaggacgaggatgtgggaccgccagccgcgggcactggtgggccctgacctccccgcggggagggtgggtgctgtggcccctgcaggtgtggcagagatggggcatgggcattggggtctccatcagcctctgtggggtgtctcagggtgggcagtgggggtggggctgggacgctgtttgtgctcagcggggacagccagggttgatctggccccgagggttttggatgtttttaggatgacataaaaagcaagtgttttccccatttcctcttatgaaacaccgtctgagcccaaggtacacattgggcggcctgcaggaacctgctccaggtggacacacgggccagcagccgcgaaccttgaagctggggtgaccgcaggagaccctgtaaggcctgtgagcggagccctcgaccccgtgacaccctggccagacaccctgcttggactggggtggcctctgctacccaggggtctggcacgggggagggctggggctttctctgcctggtacacacggaaaggcggctgtgcggacgcagggtcaccgtgctccgggttttctgacagtcggtgtttcctgggcctttggagtggctgcgaggcctgaacgccttgtggatccgctgtgtccagcccggctgagcatcgccagggctagctcatgctgctcttgtcagcctctggttctcctcgagtccttggggacgtggcagatgccagcgaccatcagacaacgtggaggccctcatgggcaatggctgagggggccgggctgaggctgtgcacatgcagtctgcacgccactcttgggctctgctggcggagatccccttccttctgggtgcagactgcacctccggatgcagttttgatgtccatcttccaggagagacggtctcgggtccagggagtggagggggctgcccctgccgtgcaggtcctggccgatggcgccttaccctgctgccctgggcttttggcctgaagcaaattcctgagtggggggtactggggcctgccgcatcctgtcctgtccactgcccacccccgtgtgctggctccctcacttctggctgcagtgggagccgccagtctgacccttgtcaccgcacgctctgcccccaccccgttgcaagaggtcacaccatgtcagcagccttgcactgaccgcagccggcccccaggcctcagagttctggatgcttccgtgcggctccaacaggcatcgtcttcccttccgcaggtggaggggccgcttcccgcaggcatctgagctctgtgccggggccgtggccatgggaagatgttccacgctgcctcctcctcgagttttcctcggaaacactcttgaatgtctgagtgagggtcctgcttagctctttggcctgtgagatgctttgaaaatttttatttttttaagatgaagcaagatgtctgtagcggtaatt

SEQ ID NO: 168505 - DNA, 409 bp, Homo sapiens
  Payload ID: 13170
  Gene Symbol: PQLC1
  Gene Name: PQ loop repeat containing 1
  ENST ID: ENST00000478144
  CDS Start-End: 1-409
gcggccgcggccatggtcttcggaggggtggtgccctacgtcccgcagtatcgggacattcgcaggacgcagaacgccgacggcttctccacctacgtgtgcctggtgctgctggtggccaacattttgcggatactcttctgtccttactaccattttgcaaaaccagcattcagcagatcacactctgtggaatgccaacattcaggatttggcaggtttggaaggcgctttgagtccccgctgctgtggcagagcgccatcatgatcctgaccatgctgctgatgctgaagctgtgcaccgaggtccgtgtggccaacgagctcaacgccaggcgccgctcctttacagacttcgacccccaccacttctggcagtggagcagcttctcggactacgtgcagtgcg

SEQ ID NO: 168506 - DNA, 856 bp, Homo sapiens
  Payload ID: 13170
  Gene Symbol: PQLC1
  Gene Name: PQ loop repeat containing 1
  ENST ID: ENST00000591964
  CDS Start-End: 149-394
gtcagcggcgcggggacgcggggcgctgggcgcggggctgggggcgcaggccccgaggccgcaggagcgcgcggagcggcgatgagcaggcggccggtggcccgcggggcgcggagcccgtgacagcctcggccaggcgggcgctgcgatggaggccgagggcctggactggctcctggtgccactgcaccagctggtgtcctggggcgcggccgcggccatggtcttcggaggggtggtgccctacgtcccgcagtatcgggacattcgcaggacgcagaacgccgacggcttctccacctacgtgtgcctggtgctgctggtggccaacattttgcggatactcttctggctggagtgcagtggtacaatctcggctcactgcagcctctgactcctgggttcaagtgattctcctgcctcagcctcctgagtagctgggactacaggtgcctgccaccatacccaggtttggaaggcgctttgagtccccgctgctgtggcagagcgccatcatgatcctgaccatgctgctgatgctgaagctgtgcaccgaggtccgtgtggccaacgagctcaacgccaggcgccgctcctttacagtgctttgaatatgttattccactgccctctggactccattgtttctgatgagaagtcagctgttaatcttattggggtttccttacttcgacccccaccacttctggcagtggagcagcttctcggactacgtgcagtgcgtcctggccttcacgggcgtggcgggctacatcacctacctgtccattgactccgccctgtttgtggagaccctgggcttcctggctgtgctgaccgaagccatgctgggtgt

SEQ ID NO: 168507 - DNA, 704 bp, Homo sapiens
  Payload ID: 13170
  Gene Symbol: PQLC1
  Gene Name: PQ loop repeat containing 1
  ENST ID: ENST00000589452
  CDS Start-End: 177-380
gagcggactgacgccgagacgcgcgcgggtcagcggcgcggggacgcggggcgctgggcgcggggctgggggcgcaggccccgaggccgcaggagcgcgcggagcggcgatgagcaggcggccggtggcccgcggggcgcggagcccgtgacagcctcggccaggcgggcgctgcgatggaggccgagggcctggactggctcctggtgccactgcaccagctggtgtcctggggcgcggccgcggccatggtcttcggaggggtggtgccctacgtcccgcagtatcgggacattcgcaggacgcagaacgccgacggcttctccacctacgtgtgcctggtgctgctggtggccaacattttgcggatactcttctgagtcttgctctgtcgccaggctggagtgcagtggtacaatctcggctcactgcagcctctgactcctgggttcaagtgattctcctgcctcagcctcctgagtagctgggactacaggtgcctgccaccatacccaggtttggaaggcgctttgagtccccgctgctgtggcagagcgccatcatgatcctgaccatgctgctgatgctgaagctgtgcaccgaggtccgtgtggccaacgagctcaacgccaggcgccgctcctttacagctgcagatagcaaggatgaagaagtcaaggttgcccccaggcggtccttcctgg

SEQ ID NO: 168508 - DNA, 764 bp, Homo sapiens
  Payload ID: 13170
  Gene Symbol: PQLC1
  Gene Name: PQ loop repeat containing 1
  ENST ID: ENST00000593030
  CDS Start-End: 123-521
tgggcgcggggctgggggcgcaggccccgaggccgcaggagcgcgcggagcggcgatgagcaggcggccggtggcccgcggggcgcggagcccgtgacagcctcggccaggcgggcgctgcgatggaggccgagggcctggactggctcctggtgccactgcaccagctggtgtcctggggcgcggccgcggccatggtcttcggaggggtggtgccctacgtcccgcagtatcgggacattcgcaggacgcagaacgccgacggcttctccacctacgtgtgcctggtgctgctggtggccaacattttgcggatactcttctggtttggaaggcgctttgagtccccgctgctgtggcagagcgccatcatgatcctgaccatgctgctgatgctgaagctgtgcaccgaggtccgtgtggccaacgagctcaacgccaggcgccgctcctttacagctgcagatagcaaggatgaagaagtcaaggttgcccccaggcggtccttcctggtgctttgaatatgttattccactgccctctggactccattgtttctgatgagaagtcagctgttaatcttattggggtttccttatcaggagtcaccatgcccaccaggtgtcccccgtgtccgccgacttctcctgactgaacttagagatctcatttcccgctgtctgagccaccccaggtcagcctcagccagcgttttccttacccagctcctccccgccacctgctccaattccccagcacatgtg

SEQ ID NO: 168509 - DNA, 2153 bp, Homo sapiens
  Payload ID: 13171
  Gene Symbol: PQLC2
  Gene Name: PQ loop repeat containing 2
  Uniprot ID: Q6ZP29
  ENST ID: ENST00000375153
  CDS Start-End: 641-1516
aagctgggccctggcggcggatctggacgtggtgagccggaccgggggcaggtggcaaacttcacggctgggggtcggggctcctgggcttccctgccacatccttccagccctctcctccggccgctggactgtcccggctcctgcgccctccttgtggcgcgatatcgtgggacgaggctccgggccgggactgggtggccctcgggaatccgcagccagtggccccccacctcaaaggcgaccagcgcggcctctcgagctggcctggccaggagttgccctgccccggccgaccggccccttggcatctgatggcttcgtttttcccgggccggccgggcgaggggccctcgcggcgctggccccagcagctgtcctatcattatccctccaaacaggcggcccgcgccgggctgagtcaccaggagggagctgtggccgaggacgccgaggcctggagtgggtggtagccccgagctgggacgctcctccctccacaatctccccaggtctgcagggaccgagggcctacactgcctcctcccacgccgtgcttaggaacccttgctggcctcagaacaccagcgccctccctccggtgcagccctgcctggccgggggcccctcctccacagccatggtctggaagaaactgggctcccgcaacttctccagctgccccagtggctccatccagtggatatgggatgtgttgggtgaatgtgcccaggacggctgggacgaggccagcgtgggcctgggcttgatctccattctctgctttgctgcatctaccttcccccagttcatcaaagcctacaagacgggcaacatggaccaggcgctgtccctgtggttcctcctgggctggattggcggagactcctgcaacctcatcggctccttccttgctgaccagctgcccctgcagacctacacggctgtgtattatgtcttggcagacctggtgatgctgacgctgtacttttactacaagttcaggacgcgcccctctctgttgtctgcccccatcaactccgtgctgttgttcctcatggggatggcgtgcgccacaccgctgctgagtgctgctgggcccgtggctgcccctagggaagccttccgggggcgggcgctcctgtccgtggagtcgggcagcaagcccttcacccggcaggaagtcattggcttcgtcatcggctccatctccagcgtgttgtacctgctttcccggctgcctcagatccgcaccaacttcctccggaagtccacccaggggatctcctactctctgttcgcgctggtgatgctggggaacacgctgtatgggctgagcgtgctgctcaaaaaccccgaggagggccagagcgagggcagctacctgctgcaccacctgccctggcttgtgggcagcctgggcgtgctgctgctcgacaccatcatctccatccagttcctggtgtacaggcgcagcaccgccgcctcggagcttgagcccctcctccccagctgaccagaaccaggctgagcgcaggaggacaggcaccaccggatgccacaccaggcaggaggaggtgtggacagtgatggtacggcggccctgcatcagcctgcgggtggcctctggatcctccgtggaccgaaccgtccccccaggaacacaccttcaggtagaccccgaagcctcaaggccggggctggagcggagaccccagggcctctcaggagacagtgaggctgcccctcctaccacctacctcattctgcctactcaccccaggggccacagccacagcctgctggactcaggactgtcctgtcaactccagacaactgaataaacaggccgggtacagtggctcgcacctgtaatcctagcactttgggaggccgaagcgggtggaccacttgacgtccgtagttcgagaccagcctggccaacatggtgaaaccccatctctactaaaaatacaaaaattagccaggtgtggtggcacacatctgtagtcccagctacttgggaggctgaggcaggagaactgtttgaacctgggagacagaggttgcggtgaaccgagatcgtgccactgtactccagcctgggtgacagagtgagactccgtctcaaaaaaataaaaaagataaccgag

SEQ ID NO: 168510 - DNA, 1805 bp, Homo sapiens
  Payload ID: 13171
  Gene Symbol: PQLC2
  Gene Name: PQ loop repeat containing 2
  Uniprot ID: Q6ZP29
  ENST ID: ENST00000375155
  CDS Start-End: 273-1148
agaagctgggccctggcggcggatctggacgtggcggcccgcgccgggctgagtcaccaggagggagctgtggccgaggacgccgaggcctggagtgggtggtagccccgagctgggacgctcctccctccacaatctccccaggtctgcagggaccgagggcctacactgcctcctcccacgccgtgcttaggaacccttgctggcctcagaacaccagcgccctccctccggtgcagccctgcctggccgggggcccctcctccacagccatggtctggaagaaactgggctcccgcaacttctccagctgccccagtggctccatccagtggatatgggatgtgttgggtgaatgtgcccaggacggctgggacgaggccagcgtgggcctgggcttgatctccattctctgctttgctgcatctaccttcccccagttcatcaaagcctacaagacgggcaacatggaccaggcgctgtccctgtggttcctcctgggctggattggcggagactcctgcaacctcatcggctccttccttgctgaccagctgcccctgcagacctacacggctgtgtattatgtcttggcagacctggtgatgctgacgctgtacttttactacaagttcaggacgcgcccctctctgttgtctgcccccatcaactccgtgctgttgttcctcatggggatggcgtgcgccacaccgctgctgagtgctgctgggcccgtggctgcccctagggaagccttccgggggcgggcgctcctgtccgtggagtcgggcagcaagcccttcacccggcaggaagtcattggcttcgtcatcggctccatctccagcgtgttgtacctgctttcccggctgcctcagatccgcaccaacttcctccggaagtccacccaggggatctcctactctctgttcgcgctggtgatgctggggaacacgctgtatgggctgagcgtgctgctcaaaaaccccgaggagggccagagcgagggcagctacctgctgcaccacctgccctggcttgtgggcagcctgggcgtgctgctgctcgacaccatcatctccatccagttcctggtgtacaggcgcagcaccgccgcctcggagcttgagcccctcctccccagctgaccagaaccaggctgagcgcaggaggacaggcaccaccggatgccacaccaggcaggaggaggtgtggacagtgatggtacggcggccctgcatcagcctgcgggtggcctctggatcctccgtggaccgaaccgtccccccaggaacacaccttcaggtagaccccgaagcctcaaggccggggctggagcggagaccccagggcctctcaggagacagtgaggctgcccctcctaccacctacctcattctgcctactcaccccaggggccacagccacagcctgctggactcaggactgtcctgtcaactccagacaactgaataaacaggccgggtacagtggctcgcacctgtaatcctagcactttgggaggccgaagcgggtggaccacttgacgtccgtagttcgagaccagcctggccaacatggtgaaaccccatctctactaaaaatacaaaaattagccaggtgtggtggcacacatctgtagtcccagctacttgggaggctgaggcaggagaactgtttgaacctgggagacagaggttgcggtgaaccgagatcgtgccactgtactccagcctgggtgacagagtgagactccgtctcaaaaaaataaaaaagataaccgaggaaacggtacctccccatga

SEQ ID NO: 168511 - DNA, 1548 bp, Homo sapiens
  Payload ID: 13171
  Gene Symbol: PQLC2
  Gene Name: PQ loop repeat containing 2
  Uniprot ID: Q6ZP29
  ENST ID: ENST00000400548
  CDS Start-End: 211-891
gcggcggatctggacgtggcggcccgcgccgggctgagtcaccaggagggagctgtggccgaggacgccgaggcctggagtgggtggtagccccgagctgggacgctcctccctccacaatctccccaggtctgcagggaccgagggcctacactgcctcctcccacgccgtgcttaggccagttcatcaaagcctacaagacgggcaacatggaccaggcgctgtccctgtggttcctcctgggctggattggcggagactcctgcaacctcatcggctccttccttgctgaccagctgcccctgcagacctacacggctgtgtattatgtcttggcagacctggtgatgctgacgctgtacttttactacaagttcaggacgcgcccctctctgttgtctgcccccatcaactccgtgctgttgttcctcatggggatggcgtgcgccacaccgctgctgagtgctgctgggcccgtggctgcccctagggaagccttccgggggcgggcgctcctgtccgtggagtcgggcagcaagcccttcacccggcaggaagtcattggcttcgtcatcggctccatctccagcgtgttgtacctgctttcccggctgcctcagatccgcaccaacttcctccggaagtccacccaggggatctcctactctctgttcgcgctggtgatgctggggaacacgctgtatgggctgagcgtgctgctcaaaaaccccgaggagggccagagcgagggcagctacctgctgcaccacctgccctggcttgtgggcagcctgggcgtgctgctgctcgacaccatcatctccatccagttcctggtgtacaggcgcagcaccgccgcctcggagcttgagcccctcctccccagctgaccagaaccaggctgagcgcaggaggacaggcaccaccggatgccacaccaggcaggaggaggtgtggacagtgatggtacggcggccctgcatcagcctgcgggtggcctctggatcctccgtggaccgaaccgtccccccaggaacacaccttcaggtagaccccgaagcctcaaggccggggctggagcggagaccccagggcctctcaggagacagtgaggctgcccctcctaccacctacctcattctgcctactcaccccaggggccacagccacagcctgctggactcaggactgtcctgtcaactccagacaactgaataaacaggccgggtacagtggctcgcacctgtaatcctagcactttgggaggccgaagcgggtggaccacttgacgtccgtagttcgagaccagcctggccaacatggtgaaaccccatctctactaaaaatacaaaaattagccaggtgtggtggcacacatctgtagtcccagctacttgggaggctgaggcaggagaactgtttgaacctgggagacagaggttgcggtgaaccgagatcgtgccactgtactccagcctgggtgacagagtgagactccgtctcaaaaaaataaaaaagataaccgaggaaacggtacctccccatga

SEQ ID NO: 168512 - DNA, 844 bp, Homo sapiens
  Payload ID: 13171
  Gene Symbol: PQLC2
  Gene Name: PQ loop repeat containing 2
  ENST ID: ENST00000432465
  CDS Start-End: 1-384
cccctgcagacctacacggctgtgtattatgtcttggcagacctggtgatgctgacgctgtacttttactacaagttcaggacgcgcccctctctgttgtctgcccccatcaactccgtgctgttgttcctcatggggatggcgtgcgccacaccgctgctgagtgctgctgggcccgtggctgcccctagggaagccttccgggggcgggcgctcctgtccgtggagtcgggcagcaagcccttcacccggcaggaagtcattggcttcgtcatcggctccatctccagcgtgttgtacctgctttcccggctgcctcagatccgcaccaactcgtgcacacctcctgtgtgccaggcacccagctggaccctggagccgtgagtgagcaagaacagccatgagtgccccagaagcttacagcccagcggggcgcagagaggacacaacgctatcatcaaagaattacttcattgcagtggcaccaagtgctgcagagaaaaacaacaagagcgtctagccagggaccgtcctggttagaggggcagcaaaggcccctataagtctcattgaacctgtgacttgacagagtaggagaagtcaggcgaaggcaggagaggaatgttctaggctgtgcagacgagagctggagtgtggagagacacatgacttggtcagacaaacctgggttcaaatcctggctcctcccctgcttcctagctgtgtgacgcagggcacacagtcaacctctctgtgctgccgtgtcttcacctcagttaacagccactgtctcgtcaggatgttgtgtaagatgaggtatctggaaacactccccacaggaccc

SEQ ID NO: 168513 - DNA, 1512 bp, Homo sapiens
  Payload ID: 13171
  Gene Symbol: PQLC2
  Gene Name: PQ loop repeat containing 2
  ENST ID: ENST00000469076
  CDS Start-End: 222-329
gctgggccctggcggcggatctggacgtggcggcccgcgccgggctgagtcaccaggagggagctgtggccgaggacgccgaggcctggagtgggtggtagccccgagctgggacgctcctccctccacaatctccccaggtctgcagggaccgagggcctacactgcctcctcccacgccgtgcttaggccagttcatcaaagcctacaagacgggcaacatggaccaggcgctgtccctgtggttcctcctgggctggattggcggagactcctgcaacctcatcggctccttccttgctgaccagctgcccctgcagacctggtgatgctgacgctgtacttttactacaagttcaggacgcgcccctctctgttgtctgcccccatcaactccgtgctgttgttcctcatggggatggcgtgcgccacaccgctgctgagtgctgctgggcccgtggctgcccctagggaagccttccgggggcgggcgctcctgtccgtggagtcgggcagcaagcccttcacccggcaggaagtcattggcttcgtcatcggctccatctccagcgtgttgtacctgctttcccggctgcctcagatccgcaccaacttcctccggaagtccacccaggggatctcctactctctgttcgcgctggtgatgctggggaacacgctgtatgggctgagcgtgctgctcaaaaaccccgaggagggccagagcgagggcagctacctgctgcaccacctgccctggcttgtgggcagcctgggcgtgctgctgctcgacaccatcatctccatccagttcctggtgtacaggcgcagcaccgccgcctcggagcttgagcccctcctccccagctgaccagaaccaggctgagcgcaggaggacaggcaccaccggatgccacaccaggcaggaggaggtgtggacagtgatggtacggcggccctgcatcagcctgcgggtggcctctggatcctccgtggaccgaaccgtccccccaggaacacaccttcaggtagaccccgaagcctcaaggccggggctggagcggagaccccagggcctctcaggagacagtgaggctgcccctcctaccacctacctcattctgcctactcaccccaggggccacagccacagcctgctggactcaggactgtcctgtcaactccagacaactgaataaacaggccgggtacagtggctcgcacctgtaatcctagcactttgggaggccgaagcgggtggaccacttgacgtccgtagttcgagaccagcctggccaacatggtgaaaccccatctctactaaaaatacaaaaattagccaggtgtggtggcacacatctgtagtcccagctacttgggaggctgaggcaggagaactgtttgaacctgggagacagaggttgcggtgaaccgagatcgtgccactgtactccagcctgggtgacagagtgagactccgtctcaaaaaaataaaaaagataaccgaggaaa

SEQ ID NO: 168514 - DNA, 1428 bp, Homo sapiens
  Payload ID: 13171
  Gene Symbol: PQLC2
  Gene Name: PQ loop repeat containing 2
  ENST ID: ENST00000497827
  CDS Start-End: 240-542
gcggcccgcgccgggctgagtcaccaggagggagctgtggccgaggacgccgaggcctggagtgggtggtagccccgagctgggacgctcctccctccacaatctccccaggtctgcagggaccgagggcctacactgcctcctcccacgccgtgcttaggaacccttgctggcctcagaacaccagcgccctccctccggtgcagccctgcctggccgggggcccctcctccacagccatggtctggaagaaactgggctcccgcaacttctccagctgccccagtggctccatccagtggatatgggatgtgttgggtgaatgtgcccaggacggctgggacgaggccagcgtgggcctgggcttgatctccattctctgctttgctgcatctaccttcccccagttcatcaaagcctacaagacgggcaacatggaccaggcgctgtccctgtggttcctcctgggctggattggcggagactcctgcaacctcatcggctccttccttgctgaccagctgcccctgcagacctggtgatgctgacgctgtacttttactacaagttcaggacgcgcccctctctgttgtctgcccccatcaactccgtgctgttgttcctcatggggatggcgtgcgccacaccgctgctgagtgctgctgggcccgtggctgcccctagggaagccttccgggggcgggcgctcctgtccgtggagtcgggcagcaagcccttcacccggcaggaagtcattggcttcgtcatcggctccatctccagcgtgttgtacctgctttcccggctgcctcagatccgcaccaacttcctccggaagtccacccaggggatctcctactctctgttcgcgctggtgatgctggggaacacgctgtatgggctgagcgtgctgctcaaaaaccccgaggagggccagagcgagggcagctacctgctgcaccacctgccctggcttgtgggcagcctgggcgtgctgctgctcgacaccatcatctccatccagttcctggtgtacaggcgcagcaccgccgcctcggagcttgagcccctcctccccagctgaccagaaccaggctgagcgcaggaggacaggcaccaccggatgccacaccaggcaggaggaggtgtggacagtgatggtacggcggccctgcatcagcctgcgggtggcctctggatcctccgtggaccgaaccgtccccccaggaacacaccttcaggtagaccccgaagcctcaaggccggggctggagcggagaccccagggcctctcaggagacagtgaggctgcccctcctaccacctacctcattctgcctactcaccccaggggccacagccacagcctgctggactcaggactgtcctgtcaactccagacaactgaataaacaggccgggtacagt

SEQ ID NO: 168515 - DNA, 1201 bp, Homo sapiens
  Payload ID: 13172
  Gene Symbol: PQLC2L
  Gene Name: PQ loop repeat containing 2-like
  Uniprot ID: A1A4F0
  ENST ID: ENST00000312275
  CDS Start-End: 293-649
gctgcttcctgggaggtggtgctcgcaaacctggcagctgactgggtggggcgtgccttccctggcagtcgcggaggggaaggctgagggacccggtccccgccccgcgtgctcaggctgaacagcttttcttccctgatctctcggaggcgccggctgctggccaacgcagggcagcctcctgcgtgcgtgctgtgggtttctccttcagtttcctctcattgcctgaggttgggcccgaacacggcggtacatttccttgagagtcttctacattcatgctgtagaagctatgaaagtcgtgggaaactatagagtcaacactgcaaactcaagcactgatacgtccggagagcacttgacctgccttagaagtcagctctttgtagcctacagaaatggaagagtggatgaagcagtctctctgggttttctggattgctggataggtggagacctgacaaatttcaaaggctgctacctgactaaccaactgcctattcagatttttacagccatcttcgacatgaacacggatgtaatcatactctcacaattcatgtactacaggttaaagaatcagaagaaaaaaatttctgaagaagatctacggaaggaacttcatttctgctgtttgcattggccatgattgggaacttcacgtatggacttggtgtggttttaaaggcaccagctgctacgtgtcacaagaatacttactttgtgcatcatcttccttggcttattgcaagttttggaatcttattccttaactcttttgtgtcttttgccatcagattgccattagagaataaacatgtatagctacttaatatatcacccaaaaagtacatatatatatatatatatatattctaagaagtgtaaatagctaatgctatagtcatttcattattatatttgaaatgttcatttataaggaaagtcttctctctcccaaagtctcctaattattattattctagcaaacgatcaaattcagatgaagatttcttggtttctttggttcttctgataaaaaaaaaaaagtggggccaagtttagaagcattgaaattaacacatcttagatattaaattttattaaaattataatagcagatattaagaaaaaaccataccatctctgaaaatctctacagagaacactttgaattaataaatgataactgatgccttgc

SEQ ID NO: 168516 - DNA, 1197 bp, Homo sapiens
  Payload ID: 13172
  Gene Symbol: PQLC2L
  Gene Name: PQ loop repeat containing 2-like
  Uniprot ID: A1A4F0
  ENST ID: ENST00000426338
  CDS Start-End: 95-496
gtttctccttcagtttcctctcattgcctgaggttgggcccgaacacggcggtacatttccttgagagtcttctacattcatgctgtagaagctatgaaagtcgtgggaaactatagagtcaacactgcaaactcaagcactgatacgtccggagagcacttgacctgccttagaagtcagctctttgtagcctacagaaatggaagagtggatgaagcagtctctctgggttttctggattgctggataggtggagacctgacaaatttcaaaggctgctacctgactaaccaactgcctattcaggatattccaacctcagttattcaaagactccatcaccagagagaaagtcagattgtcactttggggagtcctctgccctgtatatatcccatattctttcagataagtgaaattagcatgcctgggtattacagttgtttatgccatactactataaatacttctaagagaagatttatcttgacttaagacttggaattttgttaaattaatgcacaaatgtatatgaccataacttaacgatgatttgtatattagctgagtcaagtggcatacataaaagcaatgaaggtttcttggacattctacactgaaatgtttagaatgtttaaaaaatttatctttctattttccaatagtgtggtaaatgtaaagtgcttagcactttgcgtgacacatggtagggcctcaaaaaatattagctattatcattataaaccacagaggccctgttatgtggcagtttgtatctctctcttgactaatagaagcactttgcagatgatatgtcacacaatctagaaaggtagtgcttaaaggaatagacttatctccttattttacaaatgaggacattgaggccctaggaagttaaatgacttagacaaaatcacaaaggtaaagtggaaagcccaggagaaatcccctggccttcagcctgctgtgatttctaccaactatagattagaacttttcagacaagtggcacctgcaagtgtcttcgagcaaggcctcaacctccagcacagctcttgccacctacaaacaccagggaagagcaagattgagttacatggcttggaagaagagtgaaacacctcgcaagacccagagaaaactccacatccatttgcagctaattttaaagcccaaataaaagcacaatcttt

SEQ ID NO: 168517 - DNA, 1484 bp, Homo sapiens
  Payload ID: 13172
  Gene Symbol: PQLC2L
  Gene Name: PQ loop repeat containing 2-like
  Uniprot ID: A1A4F0
  ENST ID: ENST00000449199
  CDS Start-End: 142-549
gccggctgctggccaacgcagggcagcctcctgcgtgcgtgctgtgggtttctccttcagtttcctctcattgcctgaggttgggcccgaacacggcggtacatttccttgagagtcttctacattcatgctgtagaagctatgaaagtcgtgggaaactatagagtcaacactgcaaactcaagcactgatacgtccggagagcacttgacctgccttagaagtcagctctttgtagcctacagaaatggaagagtggatgaagcagtctctctgggttttctggattgctggataggtggagacctgacaaatttcaaaggctgctacctgactaaccaactgcctattcagatttttacagccatcttcgacatgaacacggatgtaatcatactctcacaattcatgtactacaggttaaagaatcagaagaaaaaaatgatattccaacctcagttattcaaagactccatcaccagagagaaagtcagattgtcactttggggagtcctctgccctgtatatatcccatattctttcagataagtgaaattagcatgcctgggtattacagttgtttatgccatactactataaatacttctaagagaagatttatcttgacttaagacttggaattttgttaaattaatgcacaaatgtatatgaccataacttaacgatgatttgtatattagctgagtcaagtggcatacataaaagcaatgaaggtttcttggacattctacactgaaatgtttagaatgtttaaaaaatttatctttctattttccaatagtgtggtaaatgtaaagtgcttagcactttgcgtgacacatggtagggcctcaaaaaatattagctattatcattataaaccacagaggccctgttatgtggcagtttgtatctctctcttgactaatagaagcactttgcagatgatatgtcacacaatctagaaaggtagtgcttaaaggaatagacttatctccttattttacaaatgaggacattgaggccctaggaagttaaatgacttagacaaaatcacaaaggtaaagtggaaagcccaggagaaatcccctggccttcagcctgctgtgatttctaccaactatagattagaacttttcagacaagtggcacctgcaagtgtcttcgagcaaggcctcaacctccagcacagctcttgccacctacaaacaccagggaagagcaagattgagttacatggcttggaagaagagtgaaacacctcgcaagacccagagaaaactccacatccatttgcagctaattttaaagcccaaataaaagcacaatctttggaatcactctatctttggtcaggcaaatgtttaaagagcaatattatatacatctagggtaagaacaattcattaatttagatgaatgaattgtcaaaaggttgttttgcctgtaaatgtgagtaaattgaatatcaagtcatcatgaaa

SEQ ID NO: 168518 - DNA, 563 bp, Homo sapiens
  Payload ID: 13172
  Gene Symbol: PQLC2L
  Gene Name: PQ loop repeat containing 2-like
  ENST ID: ENST00000461040
  CDS Start-End: 149-319
cggaggcgccggctgctggccaacgcagggcagcctcctgcgtgcgtgctgtgggtttctccttcagtttcctctcattgcctgaggttgggcccgaacacggcggtacatttccttgagagtcttctacattcatgctgtagaagctatgaaagtcgtgggaaactatagagtcaacactgcaaactcaagcactgatacgtccggagagcacttgacctgccttagaaggctgatgaagaaatctttacatggaatatgctgttcccatggacaaggagaagcaaaaagtctggtgaaaacacaccaaggcttataagactttcatcagtcctaaggatgagcagaagggtacaaatctgcctttgggaaatacatctgaaatgcagagataaacaagtttgcatctatgaaaggagaattggagagaggggagaattgaaaacacaccagtggttagaacagaagaggaaagtccactgccctttaagttgaaacagaaggaaagacatgaaggaaagccttgaatgaaatgaaataaacactgaaaccatactcagaaa

SEQ ID NO: 168519 - DNA, 883 bp, Homo sapiens
  Payload ID: 13172
  Gene Symbol: PQLC2L
  Gene Name: PQ loop repeat containing 2-like
  ENST ID: ENST00000468043
  CDS Start-End: 195-296
cccgccccgcgtgctcaggctgaacagcttttcttccctgatctctcggaggcgccggctgctggccaacgcagggcagcctcctgcgtgcgtgctgtgggtttctccttcagtttcctctcattgcctgaggttgggcccgaacacggcggtacatttccttgagagtcttctacattcatgctgtagaagctatgaaagtcgtgggaaactatagagtcaacactgcaaactcaagcactgatacgtccggagagcacttgacctgccttagaagatttgaaaacaatttgtagccaacttcagtatgaatcaaagcattgttttaaaaggaaagattccttctgacattaaattgcattttccaagaaccagcaacatcaaccatccagactttaattatggaatcacaggtgcaactgcgtatctcctcagtagaggacaggaagatttgtgtgactgggactttatggatttggcatctcctgcaagatgtgtgtccaactcctgggaatactgtagcatgattatagaattggtttctattgtctgttttctgtttgttgctctctcataagttaagaatcttggatttcaagtctatagtgtaacactcttgttcataatttcttatttaaaaaaatgtttaaatatttctatattaagtattttttcaaactatttgggcttgctattgaacaaatgttctctttgtattgtatattttgaaggtgctaaaaagcatcactaaaacattttggaatataacagaaagatggttaatacattatactgactacttttttctcaattaagatatacaaatcttttatatttagtaatcagaaaggcaataaagcatatgtaccttacctcttcacca

SEQ ID NO: 168520 - DNA, 850 bp, Homo sapiens
  Payload ID: 13172
  Gene Symbol: PQLC2L
  Gene Name: PQ loop repeat containing 2-like
  Uniprot ID: A1A4F0
  ENST ID: ENST00000459838
  CDS Start-End: 162-380
ttccctgatctctcggaggcgccggctgctggccaacgcagggcagcctcctgcgtgcgtgctgtgggtttctccttcagtttcctctcattgcctgaggttgggcccgaacacggcggtacatttccttgagagtcttctacattcatgctgtagaagctatgaaagtcgtgggaaactatagagtcaacactgcaaactcaagcactgatacgtccggagagcacttgacctgccttagaagtcagctctttgtagcctacagaaatggaagagtggatgaagcagtctctctgggttttctggattgctggataggtggagacctgacaaatttcaaaggctgctacctgactaaccaactgcctattcagttctgaagaagatctacggaaggaacttcatttctgctgtttgcattggccatgattgggaacttcacgtatggacttggtgtggttttaaaggcaccagctgctacgtgtcacaagaatacttactttgtgcatcatcttccttggcttattgcaagttttggaatcttattccttaactcttttgtgtcttttgccatcagattgccattagagaataaacatgtatagctacttaatatatcacccaaaaagtacatatatatatatatatatatattctaagaagtgtaaatagctaatgctatagtcatttcattattatatttgaaatgttcatttataaggaaagtcttctctctcccaaagtctcctaattattattattctagcaaacgatcaaattcagatgaagatttcttggtttctttggttcttctgataaaaaaaaaaaagtggggccaagtttagaagca

SEQ ID NO: 168521 - DNA, 1830 bp, Homo sapiens
  Payload ID: 13173
  Gene Symbol: PQLC3
  Gene Name: PQ loop repeat containing 3
  Uniprot ID: Q8N755
  ENST ID: ENST00000295083
  CDS Start-End: 176-784
aggggaggggcggagcgaggcgggtccggggcctggcggcgcgcggaggggcgggccctggccgggtggtcccgggcggatcccgggaaggcggaaggcttcggcagagctgcgccgccgaggctgagcggtcccttctcgctgcggccgcccaggtgcccgcgcccgtggcgctatggaggcggcgctgctggggctgtgtaactggagcacgctgggcgtgtgcgccgcgctgaagctgccgcagatctccgctgtgctagcggcgcgcagcgcgcggggcctcagccttccgagtttacttctggagctggcaggattcctggtgtttctgcggtaccagtgttactatgggtatccgccgctgacctacctggagtaccccatcctcatcgcgcaagatgtcatcctcctgctctgtatctttcattttaacgggaacgtgaagcaggccactccttacatcgctgtattggtgtcttcttggttcatccttgccctgcagaagtggatcatagacctggccatgaatctatgtactttcatcagcgcggccagtaagtttgcacagctccagtgtctgtggaagacgagagactcaggaactgtgagtgcgctgacttggagcctctcttcctatacctgtgcaacaagaataatcacaaccttaatgaccaccaatgattttacaattcttctacgttttgtgatcatgctggctttaaatatatgggtaacagtgacagtacttcgctaccggaagaccgctataaaggctgaatgatggatacattattccttcacacagtggattttgagtaactgaaccaaaggaaaaagaagctctttgctaaattaaggtcttttataaatttagtaaatcagtttataatctttaaagccaaaggtttttttagacttgaaagaaagagccacttaaattcttgtttaaaaataccaatttgcctcctccttcctcacttcgttaggttatggtagtgctcagacatctgcagtgttgaggccagtcactgttggaagtcatccaagaagcccattttgaggccattttgagccttactcttaagttctctatgaagaactacattgatttgttggctttcagaatcttttaggaaataaatcctctccaggacaaaaatgaacatgaatggagtggcattttgttccaagtcagaggtgggcacctataataaatgactagggttcactttctgggactgatgtttaattgtaacacagatacaacagggtggccttgttgtgtataatacggtattatacccgcatgtgctctagcaaggataccaaggcaagcatacatgtagctggcttgagtttgtaccaaaacagtccttcaactttgcactgtgccttaagtaattactaacaaaaggtactaggattagctgcaatctctactttcgatgaggaaatcccagtaagctttctgattcaagtacaatgctgccattttttaaagggccacaactatagaattaccactgttggaatttggtacaaaatatgttttgtctattgaaaacatacacggtaaatggtgttgttaggtaggttctgtccagttcttagggacttttttcacattatagcatttttaccctaaacatgatgttgagattattatatactgtattttcttctaaattaaccctaatgtttaaaaactcactttccccctttaattgaaggcattgttttgttagatgcagtaatgatgtttaccagagattattgtttcctatgcaaaataaattttcatattttgaattctgctgagtcttaaaa

SEQ ID NO: 168522 - DNA, 696 bp, Homo sapiens
  Payload ID: 13173
  Gene Symbol: PQLC3
  Gene Name: PQ loop repeat containing 3
  ENST ID: ENST00000402361
  CDS Start-End: 13-375
gcccgtggcgctatggaggcggcgctgctggggctgtgtaactggagcacgctgggcgtgtgcgccgcgctgaagctgccgcagatctccgctgtgctagcggcgcgcagcgcgcggggcctcagccttccgagtttacttctggagctggcaggattcctggtgtttctgcggtaccagtgttactatgggtatccgccgctgacctacctggagtaccccatcctcatcgcgcaagatgtcatcctcctgctctgtatctttcattttaacgggaacgtgaagcaggccactccttacatcgctgtattggtgtcttcttggttcatccttgccctgcagaagtggatcatagacctggccatgcaagaataatcacaaccttaatgaccaccaatgattttacaattcttctacgttttgtgatcatgctggctttaaatatatgggtaacagtgacagtacttcgctaccggaagaccgctataaaggctgaatgatggatacattattccttcacacagtggattttgagtaactgaaccaaaggaaaaagaagctctttgctaaattaaggtcttttataaatttagtaaatcagtttataatctttaaagccaaaggtttttttagacttgaaagaaagagccacttaaattcttgtttaaaaataccaatttgcctcctccttcctca

SEQ ID NO: 168523 - DNA, 1784 bp, Homo sapiens
  Payload ID: 13173
  Gene Symbol: PQLC3
  Gene Name: PQ loop repeat containing 3
  Uniprot ID: Q8N755
  ENST ID: ENST00000441908
  CDS Start-End: 176-742
aggggaggggcggagcgaggcgggtccggggcctggcggcgcgcggaggggcgggccctggccgggtggtcccgggcggatcccgggaaggcggaaggcttcggcagagctgcgccgccgaggctgagcggtcccttctcgctgcggccgcccaggtgcccgcgcccgtggcgctatggaggcggcgctgctggggctgtgtaactggagcacgctgggcgtgtgcgccgcgctgaagctgccgcagatctccgctgtgctagcggcgcgcagcgcgcggggcctcagccttccgagtttacttctggagctggcaggattcctggtgtttctgcggtaccagtgttactatgggtatccgccgctgacctacctggagtaccccatcctcatcgcgcaagatgtcatcctcctgctctgtatctttcattttaacgggaacgtgaagcaggccactccttacatcgctgtattggtgtcttcttggttcatccttgccctgcagaagtggatcatagacctggccatgaatctatgtactttcatcagcgcggccagtaagtttgcacagctccagtgtctgtggaagacgagagactcaggaactgtgagtgcgctgacttggagcctctcttcctatacctgtgcaattcttctacgttttgtgatcatgctggctttaaatatatgggtaacagtgacagtacttcgctaccggaagaccgctataaaggctgaatgatggatacattattccttcacacagtggattttgagtaactgaaccaaaggaaaaagaagctctttgctaaattaaggtcttttataaatttagtaaatcagtttataatctttaaagccaaaggtttttttagacttgaaagaaagagccacttaaattcttgtttaaaaataccaatttgcctcctccttcctcacttcgttaggttatggtagtgctcagacatctgcagtgttgaggccagtcactgttggaagtcatccaagaagcccattttgaggccattttgagccttactcttaagttctctatgaagaactacattgatttgttggctttcagaatcttttaggaaataaatcctctccaggacaaaaatgaacatgaatggagtggcattttgttccaagtcagaggtgggcacctataataaatgactagggttcactttctgggactgatgtttaattgtaacacagatacaacagggtggccttgttgtgtataatacggtattatacccgcatgtgctctagcaaggataccaaggcaagcatacatgtagctggcttgagtttgtaccaaaacagtccttcaactttgcactgtgccttaagtaattactaacaaaaggtactaggattagctgcaatctctactttcgatgaggaaatcccagtaagctttctgattcaagtacaatgctgccattttttaaagggccacaactatagaattaccactgttggaatttggtacaaaatatgttttgtctattgaaaacatacacggtaaatggtgttgttaggtaggttctgtccagttcttagggacttttttcacattatagcatttttaccctaaacatgatgttgagattattatatactgtattttcttctaaattaaccctaatgtttaaaaactcactttccccctttaattgaaggcattgttttgttagatgcagtaatgatgtttaccagagattattgtttcctatgcaaaataaattttcatattttgaattctgctgagtctt

SEQ ID NO: 168524 - DNA, 928 bp, Homo sapiens
  Payload ID: 13173
  Gene Symbol: PQLC3
  Gene Name: PQ loop repeat containing 3
  ENST ID: ENST00000445921
  CDS Start-End: 117-626
ggccgggtggtcccgggcggatcccgggaaggcggaaggcttcggcagagctgcgccgccgaggctgagcggtcccttctcgctgcggccgcccaggtgcccgcgcccgtggcgctatggaggcggcgctgctggggctgtgtaactggagcacgctgggcgtgtgcgccgcgctgaagctgccgcagatctccgctgtgctagcggcgcgcagcgcgcggggcctcagccttccgagtttacttctggagctggcaggattcctggtgtttctgcggtaccagtgttactatgggtatccgccgctgacctacctggagtaccccatcctcatcgcgcaagatgtcatcctcctgctctgtatctttcattttaacgggaacgtgaagcaggccactccttacatcgctgtattggtgtcttcttggttcatccttgccctgcagaagtggatcatagacctggccatgaatctatgtactttcatcagcgcggccagtaagtttgcacagctccagtgtctgtggaagacgagagactcaggaactgtgagtgcgctgacttggagcctctcttcctatacctgtgcaaggtctcgctctctctcacaggctggagtgcagtgatacgatcttcactcactgcgggtttccaagtagctgggacaagaataatcacaaccttaatgaccaccaatgattttacaattcttctacgttttgtgatcatgctggctttaaatatatgggtaacagtgacagtacttcgctaccggaagaccgctataaaggctgaatgatggatacattattccttcacacagtggattttgagtaactgaaccaaaggaaaaagaagctctttgctaaattaaggtcttttataaatttagtaaatcagtttataatctttaaagccaaaggttttt

SEQ ID NO: 168525 - DNA, 565 bp, Homo sapiens
  Payload ID: 13173
  Gene Symbol: PQLC3
  Gene Name: PQ loop repeat containing 3
  ENST ID: ENST00000445402
  CDS Start-End: 21-565
gaatctgggggcggggcgagatgagggtagtccgaggactgagcgagcccgggcgggcccgtaggcgaggtgcccgcgcccgtggcgctatggaggcggcgctgctggggctgtgtaactggagcacgctgggcgtgtgcgccgcgctgaagctgccgcagatctccgctgtgctagcggcgcgcagcgcgcggggcctcagccttccgagtttacttctggagctggcaggattcctggtgtttctgcggtaccagtgttactatgggtatccgccgctgacctacctggagtaccccatcctcatcgcgcaagatgtcatcctcctgctctgtatctttcattttaacgggaacgtgaagcaggccactccttacatcgctgtattggtgtcttcttggttcatccttgccctgcagaagtggatcatagacctggccatgaatctatgtactttcatcagcgcggccagtaagtttgcacagctccagtgtctgtggaagacgagagactcaggaactgtgagtgcgctgacttggagcctctcttcctatacctgtgcaag

SEQ ID NO: 168526 - DNA, 831 bp, Homo sapiens
  Payload ID: 13173
  Gene Symbol: PQLC3
  Gene Name: PQ loop repeat containing 3
  ENST ID: ENST00000428481
  CDS Start-End: 1-247
gctgccgcagatctccgctgtgctagcggcgcgcagcgcgcggggcctcagccttccgagtttacttctggagctggcaggattcctggtgtttctgcggtaccagtgttactatgggtatccgccgctgacctacctggagtaccccatcctcatcgcgcaagatgtcatcctcctgctctgtatctttcattttaacgggaacgtgaagcaggccactccttacatcgctgtgtatcctttctgaatctgagccagaagtgggaacggggatgttatttgtgaatgttcttctacgttttgtgatcatgctggctttaaatatatgggtaacagtgacagtacttcgctaccggaagaccgctataaaggctgaatgatggatacattattccttcacacagtggattttgagtaactgaaccaaaggaaaaagaagctctttgctaaattaaggtcttttataaatttagtaaatcagtttataatctttaaagccaaaggtttttttagacttgaaagaaagagccacttaaattcttgtttaaaaataccaatttgcctcctccttcctcacttcgttaggttatggtagtgctcagacatctgcagtgttgaggccagtcactgttggaagtcatccaagaagcccattttgaggccattttgagccttactcttaagttctctatgaagaactacattgatttgttggctttcagaatcttttaggaaataaatcctctccaggacaaaaatgaacatgaatggagtggcattttgttccaagtcagaggtgggcacctataataaatgactagggttcacttt

SEQ ID NO: 168527 - DNA, 4675 bp, Homo sapiens
  Payload ID: 13174
  Gene Symbol: PRDM1
  Gene Name: PR domain containing 1, with ZNF domain
  Uniprot ID: O75626
  ENST ID: ENST00000369089
  CDS Start-End: 147-2222
cagtagcatcgcccatttgccattcactgcagtagcaaaagtagtactctgtggtgggttaatcggtttgaggcagctccttaaatgaacatttgtgtttcatttttctgttattttcccgaacatgaaaagacgataaaactgaaatggaaaagatctattccagaggggagcttcaccacttcattgacggctttaatgaagagaaaagcaactggatgcgctatgtgaatccagcacactctccccgggagcaaaacctggctgcgtgtcagaacgggatgaacatctacttctacaccattaagcccatccctgccaaccaggaacttcttgtgtggtattgtcgggactttgcagaaaggcttcactacccttatcccggagagctgacaatgatgaatctcacacaaacacagagcagtctaaagcaaccgagcactgagaaaaatgaactctgcccaaagaatgtcccaaagagagagtacagcgtgaaagaaatcctaaaattggactccaacccctccaaaggaaaggacctctaccgttctaacatttcacccctcacatcagaaaaggacctcgatgactttagaagacgtgggagccccgaaatgcccttctaccctcgggtcgtttaccccatccgggcccctctgccagaagactttttgaaagcttccctggcctacgggatcgagagacccacgtacatcactcgctcccccattccatcctccaccactccaagcccctctgcaagaagcagccccgaccaaagcctcaagagctccagccctcacagcagccctgggaatacggtgtcccctgtgggccccggctctcaagagcaccgggactcctacgcttacttgaacgcgtcctacggcacggaaggtttgggctcctaccctggctacgcacccctgccccacctcccgccagctttcatcccctcgtacaacgctcactaccccaagttcctcttgcccccctacggcatgaattgtaatggcctgagcgctgtgagcagcatgaatggcatcaacaactttggcctcttcccgaggctgtgccctgtctacagcaatctcctcggtgggggcagcctgccccaccccatgctcaaccccacttctctcccgagctcgctgccctcagatggagcccggaggttgctccagccggagcatcccagggaggtgcttgtcccggcgccccacagtgccttctcctttaccggggccgccgccagcatgaaggacaaggcctgtagccccacaagcgggtctcccacggcgggaacagccgccacggcagaacatgtggtgcagcccaaagctacctcagcagcgatggcagcccccagcagcgacgaagccatgaatctcattaaaaacaaaagaaacatgaccggctacaagacccttccctacccgctgaagaagcagaacggcaagatcaagtacgaatgcaacgtttgcgccaagactttcggccagctctccaatctgaaggtccacctgagagtgcacagtggagaacggcctttcaaatgtcagacttgcaacaagggctttactcagctcgcccacctgcagaaacactacctggtacacacgggagaaaagccacatgaatgccaggtctgccacaagagatttagcagcaccagcaatctcaagacccacctgcgactccattctggagagaaaccataccaatgcaaggtgtgccctgccaagttcacccagtttgtgcacctgaaactgcacaagcgtctgcacacccgggagcggccccacaagtgctcccagtgccacaagaactacatccatctctgtagcctcaaggttcacctgaaagggaactgcgctgcggccccggcgcctgggctgcccttggaagatctgacccgaatcaatgaagaaatcgagaagtttgacatcagtgacaatgctgaccggctcgaggacgtggaggatgacatcagtgtgatctctgtagtggagaaggaaattctggccgtggtcagaaaagagaaagaagaaactggcctgaaagtgtctttgcaaagaaacatggggaatggactcctctcctcagggtgcagcctttatgagtcatcagatctacccctcatgaagttgcctcccagcaacccactacctctggtacctgtaaaggtcaaacaagaaacagttgaaccaatggatccttaagattttcagaaaacacttattttgtttcttaagttatgacttggtgagtcagggtgcctgtaggaagtggcttgtacataatcccagctctgcaaagctctctcgacagcaaatggtttcccctcacctctggaattaaagaaggaactccaaagttactgaaatctcagggcatgaacaaggcaaaggccatatatatatatatatatatatctgtatacatattatatatacttatttacacctgtgtctatatatttgcccctgtgtattttgaatatttgtgtggacatgtttgcatagccttcccattactaagactattacctagtcataattattttttcaatgataatccttcataatttattatacaatttatcattcagaaagcaataattaaaaaagtttacaatgactggaaagattccttgtaatttgagtataaatgtatttttgtcttgtggccattctttgtagataatttctgcacatctgtataagtacctaagatttagttaaacaaatatatgacttcagtcaacctctctctctaataatggtttgaaaatgaggtttgggtaattgccaatgttggacagttgatgtgttcattcctgggatcctatcatttgaacagcattgtacataacttgggggtatgtgtgcaggattacccaagaataacttaagtagaagaaacaagaaagggaatcttgtatatttttgttgatagttcatgtttttcccccagccacaattttaccggaagggtgacaggaaggctttaccaacctgtctctccctccaaaagagcagaatcctcccaccgccctgccctccccaccgagtcctgtggccattcagagcggccacatgacttttgcatccattgtattatcagaaaatgtgaagaagaaaaaaatgccatgttttaaaaccactgcgaaaatttccccaaagcataggtggctttgtgtgtgtgcgatttgggggcttgagtctgggtggtgttttgttgttggtttttgttgctttttttttttttttttttttaatgtcaaaattgcacaaacatggtgctctaccaggaaggattcgaggtagataggctcaggccacactttaaaaacaaacacacaaacaacaaaaaacgggtattctagtcatcttggggtaaaagcgggtaatgaacattcctatccccaacacatcaattgtattttttctgtaaaactcagattttcctcagtatttgtgtttttacattttatggttaatttaatggaagatgaaagggcattgcaaagttgttcaacaacagttacctcattgagtgtgtccagtagtgcaggaaatgatgtcttatctaatgatttgcttctctagaggagaaaccgagtaaatgtgctccagcaagatagactttgtgttattctatcttttattctgctaagcccaaagattacatgttggtgttcaaagtgtagcaaaaaatgatgtatatttataaatctatttataccactatatcatatgtatatatatttataaccacttaaattgtgagccaagccatgtaaaagatctactttttctaagggcaaaaaaaaaaaaaaaaaaaaaagaacactcctttctgagactttgcttaatacttggtgacctcacaatcacgtcggtatgattgggcacccttgcctactgtaagagaccctaaaaccttggtgcagtggtggggaccacaaaacaaccagggaggaagagatacatcattttttagtattaaggaccatctaagacagctctattttttttttgccactttatgattatgtggtcacacccaagtcacagaaataaaaaactgactttaccgctgcaatttttctgttttcctccttactaaatactgatacattactccaatctattttataattatatttgacattttgttcacatcaactaatgttcacctgtagaagagaacaaatttcgaataatccagggaaacccaagagccttactggtcttctgtaacttccaagactgacagctttttatgtatcagtgtttgataaacacagtccttaactgaaggtaaaccaaagcatcacgttgacattagaccaaatacttttgattcccaactactcgtttgttctttttctccttttgtgctttcccatagtgagaatttttataaagacttcttgcttctctcaccatccatccttctcttttctgcctcttacatgtgaatgttgagcccacaatcaacagtggttttattttttcctctactcaaagttaaaactgaccaaagttactggctttttactttgctagaacaacaaactatcttatgtttacatactggtttacaatgttatttatgtgcaaattgtcaaaatgtaaattaaatataaatgttcatgctttaccaaaat

SEQ ID NO: 168528 - DNA, 2612 bp, Homo sapiens
  Payload ID: 13174
  Gene Symbol: PRDM1
  Gene Name: PR domain containing 1, with ZNF domain
  Uniprot ID: O75626
  ENST ID: ENST00000369091
  CDS Start-End: 221-2590
gggaagccagacggttaacacagacaaagtgctgccgtgacactcggccctccagtgttgcggagaggcaagagcagcgaccgcggcacctgtccgcccggagctgggacgcgggcgcccgggcggccggacgaagcgaggagggaccgccgaggctgcccccaagtgtaactccagcactgtgaggtttcagggattggcagaggggaccaaggggaccatgaaaatggacatggaggatgcggatatgactctgtggacagaggctgagtttgaagagaagtgtacatacattgtgaacgaccacccctgggattctggtgctgatggcggtacttcggttcaggcggaggcatccttaccaaggaatctgcttttcaagtatgccaccaacagtgaagaggttattggagtgatgagtaaagaatacataccaaagggcacacgttttggacccctaataggtgaaatctacaccaatgacacagttcctaagaacgccaacaggaaatatttttggaggatctattccagaggggagcttcaccacttcattgacggctttaatgaagagaaaagcaactggatgcgctatgtgaatccagcacactctccccgggagcaaaacctggctgcgtgtcagaacgggatgaacatctacttctacaccattaagcccatccctgccaaccaggaacttcttgtgtggtattgtcgggactttgcagaaaggcttcactacccttatcccggagagctgacaatgatgaatctcacacaaacacagagcagtctaaagcaaccgagcactgagaaaaatgaactctgcccaaagaatgtcccaaagagagagtacagcgtgaaagaaatcctaaaattggactccaacccctccaaaggaaaggacctctaccgttctaacatttcacccctcacatcagaaaaggacctcgatgactttagaagacgtgggagccccgaaatgcccttctaccctcgggtcgtttaccccatccgggcccctctgccagaagactttttgaaagcttccctggcctacgggatcgagagacccacgtacatcactcgctcccccattccatcctccaccactccaagcccctctgcaagaagcagccccgaccaaagcctcaagagctccagccctcacagcagccctgggaatacggtgtcccctgtgggccccggctctcaagagcaccgggactcctacgcttacttgaacgcgtcctacggcacggaaggtttgggctcctaccctggctacgcacccctgccccacctcccgccagctttcatcccctcgtacaacgctcactaccccaagttcctcttgcccccctacggcatgaattgtaatggcctgagcgctgtgagcagcatgaatggcatcaacaactttggcctcttcccgaggctgtgccctgtctacagcaatctcctcggtgggggcagcctgccccaccccatgctcaaccccacttctctcccgagctcgctgccctcagatggagcccggaggttgctccagccggagcatcccagggaggtgcttgtcccggcgccccacagtgccttctcctttaccggggccgccgccagcatgaaggacaaggcctgtagccccacaagcgggtctcccacggcgggaacagccgccacggcagaacatgtggtgcagcccaaagctacctcagcagcgatggcagcccccagcagcgacgaagccatgaatctcattaaaaacaaaagaaacatgaccggctacaagacccttccctacccgctgaagaagcagaacggcaagatcaagtacgaatgcaacgtttgcgccaagactttcggccagctctccaatctgaaggtccacctgagagtgcacagtggagaacggcctttcaaatgtcagacttgcaacaagggctttactcagctcgcccacctgcagaaacactacctggtacacacgggagaaaagccacatgaatgccaggtctgccacaagagatttagcagcaccagcaatctcaagacccacctgcgactccattctggagagaaaccataccaatgcaaggtgtgccctgccaagttcacccagtttgtgcacctgaaactgcacaagcgtctgcacacccgggagcggccccacaagtgctcccagtgccacaagaactacatccatctctgtagcctcaaggttcacctgaaagggaactgcgctgcggccccggcgcctgggctgcccttggaagatctgacccgaatcaatgaagaaatcgagaagtttgacatcagtgacaatgctgaccggctcgaggacgtggaggatgacatcagtgtgatctctgtagtggagaaggaaattctggccgtggtcagaaaagagaaagaagaaactggcctgaaagtgtctttgcaaagaaacatggggaatggactcctctcctcagggtgcagcctttatgagtcatcagatctacccctcatgaagttgcctcccagcaacccactacctctggtacctgtaaaggtcaaacaagaaacagttgaaccaatggatccttaagattttcagaaaacacttattt

SEQ ID NO: 168529 - DNA, 5164 bp, Homo sapiens
  Payload ID: 13174
  Gene Symbol: PRDM1
  Gene Name: PR domain containing 1, with ZNF domain
  Uniprot ID: O75626
  ENST ID: ENST00000369096
  CDS Start-End: 235-2712
gggaagccagacggttaacacagacaaagtgctgccgtgacactcggccctccagtgttgcggagaggcaagagcagcgaccgcggcacctgtccgcccggagctgggacgcgggcgcccgggcggccggacgaagcgaggagggaccgccgaggtgcgcgtctgtgcggctcagcctggcgggggacgcggggagaatgtggactgggtagagatgaacgagacttttctcagatgttggatatttgcttggaaaaacgtgtgggtacgaccttggctgcccccaagtgtaactccagcactgtgaggtttcagggattggcagaggggaccaaggggaccatgaaaatggacatggaggatgcggatatgactctgtggacagaggctgagtttgaagagaagtgtacatacattgtgaacgaccacccctgggattctggtgctgatggcggtacttcggttcaggcggaggcatccttaccaaggaatctgcttttcaagtatgccaccaacagtgaagaggttattggagtgatgagtaaagaatacataccaaagggcacacgttttggacccctaataggtgaaatctacaccaatgacacagttcctaagaacgccaacaggaaatatttttggaggatctattccagaggggagcttcaccacttcattgacggctttaatgaagagaaaagcaactggatgcgctatgtgaatccagcacactctccccgggagcaaaacctggctgcgtgtcagaacgggatgaacatctacttctacaccattaagcccatccctgccaaccaggaacttcttgtgtggtattgtcgggactttgcagaaaggcttcactacccttatcccggagagctgacaatgatgaatctcacacaaacacagagcagtctaaagcaaccgagcactgagaaaaatgaactctgcccaaagaatgtcccaaagagagagtacagcgtgaaagaaatcctaaaattggactccaacccctccaaaggaaaggacctctaccgttctaacatttcacccctcacatcagaaaaggacctcgatgactttagaagacgtgggagccccgaaatgcccttctaccctcgggtcgtttaccccatccgggcccctctgccagaagactttttgaaagcttccctggcctacgggatcgagagacccacgtacatcactcgctcccccattccatcctccaccactccaagcccctctgcaagaagcagccccgaccaaagcctcaagagctccagccctcacagcagccctgggaatacggtgtcccctgtgggccccggctctcaagagcaccgggactcctacgcttacttgaacgcgtcctacggcacggaaggtttgggctcctaccctggctacgcacccctgccccacctcccgccagctttcatcccctcgtacaacgctcactaccccaagttcctcttgcccccctacggcatgaattgtaatggcctgagcgctgtgagcagcatgaatggcatcaacaactttggcctcttcccgaggctgtgccctgtctacagcaatctcctcggtgggggcagcctgccccaccccatgctcaaccccacttctctcccgagctcgctgccctcagatggagcccggaggttgctccagccggagcatcccagggaggtgcttgtcccggcgccccacagtgccttctcctttaccggggccgccgccagcatgaaggacaaggcctgtagccccacaagcgggtctcccacggcgggaacagccgccacggcagaacatgtggtgcagcccaaagctacctcagcagcgatggcagcccccagcagcgacgaagccatgaatctcattaaaaacaaaagaaacatgaccggctacaagacccttccctacccgctgaagaagcagaacggcaagatcaagtacgaatgcaacgtttgcgccaagactttcggccagctctccaatctgaaggtccacctgagagtgcacagtggagaacggcctttcaaatgtcagacttgcaacaagggctttactcagctcgcccacctgcagaaacactacctggtacacacgggagaaaagccacatgaatgccaggtctgccacaagagatttagcagcaccagcaatctcaagacccacctgcgactccattctggagagaaaccataccaatgcaaggtgtgccctgccaagttcacccagtttgtgcacctgaaactgcacaagcgtctgcacacccgggagcggccccacaagtgctcccagtgccacaagaactacatccatctctgtagcctcaaggttcacctgaaagggaactgcgctgcggccccggcgcctgggctgcccttggaagatctgacccgaatcaatgaagaaatcgagaagtttgacatcagtgacaatgctgaccggctcgaggacgtggaggatgacatcagtgtgatctctgtagtggagaaggaaattctggccgtggtcagaaaagagaaagaagaaactggcctgaaagtgtctttgcaaagaaacatggggaatggactcctctcctcagggtgcagcctttatgagtcatcagatctacccctcatgaagttgcctcccagcaacccactacctctggtacctgtaaaggtcaaacaagaaacagttgaaccaatggatccttaagattttcagaaaacacttattttgtttcttaagttatgacttggtgagtcagggtgcctgtaggaagtggcttgtacataatcccagctctgcaaagctctctcgacagcaaatggtttcccctcacctctggaattaaagaaggaactccaaagttactgaaatctcagggcatgaacaaggcaaaggccatatatatatatatatatatatctgtatacatattatatatacttatttacacctgtgtctatatatttgcccctgtgtattttgaatatttgtgtggacatgtttgcatagccttcccattactaagactattacctagtcataattattttttcaatgataatccttcataatttattatacaatttatcattcagaaagcaataattaaaaaagtttacaatgactggaaagattccttgtaatttgagtataaatgtatttttgtcttgtggccattctttgtagataatttctgcacatctgtataagtacctaagatttagttaaacaaatatatgacttcagtcaacctctctctctaataatggtttgaaaatgaggtttgggtaattgccaatgttggacagttgatgtgttcattcctgggatcctatcatttgaacagcattgtacataacttgggggtatgtgtgcaggattacccaagaataacttaagtagaagaaacaagaaagggaatcttgtatatttttgttgatagttcatgtttttcccccagccacaattttaccggaagggtgacaggaaggctttaccaacctgtctctccctccaaaagagcagaatcctcccaccgccctgccctccccaccgagtcctgtggccattcagagcggccacatgacttttgcatccattgtattatcagaaaatgtgaagaagaaaaaaatgccatgttttaaaaccactgcgaaaatttccccaaagcataggtggctttgtgtgtgtgcgatttgggggcttgagtctgggtggtgttttgttgttggtttttgttgctttttttttttttttttttttaatgtcaaaattgcacaaacatggtgctctaccaggaaggattcgaggtagataggctcaggccacactttaaaaacaaacacacaaacaacaaaaaacgggtattctagtcatcttggggtaaaagcgggtaatgaacattcctatccccaacacatcaattgtattttttctgtaaaactcagattttcctcagtatttgtgtttttacattttatggttaatttaatggaagatgaaagggcattgcaaagttgttcaacaacagttacctcattgagtgtgtccagtagtgcaggaaatgatgtcttatctaatgatttgcttctctagaggagaaaccgagtaaatgtgctccagcaagatagactttgtgttattctatcttttattctgctaagcccaaagattacatgttggtgttcaaagtgtagcaaaaaatgatgtatatttataaatctatttataccactatatcatatgtatatatatttataaccacttaaattgtgagccaagccatgtaaaagatctactttttctaagggcaaaaaaaaaaaaaaaaaaaaaagaacactcctttctgagactttgcttaatacttggtgacctcacaatcacgtcggtatgattgggcacccttgcctactgtaagagaccctaaaaccttggtgcagtggtggggaccacaaaacaaccagggaggaagagatacatcattttttagtattaaggaccatctaagacagctctattttttttttgccactttatgattatgtggtcacacccaagtcacagaaataaaaaactgactttaccgctgcaatttttctgttttcctccttactaaatactgatacattactccaatctattttataattatatttgacattttgttcacatcaactaatgttcacctgtagaagagaacaaatttcgaataatccagggaaacccaagagccttactggtcttctgtaacttccaagactgacagctttttatgtatcagtgtttgataaacacagtccttaactgaaggtaaaccaaagcatcacgttgacattagaccaaatacttttgattcccaactactcgtttgttctttttctccttttgtgctttcccatagtgagaatttttataaagacttcttgcttctctcaccatccatccttctcttttctgcctcttacatgtgaatgttgagcccacaatcaacagtggttttattttttcctctactcaaagttaaaactgaccaaagttactggctttttactttgctagaacaacaaactatcttatgtttacatactggtttacaatgttatttatgtgcaaattgtcaaaatgtaaattaaatataaatgttcatgctttaccaaaa

SEQ ID NO: 168530 - DNA, 583 bp, Homo sapiens
  Payload ID: 13174
  Gene Symbol: PRDM1
  Gene Name: PR domain containing 1, with ZNF domain
  ENST ID: ENST00000424894
  CDS Start-End: 395-583
ccttttcagtcttccatgtgagaggatgaaagagagctcgcagcagagggaggaggcagttgttttgaaagttgttttgcgttgggagctggtgggaaagttcggtcttccccatttggaaaaggcaggctgggttccgctcctgcaccacacgcgctttccatttttagcttcattcagaggcagacagagctccttcctcttcctctccttgtttgtgacacttttctgaggcagcttttccacagtgccgagggtctggcggccatgaccccaggcattctgggacactggactgtgtgcccagaacatttttctgccatgagaggctgcccccaagtgtaactccagcactgtgaggtttcagggattggcagaggggaccaaggggaccatgaaaatggacatggaggatgcggatatgactctgtggacagaggctgagtttgaagagaagtgtacatacattgtgaacgaccacccctgggattctggtgctgatggcggtacttcggttcaggcggaggcatccttaccaaggaatctgcttttcaagtatgccaccaacagtgaagaggttatt

SEQ ID NO: 168531 - DNA, 583 bp, Homo sapiens
  Payload ID: 13174
  Gene Symbol: PRDM1
  Gene Name: PR domain containing 1, with ZNF domain
  ENST ID: ENST00000450060
  CDS Start-End: 69-583
aagaggaaaagtgacttctcagtaatagactgtcaaattcgggctgctgcccgagtgttcgctttgttatggcaggtgaagttcacctttgccccacccagtgtttccacaaaaagatctattccagaggggagcttcaccacttcattgacggctttaatgaagagaaaagcaactggatgcgctatgtgaatccagcacactctccccgggagcaaaacctggctgcgtgtcagaacgggatgaacatctacttctacaccattaagcccatccctgccaaccaggaacttcttgtgtggtattgtcgggactttgcagaaaggcttcactacccttatcccggagagctgacaatgatgaatctcacacaaacacagagcagtctaaagcaaccgagcactgagaaaaatgaactctgcccaaagaatgtcccaaagagagagtacagcgtgaaagaaatcctaaaattggactccaacccctccaaaggaaaggacctctaccgttctaacatttcacccctcacatcagaaaaggacctcgatgactttagaagacgtgggagccccgaaatgccctt

SEQ ID NO: 168532 - DNA, 4247 bp, Homo sapiens
  Payload ID: 13174
  Gene Symbol: PRDM1
  Gene Name: PR domain containing 1, with ZNF domain
  ENST ID: ENST00000613999
  CDS Start-End: 277-2643
ggcaagagcagcgaccgcggcacctgtccgcccggagctgggacgcgggcgcccgggcggccggacgaagcgaggagggaccgccgaggtgcgcgtctgtgcggctcagcctggcgggggacgcggggagaatgtggactgggtagagatgaacgagacttttctcagatgttggatatttgcttggaaaaacgtgtgggtacgaccttggctgcccccaagtgtaactccagcactgtgaggtttcagggattggcagaggggaccaaggggaccatgaaaatggacatggaggatgcggatatgactctgtggacagaggctgagtttgaagagaagtgtacatacattgtgaacgaccacccctgggattctggtgctgatggcggtacttcggttcaggcggaggcatccttaccaaggaatctgcttttcaagtatgccaccaacagtgaagaggttattggagtgatgagtaaagaatacataccaaagggcacacgttttggacccctaataggtgaaatctacaccaatgacacagttcctaagaacgccaacaggaaatatttttggaggatctattccagaggggagcttcaccacttcattgacggctttaatgaagagaaaagcaactggatgcgctatgtgaatccagcacactctccccgggagcaaaacctggctgcgtgtcagaacgggatgaacatctacttctacaccattaagcccatccctgccaaccaggaacttcttgtgtggtattgtcgggactttgcagaaaggcttcactacccttatcccggagagctgacaatgatgaatctcacacaaacacagagcagtctaaagcaaccgagcactgagaaaaatgaactctgcccaaagaatgtcccaaagagagagtacagcgtgaaagaaatcctaaaattggactccaacccctccaaaggaaaggacctctaccgttctaacatttcacccctcacatcagaaaaggacctcgatgactttagaagacgtgggagccccgaaatgcccttctaccctcgggtcgtttaccccatccgggcccctctgccagaagactttttgaaagcttccctggcctacgggatcgagagacccacgtacatcactcgctcccccattccatcctccaccactccaagcccctctgcaagaagcagccccgaccaaagcctcaagagctccagccctcacagcagccctgggaatacggtgtcccctgtgggccccggctctcaagagcaccgggactcctacgcttacttgaacgcgtcctacggcacggaaggtttgggctcctaccctggctacgcacccctgccccacctcccgccagctttcatcccctcgtacaacgctcactaccccaagttcctcttgcccccctacggcatgaattgtaatggcctgagcgctgtgagcagcatgaatggcatcaacaactttggcctcttcccgaggctgtgccctgtctacagcaatctcctcggtgggggcagcctgcccaccccatgctcaaccccacttctcccgagctcgctgccctcagatggagcccggaggttgctccagccggagcatcccagggaggtgcttgtcccggcgccccacagtgccttctcctttaccggggccgccgccagcatgaaggacaaggcctgtagccccacaagcgggtctcccacggcgggaacagccgccacggcagaacatgtggtgcagcccaaagctacctcagcagcgatggcagcccccagcagcgacgaagccatgaatctcattaaaaacaaaagaaacatgaccggctacaagacccttccctacccgctgaagaagcagaacggcaagatcaagtacgaatgcaacgtttgcgccaagactttcggccagctctccaatctgaaggtccacctgagagtgcacagtggagaacggcctttcaaatgtcagacttgcaacaagggctttactcagctcgcccacctgcagaaacactacctggtacacacgggagaaaagccacatgaatgccaggtctgccacaagagatttagcagcaccagcaatctcaagacccacctgcgactccattctggagagaaaccataccaatgcaaggtgtgccctgccaagttcacccagtttgtgcacctgaaactgcacaagcgtctgcacacccgggagcggccccacaagtgctcccagtgccacaagaactacatccatctctgtagcctcaaggttcacctgaaagggaactgcgctgcggccccggcgcctgggctgcccttggaagatctgacccgaatcaatgaagaaatcgagaagtttgacatcagtgacaatgctgaccggctcgaggacgtggaggatgacatcagtgtgatctctgtagtggagaaggaaattctggccgtggtcagaaaagagaaagaagaaactggcctgaaagtgtctttgcaaagaaacatggggaatggactcctctcctcagggtgcagcctttatgagtcatcagatctacccctcatgaagttgcctcccagcaacccactacctctggtacctgtaaaggtcaaacaagaaacagttgaaccaatggatccttaagattttcagaaaacacttattttgtttcttaagttatgacttggtgagtcagggtgcctgtaggaagtggcttgtacataatcccagctctgcaaagctctctcgacagcaaatggtttcccctcacctctggaattaaagaaggaactccaaagttactgaaatctcagggcatgaacaaggcaaaggccatatatatatatatatatatatctgtatacatattatatatacttatttacacctgtgtctatatatttgcccctgtgtattttgaatatttgtgtggacatgtttgcatagccttcccattactaagactattacctagtcataattattttttcaatgataatccttcataatttattatacaatttatcattcagaaagcaataattaaaaaagtttacaatgactggaaagattccttgtaatttgagtataaatgtatttttgtcttgtggccattctttgtagataatttctgcacatctgtataagtacctaagatttagttaaacaaatatatgacttcagtcaacctctctctctaataatggtttgaaaatgaggtttgggtaattgccaatgttggacagttgatgtgttcattcctgggatcctatcatttgaacagcattgtacataacttgggggtatgtgtgcaggattacccaagaataacttaagtagaagaaacaagaaagggaatcttgtatatttttgttgatagttcatgtttttcccccagccacaattttaccggaagggtgacaggaaggctttaccaacctgtctctccctccaaaagagcagaatcctcccaccgccctgccctccccaccgagtcctgtggccattcagagcggccacatgacttttgcatccattgtattatcagaaaatgtgaagaagaaaaaaatgccatgttttaaaaccactgcgaaaatttccccaaagcataggtggctttgtgtgtgtgcgatttgggggcttgagtctgggtggtgttttgttgttggtttttgttgctttttttttttttttttttttaatgtcaaaattgcacaaacatggtgctctaccaggaaggattcgaggtagataggctcaggccacactttaaaaacaaacacacaaacaacaaaaaacgggtattctagtcatcttggggtaaaagcgggtaatgaacattcctatccccaacacatcaattgtattttttctgtaaaactcagattttcctcagtatttgtgtttttacattttatggttaatttaatggaagatgaaagggcattgcaaagttgttcaacaacagttacctcattgagtgtgtccagtagtgcaggaaatgatgtcttatctaatgatttgcttctctagaggagaaaccgagtaaatgtgctccagcaagatagactttgtgttattctatcttttattctgctaagcccaaagattacatgttggtgttcaaagtgtagcaaaaaatgatgtatatttataaatctatttataccactatatcatatgtatatatatttataaccacttaaattgtgagccaagccatgtaaaagatctactttttctaaggg

SEQ ID NO: 168533 - DNA, 5817 bp, Homo sapiens
  Payload ID: 13175
  Gene Symbol: PRDM10
  Gene Name: PR domain containing 10
  Uniprot ID: Q9NQV6
  ENST ID: ENST00000304538
  CDS Start-End: 148-3219
caaaaatgaagccagctcttcctcacagccggtagatggaagtcatttttccagggcctggaaggagttggtaggaagactagatttcagccagcccttgcgccctgtttgtgccagcaggcaccagcgaaccaaaagcaggtgtccatgtctgcttactctgtgccttcaacttttgcccaggcctcattgccagttcataaccaggtgctgccttccatcgagagtgtagatgggtccgaccctttggcaactctgcagacccctctaggcagactggaggccaaagaggaagaggatgaggatgaggacgaggacactgaggaagatgaggaagaagacggtgaggacacggatctggatgactgggagccagacccgccccggcccttcgacccacacgacttgtggtgtgaggagtgcaataacgcgcatgcttcagtgtgtccgaagcacggccccttgcacccgatccccaaccggccggtgctcacccgggccagggcgagcctccccctggtgctctacatagacaggtttctgggcggggtgttctccaagcggcgcatccccaagcgcacccagtttggccccgtggaggggcctctcgtcaggggctcggagctgaaagactgttacattcacctcaaggtttctcttgataaaggggacaggaaagaaagggatttacatgaagacctatggtttgagttgtctgatgagacgctttgtaactggatgatgtttgtacggccagcccagaatcacctggagcagaacctggtggcttaccagtatggccaccatgtgtattatacaaccataaaaaatgtggagcccaagcaggaactgaaggtgtggtatgccgcatcctatgctgagttcgtgaaccagaaaattcatgacatttctgaggaagaaaggaaagttcttcgagagcaagagaagaattggccctgctatgaatgtaaccgccgatttataagctcggagcagttgcaacagcatctcaattctcatgatgagaaactagatgtgtttagcagaacaagaggcagaggaaggggacgaggcaagaggcgattcggtccaggtcgacggccggggcgtcctccaaaatttatccgcctggaaatcaccagcgaaaatggggaaaagagtgacgatgggacacaggacttgctacattttcccacaaaggagcaatttgatgaggctgaaccagccactctgaatgggctggatcaaccagaacagaccactatcccaatccctcagctgccacaggaaacccagtcttccctggaacatgaaccagaaactcacaccctgcacctgcagccgcagcatgaagagagcgtggtgcccacccagagcacgctgacagccgacgacatgcgcagagccaagcgcatccgaaatgcagctcttcagcatctgtttattcggaagtccttccggccttttaaatgcttgcagtgtgggaaggccttccgggaaaaggacaaactggaccagcacttacgcttccatgggcgggaggggaactgcccactgacctgtgatctctgtaacaagggcttcatcagcagcacatccttggagagccacatgaagctccactcagaccagaagacttactcttgcattttttgcccagaatcctttgaccgccttgatttgttgaaagatcatgtggccattcatatcaatgatggctacttcacctgcccaacttgtaagaaacggttcccagattttatccaggtgaaaaaacacgtgcgcagcttccactcagaaaagatctaccagtgcacagagtgtgacaaggccttctgtcgccccgataaactgcgactccacatgctccggcattcggaccgcaaagacttcctgtgttccacctgtgggaagcaatttaagcgaaaagacaaactacgggaacacatgcagaggatgcataatcctgagagggaggccaagaaagccgaccgcatcagccgctccaagacgttcaagccccgcatcacgtccacagactacgacagcttcacgttcaagtgccgcctgtgcatgatgggcttccggcggcgcggcatgctggtaaatcacttatcgaagagacacccagacatgaagatagaagaggtgccagagttaactctacccatcataaaacccaatcgtgattacttttgtcagtattgcgataaggtttataaaagtgccagcaagcgcaaagcccacattctgaagaaccacccaggagcagagctcccaccgagcattcggaagctccgacccgctggtcctggagagccagaccccatgctgagcacacacacccagctgacgggcaccatcgccacccctcccgtctgctgtccccactgctccaagcagtacagcagcaagaccaagatggtccagcacattcgaaagaagcatccagagttcgcccagctctccaacaccatacacacaccactgacgacagctgtgatcagtgccaccccagcggttttgactacagacagcgccactggagagactgtggtgacgacggacctgctcacccaagcaatgacagaactgtcccagaccttaacgacagactaccgaacgccacaaggggattaccagagaattcagtacatccctgtgtcgcagtcggcgtctggcctccagcagcctcagcacatacagctgcaagtggttcaagtggcctcggtatctgggcagccgttgagtccctcagcccagcaggctcagcaggggctcagcccctcccacatccagggcagttcttccacacaggggcaggctctgcagcagcagcagcagcagcagcagaattcctctgtgcagcacacgtacctgcccagtgcttggaattccttccgtggctattcatctgagattcaaatgatgacgcttcctccgggtcagtttgtgattacagacagtggtgtggcaactccagttactactggccaggtgaaggcggttacttcgggtcattatgtgttatcagaaagtcaatcagaattggaagaaaagcaaacttctgccctctctggtggagtccaggtcgagccacctgcacacagtgactccctggacccccagaccaacagccaacagcagaccacacagtacatcatcaccaccaccaccaacgggaacggaagcagcgaagtgcatatcaccaaaccatgacttccaccctggagcttgaatccagcacccacctcatgtctgttctcataagtctgaaagctctgacacgtagagctcttttgtaagatttattattcactcaagagttcggaaaccacagttttgtctctcatccatacactggggtttattttgccaaggtcatctttatcaaattgactcttcaaaccctcggtttttgccacagaacagagatctttcaggggaaagtagatttcgaggtggagagaatttgccttgctcttgagctggtcttttaacatactgacgagccttacttttcctttgtggaaatattaagtggcatattgtgttcataccaaaggtggagacaggatgtgccaagttcatggttactggacttcttattccaagccatggcaccaaaggagaaggggcattttgtgggtgtgcattaggtctgaactgctttatcttgttttagttttcagtaatttaacaaagggagcctgctgaataacaaaattaaaatgatgaaacaaaagtttgacagtgatattctgaagcaaaaactgtcatctaaatttttcttgctgattttttttaacttccctattttagaaaactattgttgggctgttggtagtgctttccacagatgctggtcctcagtggattaggtcagaagctcatgttctgatagttcttcattatttcacaaaggtggacaacctgaaagagaaaaggctgcttgatgtcagcagaatctaaacccctacattaaagctttgcctcccattctgtggttgtggtggtggtaagaaggagatattggtaccaagaaaaatttccaaaactattgagagagagagagagaaagtattgaaattttgttctgccttgcaggatccatttatcattcattggtaaaggatatattccttgttcttaccaagtgtacatttaactcttgctgacatgttcagtgtattttattacttttaatgctgtcttaaaatgaacattctttaaagttggacaggaaggtggcatttcttatttattaacatttttaactttaaacatattgtgactcatctagaccttttaataagacggtcaacttcacacttagggaaaaaattaaaatgtgatggccacttctaataattcaggtagttataagggatctggaagaaatccagtctttatgaatatactattagttgggcattaaaaaatcagtatatattttaactttttgtgacatgctaacacattttcagaataattattgcatagtagaatttattactccagaacagaaagaccttacttcatttcaaatgaagttaattaatttacatttctgggtaaaaactggttctataaattaagtagagtagcttctttatgataaagacaattttctgaaaagtgaacaattctgttaaaagaactttattgatgtgtagatttcgcactttatttctgagactgcgttcatgtagttgttccccaatgtttgagtactaagagaacttgagaaaattacttcataaacatatggaaactgaaaatggactctctttgtgacaaagatattcaacagaaaatattgaccctgcattgcaaaacacaggttcgggttccctaagtcccacagtgtaatgattacaaatatcctagtgtccggtctagaaagactttctaggagaagactagtggaattttctaaaggttcagttttagcttttataacttaaatttggccctgttacgttctttttaatttgaaccataaggtatctcccctcccttcaggaataacttattggaaaactgaaaagaatcactgaatggaatgttcattttatggcagttgttttaagttttaaaatacacagaggaaaatattgtggaaggacctctttgttgctttcccttctaagttgtcttcttcttcttcttcttcttcttcttctttggtccttaagtgaaataaagactctaaaactaatttgtatattatcagccagagatgcggatggcagtcgagccaaatcgcatggctttcagatcaggtattctgcacattcattccaaggtcatagatttttaaaaggacctggatttgaagagatggcaaatgatgagccatcagaaaacttaatttggaaaacatgtatgtagccagtgtggatattgtggcctctctcaagacacattgacactgtagacttcattcagtccagtgtgagtattttggagtaggttggatgtagattttgtttttatcattgatttgtaccgacagaaatagacatttcatcatgtaaaattcctgttattctggaaaaacctattgttttgatcttcttgttttctgacttggaagtatcctttcaaaaaaactcttaagatatctaggtctaaaaagcacttcatgagatgctaaagctgacccactggttgaaaatgttgaccctatcctgttatttaaatgtgaacatttattgtacattcagtgagttatagtgttaatagtcttgtgctatgcagcaggtgtaaaaattaataaatatattttttaataaacatgtttgtatgtgtgaa

SEQ ID NO: 168534 - DNA, 6322 bp, Homo sapiens
  Payload ID: 13175
  Gene Symbol: PRDM10
  Gene Name: PR domain containing 10
  Uniprot ID: Q9NQV6
  ENST ID: ENST00000358825
  CDS Start-End: 233-3715
actctgcggcgggaagaaccacctggaggtggcggggggggttgatttctatcacccctagggagagaggatcggggacccgctgatcttccagctcccctcacccaacgtcgtgcatgctgcagacagacctttccgtccttcatgaacacacgtgtggtagacagatgactgtcctgtaccctgtgctgctctaggtgtgccagacgtggagctgtccagttgggagaagatggattccaaagatgaaagctcgcatgtgtggccgacatctgcagagcatgaacagaatgccgcacaggtgcactttgttccggacacaggaacagtggctcagattgtctataccgatgaccaggttcgccccccacagcaggtggtgtacacggcagatggtgcctcctacacatcagtggatggtccagagcacacgctggtgtacatccacccggtggaagctgcacagactctgtttacagaccccggccaggtagcttatgtccaacaggatgctacagctcagcaggcctcattgccagttcataaccaggtgctgccttccatcgagagtgtagatgggtccgaccctttggcaactctgcagacccctctaggcagactggaggccaaagaggaagaggatgaggatgaggacgaggacactgaggaagatgaggaagaagacggtgaggacacggatctggatgactgggagccagacccgccccggcccttcgacccacacgacttgtggtgtgaggagtgcaataacgcgcatgcttcagtgtgtccgaagcacggccccttgcacccgatccccaaccggccggtgctcacccgggccagggcgagcctccccctggtgctctacatagacaggtttctgggcggggtgttctccaagcggcgcatccccaagcgcacccagtttggccccgtggaggggcctctcgtcaggggctcggagctgaaagactgttacattcacctcaaggtttctcttgataaaggggacaggaaagaaagggatttacatgaagacctatggtttgagttgtctgatgagacgctttgtaactggatgatgtttgtacggccagcccagaatcacctggagcagaacctggtggcttaccagtatggccaccatgtgtattatacaaccataaaaaatgtggagcccaagcaggaactgaaggtgtggtatgccgcatcctatgctgagttcgtgaaccagaaaattcatgacatttctgaggaagaaaggaaagttcttcgagagcaagagaagaattggccctgctatgaatgtaaccgccgatttataagctcggagcagttgcaacagcatctcaattctcatgatgagaaactagatgtgtttagcagaacaagaggcagaggaaggggacgaggcaagaggcgattcggtccaggtcgacggccggggcgtcctccaaaatttatccgcctggaaatcaccagcgaaaatggggaaaagagtgacgatgggacacaggacttgctacattttcccacaaaggagcaatttgatgaggctgaaccagccactctgaatgggctggatcaaccagaacagaccactatcccaatccctcagctgccacaggaaacccagtcttccctggaacatgaaccagaaactcacaccctgcacctgcagccgcagcatgaagagagcgtggtgcccacccagagcacgctgacagccgacgacatgcgcagagccaagcgcatccgattggagctgcagaatgcagctcttcagcatctgtttattcggaagtccttccggccttttaaatgcttgcagtgtgggaaggccttccgggaaaaggacaaactggaccagcacttacgcttccatgggcgggaggggaactgcccactgacctgtgatctctgtaacaagggcttcatcagcagcacatccttggagagccacatgaagctccactcagaccagaagacttactcttgcattttttgcccagaatcctttgaccgccttgatttgttgaaagatcatgtggccattcatatcaatgatggctacttcacctgcccaacttgtaagaaacggttcccagattttatccaggtgaaaaaacacgtgcgcagcttccactcagaaaagatctaccagtgcacagagtgtgacaaggccttctgtcgccccgataaactgcgactccacatgctccggcattcggaccgcaaagacttcctgtgttccacctgtgggaagcaatttaagcgaaaagacaaactacgggaacacatgcagaggatgcataatcctgagagggaggccaagaaagccgaccgcatcagccgctccaagacgttcaagccccgcatcacgtccacagactacgacagcttcacgttcaagtgccgcctgtgcatgatgggcttccggcggcgcggcatgctggtaaatcacttatcgaagagacacccagacatgaagatagaagaggtgccagagttaactctacccatcataaaacccaatcgtgattacttttgtcagtattgcgataaggtttataaaagtgccagcaagcgcaaagcccacattctgaagaaccacccaggagcagagctcccaccgagcattcggaagctccgacccgctggtcctggagagccagaccccatgctgagcacacacacccagctgacgggcaccatcgccacccctcccgtctgctgtccccactgctccaagcagtacagcagcaagaccaagatggtccagcacattcgaaagaagcatccagagttcgcccagctctccaacaccatacacacaccactgacgacagctgtgatcagtgccaccccagcggttttgactacagacagcgccactggagagactgtggtgacgacggacctgctcacccaagcaatgacagaactgtcccagaccttaacgacagactaccgaacgccacaaggggattaccagagaattcagtacatccctgtgtcgcagtcggcgtctggcctccagcagcctcagcacatacagctgcaagtggttcaagtggcctcggccacttcccctcaccagtcacagcagtccactgtggatgttggccagctccatgatcctcagccctacccccagcacgccatccaggtgcagcacatccaggtcagcgagcctaccgcctcggccccgtcctccgcccaggtatctgggcagccgttgagtccctcagcccagcaggctcagcaggggctcagcccctcccacatccagggcagttcttccacacaggggcaggctctgcagcagcagcagcagcagcagcagaattcctctgtgcagcacacgtacctgcccagtgcttggaattccttccgtggctattcatctgagattcaaatgatgacgcttcctccgggtcagtttgtgattacagacagtggtgtggcaactccagttactactggccaggtgaaggcggttacttcgggtcattatgtgttatcagaaagtcaatcagaattggaagaaaagcaaacttctgccctctctggtggagtccaggtcgagccacctgcacacagtgactccctggacccccagaccaacagccaacagcagaccacacagtacatcatcaccaccaccaccaacgggaacggaagcagcgaagtgcatatcaccaaaccatgacttccaccctggagcttgaatccagcacccacctcatgtctgttctcataagtctgaaagctctgacacgtagagctcttttgtaagatttattattcactcaagagttcggaaaccacagttttgtctctcatccatacactggggtttattttgccaaggtcatctttatcaaattgactcttcaaaccctcggtttttgccacagaacagagatctttcaggggaaagtagatttcgaggtggagagaatttgccttgctcttgagctggtcttttaacatactgacgagccttacttttcctttgtggaaatattaagtggcatattgtgttcataccaaaggtggagacaggatgtgccaagttcatggttactggacttcttattccaagccatggcaccaaaggagaaggggcattttgtgggtgtgcattaggtctgaactgctttatcttgttttagttttcagtaatttaacaaagggagcctgctgaataacaaaattaaaatgatgaaacaaaagtttgacagtgatattctgaagcaaaaactgtcatctaaatttttcttgctgattttttttaacttccctattttagaaaactattgttgggctgttggtagtgctttccacagatgctggtcctcagtggattaggtcagaagctcatgttctgatagttcttcattatttcacaaaggtggacaacctgaaagagaaaaggctgcttgatgtcagcagaatctaaacccctacattaaagctttgcctcccattctgtggttgtggtggtggtaagaaggagatattggtaccaagaaaaatttccaaaactattgagagagagagagagaaagtattgaaattttgttctgccttgcaggatccatttatcattcattggtaaaggatatattccttgttcttaccaagtgtacatttaactcttgctgacatgttcagtgtattttattacttttaatgctgtcttaaaatgaacattctttaaagttggacaggaaggtggcatttcttatttattaacatttttaactttaaacatattgtgactcatctagaccttttaataagacggtcaacttcacacttagggaaaaaattaaaatgtgatggccacttctaataattcaggtagttataagggatctggaagaaatccagtctttatgaatatactattagttgggcattaaaaaatcagtatatattttaactttttgtgacatgctaacacattttcagaataattattgcatagtagaatttattactccagaacagaaagaccttacttcatttcaaatgaagttaattaatttacatttctgggtaaaaactggttctataaattaagtagagtagcttctttatgataaagacaattttctgaaaagtgaacaattctgttaaaagaactttattgatgtgtagatttcgcactttatttctgagactgcgttcatgtagttgttccccaatgtttgagtactaagagaacttgagaaaattacttcataaacatatggaaactgaaaatggactctctttgtgacaaagatattcaacagaaaatattgaccctgcattgcaaaacacaggttcgggttccctaagtcccacagtgtaatgattacaaatatcctagtgtccggtctagaaagactttctaggagaagactagtggaattttctaaaggttcagttttagcttttataacttaaatttggccctgttacgttctttttaatttgaaccataaggtatctcccctcccttcaggaataacttattggaaaactgaaaagaatcactgaatggaatgttcattttatggcagttgttttaagttttaaaatacacagaggaaaatattgtggaaggacctctttgttgctttcccttctaagttgtcttcttcttcttcttcttcttcttcttctttggtccttaagtgaaataaagactctaaaactaatttgtatattatcagccagagatgcggatggcagtcgagccaaatcgcatggctttcagatcaggtattctgcacattcattccaaggtcatagatttttaaaaggacctggatttgaagagatggcaaatgatgagccatcagaaaacttaatttggaaaacatgtatgtagccagtgtggatattgtggcctctctcaagacacattgacactgtagacttcattcagtccagtgtgagtattttggagtaggttggatgtagattttgtttttatcattgatttgtaccgacagaaatagacatttcatcatgtaaaattcctgttattctggaaaaacctattgttttgatcttcttgttttctgacttggaagtatcctttcaaaaaaactcttaagatatctaggtctaaaaagcacttcatgagatgctaaagctgacccactggttgaaaatgttgaccctatcctgttatttaaatgtgaacatttattgtacattcagtgagttatagtgttaatagtcttgtgctatgcagcaggtgtaaaaattaataaatatattttttaataaacatgtttgtatgtgtgaagctacaaga

SEQ ID NO: 168535 - DNA, 6301 bp, Homo sapiens
  Payload ID: 13175
  Gene Symbol: PRDM10
  Gene Name: PR domain containing 10
  Uniprot ID: Q9NQV6
  ENST ID: ENST00000360871
  CDS Start-End: 233-3703
actctgcggcgggaagaaccacctggaggtggcggggggggttgatttctatcacccctagggagagaggatcggggacccgctgatcttccagctcccctcacccaacgtcgtgcatgctgcagacagacctttccgtccttcatgaacacacgtgtggtagacagatgactgtcctgtaccctgtgctgctctaggtgtgccagacgtggagctgtccagttgggagaagatggattccaaagatgaaagctcgcatgtgtggccgacatctgcagagcatgaacagaatgccgcacaggtgcactttgttccggacacaggaacagtggctcagattgtctataccgatgaccaggttcgccccccacagcaggtggtgtacacggcagatggtgcctcctacacatcagtggatggtccagagcacacgctggtgtacatccacccggtggaagctgcacagactctgtttacagaccccggccaggtagcttatgtccaacaggatgctacagctcagcaggcctcattgccagttcataaccaggtgctgccttccatcgagagtgtagatgggtccgaccctttggcaactctgcagacccctctaggcagactggaggccaaagaggaagaggatgaggatgaggacgaggacactgaggaagatgaggaagaagacggtgaggacacggatctggatgactgggagccagacccgccccggcccttcgacccacacgacttgtggtgtgaggagtgcaataacgcgcatgcttcagtgtgtccgaagcacggccccttgcacccgatccccaaccggccggtgctcacccgggccagggcgagcctccccctggtgctctacatagacaggtttctgggcggggtgttctccaagcggcgcatccccaagcgcacccagtttggccccgtggaggggcctctcgtcaggggctcggagctgaaagactgttacattcacctcaaggtttctcttgataaaggggacaggaaagaaagggatttacatgaagacctatggtttgagttgtctgatgagacgctttgtaactggatgatgtttgtacggccagcccagaatcacctggagcagaacctggtggcttaccagtatggccaccatgtgtattatacaaccataaaaaatgtggagcccaagcaggaactgaaggtgtggtatgccgcatcctatgctgagttcgtgaaccagaaaattcatgacatttctgaggaagaaaggaaagttcttcgagagcaagagaagaattggccctgctatgaatgtaaccgccgatttataagctcggagcagttgcaacagcatctcaattctcatgatgagaaactagatgtgtttagcagaacaagaggcagaggaaggggacgaggcaagaggcgattcggtccaggtcgacggccggggcgtcctccaaaatttatccgcctggaaatcaccagcgaaaatggggaaaagagtgacgatgggacacaggacttgctacattttcccacaaaggagcaatttgatgaggctgaaccagccactctgaatgggctggatcaaccagaacagaccactatcccaatccctcagctgccacaggaaacccagtcttccctggaacatgaaccagaaactcacaccctgcacctgcagccgcagcatgaagagagcgtggtgcccacccagagcacgctgacagccgacgacatgcgcagagccaagcgcatccgaaatgcagctcttcagcatctgtttattcggaagtccttccggccttttaaatgcttgcagtgtgggaaggccttccgggaaaaggacaaactggaccagcacttacgcttccatgggcgggaggggaactgcccactgacctgtgatctctgtaacaagggcttcatcagcagcacatccttggagagccacatgaagctccactcagaccagaagacttactcttgcattttttgcccagaatcctttgaccgccttgatttgttgaaagatcatgtggccattcatatcaatgatggctacttcacctgcccaacttgtaagaaacggttcccagattttatccaggtgaaaaaacacgtgcgcagcttccactcagaaaagatctaccagtgcacagagtgtgacaaggccttctgtcgccccgataaactgcgactccacatgctccggcattcggaccgcaaagacttcctgtgttccacctgtgggaagcaatttaagcgaaaagacaaactacgggaacacatgcagaggatgcataatcctgagagggaggccaagaaagccgaccgcatcagccgctccaagacgttcaagccccgcatcacgtccacagactacgacagcttcacgttcaagtgccgcctgtgcatgatgggcttccggcggcgcggcatgctggtaaatcacttatcgaagagacacccagacatgaagatagaagaggtgccagagttaactctacccatcataaaacccaatcgtgattacttttgtcagtattgcgataaggtttataaaagtgccagcaagcgcaaagcccacattctgaagaaccacccaggagcagagctcccaccgagcattcggaagctccgacccgctggtcctggagagccagaccccatgctgagcacacacacccagctgacgggcaccatcgccacccctcccgtctgctgtccccactgctccaagcagtacagcagcaagaccaagatggtccagcacattcgaaagaagcatccagagttcgcccagctctccaacaccatacacacaccactgacgacagctgtgatcagtgccaccccagcggttttgactacagacagcgccactggagagactgtggtgacgacggacctgctcacccaagcaatgacagaactgtcccagaccttaacgacagactaccgaacgccacaaggggattaccagagaattcagtacatccctgtgtcgcagtcggcgtctggcctccagcagcctcagcacatacagctgcaagtggttcaagtggcctcggccacttcccctcaccagtcacagcagtccactgtggatgttggccagctccatgatcctcagccctacccccagcacgccatccaggtgcagcacatccaggtcagcgagcctaccgcctcggccccgtcctccgcccaggtatctgggcagccgttgagtccctcagcccagcaggctcagcaggggctcagcccctcccacatccagggcagttcttccacacaggggcaggctctgcagcagcagcagcagcagcagcagaattcctctgtgcagcacacgtacctgcccagtgcttggaattccttccgtggctattcatctgagattcaaatgatgacgcttcctccgggtcagtttgtgattacagacagtggtgtggcaactccagttactactggccaggtgaaggcggttacttcgggtcattatgtgttatcagaaagtcaatcagaattggaagaaaagcaaacttctgccctctctggtggagtccaggtcgagccacctgcacacagtgactccctggacccccagaccaacagccaacagcagaccacacagtacatcatcaccaccaccaccaacgggaacggaagcagcgaagtgcatatcaccaaaccatgacttccaccctggagcttgaatccagcacccacctcatgtctgttctcataagtctgaaagctctgacacgtagagctcttttgtaagatttattattcactcaagagttcggaaaccacagttttgtctctcatccatacactggggtttattttgccaaggtcatctttatcaaattgactcttcaaaccctcggtttttgccacagaacagagatctttcaggggaaagtagatttcgaggtggagagaatttgccttgctcttgagctggtcttttaacatactgacgagccttacttttcctttgtggaaatattaagtggcatattgtgttcataccaaaggtggagacaggatgtgccaagttcatggttactggacttcttattccaagccatggcaccaaaggagaaggggcattttgtgggtgtgcattaggtctgaactgctttatcttgttttagttttcagtaatttaacaaagggagcctgctgaataacaaaattaaaatgatgaaacaaaagtttgacagtgatattctgaagcaaaaactgtcatctaaatttttcttgctgattttttttaacttccctattttagaaaactattgttgggctgttggtagtgctttccacagatgctggtcctcagtggattaggtcagaagctcatgttctgatagttcttcattatttcacaaaggtggacaacctgaaagagaaaaggctgcttgatgtcagcagaatctaaacccctacattaaagctttgcctcccattctgtggttgtggtggtggtaagaaggagatattggtaccaagaaaaatttccaaaactattgagagagagagagagaaagtattgaaattttgttctgccttgcaggatccatttatcattcattggtaaaggatatattccttgttcttaccaagtgtacatttaactcttgctgacatgttcagtgtattttattacttttaatgctgtcttaaaatgaacattctttaaagttggacaggaaggtggcatttcttatttattaacatttttaactttaaacatattgtgactcatctagaccttttaataagacggtcaacttcacacttagggaaaaaattaaaatgtgatggccacttctaataattcaggtagttataagggatctggaagaaatccagtctttatgaatatactattagttgggcattaaaaaatcagtatatattttaactttttgtgacatgctaacacattttcagaataattattgcatagtagaatttattactccagaacagaaagaccttacttcatttcaaatgaagttaattaatttacatttctgggtaaaaactggttctataaattaagtagagtagcttctttatgataaagacaattttctgaaaagtgaacaattctgttaaaagaactttattgatgtgtagatttcgcactttatttctgagactgcgttcatgtagttgttccccaatgtttgagtactaagagaacttgagaaaattacttcataaacatatggaaactgaaaatggactctctttgtgacaaagatattcaacagaaaatattgaccctgcattgcaaaacacaggttcgggttccctaagtcccacagtgtaatgattacaaatatcctagtgtccggtctagaaagactttctaggagaagactagtggaattttctaaaggttcagttttagcttttataacttaaatttggccctgttacgttctttttaatttgaaccataaggtatctcccctcccttcaggaataacttattggaaaactgaaaagaatcactgaatggaatgttcattttatggcagttgttttaagttttaaaatacacagaggaaaatattgtggaaggacctctttgttgctttcccttctaagttgtcttcttcttcttcttcttcttcttcttctttggtccttaagtgaaataaagactctaaaactaatttgtatattatcagccagagatgcggatggcagtcgagccaaatcgcatggctttcagatcaggtattctgcacattcattccaaggtcatagatttttaaaaggacctggatttgaagagatggcaaatgatgagccatcagaaaacttaatttggaaaacatgtatgtagccagtgtggatattgtggcctctctcaagacacattgacactgtagacttcattcagtccagtgtgagtattttggagtaggttggatgtagattttgtttttatcattgatttgtaccgacagaaatagacatttcatcatgtaaaattcctgttattctggaaaaacctattgttttgatcttcttgttttctgacttggaagtatcctttcaaaaaaactcttaagatatctaggtctaaaaagcacttcatgagatgctaaagctgacccactggttgaaaatgttgaccctatcctgttatttaaatgtgaacatttattgtacattcagtgagttatagtgttaatagtcttgtgctatgcagcaggtgtaaaaattaataaatatattttttaataaacatgtttgtatgtgtgaa

SEQ ID NO: 168536 - DNA, 5998 bp, Homo sapiens
  Payload ID: 13175
  Gene Symbol: PRDM10
  Gene Name: PR domain containing 10
  Uniprot ID: Q9NQV6
  ENST ID: ENST00000423662
  CDS Start-End: 217-3402
agccctcccaggtgtgggacagaaggggcagagggagggcagaggcttaaaggctgtgagcagtcagatcaaaaatgaagccagctcttcctcacagccggtagatggaagtcatttttccagggcctggaaggagttggtaggaagactagatttcagccagcccttgcgccctgtttgtgccagcaggcaccagcgaaccaaaagcaggtgtccatgtctgcttactctgtgccttcaacttttgcccaggcctcattgccagttcataaccaggtgctgccttccatcgagagtgtagatgggtccgaccctttggcaactctgcagacccctctaggcagactggaggccaaagaggaagaggatgaggatgaggacgaggacactgaggaagatgaggaagaagacggtgaggacacggatctggatgactgggagccagacccgccccggcccttcgacccacacgacttgtggtgtgaggagtgcaataacgcgcatgcttcagtgtgtccgaagcacggccccttgcacccgatccccaaccggccggtgctcacccgggccagggcgagcctccccctggtgctctacatagacaggtttctgggcggggtgttctccaagcggcgcatccccaagcgcacccagtttggccccgtggaggggcctctcgtcaggggctcggagctgaaagactgttacattcacctcaaggtttctcttgataaaggggacaggaaagaaagggatttacatgaagacctatggtttgagttgtctgatgagacgctttgtaactggatgatgtttgtacggccagcccagaatcacctggagcagaacctggtggcttaccagtatggccaccatgtgtattatacaaccataaaaaatgtggagcccaagcaggaactgaaggtgtggtatgccgcatcctatgctgagttcgtgaaccagaaaattcatgacatttctgaggaagaaaggaaagttcttcgagagcaagagaagaattggccctgctatgaatgtaaccgccgatttataagctcggagcagttgcaacagcatctcaattctcatgatgagaaactagatgtgtttagcagaacaagaggcagaggaaggggacgaggcaagaggcgattcggtccaggtcgacggccggggcgtcctccaaaatttatccgcctggaaatcaccagcgaaaatggggaaaagagtgacgatgggacacaggacttgctacattttcccacaaaggagcaatttgatgaggctgaaccagccactctgaatgggctggatcaaccagaacagaccactatcccaatccctcagctgccacaggaaacccagtcttccctggaacatgaaccagaaactcacaccctgcacctgcagccgcagcatgaagagagcgtggtgcccacccagagcacgctgacagccgacgacatgcgcagagccaagcgcatccgattggagctgcagaatgcagctcttcagcatctgtttattcggaagtccttccggccttttaaatgcttgcagtgtgggaaggccttccgggaaaaggacaaactggaccagcacttacgcttccatgggcgggaggggaactgcccactgacctgtgatctctgtaacaagggcttcatcagcagcacatccttggagagccacatgaagctccactcagaccagaagacttactcttgcattttttgcccagaatcctttgaccgccttgatttgttgaaagatcatgtggccattcatatcaatgatggctacttcacctgcccaacttgtaagaaacggttcccagattttatccaggtgaaaaaacacgtgcgcagcttccactcagaaaagatctaccagtgcacagagtgtgacaaggccttctgtcgccccgataaactgcgactccacatgctccggcattcggaccgcaaagacttcctgtgttccacctgtgggaagcaatttaagcgaaaagacaaactacgggaacacatgcagaggatgcataatcctgagagggaggccaagaaagccgaccgcatcagccgctccaagacgttcaagccccgcatcacgtccacagactacgacagcttcacgttcaagtgccgcctgtgcatgatgggcttccggcggcgcggcatgctggtaaatcacttatcgaagagacacccagacatgaagatagaagaggtgccagagttaactctacccatcataaaacccaatcgtgattacttttgtcagtattgcgataaggtttataaaagtgccagcaagcgcaaagcccacattctgaagaaccacccaggagcagagctcccaccgagcattcggaagctccgacccgctggtcctggagagccagaccccatgctgagcacacacacccagctgacgggcaccatcgccacccctcccgtctgctgtccccactgctccaagcagtacagcagcaagaccaagatggtccagcacattcgaaagaagcatccagagttcgcccagctctccaacaccatacacacaccactgacgacagctgtgatcagtgccaccccagcggttttgactacagacagcgccactggagagactgtggtgacgacggacctgctcacccaagcaatgacagaactgtcccagaccttaacgacagactaccgaacgccacaaggggattaccagagaattcagtacatccctgtgtcgcagtcggcgtctggcctccagcagcctcagcacatacagctgcaagtggttcaagtggcctcggccacttcccctcaccagtcacagcagtccactgtggatgttggccagctccatgatcctcagccctacccccagcacgccatccaggtgcagcacatccaggtatctgggcagccgttgagtccctcagcccagcaggctcagcaggggctcagcccctcccacatccagggcagttcttccacacaggggcaggctctgcagcagcagcagcagcagcagcagaattcctctgtgcagcacacgtacctgcccagtgcttggaattccttccgtggctattcatctgagattcaaatgatgacgcttcctccgggtcagtttgtgattacagacagtggtgtggcaactccagttactactggccaggtgaaggcggttacttcgggtcattatgtgttatcagaaagtcaatcagaattggaagaaaagcaaacttctgccctctctggtggagtccaggtcgagccacctgcacacagtgactccctggacccccagaccaacagccaacagcagaccacacagtacatcatcaccaccaccaccaacgggaacggaagcagcgaagtgcatatcaccaaaccatgacttccaccctggagcttgaatccagcacccacctcatgtctgttctcataagtctgaaagctctgacacgtagagctcttttgtaagatttattattcactcaagagttcggaaaccacagttttgtctctcatccatacactggggtttattttgccaaggtcatctttatcaaattgactcttcaaaccctcggtttttgccacagaacagagatctttcaggggaaagtagatttcgaggtggagagaatttgccttgctcttgagctggtcttttaacatactgacgagccttacttttcctttgtggaaatattaagtggcatattgtgttcataccaaaggtggagacaggatgtgccaagttcatggttactggacttcttattccaagccatggcaccaaaggagaaggggcattttgtgggtgtgcattaggtctgaactgctttatcttgttttagttttcagtaatttaacaaagggagcctgctgaataacaaaattaaaatgatgaaacaaaagtttgacagtgatattctgaagcaaaaactgtcatctaaatttttcttgctgattttttttaacttccctattttagaaaactattgttgggctgttggtagtgctttccacagatgctggtcctcagtggattaggtcagaagctcatgttctgatagttcttcattatttcacaaaggtggacaacctgaaagagaaaaggctgcttgatgtcagcagaatctaaacccctacattaaagctttgcctcccattctgtggttgtggtggtggtaagaaggagatattggtaccaagaaaaatttccaaaactattgagagagagagagagaaagtattgaaattttgttctgccttgcaggatccatttatcattcattggtaaaggatatattccttgttcttaccaagtgtacatttaactcttgctgacatgttcagtgtattttattacttttaatgctgtcttaaaatgaacattctttaaagttggacaggaaggtggcatttcttatttattaacatttttaactttaaacatattgtgactcatctagaccttttaataagacggtcaacttcacacttagggaaaaaattaaaatgtgatggccacttctaataattcaggtagttataagggatctggaagaaatccagtctttatgaatatactattagttgggcattaaaaaatcagtatatattttaactttttgtgacatgctaacacattttcagaataattattgcatagtagaatttattactccagaacagaaagaccttacttcatttcaaatgaagttaattaatttacatttctgggtaaaaactggttctataaattaagtagagtagcttctttatgataaagacaattttctgaaaagtgaacaattctgttaaaagaactttattgatgtgtagatttcgcactttatttctgagactgcgttcatgtagttgttccccaatgtttgagtactaagagaacttgagaaaattacttcataaacatatggaaactgaaaatggactctctttgtgacaaagatattcaacagaaaatattgaccctgcattgcaaaacacaggttcgggttccctaagtcccacagtgtaatgattacaaatatcctagtgtccggtctagaaagactttctaggagaagactagtggaattttctaaaggttcagttttagcttttataacttaaatttggccctgttacgttctttttaatttgaaccataaggtatctcccctcccttcaggaataacttattggaaaactgaaaagaatcactgaatggaatgttcattttatggcagttgttttaagttttaaaatacacagaggaaaatattgtggaaggacctctttgttgctttcccttctaagttgtcttcttcttcttcttcttcttcttcttctttggtccttaagtgaaataaagactctaaaactaatttgtatattatcagccagagatgcggatggcagtcgagccaaatcgcatggctttcagatcaggtattctgcacattcattccaaggtcatagatttttaaaaggacctggatttgaagagatggcaaatgatgagccatcagaaaacttaatttggaaaacatgtatgtagccagtgtggatattgtggcctctctcaagacacattgacactgtagacttcattcagtccagtgtgagtattttggagtaggttggatgtagattttgtttttatcattgatttgtaccgacagaaatagacatttcatcatgtaaaattcctgttattctggaaaaacctattgttttgatcttcttgttttctgacttggaagtatcctttcaaaaaaactcttaagatatctaggtctaaaaagcacttcatgagatgctaaagctgacccactggttgaaaatgttgaccctatcctgttatttaaatgtgaacatttattgtacattcagtgagttatagtgttaatagtcttgtgctatgcagcaggtgtaaaaattaataaatatattttttaataaacatgtttgtatgtgtg

SEQ ID NO: 168537 - DNA, 6182 bp, Homo sapiens
  Payload ID: 13175
  Gene Symbol: PRDM10
  Gene Name: PR domain containing 10
  ENST ID: ENST00000528746
  CDS Start-End: 233-3586
actctgcggcgggaagaaccacctggaggtggcggggggggttgatttctatcacccctagggagagaggatcggggacccgctgatcttccagctcccctcacccaacgtcgtgcatgctgcagacagacctttccgtccttcatgaacacacgtgtggtagacagatgactgtcctgtaccctgtgctgctctaggtgtgccagacgtggagctgtccagttgggagaagatggattccaaagatgaaagctcgcatgtgtggccgacatctgcagagcatgaacagaatgccgcacaggtgcactttgttccggacacaggaacagtggctcagattgtctataccgatgaccaggttcgccccccacagcaggtggtgtacacggcagatggtgcctcctacacatcagtggatggtccagagcacacgctggtgtacatccacccggtggaagctgcacagactctgtttacagaccccggccaggtagcttatgtccaacaggatgctacagctcagcagacccctctaggcagactggaggccaaagaggaagaggatgaggatgaggacgaggacactgaggaagatgaggaagaagacggtgaggacacggatctggatgactgggagccagacccgccccggcccttcgacccacacgacttgtggtgtgaggagtgcaataacgcgcatgcttcagtgtgtccgaagcacggccccttgcacccgatccccaaccggccggtgctcacccgggccagggcgagcctccccctggtgctctacatagacaggtttctgggcggggtgttctccaagcggcgcatccccaagcgcacccagtttggccccgtggaggggcctctcgtcaggggctcggagctgaaagactgttacattcacctcaaggtttctcttgataaaggggacaggaaagaaagggatttacatgaagacctatggtttgagttgtctgatgagacgctttgtaactggatgatgtttgtacggccagcccagaatcacctggagcagaacctggtggcttaccagtatggccaccatgtgtattatacaaccataaaaaatgtggagcccaagcaggaactgaaggtgtggtatgccgcatcctatgctgagttcgtgaaccagaaaattcatgacatttctgaggaagaaaggaaagttcttcgagagcaagagaagaattggccctgctatgaatgtaaccgccgatttataagctcggagcagttgcaacagcatctcaattctcatgatgagaaactagatgtgtttagcagaacaagaggcagaggaaggggacgaggcaagaggcgattcggtccaggtcgacggccggggcgtcctccaaaatttatccgcctggaaatcaccagcgaaaatggggaaaagagtgacgatgggacacaggacttgctacattttcccacaaaggagcaatttgatgaggctgaaccagccactctgaatgggctggatcaaccagaacagaccactatcccaatccctcagctgccacaggaaacccagtcttccctggaacatgaaccagaaactcacaccctgcacctgcagccgcagcatgaagagagcgtggtgcccacccagagcacgctgacagccgacgacatgcgcagagccaagcgcatccgaaatgcagctcttcagcatctgtttattcggaagtccttccggccttttaaatgcttgcagtgtgggaaggccttccgggaaaaggacaaactggaccagcacttacgcttccatgggcgggaggggaactgcccactgacctgtgatctctgtaacaagggcttcatcagcagcacatccttggagagccacatgaagctccactcagaccagaagacttactcttgcattttttgcccagaatcctttgaccgccttgatttgttgaaagatcatgtggccattcatatcaatgatggctacttcacctgcccaacttgtaagaaacggttcccagattttatccaggtgaaaaaacacgtgcgcagcttccactcagaaaagatctaccagtgcacagagtgtgacaaggccttctgtcgccccgataaactgcgactccacatgctccggcattcggaccgcaaagacttcctgtgttccacctgtgggaagcaatttaagcgaaaagacaaactacgggaacacatgcagaggatgcataatcctgagagggaggccaagaaagccgaccgcatcagccgctccaagacgttcaagccccgcatcacgtccacagactacgacagcttcacgttcaagtgccgcctgtgcatgatgggcttccggcggcgcggcatgctggtaaatcacttatcgaagagacacccagacatgaagatagaagaggtgccagagttaactctacccatcataaaacccaatcgtgattacttttgtcagtattgcgataaggtttataaaagtgccagcaagcgcaaagcccacattctgaagaaccacccaggagcagagctcccaccgagcattcggaagctccgacccgctggtcctggagagccagaccccatgctgagcacacacacccagctgacgggcaccatcgccacccctcccgtctgctgtccccactgctccaagcagtacagcagcaagaccaagatggtccagcacattcgaaagaagcatccagagttcgcccagctctccaacaccatacacacaccactgacgacagctgtgatcagtgccaccccagcggttttgactacagacagcgccactggagagactgtggtgacgacggacctgctcacccaagcaatgacagaactgtcccagaccttaacgacagactaccgaacgccacaaggggattaccagagaattcagtacatccctgtgtcgcagtcggcgtctggcctccagcagcctcagcacatacagctgcaagtggttcaagtggcctcggccacttcccctcaccagtcacagcagtccactgtggatgttggccagctccatgatcctcagccctacccccagcacgccatccaggtgcagcacatccaggtatctgggcagccgttgagtccctcagcccagcaggctcagcaggggctcagcccctcccacatccagggcagttcttccacacaggggcaggctctgcagcagcagcagcagcagcagcagaattcctctgtgcagcacacgtacctgcccagtgcttggaattccttccgtggctattcatctgagattcaaatgatgacgcttcctccgggtcagtttgtgattacagacagtggtgtggcaactccagttactactggccaggtgaaggcggttacttcgggtcattatgtgttatcagaaagtcaatcagaattggaagaaaagcaaacttctgccctctctggtggagtccaggtcgagccacctgcacacagtgactccctggacccccagaccaacagccaacagcagaccacacagtacatcatcaccaccaccaccaacgggaacggaagcagcgaagtgcatatcaccaaaccatgacttccaccctggagcttgaatccagcacccacctcatgtctgttctcataagtctgaaagctctgacacgtagagctcttttgtaagatttattattcactcaagagttcggaaaccacagttttgtctctcatccatacactggggtttattttgccaaggtcatctttatcaaattgactcttcaaaccctcggtttttgccacagaacagagatctttcaggggaaagtagatttcgaggtggagagaatttgccttgctcttgagctggtcttttaacatactgacgagccttacttttcctttgtggaaatattaagtggcatattgtgttcataccaaaggtggagacaggatgtgccaagttcatggttactggacttcttattccaagccatggcaccaaaggagaaggggcattttgtgggtgtgcattaggtctgaactgctttatcttgttttagttttcagtaatttaacaaagggagcctgctgaataacaaaattaaaatgatgaaacaaaagtttgacagtgatattctgaagcaaaaactgtcatctaaatttttcttgctgattttttttaacttccctattttagaaaactattgttgggctgttggtagtgctttccacagatgctggtcctcagtggattaggtcagaagctcatgttctgatagttcttcattatttcacaaaggtggacaacctgaaagagaaaaggctgcttgatgtcagcagaatctaaacccctacattaaagctttgcctcccattctgtggttgtggtggtggtaagaaggagatattggtaccaagaaaaatttccaaaactattgagagagagagagagaaagtattgaaattttgttctgccttgcaggatccatttatcattcattggtaaaggatatattccttgttcttaccaagtgtacatttaactcttgctgacatgttcagtgtattttattacttttaatgctgtcttaaaatgaacattctttaaagttggacaggaaggtggcatttcttatttattaacatttttaactttaaacatattgtgactcatctagaccttttaataagacggtcaacttcacacttagggaaaaaattaaaatgtgatggccacttctaataattcaggtagttataagggatctggaagaaatccagtctttatgaatatactattagttgggcattaaaaaatcagtatatattttaactttttgtgacatgctaacacattttcagaataattattgcatagtagaatttattactccagaacagaaagaccttacttcatttcaaatgaagttaattaatttacatttctgggtaaaaactggttctataaattaagtagagtagcttctttatgataaagacaattttctgaaaagtgaacaattctgttaaaagaactttattgatgtgtagatttcgcactttatttctgagactgcgttcatgtagttgttccccaatgtttgagtactaagagaacttgagaaaattacttcataaacatatggaaactgaaaatggactctctttgtgacaaagatattcaacagaaaatattgaccctgcattgcaaaacacaggttcgggttccctaagtcccacagtgtaatgattacaaatatcctagtgtccggtctagaaagactttctaggagaagactagtggaattttctaaaggttcagttttagcttttataacttaaatttggccctgttacgttctttttaatttgaaccataaggtatctcccctcccttcaggaataacttattggaaaactgaaaagaatcactgaatggaatgttcattttatggcagttgttttaagttttaaaatacacagaggaaaatattgtggaaggacctctttgttgctttcccttctaagttgtcttcttcttcttcttcttcttcttcttctttggtccttaagtgaaataaagactctaaaactaatttgtatattatcagccagagatgcggatggcagtcgagccaaatcgcatggctttcagatcaggtattctgcacattcattccaaggtcatagatttttaaaaggacctggatttgaagagatggcaaatgatgagccatcagaaaacttaatttggaaaacatgtatgtagccagtgtggatattgtggcctctctcaagacacattgacactgtagacttcattcagtccagtgtgagtattttggagtaggttggatgtagattttgtttttatcattgatttgtaccgacagaaatagacatttcatcatgtaaaattcctgttattctggaaaaacctattgttttgatcttcttgttttctgacttggaagtatcctttcaaaaaaactcttaagatatctaggtctaaaaagcacttcatgagatgctaaagctgacccactggttgaaaatgttgaccctatcctgttatttaaatgtgaacatttattgtacattcagtgagttatagtgttaatagtcttgtgctatgcagcaggtgtaaaaattaataaatatattttttaataaacatgtttgtatgtgtg

SEQ ID NO: 168538 - DNA, 620 bp, Homo sapiens
  Payload ID: 13175
  Gene Symbol: PRDM10
  Gene Name: PR domain containing 10
  ENST ID: ENST00000527581
  CDS Start-End: 202-620
gcggggggggttgatttctatcacccctagggagagaggatcggggacccgctgatcttccagctcccctcacccaacgtcgtgcatgctgcagacagacctttccgtccttcatgaacacacgtgtggtagacagatgactgtcctgtaccctgtgctgctctaggtgtgccagacgtggagctgtccagttgggagaagatggattccaaagatgaaagctcgcatgtgtggccgacatctgcagagcatgaacagaatgccgcacaggtgcactttgttccggacacaggaacagtggctcagattgtctataccgatgaccaggttcgccccccacagcaggtggtgtacacggcagatggtgcctcctacacatcagtggatggtccagagcacacgctggtgtacatccacccggtggaagctgcacaggcctcattgccagttcataaccaggtgctgccttccatcgagagtgtagatgggtccgaccctttggcaactctgcagacccctctaggcagactggaggccaaagaggaagaggatgaggatgaggacgaggacactgaggaagatgaggaagaagacggtgaggacacggatctggatgactg

SEQ ID NO: 168539 - DNA, 3308 bp, Homo sapiens
  Payload ID: 13175
  Gene Symbol: PRDM10
  Gene Name: PR domain containing 10
  Uniprot ID: Q9NQV6
  ENST ID: ENST00000526082
  CDS Start-End: 56-3280
agcccttgcgccctgtttgtgccagcaggcaccagcgaaccaaaagcaggtgtccatgtctgcttactctgtgccttcaacttttgcccaggcctcattgccagttcataaccaggtgctgccttccatcgagagtgtagatgggtccgaccctttggcaactctgcagacccctctaggcagactggaggccaaagaggaagaggatgaggatgaggacgaggacactgaggaagatgaggaagaagacggtgaggacacggatctggatgactgggagccagacccgccccggcccttcgacccacacgacttgtggtgtgaggagtgcaataacgcgcatgcttcagtgtgtccgaagcacggccccttgcacccgatccccaaccggccggtgctcacccgggccagggcgagcctccccctggtgctctacatagacaggtttctgggcggggtgttctccaagcggcgcatccccaagcgcacccagtttggccccgtggaggggcctctcgtcaggggctcggagctgaaagactgttacattcacctcaaggtttctcttgataaaggggacaggaaagaaagggatttacatgaagacctatggtttgagttgtctgatgagacgctttgtaactggatgatgtttgtacggccagcccagaatcacctggagcagaacctggtggcttaccagtatggccaccatgtgtattatacaaccataaaaaatgtggagcccaagcaggaactgaaggtgtggtatgccgcatcctatgctgagttcgtgaaccagaaaattcatgacatttctgaggaagaaaggaaagttcttcgagagcaagagaagaattggccctgctatgaatgtaaccgccgatttataagctcggagcagttgcaacagcatctcaattctcatgatgagaaactagatgtgtttagcagaacaagaggcagaggaaggggacgaggcaagaggcgattcggtccaggtcgacggccggggcgtcctccaaaatttatccgcctggaaatcaccagcgaaaatggggaaaagagtgacgatgggacacaggacttgctacattttcccacaaaggagcaatttgatgaggctgaaccagccactctgaatgggctggatcaaccagaacagaccactatcccaatccctcagctgccacaggaaacccagtcttccctggaacatgaaccagaaactcacaccctgcacctgcagccgcagcatgaagagagcgtggtgcccacccagagcacgctgacagccgacgacatgcgcagagccaagcgcatccgattggagctgcagaatgcagctcttcagcatctgtttattcggaagtccttccggccttttaaatgcttgcagtgtgggaaggccttccgggaaaaggacaaactggaccagcacttacgcttccatgggcgggaggggaactgcccactgacctgtgatctctgtaacaagggcttcatcagcagcacatccttggagagccacatgaagctccactcagaccagaagacttactcttgcattttttgcccagaatcctttgaccgccttgatttgttgaaagatcatgtggccattcatatcaatgatggctacttcacctgcccaacttgtaagaaacggttcccagattttatccaggtgaaaaaacacgtgcgcagcttccactcagaaaagatctaccagtgcacagagtgtgacaaggccttctgtcgccccgataaactgcgactccacatgctccggcattcggaccgcaaagacttcctgtgttccacctgtgggaagcaatttaagcgaaaagacaaactacgggaacacatgcagaggatgcataatcctgagagggaggccaagaaagccgaccgcatcagccgctccaagacgttcaagccccgcatcacgtccacagactacgacagcttcacgttcaagtgccgcctgtgcatgatgggcttccggcggcgcggcatgctggtaaatcacttatcgaagagacacccagacatgaagatagaagaggtgccagagttaactctacccatcataaaacccaatcgtgattacttttgtcagtattgcgataaggtttataaaagtgccagcaagcgcaaagcccacattctgaagaaccacccaggagcagagctcccaccgagcattcggaagctccgacccgctggtcctggagagccagaccccatgctgagcacacacacccagctgacgggcaccatcgccacccctcccgtctgctgtccccactgctccaagcagtacagcagcaagaccaagatggtccagcacattcgaaagaagcatccagagttcgcccagctctccaacaccatacacacaccactgacgacagctgtgatcagtgccaccccagcggttttgactacagacagcgccactggagagactgtggtgacgacggacctgctcacccaagcaatgacagaactgtcccagaccttaacgacagactaccgaacgccacaaggggattaccagagaattcagtacatccctgtgtcgcagtcggcgtctggcctccagcagcctcagcacatacagctgcaagtggttcaagtggcctcggccacttcccctcaccagtcacagcagtccactgtggatgttggccagctccatgatcctcagccctacccccagcacgccatccaggtgcagcacatccaggtcagcgagcctaccgcctcggccccgtcctccgcccaggtatctgggcagccgttgagtccctcagcccagcaggctcagcaggggctcagcccctcccacatccagggcagttcttccacacaggggcaggctctgcagcagcagcagcagcagcagcagaattcctctgtgcagcacacgtacctgcccagtgcttggaattccttccgtggctattcatctgagattcaaatgatgacgcttcctccgggtcagtttgtgattacagacagtggtgtggcaactccagttactactggccaggtgaaggcggttacttcgggtcattatgtgttatcagaaagtcaatcagaattggaagaaaagcaaacttctgccctctctggtggagtccaggtcgagccacctgcacacagtgactccctggacccccagaccaacagccaacagcagaccacacagtacatcatcaccaccaccaccaacgggaacggaagcagcgaagtgcatatcaccaaaccatgacttccaccctggagcttgaatccagcac

SEQ ID NO: 168540 - DNA, 2643 bp, Homo sapiens
  Payload ID: 13175
  Gene Symbol: PRDM10
  Gene Name: PR domain containing 10
  ENST ID: ENST00000533431
  CDS Start-End: 49-2643
catgaagacctatggtttgagttgtctgatgagacgctttgtaactggatgatgtttgtacggccagcccagaatcacctggagcagaacctggtggcttaccagtatggccaccatgtgtattatacaaccataaaaaatgtggagcccaagcaggaactgaaggtgtggtatgccgcatcctatgctgagttcgtgaaccagaaaattcatgacatttctgaggaagaaaggaaagttcttcgagagcaagagaagaattggccctgctatgaatgtaaccgccgatttataagctcggagcagttgcaacagcatctcaattctcatgatgagaaactagatgtgtttagcagaacaagaggcagaggaaggggacgaggcaagaggcgattcggtccaggtcgacggccggggcgtcctccaaaatttatccgcctggaaatcaccagcgaaaatggggaaaagagtgacgatgggacacaggacttgctacattttcccacaaaggagcaatttgatgaggctgaaccagccactctgaatgggctggatcaaccagaacagaccactatcccaatccctcagctgccacaggaaacccagtcttccctggaacatgaaccagaaactcacaccctgcacctgcagccgcagcatgaagagagcgtggtgcccacccagagcacgctgacagccgacgacatgcgcagagccaagcgcatccgaaatgcagctcttcagcatctgtttattcggaagtccttccggccttttaaatgcttgcagtgtgggaaggccttccgggaaaaggacaaactggaccagcacttacgcttccatgggcgggaggggaactgcccactgacctgtgatctctgtaacaagggcttcatcagcagcacatccttggagagccacatgaagctccactcagaccagaagacttactcttgcattttttgcccagaatcctttgaccgccttgatttgttgaaagatcatgtggccattcatatcaatgatggctacttcacctgcccaacttgtaagaaacggttcccagattttatccaggtgaaaaaacacgtgcgcagcttccactcagaaaagatctaccagtgcacagagtgtgacaaggccttctgtcgccccgataaactgcgactccacatgctccggcattcggaccgcaaagacttcctgtgttccacctgtgggaagcaatttaagcgaaaagacaaactacgggaacacatgcagaggatgcataatcctgagagggaggccaagaaagccgaccgcatcagccgctccaagacgttcaagccccgcatcacgtccacagactacgacagcttcacgttcaagtgccgcctgtgcatgatgggcttccggcggcgcggcatgctggtaaatcacttatcgaagagacacccagacatgaagatagaagaggtgccagagttaactctacccatcataaaacccaatcgtgattacttttgtcagtattgcgataaggtttataaaagtgccagcaagcgcaaagcccacattctgaagaaccacccaggagcagagctcccaccgagcattcggaagctccgacccgctggtcctggagagccagaccccatgctgagcacacacacccagctgacgggcaccatcgccacccctcccgtctgctgtccccactgctccaagcagtacagcagcaagaccaagatggtccagcacattcgaaagaagcatccagagttcgcccagctctccaacaccatacacacaccactgacgacagctgtgatcagtgccaccccagcggttttgactacagacagcgccactggagagactgtggtgacgacggacctgctcacccaagcaatgacagaactgtcccagaccttaacgacagactaccgaacgccacaaggggattaccagagaattcagtacatccctgtgtcgcagtcggcgtctggcctccagcagcctcagcacatacagctgcaagtggttcaagtggcctcggccacttcccctcaccagtcacagcagtccactgtggatgttggccagctccatgatcctcagccctacccccagcacgccatccaggtgcagcacatccaggtcagcgagcctaccgcctcggccccgtcctccgcccaggtatctgggcagccgttgagtccctcagcccagcaggctcagcaggggctcagcccctcccacatccagggcagttcttccacacaggggcaggctctgcagcagcagcagcagcagcagcagaattcctctgtgcagcacacgtacctgcccagtgcttggaattccttccgtggctattcatctgagattcaaatgatgacgcttcctccgggtcagtttgtgattacagacagtggtgtggcaactccagttactactggccaggtgaaggcggttacttcgggtcattatgtgttatcagaaagtcaatcagaattggaagaaaagcaaacttctgccctctctggtggagtccaggtcgagccacctgcacacagtgactccctggacccccagaccaacagccaacagcagaccacacagtacatcatcaccaccaccaccaacgggaacggaagc

SEQ ID NO: 168541 - DNA, 528 bp, Homo sapiens
  Payload ID: 13175
  Gene Symbol: PRDM10
  Gene Name: PR domain containing 10
  ENST ID: ENST00000531431
  CDS Start-End: 183-528
atcacccctagggagagaggatcggggacccgctgatcttccagctcccctcacccaacgtcgtgcatgctgcagacagacctttccgtccttcatgaacacacgtgtggtagacagatgactgtcctgtaccctgtgctgctctaggtgtgccagacgtggagctgtccagttgggagaagatggattccaaagatgaaagctcgcatgtgtggccgacatctgcagagcatgaacagaatgccgcacaggtgcactttgttccggacacaggaacagtggctcagattgtctataccgatgaccaggttcgccccccacagcaggtggtgtacacggcagatggtgcctcctacacatcagtggatggtccagagcacacgctggtgtacatccacccggtggaagctgcacagactctgtttacagaccccggccaggtagcttatgtccaacaggatgctacagctcagcaggagactgacttcagcatgatgaaacaaacaggcacctcatctctttcattct

SEQ ID NO: 168542 - DNA, 1858 bp, Homo sapiens
  Payload ID: 13176
  Gene Symbol: PRDM11
  Gene Name: PR domain containing 11
  Uniprot ID: Q9NQV5
  ENST ID: ENST00000424263
  CDS Start-End: 246-1679
agttctcgcggacgccctcggccccgcgccgggggctgctgcggggtgctcggggatgaaggtgggaggcgtcctttgggatgcgacgaagccttctccatcgcggttcgcgattgcccgcgaagcgtggccgagccggagggcatttctggaatgcgttttaagtgtcagttgcggtgtagactcttcgggaaacctctccggagcgtagcctccaccccccactcgcagtccccaaggacagaatgaccgagaacatgaaggagtgcttggcccagaccaatgcagccgtgggggatatggtgacggtggtgaagacggaggtctgctcaccactccgagaccaggagtatggccagccctgctctaggagaccggactcctcggccatggaagttgagcccaagaaactgaaggggaagcgcgacctcatcgtgcccaaaagcttccagcaagtggacttctggttctgtgagtcctgccaggagtacttcgtggatgaatgcccaaaccatggccccccggtgtttgtgtctgacacaccggtgcccgtgggcatcccagaccgggcggcgctcaccatcccacagggcatggaggtggtcaaggacactagtggagagagtgacgtgcgatgtgtaaacgaggtcatccccaagggccacatcttcggcccctatgaggggcagatctccacccaggacaaatcagctggcttcttctcctggctgattgtggacaagaacaaccgctataagtccatagatggctcagacgagaccaaagccaactggatgaggtacgtggtcatctcccgggaggagagggagcagaacctgctggcgttccagcacagtgagcgcatctacttccgggcgtgcagggacatccggcctggggagtggctgcgggtctggtacagcgaggactacatgaagcgcctgcacagcatgtcccaggaaaccattcaccgcaacctggccagaggagagaagaggttgcagagggagaagtctgagcaggttctggataacccagaagacctgaggggtcccattcatctctctgtgctgagacagggcaaaagtccctacaagcgtggctttgatgagggggatgtacacccccaagctaagaagaagaaaattgacctgattttcaaggatgttctggaggcctcactggaatctgcgaaggtggaagcccaccagttggccctgagcacctcactggtcatcaggaaagtccccaaataccaggatgacgcctacagtcagtgtgcaacaacaatgacccatggtgtgcagaatataggccagacccagggggagggggactggaaggtcccccagggggtctccaaggagccaggccaattggaggatgaagaagaggagccttcatcattcaaggccgacagtcctgccgaggcctcccttgcatctgaccctcatgaacttcccaccacctctttttgccctaactgtattcgcctaaagaagaaggttcgggagctccaggcagaattagacatgcttaagtctgggaaacttcctgagccccccgtattgccaccacaggtactggagctcccagagttctcggaccctgcaggtaagttggtttggatgagattattgtcggagggcagagtacgcagtgggctgtgtggagggtagcctaaagctctctgtggaaaccaccttccgggagacctgaggagtgtaacgtggaggcggctacctccgtgggtgggagcccaggtcctcagtgtctctggcagacccatcggcagctctgccaggtgctccatgtgttgcccttgtatcctccttgtcaataaaggaagttccgctgc

SEQ ID NO: 168543 - DNA, 762 bp, Homo sapiens
  Payload ID: 13176
  Gene Symbol: PRDM11
  Gene Name: PR domain containing 11
  ENST ID: ENST00000526442
  CDS Start-End: 210-762
ggggaggagagcagcagcgagtcgccgccgccgccgcgccgaggctggcgctgaaactttgcctcgccggggaccagcgcgcccgcagcgcggccgctccctccgcgggggccgccagccgaggccgcgccgcctccgccgagccgcccgccgggccgctctcgccgcccgggccccgcggctgccgcagcattcccgggaaggacagaatgaccgagaacatgaaggagtgcttggcccagaccaatgcagccgtgggggatatggtgacggtggtgaagacggaggtctgctcaccactccgagaccaggagtatggccagccctgctctaggagaccggactcctcggccatggaagttgagcccaagaaactgaaggggaagcgcgacctcatcgtgcccaaaagcttccagcaagtggacttctggttctgtgagtcctgccaggagtacttcgtggatgaatgcccaaaccatggccccccggtgtttgtgtctgacacaccggtgcccgtgggcatcccagaccgggcggcgctcaccatcccacagggcatggaggtggtcaaggacactagtggagagagtgacgtgcgatgtgtaaacgaggtcatccccaagggccacatcttcggcccctatgaggggcagatctccacccaggacaaatcagctggcttcttctcctggctgattgtggacaagaacaaccgctataagtccatagatggctcagacgagaccaaagccaactggatga

SEQ ID NO: 168544 - DNA, 1536 bp, Homo sapiens
  Payload ID: 13176
  Gene Symbol: PRDM11
  Gene Name: PR domain containing 11
  Uniprot ID: Q9NQV5
  ENST ID: ENST00000530656
  CDS Start-End: 1-1536
atgttgaagatggcagagccaattgcatccctgatgatcgtggagtgccgggcctgcctgagatgctcacctctcttcctttaccagagagagaaagacagaatgaccgagaacatgaaggagtgcttggcccagaccaatgcagccgtgggggatatggtgacggtggtgaagacggaggtctgctcaccactccgagaccaggagtatggccagccctgctctaggagaccggactcctcggccatggaagttgagcccaagaaactgaaggggaagcgcgacctcatcgtgcccaaaagcttccagcaagtggacttctggttctgtgagtcctgccaggagtacttcgtggatgaatgcccaaaccatggccccccggtgtttgtgtctgacacaccggtgcccgtgggcatcccagaccgggcggcgctcaccatcccacagggcatggaggtggtcaaggacactagtggagagagtgacgtgcgatgtgtaaacgaggtcatccccaagggccacatcttcggcccctatgaggggcagatctccacccaggacaaatcagctggcttcttctcctggctgattgtggacaagaacaaccgctataagtccatagatggctcagacgagaccaaagccaactggatgaggtacgtggtcatctcccgggaggagagggagcagaacctgctggcgttccagcacagtgagcgcatctacttccgggcgtgcagggacatccggcctggggagtggctgcgggtctggtacagcgaggactacatgaagcgcctgcacagcatgtcccaggaaaccattcaccgcaacctggccagaggagagaagaggttgcagagggagaagtctgagcaggttctggataacccagaagacctgaggggtcccattcatctctctgtgctgagacagggcaaaagtccctacaagcgtggctttgatgagggggatgtacacccccaagctaagaagaagaaaattgacctgattttcaaggatgttctggaggcctcactggaatctgcgaaggtggaagcccaccagttggccctgagcacctcactggtcatcaggaaagtccccaaataccaggatgacgcctacagtcagtgtgcaacaacaatgacccatggtgtgcagaatataggccagacccagggggagggggactggaaggtcccccagggggtctccaaggagccaggccaattggaggatgaagaagaggagccttcatcattcaaggccgacagtcctgccgaggcctcccttgcatctgaccctcatgaacttcccaccacctctttttgccctaactgtattcgcctaaagaagaaggttcgggagctccaggcagaattagacatgcttaagtctgggaaacttcctgagccccccgtattgccaccacaggtactggagctcccagagttctcggaccctgcaggtaagttggtttggatgagattattgtcggagggcagagtacgcagtgggctgtgtggagggtag

SEQ ID NO: 168545 - DNA, 3111 bp, Homo sapiens
  Payload ID: 13176
  Gene Symbol: PRDM11
  Gene Name: PR domain containing 11
  ENST ID: ENST00000534751
  CDS Start-End: 1-1441
ccagccctgctctaggagaccggactcctcggccatggaagttgagcccaagaaactgaaggggaagcgcgacctcatcgtgcccaaaagcttccagcaagtggacttctggttctgtgagtcctgccaggagtacttcgtggatgaatgcccaaaccatggccccccggtgtttgtgtctgacacaccggtgcccgtgggcatcccagaccgggcggcgctcaccatcccacagggcatggaggtggtcaaggacactagtggagagagtgacgtgcgatgtgtaaacgaggtcatccccaagggccacatcttcggcccctatgaggggcagatctccacccaggacaaatcagctggcttcttctcctggctgattgtggacaagaacaaccgctataagtccatagatggctcagacgagaccaaagccaactggatgaggaatgtggcacacctggctgagcgtaagaggaagcccaagttctccaaggaggagctggacattcttgtcacagaggtgacccaccatgaagcagtgctctttgggagggagaccatgcggctgtcccatgctgacagggacaagatttgggaaggcatagcccggaaaatcacctccgtcagccaggtgccccgctccgtcaaggacattaagcacagatgggatgacatgaaacggaggaccaaggacaagctggccttcatgcagcagtccctgtcgggccctggggccgggggccgggcccccaccatcgtgctcacggcccacgagagggccatcaagtcggcgctgctcacggcccgtgcagggcgcggcttccccagggcggaactggatggcaccgacagcccttcgaccagctatgatgaagatgaggaggcgcctgggccctcaaggcagcctcttcgggtgcctctgcagcggtctccggaggaagaggcccacctggccaggcccgccctgctccgttcatcctcctcctcagaccagtctgagacggtgggccccaagccagaggccctgccccatccctcgccccaggcccaggctgcctgcaggacccctcggccgcaccccagcccacccaccacgggccttgactggcagctcctccacgtccatgcccagcagaccgaggtgttccggcagttctgccaggagctggtgaccgtgcaccgggacatggccaacagcatgcacgtcatcggccaggccatggccgagctgaccagccgtgtcggtcagatgtgccagacgctgacagagatccgggatggggttcaggcatctcagcgggggccagaaggggcagaccctacgggctccactccccaggccacccaggcccaagcccccctgccagagcccccaccagcttccccagcatcagcccccacacggactaccaggtctcggaagagaaagcacaatttctaacccagctagtctgcactaggaggaagagtcatggaggagggatgtctggcctcacaacaggggccagtctttcgtgtccaggaacaggatcgatgacccttgtaggacactgggggcgctgttacctcctcaccgagcgcaggtcgctgccctgtggtctaacagagcatgtattcagacccgcaccctcatctttggcggatgctgaagatgcaagaaaagccacctgcttgatgcttgcttggcctggagatcgttctcctcttggtctgtgtcccgtggtggcaggccttgcagggaggggggcgcaacagtggggagcatccgaatggagtcccactttccaaccttggggctgctgcatcggcctcccacatgtgacctcccaggccctgatgctgcttcttttgaagggggtgaggcctgatgggcaggtcaagtcggtccttcagggaggggtctaccctcccttgcccgggggtggtgcccgccttggccctccgcttgcccttgtgcgcgtgctcagctgctgtgcttgccttttttggagtggggagaagaatgggatgacgtcggaggaaggaaaagactgtcttgcattcatagagagcactttatgcttttcctcgcccttgcagagtctgggtggtctcagtgggggctcaggacagtcagctcaagacagccaagtcaggtattattatgatcatttttatcatcatcatctgtataagacaaatgacacagccagttagtgagagggccaggactggaagccagggtatcggttttcccagctcccctgtcagaggccagatctggagtagtgggaagaggaggcagggggcaggtcttgccccttgccaggcctctgccccttgccaggcctctgccccctgtatctctgcttctgcctcagctgtcctgggtgaggtgggaggcacctagcatttagcaggtgattctcccaccctgccctggctctatggctcatagccagtggcttggagaggcagggccagatctcaggagtggagggcaacctcttccctggcttctaaaagaatccagagcccagtggggctcatgtcccattccaggttccagcatgccttgcctctgcttgctcgggctgcctacgcactagctacatacacctctagcttcatgtttcatgttggagtgtggggagaaaactgggttcttagcattagagagggaagtggcaggtggcagatacaagcttagctctgacctgggtgcacctcagctctgtgtccttttttttccctgacctgaagctgaccccagcagaagtcccccagccaacccctccacccaacaaccccccaccctcccatcctgcccccagccatagtgggagctgggaggattgcagcatctagtgccttccaaggctgttcctggagcgctgcttgtaaacccaagccaagctttgtcccacgtagggagaatggaaggtgactgcaatgtccctgtgcctttggctccatctccccattctgtggttctttgggggttcctgcttccctcaaactgaacactctcctgtccaacagcctgatggcttaattattgcctggaattgcccggcctccgatgctggaatcaaagattgccttccgaagtatttttgttaagatggcaat

SEQ ID NO: 168546 - DNA, 10744 bp, Homo sapiens
  Payload ID: 13176
  Gene Symbol: PRDM11
  Gene Name: PR domain containing 11
  ENST ID: ENST00000622142
  CDS Start-End: 246-3779
agttctcgcggacgccctcggccccgcgccgggggctgctgcggggtgctcggggatgaaggtgggaggcgtcctttgggatgcgacgaagccttctccatcgcggttcgcgattgcccgcgaagcgtggccgagccggagggcatttctggaatgcgttttaagtgtcagttgcggtgtagactcttcgggaaacctctccggagcgtagcctccaccccccactcgcagtccccaaggacagaatgaccgagaacatgaaggagtgcttggcccagaccaatgcagccgtgggggatatggtgacggtggtgaagacggaggtctgctcaccactccgagaccaggagtatggccagccctgctctaggagaccggactcctcggccatggaagttgagcccaagaaactgaaggggaagcgcgacctcatcgtgcccaaaagcttccagcaagtggacttctggttctgtgagtcctgccaggagtacttcgtggatgaatgcccaaaccatggccccccggtgtttgtgtctgacacaccggtgcccgtgggcatcccagaccgggcggcgctcaccatcccacagggcatggaggtggtcaaggacactagtggagagagtgacgtgcgatgtgtaaacgaggtcatccccaagggccacatcttcggcccctatgaggggcagatctccacccaggacaaatcagctggcttcttctcctggctgattgtggacaagaacaaccgctataagtccatagatggctcagacgagaccaaagccaactggatgaggtacgtggtcatctcccgggaggagagggagcagaacctgctggcgttccagcacagtgagcgcatctacttccgggcgtgcagggacatccggcctggggagtggctgcgggtctggtacagcgaggactacatgaagcgcctgcacagcatgtcccaggaaaccattcaccgcaacctggccagaggagagaagaggttgcagagggagaagtctgagcaggttctggataacccagaagacctgaggggtcccattcatctctctgtgctgagacagggcaaaagtccctacaagcgtggctttgatgagggggatgtacacccccaagctaagaagaagaaaattgacctgattttcaaggatgttctggaggcctcactggaatctgcgaaggtggaagcccaccagttggccctgagcacctcactggtcatcaggaaagtccccaaataccaggatgacgcctacagtcagtgtgcaacaacaatgacccatggtgtgcagaatataggccagacccagggggagggggactggaaggtcccccagggggtctccaaggagccaggccaattggaggatgaagaagaggagccttcatcattcaaggccgacagtcctgccgaggcctcccttgcatctgaccctcatgaacttcccaccacctctttttgccctaactgtattcgcctaaagaagaaggttcgggagctccaggcagaattagacatgcttaagtctgggaaacttcctgagccccccgtattgccaccacaggtactggagctcccagagttctcggaccctgcagcctcagaaagcatggtctccggccccgccatcatggaggatgatgaccaggaagtcgattcagcagatgaatctgtctccaatgatatgatgacagcgacggatgagccctccaagatgtcatcggccaccgggcgccgaatccggcgctttaagcaggaatggctgaagaagttctggttcctgcggtactccccaaccctcaatgagatgtggtgccacgtctgccgccagtacacggtgcagtcctcacgcacctcggccttcatcattggctccaagcagtttaagattcacaccatcaaacttcacagccagagcaacctgcacaagaagtgcctgcaactgtacaagctccgcatgcacccggagaagacagaggagatgtgtcgcaacatgaccctgctcttcaacaccgcctaccacctggccttggagggcaggccctacctggacttccggcccctggcggagctgctgaggaagtgtgagctcaaggtggtggaccagtacatgaatgagggagactgccagatcctcatccatcacatcgcccgggccctgcgggaagacctggtggagcgcatccgccagtcaccttgcctcagcgtcatcctggatgggcagagcgacgacctgctggccgacacggtggctgtctatgttcagtacaccagcagtgatgggcccccggccacagagttcctgtccctgcaggagctgggattctctagcacagaaagctatctccaggcacttgaccgggccttctcggccttgggcatccggttgcaggatgaaaagccaactgttggcttgggtgtagatggagccaacatcacagccagcctccgtgccagcatgttcatgaccatccgcaagacgctgccctggctgctgtgcctgcccttcatggtgcaccggccccacctggagatcctggatgccatcagcgggaaggagctcccatgcctggaggagctggagaacaacctgaagcagctgctgagcttctaccgctactcaccgcgcctcatgtgcgagctgcggtccacggcggccaccctttgtgaggagacagagttcctgggcgatatccgggcagtgcggtggatcatcggcgagcagaacgtcctcaacgctctcatcaaggactacctggaggtggtggcccatctcaaggaggtcagcagccagacccagcgggcagacgcctcggccatcgcactggccctgctgcagttcctcatggactaccagtccatcaagctcatctacttcctgctggacgtgattgctgtgctctcgcgtctggcctacatcttccagggcgagtacctgctggtgtcccaggtggatgacaagatcgaggaggccatccaggagatcagccggctggctgactccccgggagaatacctgcaggagttcgaggagaatttccgagagagcttcaacgggatcgccatgaagaacctcagggtggctgaagccaagttccagtccatcagggagaagatctgccagaagacccaggtcatcctggctcagaggttcgactcccgcagccggatctttgtgaaggcctgccaggtgtttgacctggctgcctggcccaggagcagtgaggagctgatgagctatggcaaggaggatatggtgcaaatatttgatcacctggaggccatcccgaccttttcccgggatgtctgtagggaagggctggacccccggggtagtctgttgatggagtggcgagaactcaaggctgattactacaccaaaaatggcttcaaagacctgatcagccacatttgcaagtacaaacagaggtttccactcttgaacaagatcatccaggttcttaaagtcctccccacttccaccgcttgctgcgagaaaggccgcaatgccctccagcgagttcgcaaaaaccaccgctcccgcctgaccctggagcagcttagcgacctgttgacaatcgctgtaaacggaccgccaatcaccaactttgatgccaagcgagccctggacagctggtttgaggagaagtctgggaacagttacgcgctgtctgcagaagtcctcagtaggatgtctgcgctggagcagaagccagcactacagaccatggaccacgggacggagttttaccccgacatttagggagctggcgctgcagagttcactaagctgttgaatatttttttaatctatactcataagctttgatatattatataaatatatattatattatattatattatattatatatatatatatatataaactcacactgaaaatttttaaaaaccaaggtgacgcgtccaccagaagccactgggagatttcagaaaggaaaaatgttggaaactgactcttgtctacaaaatttggcagctgcaacatacatggcaactcattttcactcacagaagcacgtgctggggcctcctgtgttcccaccttactgtccaccaacagcataagctaaaatgacaggtctctgtcatcacctttaggtagctcattttgtttatgttttcatttgcgggtggcggggctctgggtttgggtttatgttcttgccttttcttttttcatttggttttatgatgggagggagctcctcagcctcctcattgacattctggtccggctgaatcagatctctgacttaagtcagggtgggttgtctgtctgcatttgggaggcaggggggttgacctttctccctccccacctgacttcagcttgagatctttttttattcatttcctgatgagggttccttcactgtcctacaaacaaaagtgtcggtcaaactgtgacactgccacacctcacctctgttgcctcgtccatccctgggttgtggatcccttccttccagccccccctggaaactcacaatattacccattatactgaaggcaacattgcctcaccgctgagcttgaaatcctggggaagggagaaggggtaagcttttagcattcctgtttttacgaggtggaggataaaacaatataattccattccaatccagggcttttggggagatgaagagccaagaagtccagaccccaacaggggagtgatttttggctaaaaaacaaggaaaatgaaaagtacatattcgagttacatggattatttatactttttctttataatcatatcatgtgttgagggtattttttttcctttaataatcaagaaatgcctgctatagttcagtggcaggtagtgtcaatgcaaattgtgccctaagttatgcataactcaaatgagagtctgtagagatgtggtcctccttttgcaacaaggctgataacatgctacatggtcataggaaactggggaatgtgtctctgcctgtaaactcttccttttttgaacagggtagagatgtcctaaagaaatggagaaaagaagagaggactctcaaggcatcagcctacacagacacacacacacacacagacacacacacacacacagacacacacacacacacacaatcacaatatacaatataagctttagaaatagccacttgcctattccctggggcaagtagtggtttaaactagaggagtctgatcaatgctctttcattcatttaactaccggtatacctcgcaagggagttttaaaaaatgtgcgtgagctgttaaaaacttctgttcatgttcctacatctgatttatgcatattttatatgcagagatcctatcacgtggatgcaggtcattttgggggagggaggaagatctgaattatatacatgtggtcagttctgctgagagcttcatctcttggttggcagagggtggtgttatctggccacaggcaaggccccaatgtcttcagcctgcttggttcagacattataaaactgtggtggcttccttccttcttggtttatgttgtctctgaggcctcatgccaccgttgagaaccatagtggaaatgtcatcaacactgaacatgttatagccctttcttggttccaccagtcccttcatcccctaccaatcccttccccttcacctccatggtcttggtgctaagataactttagaatcattgctgctagtcaatagcttttcattatataaatatattatatatattatatattatttttgaaatatttttgtttgttttcaacagtgatgtagcatgttaaaaaacaaaaaacaaaaaaaaatgggttcctccaactgtcccactgccaggcctcatatgctgccttcttcaacaaatcaatgcacccctgcctggtgacatccaccccacctcccaccccagttgcacacatgcttccctaccctcctctgagcaagaagacagttagcaggaactagcaaggaaaggctgaaagcctccttctgaggctttgagattcccagccccattccacttccccactttaaactgatgtctccctccatctgctcctcccatcagggtcaaaacctaactgtggtcaaatgggatgctgttgcaaagcaccaggtcccacctggcccagccccagccttgggacttcctctcccctcacacacgcaaactgctgtgtctggggagttttcactgaacattgcagagactaagaagggttgagggcagagatggctagcaagacagggcttggtgagggcagaaacagtaggttgagatcctttcttctagccaacagttgccttacaccttacattgggtaatgggtagggaggagcaggctaaggctcccgctcatttgaaaaccaggaagagagaaccagtgtcttcctgagcacctggtcagttggagctactctttttcctctcaagagatcatggccaaaatgagctaaaatcttcagctagaaggggaaaagcttatgggccagtgccagtgcctaccctgtagttcctgagaaagctgagagcaggtgacccacttctggcctagcagaatgagctgctatgcacagcatgcagctgcaggggtcacttcctgagctggccaccagacctcggaaaagctaacctctcaggtggtcttgaagttaggttagggcatccctaaaactctgggtgcttgtggcttctgctgaatttagccatgccagggctgtggcagacactctgtaggccacactgccatgggacagggaataatttgggtgatacaccactgcaatttacacggggtctcttctcagcttggatgctccctgggaggcccagtgcttctgtcctgtgaattctgcatgtgattacccatgatttctgtcataggcatttcccactcttctgcttgcttgagaaggacttggactgatgggacactcagggtctagcccagggagcatatgcttggctaacctaatctccccttgatgtgtatacagaactgtggaaaagcagttggtggatcccaaatgttgttacttcagacaagacagagccctttaactcagcctctggcttaggagtgatgactacaggcttagaatgaagtgtgtctctggggctgagacttggcataactgggctggctgattagtgactttctttggctcgtagggttggtgggaagtgagatcaaccttgaggcccaggtttgtggccaactgtgccaaggtgatacctggcagagcctgggagccagagcccttatgattaatatgatctgcttttccttcatggaggacaaagaaaaaatccactgccatctagtatctgtgaaacatgaggacagcgcagtcaagtctgtaactcttgccatgtcagaatccccaagttttgcctgcctggttgaatatgagagtccaggcatcagaaacagcagccttatttaatttaatttttctaatgactggcctatgacaccttgtgatgctaggcacatcctcatttccccatcctcacttgggactgagagcaggctcaagttccagggtccctggatggcaaggttcagtgctgggccctggaatctatggcacttgggggtctctgacctcagcctctgccacatgtttccaagttgagttgttttgctgaggtggtcctccccttgagttgcttatgccaaccctttaatttaggaaaagtaccttgtaattacttaaggtaatgtttaaatgttttccattcatttggaggtggtgccaacaggggggaaagcatgcagaaggctggaaacaatagctgagaccctactgtgggcccacagccctggcccagccggcactgaggggctggtgccatgttacttgatcacctggagcctgatgggacccaggaggtggcctgaggggttgaagtataacttccctcttctggatcccccctttcattttccttctaccccctctaggaatgggagttctagacctaggtctgcttttggctttcagtctgggttgatttccaagtcgaattcatgctttttcttggcccataggtccaattttggcagaaggcattggacttgtgccccctccctgcttcaagaggcagatctagccaggccaggctgaaacagctgaaacaggcaggccagtcctcctcagacaagaaaggggttttcagagggcagtggtgtgcccattccagacaccagtcttctggggaggtggtgccgtgtcatgggttctagtctggcctcttcctcagtcctcaggaggacccaagagactggcacggcccttctcctgcttggagggaaacccatctcccacttggtgggggcccttctcttgccatctgttggttagggtgcttgagctgagtggatggtgctgtgatatttttaaggagcctttcaggcaatgtttgcatgttagccagagggagaaaaagtgcccttttgggaggaaaatggtacgcccctccacttccatctggcactcccttcccccccaccccctcaagtggtatcaccctggaaatacctatgcaatccagtctccctaggagagagtgcatggaagcaggggtatgtgcagtgtagaatacagatgctacagcatatatgttgtatatatggacatatacagtacgtatacacacagagtaagagagtaaatcacgtctatatatctataaataatatcctatatatttatacatttctatgttttaaatagatataaaaatagagtctatagagctgggagagcagtgggaagcctggcgctgtgctgtgcaaaggggaagggagcacggccttcggagagggagccggggaaggccagcaggcagggttggctggcaagggggcctcctacccggagtgttggagaggagagtggctgggtcccggctcgctccatgcactttctctccttttccacaggcttggtctgaggttggaaggagataccccctgagctccagctgaggtgccccctacctctccccacccccacagcccacgcttaggcggtcactgctgcttggcagtaggacgtggtctctgactcctggtggagggaccactgcacaaactccttcaaaaccctcccgcaccaggactgagcagcgtcagtggcaataggaaaggtccaaactggatcaagagctggtccaggaaagataccgcccctgccctgttagatgcttctgctgcccctagaggccaagcccctgaagtgcagccgtcctggcctccctcacttgctcaaccactgtcaggaggagaggatgtgggcagcatgagcatcgccaggcagcgctgcccaccatccacaggctttctggccagggcagggggcatcagctagcaggaaacggtgggagagacatatctgcacactcataaattcaatggctactccagtccagaagcagggctttggcccagcccgctccgcgcagcagctgctgctggctgtactcaggacaacgctgttccccctccctcacagaggccccgtggcccctaccccactcccgccgtaacaggcaggtttagttcacatacactgttcgcattctgtgacttgaggcagaggctgagctgggataccccaagctcatccactttcgttggggagggcccctccctgggtttatcaccagctcctagcccgggccgggcggggatgtctgggggccacgcgggggcactggtgcaagctggcagcatgacagagggcttgtgcagccctgacgggacccagaagcccatttgctcgcagtttcctctctctgtttttttcctcctggaggtaggagagagggcctgaccaggcaccagatgatggagcaagggcagctgcatgctccctctctccagaccagccttctgcttttggggtccgaaggggcatttgctcccatcctgagcctcctctgcccctgtcttgctcttccccaccatcctacaagtacctcagtctccagcaggcccacccctccacctgcagcccagggcgggtctgttctgccaatgcccacctccttgagccacagttagctgccaactgggtcttgggacaccctccagtacctggctcaagagagaccaggccgggccgagccttcttcccactgcagtggactagacccacggccaggggatgggcatccccaggtagcaatcccacaatgcactgtacctcagagagagagcacgccaggggcaccaagggaccgagccctctgtccagagggggacagcggtcacaatactgctcaccaaaagacaaaggccaggctgccctcgggcacctctcagtcttcacttttgtctctccggaagaaccagcagtctgattccgtctatttcagcccccgtctctctcttctccacccccacgctgctgaaccattttcatgtcaatcacaaaggaaaaataagtggggatggggggaaatacctaggagtctattatcacatacatattaatatgttaatactttctttaaaaaaaacctcttgatgttattattttgcagactacgctttatagtacctgtgtgacgggacctagaacactggatacaaatagagctatgttggtttatcataatatgtacgcagaaactttctttttgtcatattatccttgtaatgtaagaagattgttaataaaagcatttaaatttactcaccactgttgaa

SEQ ID NO: 168547 - DNA, 2476 bp, Homo sapiens
  Payload ID: 13177
  Gene Symbol: PRDM12
  Gene Name: PR domain containing 12
  Uniprot ID: Q9H4Q4
  ENST ID: ENST00000253008
  CDS Start-End: 61-1164
cccgcccacctcccccgtcggcccggccgtcccccggcgccggggagctccgggccgcccatgatgggctccgtgctcccggctgaggccctggtgctcaagaccgggctgaaggcgccgggactggcgctggccgaggttatcacctccgacatcctgcacagcttcctgtacggccgctggcgcaacgtgctcggggagcagctcttcgaggacaagagccaccacgccagccccaagacagccttcaccgccgaggtgctggcgcagtccttctccggcgaagtgcagaagctgtccagcctggtgctgcctgcggaggtgatcatcgctcagagctccatccctggcgagggcctcggcatcttctccaagacgtggatcaaggcgggaaccgagatgggccccttcaccggccgcgtgatcgccccggagcacgtggacatctgcaagaacaacaacctcatgtgggaggtgttcaatgaggatggcacggtgcgctacttcatcgatgccagccaggaggaccaccggagctggatgacctacatcaagtgtgcacgtaacgaacaggagcagaacctggaggtggtccagatcggcaccagcatcttctacaaggccattgagatgatcccacctgaccaggaactgctggtgtggtacggaaactcacacaacaccttcctggggatcccaggtgtgcccgggctagaggaggaccagaaaaagaacaagcatgaggacttccacccggcggactcggcggctggccccgcgggccgcatgcgatgcgtcatctgccaccgcggcttcaactcgcgcagcaacctgcgctcgcacatgcgcatccacacgctggacaagcccttcgtgtgccgcttctgcaaccgccgcttcagccagtcgtccacgctgcgcaaccacgtgcgcctgcacacgggcgagcgcccctacaagtgccaggtgtgccagagcgcctactcgcagctggccggcctgcgcgcccaccagaagagcgcgcggcaccggccgcccagcaccgcgctgcaggcacactcgcccgcgctgcccgccccgcacgcgcacgcgcccgcgctcgccgccgccgccgccgccgccgccgccgccgccgcgcaccacctgccggccatggtgctgtgagcgcgcccgcgcccccgccgggccccgcgcgctcctgggtccccggcaccccggccccgcagcgcgactcgccctccagccccaacccccggcccggcgccgccgcggagccccgcgcgctggggttgcgccccggaggcggatctcaggcacccccgccttggcccgtgtcgcagatgaggacactgagggcggcgtccctcacccaggccacgcagctggtgcggctgttcggccgcctcctctgggagggggtccccctgcctggcctcgcccccgagtctccctgctgctgtagagccgggcgcccaggccggcatccccctcgtgggtggcaggagagcggacttagagcccccgagggcccctcagcagaggaaggggagtcccctcctccgccaccgagagtcctgtgcttcggaatgaagggagggcgacctccttgtccgggtgtggtcgggcgcgggggttgtgggggcgccatctcctcttccggcccctgggactggtgtcctgaagtgtcgggagtccttacgcaaccttgacatgtgcgggctactggggtccatcggcagcgggaagagacccggagagatgcatcttctgggcccttctctcctttaggccagcttacccccaaacctggctcctggggacggatgaggaaggagctctttgcagtgcaccaggcacgttgagagtggaggcacaatggaaatcctctgtgggaccccgagcaagaccctgcacctctttgggcctcagtttccccatctgtaaaatgaaggagttggaccaatgccccctccccttcagctgtgacatcgtgcctgggaaggcgaaatatacccccagccccttccaacacacacactccagcgagaggagggcaagactggaaccgctgcccgagaggttaaggtggcttctgtggccacgaagcgcttccgagctgtgcccagtcccgggaattccgcccagtctgcccacacttccctcggtccctgcccgtttcctcaaattcgggccgtgcgcgccctctggtgtcgcctctcacactttgcagtcatttaccaggattcccgtagggcgttttgtaaaataaactataatattaatgaaaagtataaaatgtatagagttttcaagaaactgcgttctacttccagaagatggtcactttaaccttgtaaatatttatctaaaatgatatttacaaaactgtaatatattattatttgattgtatatgtacaactgtaaatacatttgtacctctcttgtattctaaaataaaaattacttggaacatt

SEQ ID NO: 168548 - DNA, 3232 bp, Homo sapiens
  Payload ID: 13178
  Gene Symbol: PRDM13
  Gene Name: PR domain containing 13
  ENST ID: ENST00000369214
  CDS Start-End: 262-627
ccatgtgaccctctcgggtgggactctgcagctgcttcgcagcgcaactctctcaccaaactccgcgcccttgcgctagcggtgccaaaaggctcccgccccgattgaaaaggcgcagtgcatgcccgcccgcgtcactccgcgggcggaggacgcacgtcggggcgcggctctctggctagcgcgcagctccagctctgtcactcgcgcccttccaaggacctggagcacccgagcgcctgcctggtggcggcggcaacaatgcacggagccgccagagcgccagccaccagcgtgagtgccgactgctgcatcccggccggcttgcgcctcggaccggtgcctggtaccttcaagctgggcaagtacctgtcagaccgcagggagcccgggcctaagaaaaaggtattgaccattcagacctctgcccactgtgcgcatggtgagaggggagctggtggacgagtcggggggctcccctctggagtggatagggttaatccgggcagccagaaactcccaggaacagactctggaagctattgcagacttacccggaggacagatcttctaccgagcattgcgagacgtccagccaggggaggagctgacagtgtggtattctaactccttggctcagtggttcgacatccccaccacagcgactccgactcacgacgagaaaggggaggagcgctacatctgctggtactgctggaggacgtttagataccccaacagccttaaggcacacctgcgtttccactgcgtgttcagcggcggtggaggcggcgccttcctgcaccacgaacacgcggctcgccaaggcgccgtcccagcggctgatggcctcggtctctccccaaaacccccggcgcccgatttcgccgcgccttcccaggcaggaactttgcgaccccaccccctgggcccgccaccagttcaggcctgcggtgcgcgggagggcatcaagcgcgaggcctcttccgcgccctcggccacctcgccgaccccaggcaagtgggggcagcccaagaagggcaaggagcagctggaccgtgccctggacatgagcggagccgcccgaggacaagggcacttcctcggcatcgtgggcggctcctcggcgggggtcggcagcctggctttctaccccggcgtgcgctcagctttcaagcccgccggcctagcgagggcggcggcggccgctcacggcgacccctaccgggaggagagcagcagcaagcaaggagccggcctcgctttgggcaggctgctgggcgggggccgggcgtgcgggcgccccgggagcggggagaactcggcggcgggcggcgcgggtcaccaccatcaccaccacgcgcaccaccaccaccatcccaagtgcctgctcgctggggacccgccgccgccgccgccgcctggcctgccctgctctggggccctgcgcggcttccctctgctctccgtccccccggaagaggcgtccgccttcaagcacgtggagcgcgccccgcccgcagccgccgcgctgccaggagcgcgttatgcgcagctgccccctgcgccggggttgcccctcgagcgctgcgcgctgccgcccctcgacccgggcggtctcaaagcctatccgggtggtgagtgcagccacctgcccgccgtcatgccggcctttacagtctacaacggggagctgctctacggctcaccggccaccaccgcttattacccgctcaaattgcacttcggcgggctgctgaagtatccggagtccatctcctacttcagcgggcctgcagcggccgccctaagccccgccgagctggggtcgctggccagcatcgaccgagagatcgccatgcacaatcagcagctgtccgagatggctgccgggaagggtcgcggacgcctggactcggggacgttgccaccggccgtcgcggcggcgggaggcaccgggggcggcggcagcggaggcagcggcgcaggtaagcccaagaccggccacctgtgcctctactgtggcaagctgtactcgcgcaagtatgggctcaagatccacatgcggacgcacacgggctacaagccactcaagtgcaaagtctgtctgcggcccttcggcgaccccagcaatctcaacaagcacatccggctgcacgccgagggcaatacgccctaccgctgcgagttctgcggcaaggtacttgtgcgccgccgggacctggagcgacatgtcaagtcccgccaccctggccagagtctgctcgccaaagcgggcgacggcccgggtgccgagcccggctatcccccggagcctggggatcccaagagcgacgacagtgacgtggacgtctgcttcacagacgaccagagcgaccccgaggttgggggcggcggggagcgcgacttgtaacgagtcttcccgggaaggggcggggtgaggacagagaggagtcgagggtttattctcgcagtagaggaactcctggtggtgggaagagggacccaatggacaaaaccgtttttgtttttgagagggcgccagatttgaaacagtgagaggtcccacatctggtgctgaaactcagagcaacagttcagaggtggcgtaaatctggccacctggagagctcgagtgccaccagtacctccgcaccccgggcctctggacttcttggatgagctcaccctgaaccgcccaggcggtctgctcttggtgttcagaatcacatcaatgcgaacgtcacagcgccttcgagggcgcagattttaactgccacgtatttttaagttgtacttttctgtggaggaaattgtgccttttgaaacgacgttttgtgtgtgtatttcacgttagcatttcattgcataggcaaaacactagtcacaattgggtagatgtgacatccatatacttgtttacattttatctgttctcatgtcaaagactactccttgccccattgaatatatagtggtagcaggtgtacaaattggtcaagttgcaattatttatgagaaaataatgataaatgtaaaatatctaaagcatgaatctaagagcacgcaatatataattttaaagaaaatattctatttggtagaatacaaatgtggtgtgtgttgttttataatgactgctgtacagtgggtatagtattttggttttggttccagattgtgcaatctttaagaaaaataaagatacaaacgagagttttgttcacttagt

SEQ ID NO: 168549 - DNA, 2429 bp, Homo sapiens
  Payload ID: 13178
  Gene Symbol: PRDM13
  Gene Name: PR domain containing 13
  Uniprot ID: Q9H4Q3
  ENST ID: ENST00000369215
  CDS Start-End: 306-2429
gccattcagcggcctcgattatgcagggggctgagggaaccactccatgtgaccctctcgggtgggactctgcagctgcttcgcagcgcaactctctcaccaaactccgcgcccttgcgctagcggtgccaaaaggctcccgccccgattgaaaaggcgcagtgcatgcccgcccgcgtcactccgcgggcggaggacgcacgtcggggcgcggctctctggctagcgcgcagctccagctctgtcactcgcgcccttccaaggacctggagcacccgagcgcctgcctggtggcggcggcaacaatgcacggagccgccagagcgccagccaccagcgtgagtgccgactgctgcatcccggccggcttgcgcctcggaccggtgcctggtaccttcaagctgggcaagtacctgtcagaccgcagggagcccgggcctaagaaaaaggtgcgcatggtgagaggggagctggtggacgagtcggggggctcccctctggagtggatagggttaatccgggcagccagaaactcccaggaacagactctggaagctattgcagacttacccggaggacagatcttctaccgagcattgcgagacgtccagccaggggaggagctgacagtgtggtattctaactccttggctcagtggttcgacatccccaccacagcgactccgactcacgacgagaaaggggaggagcgctacatctgctggtactgctggaggacgtttagataccccaacagccttaaggcacacctgcgtttccactgcgtgttcagcggcggtggaggcggcgccttcctgcaccacgaacacgcggctcgccaaggcgccgtcccagcggctgatggcctcggtctctccccaaaacccccggcgcccgatttcgccgcgccttcccaggcaggaactttgcgaccccaccccctgggcccgccaccagttcaggcctgcggtgcgcgggagggcatcaagcgcgaggcctcttccgcgccctcggccacctcgccgaccccaggcaagtgggggcagcccaagaagggcaaggagcagctggaccgtgccctggacatgagcggagccgcccgaggacaagggcacttcctcggcatcgtgggcggctcctcggcgggggtcggcagcctggctttctaccccggcgtgcgctcagctttcaagcccgccggcctagcgagggcggcggcggccgctcacggcgacccctaccgggaggagagcagcagcaagcaaggagccggcctcgctttgggcaggctgctgggcgggggccgggcgtgcgggcgccccgggagcggggagaactcggcggcgggcggcgcgggtcaccaccatcaccaccacgcgcaccaccaccaccatcccaagtgcctgctcgctggggacccgccgccgccgccgccgcctggcctgccctgctctggggccctgcgcggcttccctctgctctccgtccccccggaagaggcgtccgccttcaagcacgtggagcgcgccccgcccgcagccgccgcgctgccaggagcgcgttatgcgcagctgccccctgcgccggggttgcccctcgagcgctgcgcgctgccgcccctcgacccgggcggtctcaaagcctatccgggtggtgagtgcagccacctgcccgccgtcatgccggcctttacagtctacaacggggagctgctctacggctcaccggccaccaccgcttattacccgctcaaattgcacttcggcgggctgctgaagtatccggagtccatctcctacttcagcgggcctgcagcggccgccctaagccccgccgagctggggtcgctggccagcatcgaccgagagatcgccatgcacaatcagcagctgtccgagatggctgccgggaagggtcgcggacgcctggactcggggacgttgccaccggccgtcgcggcggcgggaggcaccgggggcggcggcagcggaggcagcggcgcaggtaagcccaagaccggccacctgtgcctctactgtggcaagctgtactcgcgcaagtatgggctcaagatccacatgcggacgcacacgggctacaagccactcaagtgcaaagtctgtctgcggcccttcggcgaccccagcaatctcaacaagcacatccggctgcacgccgagggcaatacgccctaccgctgcgagttctgcggcaaggtacttgtgcgccgccgggacctggagcgacatgtcaagtcccgccaccctggccagagtctgctcgccaaagcgggcgacggcccgggtgccgagcccggctatcccccggagcctggggatcccaagagcgacgacagtgacgtggacgtctgcttcacagacgaccagagcgaccccgaggttgggggcggcggggagcgcgacttgtaa

SEQ ID NO: 168550 - DNA, 2344 bp, Homo sapiens
  Payload ID: 13179
  Gene Symbol: PRDM14
  Gene Name: PR domain containing 14
  Uniprot ID: Q9GZV8
  ENST ID: ENST00000276594
  CDS Start-End: 203-1918
aattccctaccctcgacctgtcgatgccccgcggccccgcccgccctcttaagcctggctcagccctcagggcccgcccgaagtctaccgagcccgagtggcctaccgagcccgagtggccccgcagcgtccaggaggcgcccgctccgcggtggcgctcttggaggtggtgtcggagagccgccgagcgtgcggtcccgggatggctctaccccggccaagtgaggccgtgcctcaggacaaggtgtgctacccgccggagagcagcccgcagaacctggccgcgtactacacgcctttcccgtcctatggacactacagaaacagcctggccaccgtggaggaagacttccaacctttccggcagctggaggccgcagcgtctgctgcccccgccatgccccccttccccttccggatggcgcctcccttgctgagcccgggtctgggcctacagagggagcctctctacgatctgccctggtacagcaagctgccaccgtggtacccaattccccacgtccccagggaagtgccgcccttcctgagcagcagccacgagtacgcgggtgccagcagtgaagatctgggccaccaaatcattggtggcgacaacgagagtggcccgtgttgtggacctgacactttaattccaccgccccctgcggatgcttctctgttacctgaggggctgaggacctcccagttattaccttgctcacccagcaagcagtcagaggatggtcccaaaccctccaaccaagaagggaagtcccctgctcggttccagttcacggaggaggacctgcacttcgttctgtacggggtcactcccagcctggagcacccagccagcctgcaccatgcgatttcaggcctcctggtccccccagacagctctggatctgattctcttcctcaaactctggataaagactcccttcaacttccagaaggtctatgcctcatgcagacggtgtttggtgaagtcccacattttggtgtgttctgcagtagttttatcgccaaaggagtcaggtttgggccctttcaaggtaaagtggtcaatgccagtgaagtgaagacctacggagacaattctgtgatgtgggagatctttgaagatggtcatttgagccactttatagatggaaaaggaggtacggggaactggatgtcctatgtcaactgtgcccgcttccccaaggagcagaacctagttgctgtgcagtgtcaagggcatatattttatgagagctgcaaagagatccatcagaaccaagagctccttgtgtggtatggagactgctatgagaaatttctggatattcctgtgagccttcaggtcacagagccggggaagcagccatctgggccctctgaagagtctgcagaaggctacagatgtgaaagatgtgggaaggtatttacctacaaatattacagagataagcacctcaagtacaccccctgtgtggacaagggcgataggaaatttccctgttctctctgcaaacgatcctttgagaagcgggaccggcttcggatccacattcttcatgttcatgagaagcaccggcctcacaagtgttctacatgtgggaaatgtttctctcaatcttccagcctaaacaaacacatgcgagtccactctggagacagaccataccagtgtgtgtattgtactaagaggttcacagcctccagcatactccgcacacacatcaggcagcactccggggagaagcccttcaaatgcaagtactgtggtaaatcttttgcatcccatgctgcccatgacagccatgtccggcgttcacacaaggaggatgatggctgctcatgcagcatctgtgggaaaatcttctcagatcaagaaacattctactcccacatgaagtttcatgaagactactagccctgccaggcacaatgactcacgcctgtaatcccagcactttgggaggcagaggtgggtggatcactcaagtccaggagttcgagaccagcctgggcaacatggtgaaatcctgtctctaccaaaaaaatacaaaaatcagctgggggtggtggcacatgcctgtggttccagccactcaggaggtcgaggtggcaggatggtttgagcacaggagacggaggttgctgtgagctgagatcgccccactgcttttcaacctgggtgacagaaccagaccctgtctcaaaacaaaacaaaacaaaaaaaatgagtagccctcaagagtgtggagacaatgtaaaaacaagagattcggattctctctatttccttttatgggttatagaagtccctgcagttggctgtgtgtggtggctcacgcct

SEQ ID NO: 168551 - DNA, 422 bp, Homo sapiens
  Payload ID: 13179
  Gene Symbol: PRDM14
  Gene Name: PR domain containing 14
  ENST ID: ENST00000426346
  CDS Start-End: 124-422
acgccgccttcgggcaggctgggatcttccgaactgggagcggagagtaaggggctcgaccccgggacgcgagtccggccttctggactccggttcaggagccgccgagcgtgcggtcccgggatggctctaccccggccaagtgaggccgtgcctcaggacaaggtgtgctacccgccggagagcagcccgcagaacctggccgcgtactacacgcctttcccgtcctatggacactacagaaacagcctggccaccgtggaggaagacttccaacctttccggcagctggaggccgcagcgtctgctgcccccgccatgccccccttccccttccggatggcgcctcccttgctgagcccgggtctgggcctacagagggagcctctctacgatctgccctggtacagcaagctgccacc

SEQ ID NO: 168552 - DNA, 4881 bp, Homo sapiens
  Payload ID: 13180
  Gene Symbol: PRDM15
  Gene Name: PR domain containing 15
  Uniprot ID: P57071
  ENST ID: ENST00000269844
  CDS Start-End: 112-4635
cgctgccccgtccacgccgcccgcgccccgcagtcccacccgcaggacccccggccgcgccagggtctcgcctgcgccccccgcgcccgcccgcggactacaagtcccgccatgccccgccgccgccccccggcttccggtgctgcgcagtttccggagcggatcgcaacccggagtccggatccgatcccgctctgcacattccaaaggcagccgcgcgccgccccggtccagccgccatgccgactgttctttgttacattcgccggctgcgggcaccgttggcgatcggagtcaaaacccggctggatttcccggagccgctccgggatcgccctgcgcgccgcccgcccgccggggtcttcgccgccccggcccgcggccccgcggcccccgccgccgggcggcgtcgtcgccgaggccccaggggatgtcgttatcccccgccctcgggtacagcccatgcgggtcgcacgggggggtccctggacccccaaccccgcgtttagagaagctgagtcctggtcccagattgggaaccagagggtcagtgagcagctcttggaaacatctctagggaatgaggtgtccgacactgagccactgagccctgcgagtgcaggcctgcgacgcaatcctgccctacctcctggaccctttgcacaaaacttttcctgggggaaccaggaaaatctgcccccagccctggggaagattgcgaacggaggaggaactggggcaggcaaggccgaatgcggctatgaaactgagtcacacttgctagagccgcacgagatacctttgaacgtgaatacacacaagttcagtgactgtgagtttccatatgagttttgcacggtctgcttttcacccttcaagctgctggggatgagcggggtggagggcgtgtggaatcagcattcaagaagtgccagcatgcacactttcctaaaccactcagcaacgggcatcagagaagcaggttgcaggaaggacatgccggtgtcagagatggctgaagatgggagcgaagagatcatgttcatctggtgtgaagactgcagccagtaccacgactccgaatgtcccgagctgggcccagtggtcatggtcaaagactcctttgtgttaagcagggcaaggtcttggcctgccagcggacacgtgcacacccaggcggggcaggggatgcggggttatgaggacagggacagggctgacccacagcagcttccagaagcagtccctgcaggcctggtgaggcggctcagtgggcagcagctgccctgccgttccaccctcacctgggggaggctgtgccacctggtggcccagggcaggtcatcccttcctcccaacttggagatcagacgactggaagatggagccgagggggtgttcgccatcactcagctcgtcaagcggacacagttcggtccctttgagtccaggagggtcgccaaatgggaaaaggagtctgcatttcccctgaaggtgttccagaaggacgggcaccccgtgtgcttcgacacctccaacgaggatgactgcaactggatgatgctggtgcggccagcggcggaggccgagcaccagaacctgacggcctaccagcacggcagcgacgtgtacttcaccacctccagagacatccccccgggtaccgagctgcgcgtgtggtatgcggccttctatgccaagaagatggacaagcccatgctgaagcaggccggctctggcgtccacgctgcaggcaccccagaaaacagcgcccccgtggagtcggagcccagccagtgggcgtgtaaagtgtgttctgccaccttcctggagctgcagctcctcaatgaacatctgttgggccacttagaacaagccaaaagccttcctccaggcagccaaagcgaggcagcagctcccgagaaggagcaggacacaccccggggggaaccccctgcagtgcccgagagcgagaatgttgccaccaaagaacagaagaaaaagcctcgaagggggagaaaacccaaagtgtccaaagctgagcagcctctagtcatcgtggaagacaaggaacccacagagcaagtggcagagatcattaccgaggtccctccggatgagcctgtgagtgcaacgccagatgagcggatcatggagctggttctggggaagctggccaccaccaccactgacaccagctcggttccaaagttcacccatcatcagaataacaccatcacgctcaagaggagcttaattctctcaagcagacacggcatccggcgcaagctcatcaaacagctcggggagcacaagcgggtttaccagtgcaatatctgcagcaagatcttccagaacagcagcaacctgagcaggcacgtgcgctcgcatggtgacaagctgtttaagtgcgaagagtgtgcaaaattgttcagccgcaaagagagcctaaagcagcacgtttcctacaagcacagcaggaacgaggtggacggcgagtacaggtaccgctgcggcacttgtgagaagaccttccgcatcgagagcgcgctggagttccacaactgcaggacagatgacaagacgttccaatgtgagatgtgtttcagattcttctccaccaacagcaacctctccaagcacaagaagaagcacggcgacaagaagtttgcctgtgaggtctgcagcaagatgttctaccgcaaggacgtcatgctggaccaccagcgccggcacctggaaggagtgcggcgagtgaagcgagaggacctggaggccggtggggagaacctggtccgttacaagaaggagccttccgggtgcccggtgtgtggcaaggtgttctcctgccggagcaatatgaacaagcacctgctcacccacggcgacaagaagtacacctgcgagatctgcgggcgcaagttcttccgcgtggatgtgctcagggaccacatccatgtccacttcaaggacatcgcgttgatggatgaccaccagagggaagagtttatcggcaagatcgggatctcctcggaagaaaacgatgacaattctgacgagagcgcagactcggagcctcacaagtacagctgcaagcggtgccagctcaccttcggccgggggaaggagtacctgaagcacatcatggaggtgcacaaggagaagggctatggctgcagcatctgcaaccggcgctttgcactgaaggccacctaccacgcccacatggtcatccaccgtgaaaacctgccggaccccaacgtgcagaagtacatccacccctgcgagatctgcgggcggatcttcaacagcatcgggaacctggagcgccacaagctcatccacacaggtgtgaagagccacgcctgcgagcagtgtgggaagtcctttgccaggaaggacatgctgaaggagcacatgcgtgtgcacgacaatgtccgcgagtacctgtgtgccgagtgtgggaaaggcatgaagaccaagcacgcgctgcgccaccacatgaagctgcacaagggcatcaaggagtacgagtgcaaggagtgccaccgcaggttcgcgcagaaggtcaacatgctcaagcactgcaagcggcacacggggattaaagatttcatgtgtgaattgtgtgggaagacattcagcgagaggaacaccatggagacccacaagctcatccacacagtgggcaagcagtggacgtgctccgtgtgcgacaagaagtacgtgaccgagtacatgctgcagaagcacgttcagctcacacacgacaaggtggaggcgcagagctgccagctgtgcgggaccaaggtgtccaccagggcctccatgagccgacacatgcggcgcaagcaccccgaggtgctcgcggtgaggatcgatgacctggaccacctcccggagaccaccaccatcgacgcctcctccattggcatcgtccagcctgagctgactctggagcaggaggatttggccgaagggaagcacgggaaagctgccaagcgaagtcacaagagaaagcagaagccagaagaggaggcgggtgctccggtgcccgaggacgccaccttcagcgaatactcagagaaagagacggagttcacaggcagtgtaggcgacgagaccaattccgcagtacagagcattcagcaggtagtggtgaccctgggtgacccaaatgtgaccacaccatcgagctcagtcggcttaaccaacatcaccgtgacccccatcaccactgcggccgcgactcagtttaccaatctccagccggtggccgtggggcaccttaccacccctgaacgccagttacagctggacaactcaatcctgaccgtgacctttgataccgtcagcggctctgccatgttgcacaaccgccaaaatgacgtccagatccacccccagccggaagcctcgaacccacagtctgtggcccatttcatcaacctgacgaccctggtcaactccatcacgcccctggggagccagcttagtgaccagcacccgctcacgtggcgggcagtgccccagactgacgtcttgccaccctcgcagccgcaggcacccccacagcaggcggcccagccccaggtgcaggcggagcagcagcagcagcagatgtacagctactgagctgcgttccgggagactcggggcaagaactgcagagggatgtttgggatttgtttagatgtgtttgctggataccaaacaaacaaaaagtcatacattgcaatgtaaggttgacttagctttgcagagtatctccagatcccccgccagcaaccattacggtctgtcagcttaactctagaagggacctctggcaggccagagttttaaactggatggggctccacaccatgccttaccaaggca

SEQ ID NO: 168553 - DNA, 6654 bp, Homo sapiens
  Payload ID: 13180
  Gene Symbol: PRDM15
  Gene Name: PR domain containing 15
  Uniprot ID: P57071
  ENST ID: ENST00000398548
  CDS Start-End: 103-3639
gtccacgccgcccgcgccccgcagtcccacccgcaggacccccggccgcgccagggtctcgcctgcgccccccgcgcccgcccgcggactacaagtcccgccatgccccgccgccgccccccggcttccggtgctgcgcagtttccggagcggatcgcaacccggagtccggatccgatcccgctctgcacattccaaaggcaggtgtcagagatggctgaagatgggagcgaagagatcatgttcatctggtgtgaagactgcagccagtaccacgactccgaatgtcccgagctgggcccagtggtcatggtcaaagactcctttgtgttaagcagggcaaggtcatcccttcctcccaacttggagatcagacgactggaagatggagccgagggggtgttcgccatcactcagctcgtcaagcggacacagttcggtccctttgagtccaggagggtcgccaaatgggaaaaggagtctgcatttcccctgaaggtgttccagaaggacgggcaccccgtgtgcttcgacacctccaacgaggatgactgcaactggatgatgctggtgcggccagcggcggaggccgagcaccagaacctgacggcctaccagcacggcagcgacgtgtacttcaccacctccagagacatccccccgggtaccgagctgcgcgtgtggtatgcggccttctatgccaagaagatggacaagcccatgctgaagcaggccggctctggcgtccacgctgcaggcaccccagaaaacagcgcccccgtggagtcggagcccagccagtgggcgtgtaaagtgtgttctgccaccttcctggagctgcagctcctcaatgaacatctgttgggccacttagaacaagccaaaagccttcctccaggcagccaaagcgaggcagcagctcccgagaaggagcaggacacaccccggggggaaccccctgcagtgcccgagagcgagaatgttgccaccaaagaacagaagaaaaagcctcgaagggggagaaaacccaaagtgtccaaagctgagcagcctctagtcatcgtggaagacaaggaacccacagagcaagtggcagagatcattaccgaggtccctccggatgagcctgtgagtgcaacgccagatgagcggatcatggagctggttctggggaagctggccaccaccaccactgacaccagctcggttccaaagttcacccatcatcagaataacaccatcacgctcaagaggagcttaattctctcaagcagacacggcatccggcgcaagctcatcaaacagctcggggagcacaagcgggtttaccagtgcaatatctgcagcaagatcttccagaacagcagcaacctgagcaggcacgtgcgctcgcatggtgacaagctgtttaagtgcgaagagtgtgcaaaattgttcagccgcaaagagagcctaaagcagcacgtttcctacaagcacagcaggaacgaggtggacggcgagtacaggtaccgctgcggcacttgtgagaagaccttccgcatcgagagcgcgctggagttccacaactgcaggacagatgacaagacgttccaatgtgagatgtgtttcagattcttctccaccaacagcaacctctccaagcacaagaagaagcacggcgacaagaagtttgcctgtgaggtctgcagcaagatgttctaccgcaaggacgtcatgctggaccaccagcgccggcacctggaaggagtgcggcgagtgaagcgagaggacctggaggccggtggggagaacctggtccgttacaagaaggagccttccgggtgcccggtgtgtggcaaggtgttctcctgccggagcaatatgaacaagcacctgctcacccacggcgacaagaagtacacctgcgagatctgcgggcgcaagttcttccgcgtggatgtgctcagggaccacatccatgtccacttcaaggacatcgcgttgatggatgaccaccagagggaagagtttatcggcaagatcgggatctcctcggaagaaaacgatgacaattctgacgagagcgcagactcggagcctcacaagtacagctgcaagcggtgccagctcaccttcggccgggggaaggagtacctgaagcacatcatggaggtgcacaaggagaagggctatggctgcagcatctgcaaccggcgctttgcactgaaggccacctaccacgcccacatggtcatccaccgtgaaaacctgccggaccccaacgtgcagaagtacatccacccctgcgagatctgcgggcggatcttcaacagcatcgggaacctggagcgccacaagctcatccacacaggtgtgaagagccacgcctgcgagcagtgtgggaagtcctttgccaggaaggacatgctgaaggagcacatgcgtgtgcacgacaatgtccgcgagtacctgtgtgccgagtgtgggaaaggcatgaagaccaagcacgcgctgcgccaccacatgaagctgcacaagggcatcaaggagtacgagtgcaaggagtgccaccgcaggttcgcgcagaaggtcaacatgctcaagcactgcaagcggcacacggggattaaagatttcatgtgtgaattgtgtgggaagacattcagcgagaggaacaccatggagacccacaagctcatccacacagtgggcaagcagtggacgtgctccgtgtgcgacaagaagtacgtgaccgagtacatgctgcagaagcacgttcagctcacacacgacaaggtggaggcgcagagctgccagctgtgcgggaccaaggtgtccaccagggcctccatgagccgacacatgcggcgcaagcaccccgaggtgctcgcggtgaggatcgatgacctggaccacctcccggagaccaccaccatcgacgcctcctccattggcatcgtccagcctgagctgactctggagcaggaggatttggccgaagggaagcacgggaaagctgccaagcgaagtcacaagagaaagcagaagccagaagaggaggcgggtgctccggtgcccgaggacgccaccttcagcgaatactcagagaaagagacggagttcacaggcagtgtaggcgacgagaccaattccgcagtacagagcattcagcaggtagtggtgaccctgggtgacccaaatgtgaccacaccatcgagctcagtcggcttaaccaacatcaccgtgacccccatcaccactgcggccgcgactcagtttaccaatctccagccggtggccgtggggcaccttaccacccctgaacgccagttacagctggacaactcaatcctgaccgtgacctttgataccgtcagcggctctgccatgttgcacaaccgccaaaatgacgtccagatccacccccagccggaagcctcgaacccacagtctgtggcccatttcatcaacctgacgaccctggtcaactccatcacgcccctggggagccagcttagtgaccagcacccgctcacgtggcgggcagtgccccagactgacgtcttgccaccctcgcagccgcaggcacccccacagcaggcggcccagccccaggtgcaggcggagcagcagcagcagcagatgtacagctactgagctgcgttccgggagactcggggcaagaactgcagagggatgtttgggatttgtttagatgtgtttgctggataccaaacaaacaaaaagtcatacattgcaatgtaaggttgacttagctttgcagagtatctccagatcccccgccagcaaccattacggtctgtcagcttaactctagaagggacctctggcaggccagagttttaaactggatggggctccacaccatgccttaccaaggcagtaagtcctgggccggggccgcatctgcctccccttacagaaccagtgttcgcccgacacagggttcgggaaagtgaagctgagagagaagcaggattttaagaggcaggagataagttattaggaacacaaatggttcattttcttttttcttttagagctcggttcctatgagaacacagacagtattcacaggtggcagcaggcagcagggaacattttctcctcacttctggatttttttgcaagcgagcacatagaagttaaagtaacgtgtattctctttgaactaggagtggagtcggttcttatacaactatgggctgaaaccatgaggcgtgctgagccgcacctgatcctgcaaccttcgaggtcatcacggtcatcatgtgcaaggggtcacgtgaggtcactgactccagctcaaaacgcatcttagtaatatccatgaatcgatttccaatagagtttttttccttttttttttttaactttatttcaaacatacattatgtgttcaagactgttatggccaatattgtgttttagttttatgttaacatgataaagtcatgtgcactgtaggaccatctgtccctgtccacccttcacagctgcccagatgcagagggtcgcgcggctgtgtgtgaggagtgagcctccctgctgcccccaggggctcctccgggttgtctcaggattctctgcaatccaaatgtatccattctggctgaagcccagccagaatcccgagtggaagaaacgggggaaaagtcatattttccttctgtttaaacttcaattccaaaggttggtgtatttcatgaccagttttctataaaaatattgaatgagtttggctctttacaatggaaaagtgtaggtatttctgaaacacagagaaaatgctatttcctgccaggtggtaatgaaagcagagaggttagttcactaatagaagcattaattgcccctaaaactgaatgtgcggtgaacagccaggtctgcgtgtgcggggacacgtgctgtcacgtctgtgtaccagtttcgggggcaggggccagggttgggggaggcacccagccctcctgctgcccacgacaagaaacactgagaggtgtggggagaagtttgctcttaactttcctggtactctgtttgtggccacagtgagaggacaaacctgccttaaggtgtcctgctttgccagttatcccagatcctgcactcactgggagtccatcttgaggaaacactggcatggctgagtaattgatcaggagcagtcctgatgttgccagcagaacaaaggatgattgtgtttttcaaaacgcaactttctcagcacttcactccaaacagcagacttttgaggacagggctggaatttgttttgtgcaatatatgccttcatgaactaaggaatgttcatccccaggcagcatgcaggagggtctgtggggctcacctcctcaccttacccaccatcactcgcgcctagctctcacctctcagttgaatgaatagtgggagatcatttgacttttaatttatgagaattattttatgttatttatgtatataattaactgttttatacatagtagtctcatcaaatgaattcgggcttggggtgatattgtctccattctccagatacaagtgctccaggcatccatggaatcagcaggagaccagggctcctaagatatatttttaaaaatcagtatcgatttctttttgcctttgcagaatctaaagggcaaatgacctcgcagagactcccaacgggctttgggctcatgacgaaacacccactagcattgatcttttattcctcttccctataaaataaaggccttggaaatcacaattttatttttttaaagaagttgttttagtgcctagagtaagaccgcatcaaatgttgttaaagaacctaatttagattgtgtggtatataccactgtttatctcaatacacagacacctcttacttcttgttataagtgagaactctaaagaaaaatcaaactcccaagttttctgtaaacatacgtggtcttaatagggtcactgtctgaggcaaaatgggttgtcttaaagcaattgctacaaatttgcatcaaagaaactagatagcaaaatacaacaaccatgtaccacccaggcagaagagtcctcacctatacgcagttctgcatattgatcatcatgacaggaagtatttcgttttttaactgatcccaggtgcacagatgtattcataaaggaagacattagatccagccattgtggccaccaggctctgtggacccatctcagtggagaattcgttttggacccgtggctccgtgcagctgtggactcgagtgccatccactggtgtgagtcttgcggggaggccacaggtacagctgctccccgtgaatcctggtctgtgggttgagaaggggctcgggcctctggaatgctctagcgtgtgacgtgttctcaggaaaacgttctgtgccaagtgccgcctcgctgtgtccggcatgggactgcgctggagggtccggcgtggaaggcagacctcctgtacctctatcgttcccatttgtggcatccaaaggcggaaggctcatggcttccccactagaggcggcgtcttgggctttcccattggattgtgaaaggcattaagactgtttggagatgttggctgtatttcctgtcacatcaggttgtatgatgacgaataaaaggtgctgtgacccgtgttttcaa

SEQ ID NO: 168554 - DNA, 6542 bp, Homo sapiens
  Payload ID: 13180
  Gene Symbol: PRDM15
  Gene Name: PR domain containing 15
  ENST ID: ENST00000441787
  CDS Start-End: 214-1650
gtccacgccgcccgcgccccgcagtcccacccgcaggacccccggccgcgccagggtctcgcctgcgccccccgcgcccgcccgcggactacaagtcccgccatgccccgccgccgccccccggcttccggtgctgcgcagtttccggagcggatcgcaacccggagtccggatccgatcccgctctgcacattccaaaggcaggtgtcagagatggctgaagatgggagcgaagagatcatgttcatctggtgtgaagactgcagccagtaccacgactccgaatgtcccgagctgggcccagtggtcatggtcaaagactcctttgtgttaagcagggcaaggtcatcccttcctcccaacttggagatcagacgactggaagatggagccgagggggtgttcgccatcactcagctcgtcaagcggacacagttcggtccctttgagtccaggagggtcgccaaatgggaaaaggagtctgcatttcccctgaaggtgttccagaaggacgggcaccccgtgtgcttcgacacctccaacgaggatgactgcaactggatgatgctggtgcggccagcggcggaggccgagcaccagaacctgacggcctaccagcacggcagcgacgtgtacttcaccacctccagagacatccccccgggtaccgagctgcgcgtgtggtatgcggccttctatgccaagaagatggacaagcccatgctgaagcaggccggctctggcgtccacgctgcaggcaccccagaaaacagcgcccccgtggagtcggagcccagccagtgggcgtgtaaagtgtgttctgccaccttcctggagctgcagctcctcaatgaacatctgttgggccacttagaacaagccaaaagccttcctccaggcagccaaagcgaggcagcagctcccgagaaggagcaggacacaccccggggggaaccccctgcagtgcccgagagcgagaatgttgccaccaaagaacagaagaaaaagcctcgaagggggagaaaacccaaagtgtccaaagctgagcagcctctagtcatcgtggaagacaaggaacccacagagcaagtggcagagatcattaccgaggtccctccggatgagcctgtgagtgcaacgccagatgagcggatcatggagctggttctggggaagctggccaccaccaccactgacaccagctcggttccaaaacacggcatccggcgcaagctcatcaaacagctcggggagcacaagcgggtttaccagtgcaatatctgcagcaagatcttccagaacagcagcaacctgagcaggcacgtgcgctcgcatggtgacaagctgtttaagtgcgaagagtgtgcaaaattgttcagccgcaaagagagcctaaagcagcacgtttcctacaagcacagcaggaacgaggtggacggcgagtacaggtaccgctgcggcacttgtgagaagaccttccgcatcgagagcgcgctggagttccacaactgcaggacagcaacctctccaagcacaagaagaagcacggcgacaagaagtttgcctgtgaggtctgcagcaagatgttctaccgcaaggacgtcatgctggaccaccagcgccggcacctggaaggagtgcggcgagtgaagcgagaggacctggaggccggtggggagaacctggtccgttacaagaaggagccttccgggtgcccggtgtgtggcaaggtgttctcctgccggagcaatatgaacaagcacctgctcacccacggcgacaagaagtacacctgcgagatctgcgggcgcaagttcttccgcgtggatgtgctcagggaccacatccatgtccacttcaaggacatcgcgttgatggatgaccaccagagggaagagtttatcggcaagatcgggatctcctcggaagaaaacgatgacaattctgacgagagcgcagactcggagcctcacaagtacagctgcaagcggtgccagctcaccttcggccgggggaaggagtacctgaagcacatcatggaggtgcacaaggagaagggctatggctgcagcatctgcaaccggcgctttgcactgaaggccacctaccacgcccacatggtcatccaccgtgaaaacctgccggaccccaacgtgcagaagtacatccacccctgcgagatctgcgggcggatcttcaacagcatcgggaacctggagcgccacaagctcatccacacaggtgtgaagagccacgcctgcgagcagtgtgggaagtcctttgccaggaaggacatgctgaaggagcacatgcgtgtgcacgacaatgtccgcgagtacctgtgtgccgagtgtgggaaaggcatgaagaccaagcacgcgctgcgccaccacatgaagctgcacaagggcatcaaggagtacgagtgcaaggagtgccaccgcaggttcgcgcagaaggtcaacatgctcaagcactgcaagcggcacacggggattaaagatttcatgtgtgaattgtgtgggaagacattcagcgagaggaacaccatggagacccacaagctcatccacacagtgggcaagcagtggacgtgctccgtgtgcgacaagaagtacgtgaccgagtacatgctgcagaagcacgttcagctcacacacgacaaggtggaggcgcagagctgccagctgtgcgggaccaaggtgtccaccagggcctccatgagccgacacatgcggcgcaagcaccccgaggtgctcgcggtgaggatcgatgacctggaccacctcccggagaccaccaccatcgacgcctcctccattggcatcgtccagcctgagctgactctggagcaggaggatttggccgaagggaagcacgggaaagctgccaagcgaagtcacaagagaaagcagaagccagaagaggaggcgggtgctccggtgcccgaggacgccaccttcagcgaatactcagagaaagagacggagttcacaggcagtgtaggcgacgagaccaattccgcagtacagagcattcagcaggtagtggtgaccctgggtgacccaaatgtgaccacaccatcgagctcagtcggcttaaccaacatcaccgtgacccccatcaccactgcggccgcgactcagtttaccaatctccagccggtggccgtggggcaccttaccacccctgaacgccagttacagctggacaactcaatcctgaccgtgacctttgataccgtcagcggctctgccatgttgcacaaccgccaaaatgacgtccagatccacccccagccggaagcctcgaacccacagtctgtggcccatttcatcaacctgacgaccctggtcaactccatcacgcccctggggagccagcttagtgaccagcacccgctcacgtggcgggcagtgccccagactgacgtcttgccaccctcgcagccgcaggcacccccacagcaggcggcccagccccaggtgcaggcggagcagcagcagcagcagatgtacagctactgagctgcgttccgggagactcggggcaagaactgcagagggatgtttgggatttgtttagatgtgtttgctggataccaaacaaacaaaaagtcatacattgcaatgtaaggttgacttagctttgcagagtatctccagatcccccgccagcaaccattacggtctgtcagcttaactctagaagggacctctggcaggccagagttttaaactggatggggctccacaccatgccttaccaaggcagtaagtcctgggccggggccgcatctgcctccccttacagaaccagtgttcgcccgacacagggttcgggaaagtgaagctgagagagaagcaggattttaagaggcaggagataagttattaggaacacaaatggttcattttcttttttcttttagagctcggttcctatgagaacacagacagtattcacaggtggcagcaggcagcagggaacattttctcctcacttctggatttttttgcaagcgagcacatagaagttaaagtaacgtgtattctctttgaactaggagtggagtcggttcttatacaactatgggctgaaaccatgaggcgtgctgagccgcacctgatcctgcaaccttcgaggtcatcacggtcatcatgtgcaaggggtcacgtgaggtcactgactccagctcaaaacgcatcttagtaatatccatgaatcgatttccaatagagtttttttccttttttttttttaactttatttcaaacatacattatgtgttcaagactgttatggccaatattgtgttttagttttatgttaacatgataaagtcatgtgcactgtaggaccatctgtccctgtccacccttcacagctgcccagatgcagagggtcgcgcggctgtgtgtgaggagtgagcctccctgctgcccccaggggctcctccgggttgtctcaggattctctgcaatccaaatgtatccattctggctgaagcccagccagaatcccgagtggaagaaacgggggaaaagtcatattttccttctgtttaaacttcaattccaaaggttggtgtatttcatgaccagttttctataaaaatattgaatgagtttggctctttacaatggaaaagtgtaggtatttctgaaacacagagaaaatgctatttcctgccaggtggtaatgaaagcagagaggttagttcactaatagaagcattaattgcccctaaaactgaatgtgcggtgaacagccaggtctgcgtgtgcggggacacgtgctgtcacgtctgtgtaccagtttcgggggcaggggccagggttgggggaggcacccagccctcctgctgcccacgacaagaaacactgagaggtgtggggagaagtttgctcttaactttcctggtactctgtttgtggccacagtgagaggacaaacctgccttaaggtgtcctgctttgccagttatcccagatcctgcactcactgggagtccatcttgaggaaacactggcatggctgagtaattgatcaggagcagtcctgatgttgccagcagaacaaaggatgattgtgtttttcaaaacgcaactttctcagcacttcactccaaacagcagacttttgaggacagggctggaatttgttttgtgcaatatatgccttcatgaactaaggaatgttcatccccaggcagcatgcaggagggtctgtggggctcacctcctcaccttacccaccatcactcgcgcctagctctcacctctcagttgaatgaatagtgggagatcatttgacttttaatttatgagaattattttatgttatttatgtatataattaactgttttatacatagtagtctcatcaaatgaattcgggcttggggtgatattgtctccattctccagatacaagtgctccaggcatccatggaatcagcaggagaccagggctcctaagatatatttttaaaaatcagtatcgatttctttttgcctttgcagaatctaaagggcaaatgacctcgcagagactcccaacgggctttgggctcatgacgaaacacccactagcattgatcttttattcctcttccctataaaataaaggccttggaaatcacaattttatttttttaaagaagttgttttagtgcctagagtaagaccgcatcaaatgttgttaaagaacctaatttagattgtgtggtatataccactgtttatctcaatacacagacacctcttacttcttgttataagtgagaactctaaagaaaaatcaaactcccaagttttctgtaaacatacgtggtcttaatagggtcactgtctgaggcaaaatgggttgtcttaaagcaattgctacaaatttgcatcaaagaaactagatagcaaaatacaacaaccatgtaccacccaggcagaagagtcctcacctatacgcagttctgcatattgatcatcatgacaggaagtatttcgttttttaactgatcccaggtgcacagatgtattcataaaggaagacattagatccagccattgtggccaccaggctctgtggacccatctcagtggagaattcgttttggacccgtggctccgtgcagctgtggactcgagtgccatccactggtgtgagtcttgcggggaggccacaggtacagctgctccccgtgaatcctggtctgtgggttgagaaggggctcgggcctctggaatgctctagcgtgtgacgtgttctcaggaaaacgttctgtgccaagtgccgcctcgctgtgtccggcatgggactgcgctggagggtccggcgtggaaggcagacctcctgtacctctatcgttcccatttgtggcatccaaaggcggaaggctcatggcttccccactagaggcggcgtcttgggctttcccattggattgtgaaaggcattaagactgtttggagatgttggctgtatttcctgtcacatcaggttgtatgatgacgaataaaaggtgctgtgacccgtgttttcaa

SEQ ID NO: 168555 - DNA, 4928 bp, Homo sapiens
  Payload ID: 13180
  Gene Symbol: PRDM15
  Gene Name: PR domain containing 15
  ENST ID: ENST00000447207
  CDS Start-End: 16-3441
tgacaggtgtcagagatggctgaagatgggagcgaagagatcatgttcatctggtgtgaagactgcagccagtaccacgactccgaatgtcccgagctgggcccagtggtcatggtcaaagactcctttgtgttaagcagggcaaggtcatcccttcctcccaacttggagatcagacgactggaagatggagccgagggggtgttcgccatcactcagctcgtcaagcggacacagttcggtccctttgagtccaggagggtcgccaaatgggaaaaggagtctgcatttcccctgaaggtgttccagaaggacgggcaccccgtgtgcttcgacacctccaacgaggatgactgcaactggatgatgctggtgcggccagcggcggaggccgagcaccagaacctgacggcctaccagcacggcagcgacgtgtacttcaccacctccagagacatccccccgggtaccgagctgcgcgtgtggtatgcggccttctatgccaagaagatggacaagcccatgctgaagcaggccggctctggcgtccacgctgcaggcaccccagaaaacagcgcccccgtggagtcggagcccagccagtgggcgtgtaaagtgtgttctgccaccttcctggagctgcagctcctcaatgaacatctgttgggccacttagaacaagccaaaagccttcctccaggcagccaaagcgaggcagcagctcccgagaaggagcaggacacaccccggggggaaccccctgcagtgcccgagagcgagaatgttgccaccaaagaacagaagaaaaagcctcgaagggggagaaaacccaaagtgtccaaagctgagcagcctctagtcatcgtggaagacaaggaacccacagagcaagtggcagagatcattaccgaggtccctccggatgagcctgtgagtgcaacgccagatgagcggatcatggagctggttctggggaagctggccaccaccaccactgacaccagctcggttccaaagttcacccatcatcagaataacaccatcacgctcaagaggagcttaattctctcaagcagacacggcatccggcgcaagctcatcaaacagctcggggagcacaagcgggtttaccagtgcaatatctgcagcaagatcttccagaacagcagcaacctgagcaggcacgtgcgctcgcatggtgacaagctgtttaagtgcgaagagtgtgcaaaattgttcagccgcaaagagagcctaaagcagcacgtttcctacaagcacagcaggaacgaggtggacggcgagtacaggtaccgctgcggcacttgtgagaagaccttccgcatcgagagcgcgctggagttccacaactgcaggacagatgacaagacgttccaatgtgagatgtgtttcagattcttctccaccaacagcaacctctccaagcacaagaagaagcacggcgacaagaagtttgcctgtgaggtctgcagcaagatgttctaccgcaaggacgtcatgctggaccaccagcgccggcacctggaaggagtgcggcgagtgaagcgagaggacctggaggccggtggggagaacctggtccgttacaagaaggagccttccgggtgcccggtgtgtggcaaggtgttctcctgccggagcaatatgaacaagcacctgctcacccacggcgacaagaagtacacctgcgagatctgcgggcgcaagttcttccgcgtggatgtgctcagggaccacatccatgtccacttcaaggacatcgcgttgatggatgaccaccagagggaagagtttatcggcaagatcgggatctcctcggaagaaaacgatgacaattctgacgagagcgcagactcggagcctcacaagtacagctgcaagcggtgccagctcaccttcggccgggggaaggagtacctgaagcacatcatggaggtgcacaaggagaagggctatggctgcagcatctgcaaccggcgctttgcactgaaggccacctaccacgcccacatggtcatccaccgtgaaaacctgccggaccccaacgtgcagaagtacatccacccctgcgagatctgcgggcggatcttcaacagcatcgggaacctggagcgccacaagctcatccacacaggtgtgaagagccacgcctgcgagcagtgtgggaagtcctttgccaggaaggacatgctgaaggagcacatgcgtgtgcacgacaatgtccgcgagtacctgtgtgccgagtgtgggaaaggcatgaagaccaagcacgcgctgcgccaccacatgaagctgcacaagggcatcaaggagtacgagtgcaaggagtgccaccgcaggttcgcgcagaaggtcaacatgctcaagcactgcaagcggcacacggggattaaagatttcatgtgtgaattgtgtgggaagacattcagcgagaggaacaccatggagacccacaagctcatccacacagtgggcaagcagtggacgtgctccgtgtgcgacaagaagtacgtgaccgagtacatgctgcagaagcacgttcagctcacacacgacaaggtggaggcgcagagctgccagctgtgcgggaccaaggtgtccaccagggcctccatgagccgacacatgcggcgcaagcaccccgaggtgctcgcggtgaggatcgatgacctggaccacctcccggagaccaccaccatcgacgcctcctccattggcatcgtccagcctgagctgactctggagcaggaggatttggccgaagggaagcacgggaaagctgccaagcgaagtcacaagagaaagcagaagccagaagaggaggcgggtgctccggtgcccgaggacgccaccttcagcgaatactcagagaaagagacggagttcacaggcagtgtaggcgacgagaccaattccgcagtacagagcattcagcaggtagtggtgaccctgggtgacccaaatgtgaccacaccatcgagctcagtcggcttaaccaacatcaccgtgacccccatcaccactgcggccgcgactcagtttaccaatctccagccggtggccgtggggcaccttaccacccctgaacgccagttacagctggacaactcaatcctgaccgtgacctttgataccgtcagcggctctgccatgttgcacaaccgccaaaatgacgtccagatccacccccagccggaagcctcgaacccacagtctgtggcccatttcatcaacctgacgaccctggtcaactccatcacgcccctggggagccagcttagtgaccagcacccgctcacgtggcgggcagtgccccagactgacgtcttgccaccctcgcagccgcaggcacccccacagcaggcggcccagccccaggtgcaggcggagcagcagcagcagcagatgtacagctactgagctgcgttccgggagactcggggcaagaactgcagagggatgtttgggatttgtttagatgtgtttgctggataccaaacaaacaaaaagtcatacattgcaatgtaaggttgacttagctttgcagagtatctccagatcccccgccagcaaccattacggtctgtcagcttaactctagaagggacctctggcaggccagagttttaaactggatggggctccacaccatgccttaccaaggcagtaagtcctgggccggggccgcatctgcctccccttacagaaccagtgttcgcccgacacagggttcgggaaagtgaagctgagagagaagcaggattttaagaggcaggagataagttattaggaacacaaatggttcattttcttttttcttttagagctcggttcctatgagaacacagacagtattcacaggtggcagcaggcagcagggaacattttctcctcacttctggatttttttgcaagcgagcacatagaagttaaagtaacgtgtattctctttgaactaggagtggagtcggttcttatacaactatgggctgaaaccatgaggcgtgctgagccgcacctgatcctgcaaccttcgaggtcatcacggtcatcatgtgcaaggggtcacgtgaggtcactgactccagctcaaaacgcatcttagtaatatccatgaatcgatttccaatagagtttttttccttttttttttttaactttatttcaaacatacattatgtgttcaagactgttatggccaatattgtgttttagttttatgttaacatgataaagtcatgtgcactgtaggaccatctgtccctgtccacccttcacagctgcccagatgcagagggtcgcgcggctgtgtgtgaggagtgagcctccctgctgcccccaggggctcctccgggttgtctcaggattctctgcaatccaaatgtatccattctggctgaagcccagccagaatcccgagtggaagaaacgggggaaaagtcatattttccttctgtttaaacttcaattccaaaggtgcacagatgtattcataaaggaagacattagatccagccattgtggccaccaggctctgtggacccatctcagtggagaattcgttttggacccgtggctccgtgcagctgtggactcgagtgccatccactggtgtgagtcttgcggggaggccacaggaaaacgttctgtgccaagtgccgcctcgctgtgtccggcatgggactgcgctggagggtccggcgtggaaggcagacctcctgtacctctatcgttcccatttgtggcatccaaaggcggaaggctcatggcttccccactagaggcggcgtcttgggctttcccattggattgtgaaaggcattaagactgtttggagatgttggctgtatttcctgtcacatcaggttgtatgatgacgaataaaaggtgctgtgacccgtgttttc

SEQ ID NO: 168556 - DNA, 6662 bp, Homo sapiens
  Payload ID: 13180
  Gene Symbol: PRDM15
  Gene Name: PR domain containing 15
  Uniprot ID: P57071
  ENST ID: ENST00000449395
  CDS Start-End: 103-1770
gtccacgccgcccgcgccccgcagtcccacccgcaggacccccggccgcgccagggtctcgcctgcgccccccgcgcccgcccgcggactacaagtcccgccatgccccgccgccgccccccggcttccggtgctgcgcagtttccggagcggatcgcaacccggagtccggatccgatcccgctctgcacattccaaaggcaggtgtcagagatggctgaagatgggagcgaagagatcatgttcatctggtgtgaagactgcagccagtaccacgactccgaatgtcccgagctgggcccagtggtcatggtcaaagactcctttgtgttaagcagggcaaggtcatcccttcctcccaacttggagatcagacgactggaagatggagccgagggggtgttcgccatcactcagctcgtcaagcggacacagttcggtccctttgagtccaggagggtcgccaaatgggaaaaggagtctgcatttcccctgaaggtgttccagaaggacgggcaccccgtgtgcttcgacacctccaacgaggatgactgcaactggatgatgctggtgcggccagcggcggaggccgagcaccagaacctgacggcctaccagcacggcagcgacgtgtacttcaccacctccagagacatccccccgggtaccgagctgcgcgtgtggtatgcggccttctatgccaagaagatggacaagcccatgctgaagcaggccggctctggcgtccacgctgcaggcaccccagaaaacagcgcccccgtggagtcggagcccagccagtgggcgtgtaaagtgtgttctgccaccttcctggagctgcagctcctcaatgaacatctgttgggccacttagaacaagccaaaagccttcctccaggcagccaaagcgaggcagcagctcccgagaaggagcaggacacaccccggggggaaccccctgcagtgcccgagagcgagaatgttgccaccaaagaacagaagaaaaagcctcgaagggggagaaaacccaaagtgtccaaagctgagcagcctctagtcatcgtggaagacaaggaacccacagagcaagtggcagagatcattaccgaggtccctccggatgagcctgtgagtgcaacgccagatgagcggatcatggagctggttctggggaagctggccaccaccaccactgacaccagctcggttccaaagttcacccatcatcagaataacaccatcacgctcaagaggagcttaattctctcaagcagacacggcatccggcgcaagctcatcaaacagctcggggagcacaagcgggtttaccagtgcaatatctgcagcaagatcttccagaacagcagcaacctgagcaggcacgtgcgctcgcatggtgacaagctgtttaagtgcgaagagtgtgcaaaattgttcagccgcaaagagagcctaaagcagcacgtttcctacaagcacagcaggaacgaggtggacggcgagtacaggtaccgctgcggcacttgtgagaagaccttccgcatcgagagcgcgctggagttccacaactgcaggacaggactcatagcacaccctggagagggggggcccggcggcagtcggcttagagacctaccagcaacctctccaagcacaagaagaagcacggcgacaagaagtttgcctgtgaggtctgcagcaagatgttctaccgcaaggacgtcatgctggaccaccagcgccggcacctggaaggagtgcggcgagtgaagcgagaggacctggaggccggtggggagaacctggtccgttacaagaaggagccttccgggtgcccggtgtgtggcaaggtgttctcctgccggagcaatatgaacaagcacctgctcacccacggcgacaagaagtacacctgcgagatctgcgggcgcaagttcttccgcgtggatgtgctcagggaccacatccatgtccacttcaaggacatcgcgttgatggatgaccaccagagggaagagtttatcggcaagatcgggatctcctcggaagaaaacgatgacaattctgacgagagcgcagactcggagcctcacaagtacagctgcaagcggtgccagctcaccttcggccgggggaaggagtacctgaagcacatcatggaggtgcacaaggagaagggctatggctgcagcatctgcaaccggcgctttgcactgaaggccacctaccacgcccacatggtcatccaccgtgaaaacctgccggaccccaacgtgcagaagtacatccacccctgcgagatctgcgggcggatcttcaacagcatcgggaacctggagcgccacaagctcatccacacaggtgtgaagagccacgcctgcgagcagtgtgggaagtcctttgccaggaaggacatgctgaaggagcacatgcgtgtgcacgacaatgtccgcgagtacctgtgtgccgagtgtgggaaaggcatgaagaccaagcacgcgctgcgccaccacatgaagctgcacaagggcatcaaggagtacgagtgcaaggagtgccaccgcaggttcgcgcagaaggtcaacatgctcaagcactgcaagcggcacacggggattaaagatttcatgtgtgaattgtgtgggaagacattcagcgagaggaacaccatggagacccacaagctcatccacacagtgggcaagcagtggacgtgctccgtgtgcgacaagaagtacgtgaccgagtacatgctgcagaagcacgttcagctcacacacgacaaggtggaggcgcagagctgccagctgtgcgggaccaaggtgtccaccagggcctccatgagccgacacatgcggcgcaagcaccccgaggtgctcgcggtgaggatcgatgacctggaccacctcccggagaccaccaccatcgacgcctcctccattggcatcgtccagcctgagctgactctggagcaggaggatttggccgaagggaagcacgggaaagctgccaagcgaagtcacaagagaaagcagaagccagaagaggaggcgggtgctccggtgcccgaggacgccaccttcagcgaatactcagagaaagagacggagttcacaggcagtgtaggcgacgagaccaattccgcagtacagagcattcagcaggtagtggtgaccctgggtgacccaaatgtgaccacaccatcgagctcagtcggcttaaccaacatcaccgtgacccccatcaccactgcggccgcgactcagtttaccaatctccagccggtggccgtggggcaccttaccacccctgaacgccagttacagctggacaactcaatcctgaccgtgacctttgataccgtcagcggctctgccatgttgcacaaccgccaaaatgacgtccagatccacccccagccggaagcctcgaacccacagtctgtggcccatttcatcaacctgacgaccctggtcaactccatcacgcccctggggagccagcttagtgaccagcacccgctcacgtggcgggcagtgccccagactgacgtcttgccaccctcgcagccgcaggcacccccacagcaggcggcccagccccaggtgcaggcggagcagcagcagcagcagatgtacagctactgagctgcgttccgggagactcggggcaagaactgcagagggatgtttgggatttgtttagatgtgtttgctggataccaaacaaacaaaaagtcatacattgcaatgtaaggttgacttagctttgcagagtatctccagatcccccgccagcaaccattacggtctgtcagcttaactctagaagggacctctggcaggccagagttttaaactggatggggctccacaccatgccttaccaaggcagtaagtcctgggccggggccgcatctgcctccccttacagaaccagtgttcgcccgacacagggttcgggaaagtgaagctgagagagaagcaggattttaagaggcaggagataagttattaggaacacaaatggttcattttcttttttcttttagagctcggttcctatgagaacacagacagtattcacaggtggcagcaggcagcagggaacattttctcctcacttctggatttttttgcaagcgagcacatagaagttaaagtaacgtgtattctctttgaactaggagtggagtcggttcttatacaactatgggctgaaaccatgaggcgtgctgagccgcacctgatcctgcaaccttcgaggtcatcacggtcatcatgtgcaaggggtcacgtgaggtcactgactccagctcaaaacgcatcttagtaatatccatgaatcgatttccaatagagtttttttccttttttttttttaactttatttcaaacatacattatgtgttcaagactgttatggccaatattgtgttttagttttatgttaacatgataaagtcatgtgcactgtaggaccatctgtccctgtccacccttcacagctgcccagatgcagagggtcgcgcggctgtgtgtgaggagtgagcctccctgctgcccccaggggctcctccgggttgtctcaggattctctgcaatccaaatgtatccattctggctgaagcccagccagaatcccgagtggaagaaacgggggaaaagtcatattttccttctgtttaaacttcaattccaaaggttggtgtatttcatgaccagttttctataaaaatattgaatgagtttggctctttacaatggaaaagtgtaggtatttctgaaacacagagaaaatgctatttcctgccaggtggtaatgaaagcagagaggttagttcactaatagaagcattaattgcccctaaaactgaatgtgcggtgaacagccaggtctgcgtgtgcggggacacgtgctgtcacgtctgtgtaccagtttcgggggcaggggccagggttgggggaggcacccagccctcctgctgcccacgacaagaaacactgagaggtgtggggagaagtttgctcttaactttcctggtactctgtttgtggccacagtgagaggacaaacctgccttaaggtgtcctgctttgccagttatcccagatcctgcactcactgggagtccatcttgaggaaacactggcatggctgagtaattgatcaggagcagtcctgatgttgccagcagaacaaaggatgattgtgtttttcaaaacgcaactttctcagcacttcactccaaacagcagacttttgaggacagggctggaatttgttttgtgcaatatatgccttcatgaactaaggaatgttcatccccaggcagcatgcaggagggtctgtggggctcacctcctcaccttacccaccatcactcgcgcctagctctcacctctcagttgaatgaatagtgggagatcatttgacttttaatttatgagaattattttatgttatttatgtatataattaactgttttatacatagtagtctcatcaaatgaattcgggcttggggtgatattgtctccattctccagatacaagtgctccaggcatccatggaatcagcaggagaccagggctcctaagatatatttttaaaaatcagtatcgatttctttttgcctttgcagaatctaaagggcaaatgacctcgcagagactcccaacgggctttgggctcatgacgaaacacccactagcattgatcttttattcctcttccctataaaataaaggccttggaaatcacaattttatttttttaaagaagttgttttagtgcctagagtaagaccgcatcaaatgttgttaaagaacctaatttagattgtgtggtatataccactgtttatctcaatacacagacacctcttacttcttgttataagtgagaactctaaagaaaaatcaaactcccaagttttctgtaaacatacgtggtcttaatagggtcactgtctgaggcaaaatgggttgtcttaaagcaattgctacaaatttgcatcaaagaaactagatagcaaaatacaacaaccatgtaccacccaggcagaagagtcctcacctatacgcagttctgcatattgatcatcatgacaggaagtatttcgttttttaactgatcccaggtgcacagatgtattcataaaggaagacattagatccagccattgtggccaccaggctctgtggacccatctcagtggagaattcgttttggacccgtggctccgtgcagctgtggactcgagtgccatccactggtgtgagtcttgcggggaggccacaggtacagctgctccccgtgaatcctggtctgtgggttgagaaggggctcgggcctctggaatgctctagcgtgtgacgtgttctcaggaaaacgttctgtgccaagtgccgcctcgctgtgtccggcatgggactgcgctggagggtccggcgtggaaggcagacctcctgtacctctatcgttcccatttgtggcatccaaaggcggaaggctcatggcttccccactagaggcggcgtcttgggctttcccattggattgtgaaaggcattaagactgtttggagatgttggctgtatttcctgtcacatcaggttgtatgatgacgaataaaaggtgctgtgacccgtgttttcaa

SEQ ID NO: 168557 - DNA, 6714 bp, Homo sapiens
  Payload ID: 13180
  Gene Symbol: PRDM15
  Gene Name: PR domain containing 15
  Uniprot ID: P57071
  ENST ID: ENST00000422911
  CDS Start-End: 103-3699
gtccacgccgcccgcgccccgcagtcccacccgcaggacccccggccgcgccagggtctcgcctgcgccccccgcgcccgcccgcggactacaagtcccgccatgccccgccgccgccccccggcttccggtgctgcgcagtttccggagcggatcgcaacccggagtccggatccgatcccgctctgcacattccaaaggcaggtgtcagagatggctgaagatgggagcgaagagatcatgttcatctggtgtgaagactgcagccagtaccacgactccgaatgtcccgagctgggcccagtggtcatggtcaaagactcctttgtgttaagcagggcaaggtcatcccttcctcccaacttggagatcagacgactggaagatggagccgagggggtgttcgccatcactcagctcgtcaagcggacacagttcggtccctttgagtccaggagggtcgccaaatgggaaaaggagtctgcatttcccctgaaggtgttccagaaggacgggcaccccgtgtgcttcgacacctccaacgaggatgactgcaactggatgatgctggtgcggccagcggcggaggccgagcaccagaacctgacggcctaccagcacggcagcgacgtgtacttcaccacctccagagacatccccccgggtaccgagctgcgcgtgtggtatgcggccttctatgccaagaagatggacaagcccatgctgaagcaggccggctctggcgtccacgctgcaggcaccccagaaaacagcgcccccgtggagtcggagcccagccagtgggcgtgtaaagtgtgttctgccaccttcctggagctgcagctcctcaatgaacatctgttgggccacttagaacaagccaaaagccttcctccaggcagccaaagcgaggcagcagctcccgagaaggagcaggacacaccccggggggaaccccctgcagtgcccgagagcgagaatgttgccaccaaagaacagaagaaaaagcctcgaagggggagaaaacccaaagtgtccaaagctgagcagcctctagtcatcgtggaagacaaggaacccacagagcaagtggcagagatcattaccgaggtccctccggatgagcctgtgagtgcaacgccagatgagcggatcatggagctggttctggggaagctggccaccaccaccactgacaccagctcggttccaaagttcacccatcatcagaataacaccatcacgctcaagaggagcttaattctctcaagcagacacggcatccggcgcaagctcatcaaacagctcggggagcacaagcgggtttaccagtgcaatatctgcagcaagatcttccagaacagcagcaacctgagcaggcacgtgcgctcgcatggtgacaagctgtttaagtgcgaagagtgtgcaaaattgttcagccgcaaagagagcctaaagcagcacgtttcctacaagcacagcaggaacgaggtggacggcgagtacaggtaccgctgcggcacttgtgagaagaccttccgcatcgagagcgcgctggagttccacaactgcaggacaggactcatagcacaccctggagagggggggcccggcggcagtcggcttagagacctaccagatgacaagacgttccaatgtgagatgtgtttcagattcttctccaccaacagcaacctctccaagcacaagaagaagcacggcgacaagaagtttgcctgtgaggtctgcagcaagatgttctaccgcaaggacgtcatgctggaccaccagcgccggcacctggaaggagtgcggcgagtgaagcgagaggacctggaggccggtggggagaacctggtccgttacaagaaggagccttccgggtgcccggtgtgtggcaaggtgttctcctgccggagcaatatgaacaagcacctgctcacccacggcgacaagaagtacacctgcgagatctgcgggcgcaagttcttccgcgtggatgtgctcagggaccacatccatgtccacttcaaggacatcgcgttgatggatgaccaccagagggaagagtttatcggcaagatcgggatctcctcggaagaaaacgatgacaattctgacgagagcgcagactcggagcctcacaagtacagctgcaagcggtgccagctcaccttcggccgggggaaggagtacctgaagcacatcatggaggtgcacaaggagaagggctatggctgcagcatctgcaaccggcgctttgcactgaaggccacctaccacgcccacatggtcatccaccgtgaaaacctgccggaccccaacgtgcagaagtacatccacccctgcgagatctgcgggcggatcttcaacagcatcgggaacctggagcgccacaagctcatccacacaggtgtgaagagccacgcctgcgagcagtgtgggaagtcctttgccaggaaggacatgctgaaggagcacatgcgtgtgcacgacaatgtccgcgagtacctgtgtgccgagtgtgggaaaggcatgaagaccaagcacgcgctgcgccaccacatgaagctgcacaagggcatcaaggagtacgagtgcaaggagtgccaccgcaggttcgcgcagaaggtcaacatgctcaagcactgcaagcggcacacggggattaaagatttcatgtgtgaattgtgtgggaagacattcagcgagaggaacaccatggagacccacaagctcatccacacagtgggcaagcagtggacgtgctccgtgtgcgacaagaagtacgtgaccgagtacatgctgcagaagcacgttcagctcacacacgacaaggtggaggcgcagagctgccagctgtgcgggaccaaggtgtccaccagggcctccatgagccgacacatgcggcgcaagcaccccgaggtgctcgcggtgaggatcgatgacctggaccacctcccggagaccaccaccatcgacgcctcctccattggcatcgtccagcctgagctgactctggagcaggaggatttggccgaagggaagcacgggaaagctgccaagcgaagtcacaagagaaagcagaagccagaagaggaggcgggtgctccggtgcccgaggacgccaccttcagcgaatactcagagaaagagacggagttcacaggcagtgtaggcgacgagaccaattccgcagtacagagcattcagcaggtagtggtgaccctgggtgacccaaatgtgaccacaccatcgagctcagtcggcttaaccaacatcaccgtgacccccatcaccactgcggccgcgactcagtttaccaatctccagccggtggccgtggggcaccttaccacccctgaacgccagttacagctggacaactcaatcctgaccgtgacctttgataccgtcagcggctctgccatgttgcacaaccgccaaaatgacgtccagatccacccccagccggaagcctcgaacccacagtctgtggcccatttcatcaacctgacgaccctggtcaactccatcacgcccctggggagccagcttagtgaccagcacccgctcacgtggcgggcagtgccccagactgacgtcttgccaccctcgcagccgcaggcacccccacagcaggcggcccagccccaggtgcaggcggagcagcagcagcagcagatgtacagctactgagctgcgttccgggagactcggggcaagaactgcagagggatgtttgggatttgtttagatgtgtttgctggataccaaacaaacaaaaagtcatacattgcaatgtaaggttgacttagctttgcagagtatctccagatcccccgccagcaaccattacggtctgtcagcttaactctagaagggacctctggcaggccagagttttaaactggatggggctccacaccatgccttaccaaggcagtaagtcctgggccggggccgcatctgcctccccttacagaaccagtgttcgcccgacacagggttcgggaaagtgaagctgagagagaagcaggattttaagaggcaggagataagttattaggaacacaaatggttcattttcttttttcttttagagctcggttcctatgagaacacagacagtattcacaggtggcagcaggcagcagggaacattttctcctcacttctggatttttttgcaagcgagcacatagaagttaaagtaacgtgtattctctttgaactaggagtggagtcggttcttatacaactatgggctgaaaccatgaggcgtgctgagccgcacctgatcctgcaaccttcgaggtcatcacggtcatcatgtgcaaggggtcacgtgaggtcactgactccagctcaaaacgcatcttagtaatatccatgaatcgatttccaatagagtttttttccttttttttttttaactttatttcaaacatacattatgtgttcaagactgttatggccaatattgtgttttagttttatgttaacatgataaagtcatgtgcactgtaggaccatctgtccctgtccacccttcacagctgcccagatgcagagggtcgcgcggctgtgtgtgaggagtgagcctccctgctgcccccaggggctcctccgggttgtctcaggattctctgcaatccaaatgtatccattctggctgaagcccagccagaatcccgagtggaagaaacgggggaaaagtcatattttccttctgtttaaacttcaattccaaaggttggtgtatttcatgaccagttttctataaaaatattgaatgagtttggctctttacaatggaaaagtgtaggtatttctgaaacacagagaaaatgctatttcctgccaggtggtaatgaaagcagagaggttagttcactaatagaagcattaattgcccctaaaactgaatgtgcggtgaacagccaggtctgcgtgtgcggggacacgtgctgtcacgtctgtgtaccagtttcgggggcaggggccagggttgggggaggcacccagccctcctgctgcccacgacaagaaacactgagaggtgtggggagaagtttgctcttaactttcctggtactctgtttgtggccacagtgagaggacaaacctgccttaaggtgtcctgctttgccagttatcccagatcctgcactcactgggagtccatcttgaggaaacactggcatggctgagtaattgatcaggagcagtcctgatgttgccagcagaacaaaggatgattgtgtttttcaaaacgcaactttctcagcacttcactccaaacagcagacttttgaggacagggctggaatttgttttgtgcaatatatgccttcatgaactaaggaatgttcatccccaggcagcatgcaggagggtctgtggggctcacctcctcaccttacccaccatcactcgcgcctagctctcacctctcagttgaatgaatagtgggagatcatttgacttttaatttatgagaattattttatgttatttatgtatataattaactgttttatacatagtagtctcatcaaatgaattcgggcttggggtgatattgtctccattctccagatacaagtgctccaggcatccatggaatcagcaggagaccagggctcctaagatatatttttaaaaatcagtatcgatttctttttgcctttgcagaatctaaagggcaaatgacctcgcagagactcccaacgggctttgggctcatgacgaaacacccactagcattgatcttttattcctcttccctataaaataaaggccttggaaatcacaattttatttttttaaagaagttgttttagtgcctagagtaagaccgcatcaaatgttgttaaagaacctaatttagattgtgtggtatataccactgtttatctcaatacacagacacctcttacttcttgttataagtgagaactctaaagaaaaatcaaactcccaagttttctgtaaacatacgtggtcttaatagggtcactgtctgaggcaaaatgggttgtcttaaagcaattgctacaaatttgcatcaaagaaactagatagcaaaatacaacaaccatgtaccacccaggcagaagagtcctcacctatacgcagttctgcatattgatcatcatgacaggaagtatttcgttttttaactgatcccaggtgcacagatgtattcataaaggaagacattagatccagccattgtggccaccaggctctgtggacccatctcagtggagaattcgttttggacccgtggctccgtgcagctgtggactcgagtgccatccactggtgtgagtcttgcggggaggccacaggtacagctgctccccgtgaatcctggtctgtgggttgagaaggggctcgggcctctggaatgctctagcgtgtgacgtgttctcaggaaaacgttctgtgccaagtgccgcctcgctgtgtccggcatgggactgcgctggagggtccggcgtggaaggcagacctcctgtacctctatcgttcccatttgtggcatccaaaggcggaaggctcatggcttccccactagaggcggcgtcttgggctttcccattggattgtgaaaggcattaagactgtttggagatgttggctgtatttcctgtcacatcaggttgtatgatgacgaataaaaggtgctgtgacccgtgttttcaa

SEQ ID NO: 168558 - DNA, 6124 bp, Homo sapiens
  Payload ID: 13180
  Gene Symbol: PRDM15
  Gene Name: PR domain containing 15
  Uniprot ID: P57071
  ENST ID: ENST00000433067
  CDS Start-End: 112-4635
cgctgccccgtccacgccgcccgcgccccgcagtcccacccgcaggacccccggccgcgccagggtctcgcctgcgccccccgcgcccgcccgcggactacaagtcccgccatgccccgccgccgccccccggcttccggtgctgcgcagtttccggagcggatcgcaacccggagtccggatccgatcccgctctgcacattccaaaggcagccgcgcgccgccccggtccagccgccatgccgactgttctttgttacattcgccggctgcgggcaccgttggcgatcggagtcaaaacccggctggatttcccggagccgctccgggatcgccctgcgcgccgcccgcccgccggggtcttcgccgccccggcccgcggccccgcggcccccgccgccgggcggcgtcgtcgccgaggccccaggggatgtcgttatcccccgccctcgggtacagcccatgcgggtcgcacgggggggtccctggacccccaaccccgcgtttagagaagctgagtcctggtcccagattgggaaccagagggtcagtgagcagctcttggaaacatctctagggaatgaggtgtccgacactgagccactgagccctgcgagtgcaggcctgcgacgcaatcctgccctacctcctggaccctttgcacaaaacttttcctgggggaaccaggaaaatctgcccccagccctggggaagattgcgaacggaggaggaactggggcaggcaaggccgaatgcggctatgaaactgagtcacacttgctagagccgcacgagatacctttgaacgtgaatacacacaagttcagtgactgtgagtttccatatgagttttgcacggtctgcttttcacccttcaagctgctggggatgagcggggtggagggcgtgtggaatcagcattcaagaagtgccagcatgcacactttcctaaaccactcagcaacgggcatcagagaagcaggttgcaggaaggacatgccggtgtcagagatggctgaagatgggagcgaagagatcatgttcatctggtgtgaagactgcagccagtaccacgactccgaatgtcccgagctgggcccagtggtcatggtcaaagactcctttgtgttaagcagggcaaggtcttggcctgccagcggacacgtgcacacccaggcggggcaggggatgcggggttatgaggacagggacagggctgacccacagcagcttccagaagcagtccctgcaggcctggtgaggcggctcagtgggcagcagctgccctgccgttccaccctcacctgggggaggctgtgccacctggtggcccagggcaggtcatcccttcctcccaacttggagatcagacgactggaagatggagccgagggggtgttcgccatcactcagctcgtcaagcggacacagttcggtccctttgagtccaggagggtcgccaaatgggaaaaggagtctgcatttcccctgaaggtgttccagaaggacgggcaccccgtgtgcttcgacacctccaacgaggatgactgcaactggatgatgctggtgcggccagcggcggaggccgagcaccagaacctgacggcctaccagcacggcagcgacgtgtacttcaccacctccagagacatccccccgggtaccgagctgcgcgtgtggtatgcggccttctatgccaagaagatggacaagcccatgctgaagcaggccggctctggcgtccacgctgcaggcaccccagaaaacagcgcccccgtggagtcggagcccagccagtgggcgtgtaaagtgtgttctgccaccttcctggagctgcagctcctcaatgaacatctgttgggccacttagaacaagccaaaagccttcctccaggcagccaaagcgaggcagcagctcccgagaaggagcaggacacaccccggggggaaccccctgcagtgcccgagagcgagaatgttgccaccaaagaacagaagaaaaagcctcgaagggggagaaaacccaaagtgtccaaagctgagcagcctctagtcatcgtggaagacaaggaacccacagagcaagtggcagagatcattaccgaggtccctccggatgagcctgtgagtgcaacgccagatgagcggatcatggagctggttctggggaagctggccaccaccaccactgacaccagctcggttccaaagttcacccatcatcagaataacaccatcacgctcaagaggagcttaattctctcaagcagacacggcatccggcgcaagctcatcaaacagctcggggagcacaagcgggtttaccagtgcaatatctgcagcaagatcttccagaacagcagcaacctgagcaggcacgtgcgctcgcatggtgacaagctgtttaagtgcgaagagtgtgcaaaattgttcagccgcaaagagagcctaaagcagcacgtttcctacaagcacagcaggaacgaggtggacggcgagtacaggtaccgctgcggcacttgtgagaagaccttccgcatcgagagcgcgctggagttccacaactgcaggacagatgacaagacgttccaatgtgagatgtgtttcagattcttctccaccaacagcaacctctccaagcacaagaagaagcacggcgacaagaagtttgcctgtgaggtctgcagcaagatgttctaccgcaaggacgtcatgctggaccaccagcgccggcacctggaaggagtgcggcgagtgaagcgagaggacctggaggccggtggggagaacctggtccgttacaagaaggagccttccgggtgcccggtgtgtggcaaggtgttctcctgccggagcaatatgaacaagcacctgctcacccacggcgacaagaagtacacctgcgagatctgcgggcgcaagttcttccgcgtggatgtgctcagggaccacatccatgtccacttcaaggacatcgcgttgatggatgaccaccagagggaagagtttatcggcaagatcgggatctcctcggaagaaaacgatgacaattctgacgagagcgcagactcggagcctcacaagtacagctgcaagcggtgccagctcaccttcggccgggggaaggagtacctgaagcacatcatggaggtgcacaaggagaagggctatggctgcagcatctgcaaccggcgctttgcactgaaggccacctaccacgcccacatggtcatccaccgtgaaaacctgccggaccccaacgtgcagaagtacatccacccctgcgagatctgcgggcggatcttcaacagcatcgggaacctggagcgccacaagctcatccacacaggtgtgaagagccacgcctgcgagcagtgtgggaagtcctttgccaggaaggacatgctgaaggagcacatgcgtgtgcacgacaatgtccgcgagtacctgtgtgccgagtgtgggaaaggcatgaagaccaagcacgcgctgcgccaccacatgaagctgcacaagggcatcaaggagtacgagtgcaaggagtgccaccgcaggttcgcgcagaaggtcaacatgctcaagcactgcaagcggcacacggggattaaagatttcatgtgtgaattgtgtgggaagacattcagcgagaggaacaccatggagacccacaagctcatccacacagtgggcaagcagtggacgtgctccgtgtgcgacaagaagtacgtgaccgagtacatgctgcagaagcacgttcagctcacacacgacaaggtggaggcgcagagctgccagctgtgcgggaccaaggtgtccaccagggcctccatgagccgacacatgcggcgcaagcaccccgaggtgctcgcggtgaggatcgatgacctggaccacctcccggagaccaccaccatcgacgcctcctccattggcatcgtccagcctgagctgactctggagcaggaggatttggccgaagggaagcacgggaaagctgccaagcgaagtcacaagagaaagcagaagccagaagaggaggcgggtgctccggtgcccgaggacgccaccttcagcgaatactcagagaaagagacggagttcacaggcagtgtaggcgacgagaccaattccgcagtacagagcattcagcaggtagtggtgaccctgggtgacccaaatgtgaccacaccatcgagctcagtcggcttaaccaacatcaccgtgacccccatcaccactgcggccgcgactcagtttaccaatctccagccggtggccgtggggcaccttaccacccctgaacgccagttacagctggacaactcaatcctgaccgtgacctttgataccgtcagcggctctgccatgttgcacaaccgccaaaatgacgtccagatccacccccagccggaagcctcgaacccacagtctgtggcccatttcatcaacctgacgaccctggtcaactccatcacgcccctggggagccagcttagtgaccagcacccgctcacgtggcgggcagtgccccagactgacgtcttgccaccctcgcagccgcaggcacccccacagcaggcggcccagccccaggtgcaggcggagcagcagcagcagcagatgtacagctactgagctgcgttccgggagactcggggcaagaactgcagagggatgtttgggatttgtttagatgtgtttgctggataccaaacaaacaaaaagtcatacattgcaatgtaaggttgacttagctttgcagagtatctccagatcccccgccagcaaccattacggtctgtcagcttaactctagaagggacctctggcaggccagagttttaaactggatggggctccacaccatgccttaccaaggcagtaagtcctgggccggggccgcatctgcctccccttacagaaccagtgttcgcccgacacagggttcgggaaagtgaagctgagagagaagcaggattttaagaggcaggagataagttattaggaacacaaatggttcattttcttttttcttttagagctcggttcctatgagaacacagacagtattcacaggtggcagcaggcagcagggaacattttctcctcacttctggatttttttgcaagcgagcacatagaagttaaagtaacgtgtattctctttgaactaggagtggagtcggttcttatacaactatgggctgaaaccatgaggcgtgctgagccgcacctgatcctgcaaccttcgaggtcatcacggtcatcatgtgcaaggggtcacgtgaggtcactgactccagctcaaaacgcatcttagtaatatccatgaatcgatttccaatagagtttttttccttttttttttttaactttatttcaaacatacattatgtgttcaagactgttatggccaatattgtgttttagttttatgttaacatgataaagtcatgtgcactgtaggaccatctgtccctgtccacccttcacagctgcccagatgcagagggtcgcgcggctgtgtgtgaggagtgagcctccctgctgcccccaggggctcctccgggttgtctcaggattctctgcaatccaaatgtatccattctggctgaagcccagccagaatcccgagtggaagaaacgggggaaaagtcatattttccttctgtttaaacttcaattccaaaggtgcacagatgtattcataaaggaagacattagatccagccattgtggccaccaggctctgtggacccatctcagtggagaattcgttttggacccgtggctccgtgcagctgtggactcgagtgccatccactggtgtgagtcttgcggggaggccacaggaaaacgttctgtgccaagtgccgcctcgctgtgtccggcatgggactgcgctggagggtccggcgtggaaggcagacctcctgtacctctatcgttcccatttgtggcatccaaaggcggaaggctcatggcttccccactagaggcggcgtcttgggctttcccattggattgtgaaaggcattaagactgtttggagatgttggctgtatttcctgtcacatcaggttgtatgatgacgaataaaaggtgctgtgacccgtgttttcaa

SEQ ID NO: 168559 - DNA, 4992 bp, Homo sapiens
  Payload ID: 13180
  Gene Symbol: PRDM15
  Gene Name: PR domain containing 15
  ENST ID: ENST00000447016
  CDS Start-End: 78-3503
gttcccaagcagtgctggcactgctggttcctggtccagggaccacattttgaaatcactaatgtaaggtgtcagagatggctgaagatgggagcgaagagatcatgttcatctggtgtgaagactgcagccagtaccacgactccgaatgtcccgagctgggcccagtggtcatggtcaaagactcctttgtgttaagcagggcaaggtcatcccttcctcccaacttggagatcagacgactggaagatggagccgagggggtgttcgccatcactcagctcgtcaagcggacacagttcggtccctttgagtccaggagggtcgccaaatgggaaaaggagtctgcatttcccctgaaggtgttccagaaggacgggcaccccgtgtgcttcgacacctccaacgaggatgactgcaactggatgatgctggtgcggccagcggcggaggccgagcaccagaacctgacggcctaccagcacggcagcgacgtgtacttcaccacctccagagacatccccccgggtaccgagctgcgcgtgtggtatgcggccttctatgccaagaagatggacaagcccatgctgaagcaggccggctctggcgtccacgctgcaggcaccccagaaaacagcgcccccgtggagtcggagcccagccagtgggcgtgtaaagtgtgttctgccaccttcctggagctgcagctcctcaatgaacatctgttgggccacttagaacaagccaaaagccttcctccaggcagccaaagcgaggcagcagctcccgagaaggagcaggacacaccccggggggaaccccctgcagtgcccgagagcgagaatgttgccaccaaagaacagaagaaaaagcctcgaagggggagaaaacccaaagtgtccaaagctgagcagcctctagtcatcgtggaagacaaggaacccacagagcaagtggcagagatcattaccgaggtccctccggatgagcctgtgagtgcaacgccagatgagcggatcatggagctggttctggggaagctggccaccaccaccactgacaccagctcggttccaaagttcacccatcatcagaataacaccatcacgctcaagaggagcttaattctctcaagcagacacggcatccggcgcaagctcatcaaacagctcggggagcacaagcgggtttaccagtgcaatatctgcagcaagatcttccagaacagcagcaacctgagcaggcacgtgcgctcgcatggtgacaagctgtttaagtgcgaagagtgtgcaaaattgttcagccgcaaagagagcctaaagcagcacgtttcctacaagcacagcaggaacgaggtggacggcgagtacaggtaccgctgcggcacttgtgagaagaccttccgcatcgagagcgcgctggagttccacaactgcaggacagatgacaagacgttccaatgtgagatgtgtttcagattcttctccaccaacagcaacctctccaagcacaagaagaagcacggcgacaagaagtttgcctgtgaggtctgcagcaagatgttctaccgcaaggacgtcatgctggaccaccagcgccggcacctggaaggagtgcggcgagtgaagcgagaggacctggaggccggtggggagaacctggtccgttacaagaaggagccttccgggtgcccggtgtgtggcaaggtgttctcctgccggagcaatatgaacaagcacctgctcacccacggcgacaagaagtacacctgcgagatctgcgggcgcaagttcttccgcgtggatgtgctcagggaccacatccatgtccacttcaaggacatcgcgttgatggatgaccaccagagggaagagtttatcggcaagatcgggatctcctcggaagaaaacgatgacaattctgacgagagcgcagactcggagcctcacaagtacagctgcaagcggtgccagctcaccttcggccgggggaaggagtacctgaagcacatcatggaggtgcacaaggagaagggctatggctgcagcatctgcaaccggcgctttgcactgaaggccacctaccacgcccacatggtcatccaccgtgaaaacctgccggaccccaacgtgcagaagtacatccacccctgcgagatctgcgggcggatcttcaacagcatcgggaacctggagcgccacaagctcatccacacaggtgtgaagagccacgcctgcgagcagtgtgggaagtcctttgccaggaaggacatgctgaaggagcacatgcgtgtgcacgacaatgtccgcgagtacctgtgtgccgagtgtgggaaaggcatgaagaccaagcacgcgctgcgccaccacatgaagctgcacaagggcatcaaggagtacgagtgcaaggagtgccaccgcaggttcgcgcagaaggtcaacatgctcaagcactgcaagcggcacacggggattaaagatttcatgtgtgaattgtgtgggaagacattcagcgagaggaacaccatggagacccacaagctcatccacacagtgggcaagcagtggacgtgctccgtgtgcgacaagaagtacgtgaccgagtacatgctgcagaagcacgttcagctcacacacgacaaggtggaggcgcagagctgccagctgtgcgggaccaaggtgtccaccagggcctccatgagccgacacatgcggcgcaagcaccccgaggtgctcgcggtgaggatcgatgacctggaccacctcccggagaccaccaccatcgacgcctcctccattggcatcgtccagcctgagctgactctggagcaggaggatttggccgaagggaagcacgggaaagctgccaagcgaagtcacaagagaaagcagaagccagaagaggaggcgggtgctccggtgcccgaggacgccaccttcagcgaatactcagagaaagagacggagttcacaggcagtgtaggcgacgagaccaattccgcagtacagagcattcagcaggtagtggtgaccctgggtgacccaaatgtgaccacaccatcgagctcagtcggcttaaccaacatcaccgtgacccccatcaccactgcggccgcgactcagtttaccaatctccagccggtggccgtggggcaccttaccacccctgaacgccagttacagctggacaactcaatcctgaccgtgacctttgataccgtcagcggctctgccatgttgcacaaccgccaaaatgacgtccagatccacccccagccggaagcctcgaacccacagtctgtggcccatttcatcaacctgacgaccctggtcaactccatcacgcccctggggagccagcttagtgaccagcacccgctcacgtggcgggcagtgccccagactgacgtcttgccaccctcgcagccgcaggcacccccacagcaggcggcccagccccaggtgcaggcggagcagcagcagcagcagatgtacagctactgagctgcgttccgggagactcggggcaagaactgcagagggatgtttgggatttgtttagatgtgtttgctggataccaaacaaacaaaaagtcatacattgcaatgtaaggttgacttagctttgcagagtatctccagatcccccgccagcaaccattacggtctgtcagcttaactctagaagggacctctggcaggccagagttttaaactggatggggctccacaccatgccttaccaaggcagtaagtcctgggccggggccgcatctgcctccccttacagaaccagtgttcgcccgacacagggttcgggaaagtgaagctgagagagaagcaggattttaagaggcaggagataagttattaggaacacaaatggttcattttcttttttcttttagagctcggttcctatgagaacacagacagtattcacaggtggcagcaggcagcagggaacattttctcctcacttctggatttttttgcaagcgagcacatagaagttaaagtaacgtgtattctctttgaactaggagtggagtcggttcttatacaactatgggctgaaaccatgaggcgtgctgagccgcacctgatcctgcaaccttcgaggtcatcacggtcatcatgtgcaaggggtcacgtgaggtcactgactccagctcaaaacgcatcttagtaatatccatgaatcgatttccaatagagtttttttccttttttttttttaactttatttcaaacatacattatgtgttcaagactgttatggccaatattgtgttttagttttatgttaacatgataaagtcatgtgcactgtaggaccatctgtccctgtccacccttcacagctgcccagatgcagagggtcgcgcggctgtgtgtgaggagtgagcctccctgctgcccccaggggctcctccgggttgtctcaggattctctgcaatccaaatgtatccattctggctgaagcccagccagaatcccgagtggaagaaacgggggaaaagtcatattttccttctgtttaaacttcaattccaaaggtgcacagatgtattcataaaggaagacattagatccagccattgtggccaccaggctctgtggacccatctcagtggagaattcgttttggacccgtggctccgtgcagctgtggactcgagtgccatccactggtgtgagtcttgcggggaggccacaggaaaacgttctgtgccaagtgccgcctcgctgtgtccggcatgggactgcgctggagggtccggcgtggaaggcagacctcctgtacctctatcgttcccatttgtggcatccaaaggcggaaggctcatggcttccccactagaggcggcgtcttgggctttcccattggattgtgaaaggcattaagactgtttggagatgttggctgtatttcctgtcacatcaggttgtatgatgacgaataaaaggtgctgtgacccgtgttttcaa

SEQ ID NO: 168560 - DNA, 8690 bp, Homo sapiens
  Payload ID: 13181
  Gene Symbol: PRDM16
  Gene Name: PR domain containing 16
  Uniprot ID: Q9HAZ2
  ENST ID: ENST00000270722
  CDS Start-End: 50-3880
gctgcttctggactcaaggaggaggagagagattccgcgagccgacaccatgcgatccaaggcgagggcgaggaagctagccaaaagtgacggtgacgttgtaaataatatgtatgagcccaaccgggacctgctggccagccacagcgcggaggacgaggccgaggacagtgccatgtcgcccatccccgtggggccaccgtcccccttccccaccagcgaggacttcacccccaaggagggctcgccgtacgaggcccctgtctacattcctgaagacattccgatcccagcagacttcgagctccgagagtcctccatcccaggggctggcctgggggtctgggccaagaggaagatggaagccggggagaggctgggcccctgcgtggtggtgccccgggcggcggcaaaggagacagacttcggatgggagcaaatactgacggacgtggaagtgtcgccccaggaaggctgcatcacaaagatctccgaagacctgggcagtgagaagttctgcgtggatgcaaatcaggcgggggctggcagctggctcaagtacatccgtgtggcgtgctcctgcgatgaccagaacctcaccatgtgtcagatcagtgagcagatttactataaagtcattaaggacattgagccaggtgaggagctgctggtgcacgtgaaggaaggcgtctaccccctgggcacagtgccgcccggcctggacgaggagcccacgttccgctgtgacgagtgtgacgaactcttccagtccaagctggacctgcggcgccataagaagtacacgtgtggctcagtgggggctgcgctctacgagggcctggctgaggagctcaagcccgagggccttggcggtggcagcggccaagcccacgagtgcaaggactgcgagcggatgttccccaacaagtacagcctggagcagcacatggtcatccacacggaggagcgcgagtacaaatgcgaccagtgtcccaaggccttcaactggaagtccaacctcatccgccaccagatgtcccacgacagcggcaaacgcttcgaatgtgaaaactgcgtgaaggtgttcacggaccccagcaaccttcagcggcacatccgctcgcagcacgtgggcgctcgggcccacgcctgccccgactgcgggaagaccttcgccacgtcctccggcctcaagcagcacaagcatatccacagcacggtgaagcctttcatatgtgaggtctgccacaagtcctacacgcagttctccaacctgtgccggcacaagcggatgcacgccgactgccgcacgcagatcaagtgcaaggactgtggccagatgttcagcactacctcctccctcaacaagcaccggcgcttctgcgagggcaagaaccattacacgccgggcggcatctttgccccgggcctgcccttgacccccagccccatgatggacaaggcaaaaccctcccccagcctcaatcacgccagcctgggcttcaacgagtactttccctccaggccgcacccggggagcctgcccttctccacggcgcctcccacgttccccgcactcacccccggcttcccgggcatcttccctccatccttgtacccccggccgcctctgctacctcccacatcgctgctcaagagccccctgaaccacacccaggacgccaagctccccagtcccctggggaacccagccctgcccctggtctccgccgtcagcaacagcagccagggcacgacggcagctgcggggcccgaggagaagttcgagagccgcctggaggactcctgtgtggagaagctgaagaccaggagcagcgacatgtcggacggcagtgactttgaggacgtcaacaccaccacggggaccgacctggacacgaccacggggacgggctcggacctggacagcgacgtggacagcgaccctgacaaggacaagggcaagggcaagtccgccgagggccagcccaagtttgggggcggcttggcgcccccgggggccccgaacagcgtggccgaggtgcctgtcttctattcccagcactcattcttcccgccacccgacgagcagctgctgactgcaacgggcgccgccggggactccatcaaggccatcgcatccattgccgagaagtactttggccccggcttcatggggatgcaggagaagaagctgggctcgctcccctaccactcggcgttccccttccagttcctgcccaacttcccccactccctttaccccttcacggaccgagccctcgcccacaacttgctggtcaaggccgagccaaagtcaccccgggacgccctcaaggtgggcggccccagtgccgagtgcccctttgatctcaccaccaagcccaaagacgtgaagcccatcctgcccatgcccaagggcccctcggcccccgcatccggcgaggagcagccgctggacctgagcatcggcagccgggcccgtgccagccaaaacggcggcgggcgggagccccgcaagaaccacgtctatggggaacgcaagctgggcgccggcgaggggctgccccaggtgtgcccggcgcggatgccccagcagcccccgctccactacgccaagccctcgcccttcttcatggaccccatctacagcagggtagaaaagcggaaggtcacagaccccgtgggagccctgaaggagaagtacctgcggccgtccccgctgctcttccacccccagatgtcagccatagagaccatgacagagaagctggagagctttgcagccatgaaggcggactcgggcagctccctgcagcccctcccccaccaccccttcaacttccggtccccacccccaacgctctccgaccccatcctcaggaagggcaaggagcgatacacgtgcaggtactgtgggaagatcttccccagatcagccaatctcaccagacacctgaggacgcacactggggagcagccgtacaggtgtaagtactgcgaccgctccttcagcatctcttcgaacctccagcggcacgtccggaacatccacaacaaggagaagcctttcaagtgccacctgtgcaaccgctgcttcgggcagcagaccaacctggaccggcacctcaagaagcacgagcacgagaacgcaccagtgagccagcaccccggggtcctcacgaaccacctggggaccagcgcgtcctctcccacctcagagtcggacaaccacgcacttttagacgagaaagaagactcttatttctcggaaatcagaaactttattgccaatagtgagatgaaccaagcatcaacgcgaacagagaaacgggcggacatgcagatcgtggacggcagtgcccagtgtccaggcctagccagtgagaagcaggaggacgtggaggaggaggacgacgatgacctggaggaggacgatgaggacagcctggccgggaagtcgcaggatgacaccgtgtcccccgcacccgagccccaggccgcctacgaggatgaggaggatgaggagccagccgcctccctggccgtgggctttgaccacacccgaaggtgtgctgaggaccacgaaggcggtctgttagctttggagccgatgccgacttttgggaaggggctggacctccgcagagcagctgaggaagcatttgaagttaaagatgtgcttaattccaccttagattctgaggctttaaaacatacactgtgcaggcaggctaagaaccaggcatatgcaatgatgctgtccctttccgaagacactcctctccacaccccctcccagggttctctggacgcttggttgaaggtcactggagccacgtcggagtctggagcatttcaccccatcaaccacctctgacgggctgggcagccgggggccggtggccagagcgagggcaccagccacgaaggacggaggcgggcggggccccggagaaccctgtccctgcgtgtggccactcctcagcatcctccccacccaccatggttcattccgacttttccaatggaaactcagatcccaaaagtccctaaagcagtcgtagagtctcaccatctccaaggattggtcttgagaacactgttcagtgacggccatgcaggtggccgtccaaagacagccaacggagctgcctcgcagaatcagccagtgggcaggtggacgctctgctgagacagaagctggtggccactgccgggtgcccgcgtggggtcgcggaagggaatggatagactggtgtgctcaaaagagagagatcactcaaatgatttttataatgaaatgacaagaataacccttttggtaaccgtattgactgcagagtctatttaagcatgtggttttaaaaatagacagtattttttaaaaatcaaaaaatgacttgcaaattgttttttaaaagtaattttgcattgctttgaaatttgagctcatttgcaaacccgagtctgcctgggaacccgcactgtgcctgggtgtattctttatactgtagataatggagaaattttctatctctgtccctatttgtataagccaaggtgatgctgggtgccccgaggcagaacaagaggcgcggggccacacccgtgaaccatgcagacggccgaagaagtcttaggcagggcgccctgggctgcaggcctgcccgaggctgggatgggaagtgtgcctgccctcgtgtgacatggaattggtgtcaggaccgccacgtggccttcagaggaatccacaggtccccacccaagatccctcaattatatggggaagtcgagggcctgtggcttggatccgccatgcagagatgtggccgggcacccatcttccttccctcctctgtccctgcctcggccaccccacgcgggaacccagcgccgtcctctgaaggcagggccttggccacgtcctgggtctcccacctcccacctgaccccagcggctccggtgtcctccacgtggctgccctggggagcaatcccagcggatcgctccgggccaccaagccgcacctgtgcctgagactccggatggacgacacagtcgtcacgtcgctcttcctgcgggttcttggcgagacacagcttgagaacagaagggcgtcgggggaacctgccgcaaggagcagagacagcacagccccccgggcccagccgcctccctctcttgggacgcaacttcttccccactcggatgggctttaaattattcccataggggccaatttcaaataataatttttttccctgatggaatttaccttaatctgtatataacttgtaattttttctaattcatttcttttcttattttatttcctccttaacagtatttttggcattagacattcttattgtgaagaaataatgttaatataagtatctggtgaaggaccaaaaccgtgtgataaggttgtgtgtcgtgtgggagtggggcgattttttatgtgccaaatacccccgtcccccccatgaatcctgctgtccctgctgccgtttaccagacaatcatatgtttttgttaaatttgcgtttcagttacatttgcatttaagacaagtgttctatttatttcttgtattgtttggaagaaaaaatgatgatagagtcccaaaaagaagagaaaaaaaatgcccaagttgccctttaaaaaaaaagagcgtaaatacaaacaggagtggtgcaagccgccttggtgtgggtttgtgtcacgtgtggacatctcctcaggctttgtgtcacgcgtggacatctcctcaggctgtccccagcggtgacgggaggtgtcctggctgctccaggacaaaagacaatcgtctctgtgggtgccgggtggtccaggcttgcactgaagacgtgccacggggaggctcctgcaggaggctcaacccgacggatcacagtgaaagggattcctcccacgccagatctgcacaacgaggcaagacaggacccacctgtgcgtgcgctggggccatggggtggccccgccggggcagcgggggagctgcctgcagaagagccagctggcgtgtcgggaaggatccaggatctgcaaacacaactgctcaggccttctcacgcgtttccacaacatcccctgggtcagacccaccaggtaccccgtaggaatttccagtttcccttgatctagatgggattcttataaaaattcaacctcagacataaacaccccatttctgtaaacccaaattatatggtttcttctgcgaaagagtaaggtgtgtgcttttttttttttgcaatatgaccccgtctctctgaagtgggacattcggacggatggagccctcagcgtgtcttttcagcaggagcagaaccgatgagagccgcccttaccgttggtctccggatcccccagtcccatcccgccgttttcggctgtcttcctaaccgtcctgtcttctcttggcgctctttccttccacctttcccaagagtcctggttgcacgttttaagtcatatattttcgtccccctgaaaatgatggcaagcccagtttctcctgagcattcagacccccaggccccagcacttggcgttttcaggaggccctgttcttagagcccctgacaaaggcagcacttatttcctgggctggtgcgccccaaaacacggccccgacacttagtgtggccccaggccccagcgagcctcgccctcccagttttgctctgcccagcagtgttggtgcccagagatgacaagggccagggagcctggcccgggtgtgagaattcagagattctggcctccagctgtcaccacaccgtaacggggccatgtaactgtgcagcatggacagggatgcgacggggcagctggctgtgtccatggccaggtggccagggtcagggctgcaagccaggggtccagggcccttccgttcagcccaaatgctgccccaatgctaactccttggattgtcaacccccatcccccaaatggaaattccgaaggaggcctcctcgcacctgccctccgctgctcctcagaccccagcccccagcgagccgacgtccccacccgttcctgctctcatccccaggttgggcacgtggggttcctcctctgtgggcctggcagacccttcatgagtgggacccaagatatcactgacttcaacccagaggatcgagcccctgcaccctgcctggggccctggggtgtggagcagtggctggggtgggcgtggtgtggcctgagagactgcccagctggagaggccttcctttacaaggccacgcgtgcagctgtcccatccagaccccgactggccaagacctccacgtccccagagtccagccctggaaattccaagggccctggcgtcctctgccttccccgcttccccatgagcgtctgcaaaacacttgcctgaatacatatcacgtattttagactcgaagcctcaaagcactggattgtggtcccctgccccctctgtcccgtccccctgcccaagtgactgaaacctactgagctatattcactgtgctgtcctagggggagggagagcagagctcgcccctgcactgcagccttgtgggggagggcaaggctctcctcccagccagggacgccaggacatagctgctcctggtcagtggaggtcagccgggtatcaaaagccatgaaactgtgtctctgtagcaatgagtgatactgtgacaaaaccatccttgcattcttcctagaagagttcctctgctccttccattccatttttgtgtttgttttgttcttttctgtcactgatccgtattaccacttttggaaaaaaataaataaataaataaataaaaggcagcttgagtttccaaacgtgtgattcacttgtgaacaaaagtcattctaacaattgccttcagcgtcacgtgcattgccactgcgctttcggcacgagggatgctgagccctggtgtcagagtcgtaatttaaagcgtgtgtgtatatggactttgtcccttaaggtcgatataaagaatcctcgcagaatcacagacctgtgccgcccgccaccttctgccattgttacattacagatttggtttagttttgttttgttttgttttttcttttagaactgtatagtattgaaaaagaaatcaaatgtaaatgtctggttttcatataatgtttaaaaagaccattgagaaggaggctggcgctcgccccatgtcccccttgattgtaaattgcttctgttctgtttataagtaaactgtgcatgactcctgcttagcggtcattatcgtgtctgttggtgaaatttttattaaaaggaaaattctgtagatgcacttattgaatatgtgattaggatctacgtctgagactaggagtcctgaactgctgacgcgaaagaggcgcagttcccaattaatacggaaatcgctgtgggagaagaatgaaataagacgtgaagtgtaggaaatcatgaaaagaacaattttgcaaattgcattctgatgcttgtgatgaacacaaatgtacttgtgtagagacatttccttaagagaaagcctaggagaagccgatttggaggttaatgctgtagaataggactgtataccaaatgtaatctttccaatgctccaatgaatttatacatgagattgatatgcaataaatctgtgtgcttttctaa

SEQ ID NO: 168561 - DNA, 5447 bp, Homo sapiens
  Payload ID: 13181
  Gene Symbol: PRDM16
  Gene Name: PR domain containing 16
  Uniprot ID: Q9HAZ2
  ENST ID: ENST00000378391
  CDS Start-End: 64-3837
gaagatagtgtgtggctgcttctggactcaaggaggaggagagagattccgcgagccgacaccatgcgatccaaggcgagggcgaggaagctagccaaaagtgacggtgacgttgtaaataatatgtatgagcccaaccgggacctgctggccagccacagcgcggaggacgaggccgaggacagtgccatgtcgcccatccccgtggggccaccgtcccccttccccaccagcgaggacttcacccccaaggagggctcgccgtacgaggcccctgtctacattcctgaagacattccgatcccagcagacttcgagctccgagagtcctccatcccaggggctggcctgggggtctgggccaagaggaagatggaagccggggagaggctgggcccctgcgtggtggtgccccgggcggcggcaaaggagacagacttcggatgggagcaaatactgacggacgtggaagtgtcgccccaggaaggctgcatcacaaagatctccgaagacctgggcagtgagaagttctgcgtggatgcaaatcaggcgggggctggcagctggctcaagtacatccgtgtggcgtgctcctgcgatgaccagaacctcaccatgtgtcagatcagtgagcagatttactataaagtcattaaggacattgagccaggtgaggagctgctggtgcacgtgaaggaaggcgtctaccccctgggcacagtgccgcccggcctggacgaggagcccacgttccgctgtgacgagtgtgacgaactcttccagtccaagctggacctgcggcgccataagaagtacacgtgtggctcagtgggggctgcgctctacgagggcctggctgaggagctcaagcccgagggccttggcggtggcagcggccaagcccacgagtgcaaggactgcgagcggatgttccccaacaagtacagcctggagcagcacatggtcatccacacggaggagcgcgagtacaaatgcgaccagtgtcccaaggccttcaactggaagtccaacctcatccgccaccagatgtcccacgacagcggcaaacgcttcgaatgtgaaaactgcgtgaaggtgttcacggaccccagcaaccttcagcggcacatccgctcgcagcacgtgggcgctcgggcccacgcctgccccgactgcgggaagaccttcgccacgtcctccggcctcaagcagcacaagcatatccacagcacggtgaagcctttcatatgtgaggtctgccacaagtcctacacgcagttctccaacctgtgccggcacaagcggatgcacgccgactgccgcacgcagatcaagtgcaaggactgtggccagatgttcagcactacctcctccctcaacaagcaccggcgcttctgcgagggcaagaaccattacacgccgggcggcatctttgccccgggcctgcccttgacccccagccccatgatggacaaggcaaaaccctcccccagcctcaatcacgccagcctgggcttcaacgagtactttccctccaggccgcacccggggagcctgcccttctccacggcgcctcccacgttccccgcactcacccccggcttcccgggcatcttccctccatccttgtacccccggccgcctctgctacctcccacatcgctgctcaagagccccctgaaccacacccaggacgccaagctccccagtcccctggggaacccagccctgcccctggtctccgccgtcagcaacagcagccagggcacgacggcagctgcggggcccgaggagaagttcgagagccgcctggaggactcctgtgtggagaagctgaagaccaggagcagcgacatgtcggacggcagtgactttgaggacgtcaacaccaccacggggaccgacctggacacgaccacggggacgggctcggacctggacagcgacgtggacagcgaccctgacaaggacaagggcaagggcaagtccgccgagggccagcccaagtttgggggcggcttggcgcccccgggggccccgaacagcgtggccgaggtgcctgtcttctattcccagcactcattcttcccgccacccgacgagcagctgctgactgcaacgggcgccgccggggactccatcaaggccatcgcatccattgccgagaagtactttggccccggcttcatggggatgcaggagaagaagctgggctcgctcccctaccactcggcgttccccttccagttcctgcccaacttcccccactccctttaccccttcacggaccgagccctcgcccacaacttgctggtcaaggccgagccaaagtcaccccgggacgccctcaaggtgggcggccccagtgccgagtgcccctttgatctcaccaccaagcccaaagacgtgaagcccatcctgcccatgcccaagggcccctcggcccccgcatccggcgaggagcagccgctggacctgagcatcggcagccgggcccgtgccagccaaaacggcggcgggcgggagccccgcaagaaccacgtctatggggaacgcaagctgggcgccggcgaggggctgccccaggtgtgcccggcgcggatgccccagcagcccccgctccactacgccaagccctcgcccttcttcatggaccccatctacagcagggtagaaaagcggaaggtcacagaccccgtgggagccctgaaggagaagtacctgcggccgtccccgctgctcttccacccccagatgtcagccatagagaccatgacagagaagctggagagctttgcagccatgaaggcggactcgggcagctccctgcagcccctcccccaccaccccttcaacttccggtccccacccccaacgctctccgaccccatcctcaggaagggcaaggagcgatacacgtgcaggtactgtgggaagatcttccccagatcagccaatctcaccagacacctgaggacgcacactggggagcagccgtacaggtgtaagtactgcgaccgctccttcagcatctcttcgaacctccagcggcacgtccggaacatccacaacaaggagaagcctttcaagtgccacctgtgcaaccgctgcttcgggcagcagaccaacctggaccggcacctcaagaagcacgagcacgagaacgcaccagtgagccagcaccccggggtcctcacgaaccacctggggaccagcgcgtcctctcccacctcagagtcggacaaccacgcacttttagacgagaaagaagactcttatttctcggaaatcagaaactttattgccaatagtgagatgaaccaagcatcaacgcgaacagagaaacgggcggacatgcagatcgtggacggcagtgcccagtgtccaggcctagccagtgagaagcaggaggacgtggaggaggaggacgacgatgacctggaggaggacgatgaggacagcctggccgggaagtcgcaggatgacaccgtgtcccccgcacccgagccccaggccgcctacgaggatgaggaggatgaggagccagccgcctccctggccgtgggctttgaccacacccgaaggtgtgctgaggaccacgaaggcggtctgttagctttggagccgatgccgacttttgggaaggggctggacctccgcagagcagctgaggaagcatttgaagttaaagatgtgcttaattccaccttagattctgaggctttaaaacatacactgtgcaggcaggctaagaaccagggttctctggacgcttggttgaaggtcactggagccacgtcggagtctggagcatttcaccccatcaaccacctctgacgggctgggcagccgggggccggtggccagagcgagggcaccagccacgaaggacggaggcgggcggggccccggagaaccctgtccctgcgtgtggccactcctcagcatcctccccacccaccatggttcattccgacttttccaatggaaactcagatcccaaaagtccctaaagcagtcgtagagtctcaccatctccaaggattggtcttgagaacactgttcagtgacggccatgcaggtggccgtccaaagacagccaacggagctgcctcgcagaatcagccagtgggcaggtggacgctctgctgagacagaagctggtggccactgccgggtgcccgcgtggggtcgcggaagggaatggatagactggtgtgctcaaaagagagagatcactcaaatgatttttataatgaaatgacaagaataacccttttggtaaccgtattgactgcagagtctatttaagcatgtggttttaaaaatagacagtattttttaaaaatcaaaaaatgacttgcaaattgttttttaaaagtaattttgcattgctttgaaatttgagctcatttgcaaacccgagtctgcctgggaacccgcactgtgcctgggtgtattctttatactgtagataatggagaaattttctatctctgtccctatttgtataagccaaggtgatgctgggtgccccgaggcagaacaagaggcgcggggccacacccgtgaaccatgcagacggccgaagaagtcttaggcagggcgccctgggctgcaggcctgcccgaggctgggatgggaagtgtgcctgccctcgtgtgacatggaattggtgtcaggaccgccacgtggccttcagaggaatccacaggtccccacccaagatccctcaattatatggggaagtcgagggcctgtggcttggatccgccatgcagagatgtggccgggcacccatcttccttccctcctctgtccctgcctcggccaccccacgcgggaacccagcgccgtcctctgaaggcagggccttggccacgtcctgggtctcccacctcccacctgaccccagcggctccggtgtcctccacgtggctgccctggggagcaatcccagcggatcgctccgggccaccaagccgcacctgtgcctgagactccggatggacgacacagtcgtcacgtcgctcttcctgcgggttcttggcgagacacagcttgagaacagaagggcgtcgggggaacctgccgcaaggagcagagacagcacagccccccgggcccagccgcctccctctcttgggacgcaacttcttccccactcggatgggctttaaattattcccataggggccaatttcaaataataatttttttccctgatggaatttaccttaatctgtatataacttgtaattttttctaattcatttcttttcttattttatttcctccttaacagtatttttggcattagacattcttattgtgaagaaataatgttaatataagtatctggtgaaggaccaaaaccgtgtgataaggttgtgtgtcgtgtgggagtggggcgattttttatgtgccaaatacccccgtccccccca

SEQ ID NO: 168562 - DNA, 4236 bp, Homo sapiens
  Payload ID: 13181
  Gene Symbol: PRDM16
  Gene Name: PR domain containing 16
  ENST ID: ENST00000514189
  CDS Start-End: 50-3583
gctgcttctggactcaaggaggaggagagagattccgcgagccgacaccatgcgatccaaggcgagggcgaggaagctagccaaaagtgacggtgacgttgtaaataatatgtatgagcccaaccgggacctgctggccagccacagcgcggaggacgaggccgaggacagtgccatgtcgcccatccccgtggggccaccgtcccccttccccaccagcgaggacttcacccccaaggagggctcgccgtacgaggcccctgtctacattcctgaagacattccgatcccagcagacttcgagctccgagagtcctccatcccaggggctggcctgggggtctgggccaagaggaagatggaagccggggagaggctgggcccctgcgtggtggtgccccgggcggcggcaaaggagacagacttcggatgggagcaaatactgacggacgtggaagtgtcgccccaggaaggctgcatcacaaagcagatctccgaagacctgggcagtgagaagttctgcgtggatgcaaatcaggcgggggctggcagctggctcaagtacatccgtgtggcgtgctcctgcgatgaccagaacctcaccatgtgtcagatcagtgagcagatttactataaagtcattaaggacattgagccaggtgaggagctgctggtgcacgtgaaggaaggcgtctaccccctgggcacagtgccgcccggcctggacgaggagcccacgttccgctgtgacgagtgtgacgaactcttccagtccaagctggacctgcggcgccataagaagtacacgtgtggctcagtgggggctgcgctctacgagggcctggctgaggagctcaagcccgagggccttggcggtggcagcggccaagcccacgagtgcaaggactgcgagcggatgttccccaacaagtacagcctggagcagcacatggtcatccacacggaggagcgcgagtacaaatgcgaccagtgtcccaaggccttcaactggaagtccaacctcatccgccaccagatgtcccacgacagcggcaaacgcttcgaatgtgaaaactgcgtgaaggtgttcacggaccccagcaaccttcagcggcacatccgctcgcagcacgtgggcgctcgggcccacgcctgccccgactgcgggaagaccttcgccacgtcctccggcctcaagcagcacaagcatatccacagcacggtgaagcctttcatatgtgaggtctgccacaagtcctacacgcagttctccaacctgtgccggcacaagcggatgcacgccgactgccgcacgcagatcaagtgcaaggactgtggccagatgttcagcactacctcctccctcaacaagcaccggcgcttctgcgagggcaagaaccattacacgccgggcggcatctttgccccgggcctgcccttgacccccagccccatgatggacaaggcaaaaccctcccccagcctcaatcacgccagcctgggcttcaacgagtactttccctccaggccgcacccggggagcctgcccttctccacggcgcctcccacgttccccgcactcacccccggcttcccgggcatcttccctccatccttgtacccccggccgcctctgctacctcccacatcgctgctcaagagccccctgaaccacacccaggacgccaagctccccagtcccctggggaacccagccctgcccctggtctccgccgtcagcaacagcagccagggcacgacggcagctgcggggcccgaggagaagttcgagagccgcctggaggactcctgtgtggagaagctgaagaccaggagcagcgacatgtcggacggcagtgactttgaggacgtcaacaccaccacggggaccgacctggacacgaccacggggacgggctcggacctggacagcgacgtggacagcgaccctgacaaggacaagggcaagggcaagtccgccgagggccagcccaagtttgggggcggcttggcgcccccgggggccccgaacagcgtggccgaggtgcctgtcttctattcccagcactcattcttcccgccacccgacgagcagctgctgactgcaacgggcgccgccggggactccatcaaggccatcgcatccattgccgagaagtactttggccccggcttcatggggatgcaggagaagaagctgggctcgctcccctaccactcggcgttccccttccagttcctgcccaacttcccccactccctttaccccttcacggaccgagccctcgcccacaacttgctggtcaaggccgagccaaagtcaccccgggacgccctcaaggtgggcggccccagtgccgagtgcccctttgatctcaccaccaagcccaaagacgtgaagcccatcctgcccatgcccaagggcccctcggcccccgcatccggcgaggagcagccgctggacctgagcatcggcagccgggcccgtgccagccaaaacggcggcgggcgggagccccgcaagaaccacgtctatggggaacgcaagctgggcgccggcgaggggctgccccaggtgtgcccggcgcggatgccccagcagcccccgctccactacgccaagccctcgcccttcttcatggaccccatctacagggtagaaaagcggaaggtcacagaccccgtgggagccctgaaggagaagtacctgcggccgtccccgctgctcttccacccccagatgtcagccatagagaccatgacagagaagctggagagctttgcagccatgaaggcggactcgggcagctccctgcagcccctcccccaccaccccttcaacttccggtccccacccccaacgctctccgaccccatcctcaggaagggcaaggagcgatacacgtgcaggtactgtgggaagatcttccccagatcagccaatctcaccagacacctgaggacgcacactggggagcagccgtacaggtgtaagtactgcgaccgctccttcagcatctcttcgaacctccagcggcacgtccggaacatccacaacaaggagaagcctttcaagtgccacctgtgcaaccgctgcttcgggcagcagaccaacctggaccggcacctcaagaagcacgagcacgagaacgcaccagtgagccagcaccccggggtcctcacgaaccacctggggaccagcgcgtcctctcccacctcagagtcggacaaccacgcacttttagacgagaaagaagactcttatttctcggaaatcagaaactttattgccaatagtgagatgaaccaagcatcaacgcgaacagagaaacgggcggacatgcagatcgtggacggcagtgcccagtgtccaggcctagccagtgagaagcaggaggacgtggaggaggaggacgacgatgacctggaggaggacgatgaggacagcctggccgggaagtcgcaggatgacaccgtgtcccccgcacccgagccccaggccgcctacgaggatgaggaggatgaggagccagccgcctccctggccgtgggctttgaccacacccgaaggcatatgcaatgatgctgtccctttccgaagacactcctctccacaccccctcccagggttctctggacgcttggttgaaggtcactggagccacgtcggagtctggagcatttcaccccatcaaccacctctgacgggctgggcagccgggggccggtggccagagcgagggcaccagccacgaaggacggaggcgggcggggccccggagaaccctgtccctgcgtgtggccactcctcagcatcctccccacccaccatggttcattccgacttttccaatggaaactcagatcccaaaagtccctaaagcagtcgtagagtctcaccatctccaaggattggtcttgagaacactgttcagtgacggccatgcaggtggccgtccaaagacagccaacggagctgcctcgcagaatcagccagtgggcaggtggacgctctgctgagacagaagctggtggccactgccgggtgcccgcgtggggtcgcggaagggaatggatagactggtgtgctcaaaagagagagatcactcaaatgatttttataatgaaatgacaagaataacccttttggtaaccgtattgactgcagagtctatttaagcatgtggttttaaaaatagacagtattttttaaaaatcaaaaaatgacttgcaaat

SEQ ID NO: 168563 - DNA, 3737 bp, Homo sapiens
  Payload ID: 13181
  Gene Symbol: PRDM16
  Gene Name: PR domain containing 16
  ENST ID: ENST00000509860
  CDS Start-End: 1-3255
atttactataaagtcattaaggacattgagccaggtgaggagctgctggtgcacgtgaaggaaggcgtctaccccctgggcacagtgccgcccggcctggacgaggagcccacgttccgctgtgacgagtgtgacgaactcttccagtccaagctggacctgcggcgccataagaagtacacgtgtggctcagtgggggctgcgctctacgagggcctggctgaggagctcaagcccgagggccttggcggtggcagcggccaagcccacgagtgcaaggactgcgagcggatgttccccaacaagtacagcctggagcagcacatggtcatccacacggaggagcgcgagtacaaatgcgaccagtgtcccaaggccttcaactggaagtccaacctcatccgccaccagatgtcccacgacagcggcaaacgcttcgaatgtgaaaactgcgtgaaggtgttcacggaccccagcaaccttcagcggcacatccgctcgcagcacgtgggcgctcgggcccacgcctgccccgactgcgggaagaccttcgccacgtcctccggcctcaagcagcacaagcatatccacagcacggtgaagcctttcatatgtgaggtctgccacaagtcctacacgcagttctccaacctgtgccggcacaagcggatgcacgccgactgccgcacgcagatcaagtgcaaggactgtggccagatgttcagcactacctcctccctcaacaagcaccggcgcttctgcgagggcaagaaccattacacgccgggcggcatctttgccccgggcctgcccttgacccccagccccatgatggacaaggcaaaaccctcccccagcctcaatcacgccagcctgggcttcaacgagtactttccctccaggccgcacccggggagcctgcccttctccacggcgcctcccacgttccccgcactcacccccggcttcccgggcatcttccctccatccttgtacccccggccgcctctgctacctcccacatcgctgctcaagagccccctgaaccacacccaggacgccaagctccccagtcccctggggaacccagccctgcccctggtctccgccgtcagcaacagcagccagggcacgacggcagctgcggggcccgaggagaagttcgagagccgcctggaggactcctgtgtggagaagctgaagaccaggagcagcgacatgtcggacggcagtgactttgaggacgtcaacaccaccacggggaccgacctggacacgaccacggggacgggctcggacctggacagcgacgtggacagcgaccctgacaaggacaagggcaagggcaagtccgccgagggccagcccaagtttgggggcggcttggcgcccccgggggccccgaacagcgtggccgaggtgcctgtcttctattcccagcactcattcttcccgccacccgacgagcagctgctgactgcaacgggcgccgccggggactccatcaaggccatcgcatccattgccgagaagtactttggccccggcttcatggggatgcaggagaagaagctgggctcgctcccctaccactcggcgttccccttccagttcctgcccaacttcccccactccctttaccccttcacggaccgagccctcgcccacaacttgctggtcaaggccgagccaaagtcaccccgggacgccctcaaggtgggcggccccagtgccgagtgcccctttgatctcaccaccaagcccaaagacgtgaagcccatcctgcccatgcccaagggcccctcggcccccgcatccggcgaggagcagccgctggacctgagcatcggcagccgggcccgtgccagccaaaacggcggcgggcgggagccccgcaagaaccacgtctatggggaacgcaagctgggcgccggcgaggggctgccccaggtgtgcccggcgcggatgccccagcagcccccgctccactacgccaagccctcgcccttcttcatggaccccatctacagggtagaaaagcggaaggtcacagaccccgtgggagccctgaaggagaagtacctgcggccgtccccgctgctcttccacccccagatgtcagccatagagaccatgacagagaagctggagagctttgcagccatgaaggcggactcgggcagctccctgcagcccctcccccaccaccccttcaacttccggtccccacccccaacgctctccgaccccatcctcaggaagggcaaggagcgatacacgtgcaggtactgtgggaagatcttccccagatcagccaatctcaccagacacctgaggacgcacactggggagcagccgtacaggtgtaagtactgcgaccgctccttcagcatctcttcgaacctccagcggcacgtccggaacatccacaacaaggagaagcctttcaagtgccacctgtgcaaccgctgcttcgggcagcagaccaacctggaccggcacctcaagaagcacgagcacgagaacgcaccagtgagccagcaccccggggtcctcacgaaccacctggggaccagcgcgtcctctcccacctcagagtcggacaaccacgcacttttagacgagaaagaagactcttatttctcggaaatcagaaactttattgccaatagtgagatgaaccaagcatcaacgcgaacagagaaacgggcggacatgcagatcgtggacggcagtgcccagtgtccaggcctagccagtgagaagcaggaggacgtggaggaggaggacgacgatgacctggaggaggacgatgaggacagcctggccgggaagtcgcaggatgacaccgtgtcccccgcacccgagccccaggccgcctacgaggatgaggaggatgaggagccagccgcctccctggccgtgggctttgaccacacccgaaggtgtgctgaggaccacgaaggcggtctgttagctttggagccgatgccgacttttgggaaggggctggacctccgcagagcagctgaggaagcatttgaagttaaagatgtgcttaattccaccttagattctgaggctttaaaacatacactgtgcaggcaggctaagaaccaggcatatgcaatgatgctgtccctttccgaagacactcctctccacaccccctcccagggttctctggacgcttggttgaaggtcactggagccacgtcggagtctggagcatttcaccccatcaaccacctctgacgggctgggcagccgggggccggtggccagagcgagggcaccagccacgaaggacggaggcgggcggggccccggagaaccctgtccctgcgtgtggccactcctcagcatcctccccacccaccatggttcattccgacttttccaatggaaactcagatcccaaaagtccctaaagcagtcgtagagtctcaccatctccaaggattggtcttgagaacactgttcagtgacggccatgcaggtggccgtccaaagacagccaacggagctgcctcgcagaatcagccagtgggcaggtggacgctctgctgagacagaagctggtggccactgccgggtgcccgcgtggggtcgcggaagggaatggatagactggtgtgctcaaaagagagagatcactcaaatgatttttataatgaaatgacaagaataacccttttggtaaccgtattgactgcagagtctatttaagcatgtgg

SEQ ID NO: 168564 - DNA, 4282 bp, Homo sapiens
  Payload ID: 13181
  Gene Symbol: PRDM16
  Gene Name: PR domain containing 16
  ENST ID: ENST00000511072
  CDS Start-End: 93-3629
ggtgtccaaactgacaatgctggggagatgaagatagtgtgtggctgcttctggactcaaggaggaggagagagattccgcgagccgacaccatgcgatccaaggcgagggcgaggaagctagccaaaagtgacggtgacgttgtaaataatatgtatgagcccaaccgggacctgctggccagccacagcgcggaggacgaggccgaggacagtgccatgtcgcccatccccgtggggccaccgtcccccttccccaccagcgaggacttcacccccaaggagggctcgccgtacgaggcccctgtctacattcctgaagacattccgatcccagcagacttcgagctccgagagtcctccatcccaggggctggcctgggggtctgggccaagaggaagatggaagccggggagaggctgggcccctgcgtggtggtgccccgggcggcggcaaaggagacagacttcggatgggagcaaatactgacggacgtggaagtgtcgccccaggaaggctgcatcacaaagcagatctccgaagacctgggcagtgagaagttctgcgtggatgcaaatcaggcgggggctggcagctggctcaagtacatccgtgtggcgtgctcctgcgatgaccagaacctcaccatgtgtcagatcagtgagcagatttactataaagtcattaaggacattgagccaggtgaggagctgctggtgcacgtgaaggaaggcgtctaccccctgggcacagtgccgcccggcctggacgaggagcccacgttccgctgtgacgagtgtgacgaactcttccagtccaagctggacctgcggcgccataagaagtacacgtgtggctcagtgggggctgcgctctacgagggcctggctgaggagctcaagcccgagggccttggcggtggcagcggccaagcccacgagtgcaaggactgcgagcggatgttccccaacaagtacagcctggagcagcacatggtcatccacacggaggagcgcgagtacaaatgcgaccagtgtcccaaggccttcaactggaagtccaacctcatccgccaccagatgtcccacgacagcggcaaacgcttcgaatgtgaaaactgcgtgaaggtgttcacggaccccagcaaccttcagcggcacatccgctcgcagcacgtgggcgctcgggcccacgcctgccccgactgcgggaagaccttcgccacgtcctccggcctcaagcagcacaagcatatccacagcacggtgaagcctttcatatgtgaggtctgccacaagtcctacacgcagttctccaacctgtgccggcacaagcggatgcacgccgactgccgcacgcagatcaagtgcaaggactgtggccagatgttcagcactacctcctccctcaacaagcaccggcgcttctgcgagggcaagaaccattacacgccgggcggcatctttgccccgggcctgcccttgacccccagccccatgatggacaaggcaaaaccctcccccagcctcaatcacgccagcctgggcttcaacgagtactttccctccaggccgcacccggggagcctgcccttctccacggcgcctcccacgttccccgcactcacccccggcttcccgggcatcttccctccatccttgtacccccggccgcctctgctacctcccacatcgctgctcaagagccccctgaaccacacccaggacgccaagctccccagtcccctggggaacccagccctgcccctggtctccgccgtcagcaacagcagccagggcacgacggcagctgcggggcccgaggagaagttcgagagccgcctggaggactcctgtgtggagaagctgaagaccaggagcagcgacatgtcggacggcagtgactttgaggacgtcaacaccaccacggggaccgacctggacacgaccacggggacgggctcggacctggacagcgacgtggacagcgaccctgacaaggacaagggcaagggcaagtccgccgagggccagcccaagtttgggggcggcttggcgcccccgggggccccgaacagcgtggccgaggtgcctgtcttctattcccagcactcattcttcccgccacccgacgagcagctgctgactgcaacgggcgccgccggggactccatcaaggccatcgcatccattgccgagaagtactttggccccggcttcatggggatgcaggagaagaagctgggctcgctcccctaccactcggcgttccccttccagttcctgcccaacttcccccactccctttaccccttcacggaccgagccctcgcccacaacttgctggtcaaggccgagccaaagtcaccccgggacgccctcaaggtgggcggccccagtgccgagtgcccctttgatctcaccaccaagcccaaagacgtgaagcccatcctgcccatgcccaagggcccctcggcccccgcatccggcgaggagcagccgctggacctgagcatcggcagccgggcccgtgccagccaaaacggcggcgggcgggagccccgcaagaaccacgtctatggggaacgcaagctgggcgccggcgaggggctgccccaggtgtgcccggcgcggatgccccagcagcccccgctccactacgccaagccctcgcccttcttcatggaccccatctacagcagggtagaaaagcggaaggtcacagaccccgtgggagccctgaaggagaagtacctgcggccgtccccgctgctcttccacccccagatgtcagccatagagaccatgacagagaagctggagagctttgcagccatgaaggcggactcgggcagctccctgcagcccctcccccaccaccccttcaacttccggtccccacccccaacgctctccgaccccatcctcaggaagggcaaggagcgatacacgtgcaggtactgtgggaagatcttccccagatcagccaatctcaccagacacctgaggacgcacactggggagcagccgtacaggtgtaagtactgcgaccgctccttcagcatctcttcgaacctccagcggcacgtccggaacatccacaacaaggagaagcctttcaagtgccacctgtgcaaccgctgcttcgggcagcagaccaacctggaccggcacctcaagaagcacgagcacgagaacgcaccagtgagccagcaccccggggtcctcacgaaccacctggggaccagcgcgtcctctcccacctcagagtcggacaaccacgcacttttagacgagaaagaagactcttatttctcggaaatcagaaactttattgccaatagtgagatgaaccaagcatcaacgcgaacagagaaacgggcggacatgcagatcgtggacggcagtgcccagtgtccaggcctagccagtgagaagcaggaggacgtggaggaggaggacgacgatgacctggaggaggacgatgaggacagcctggccgggaagtcgcaggatgacaccgtgtcccccgcacccgagccccaggccgcctacgaggatgaggaggatgaggagccagccgcctccctggccgtgggctttgaccacacccgaaggcatatgcaatgatgctgtccctttccgaagacactcctctccacaccccctcccagggttctctggacgcttggttgaaggtcactggagccacgtcggagtctggagcatttcaccccatcaaccacctctgacgggctgggcagccgggggccggtggccagagcgagggcaccagccacgaaggacggaggcgggcggggccccggagaaccctgtccctgcgtgtggccactcctcagcatcctccccacccaccatggttcattccgacttttccaatggaaactcagatcccaaaagtccctaaagcagtcgtagagtctcaccatctccaaggattggtcttgagaacactgttcagtgacggccatgcaggtggccgtccaaagacagccaacggagctgcctcgcagaatcagccagtgggcaggtggacgctctgctgagacagaagctggtggccactgccgggtgcccgcgtggggtcgcggaagggaatggatagactggtgtgctcaaaagagagagatcactcaaatgatttttataatgaaatgacaagaataacccttttggtaaccgtattgactgcagagtctatttaagcatgtggttttaaaaatagacagtattttttaaaaatcaaaaaatgacttgcaaat

SEQ ID NO: 168565 - DNA, 384 bp, Homo sapiens
  Payload ID: 13181
  Gene Symbol: PRDM16
  Gene Name: PR domain containing 16
  ENST ID: ENST00000463591
  CDS Start-End: 1-162
acaaagatctccgaagacctgggcagtgagaagttctgcgtggatgcaaatcaggcgggggctggcagctggctcaagtacatccgtgtggcgtgctcctgcgatgaccagaacctcaccatgtgtcagatcagtgagcagatgaaagtgaaattggagtgaaggaaaattgggcttgaggcgcatagaaggacggtctttccgtccccttctggggctcagatttgcagagtgtgtccttagtcgtccgttgggaagctgacgggcaggggcaccgcggggctgggccagggctgtgcttttgtgagatgcaaactatagtaatgaagggcccagattttttttatttaagaaataaatgtttattagaacttttgaactaaa

SEQ ID NO: 168566 - DNA, 7957 bp, Homo sapiens
  Payload ID: 13182
  Gene Symbol: PRDM2
  Gene Name: PR domain containing 2, with ZNF domain
  Uniprot ID: Q13029
  ENST ID: ENST00000235372
  CDS Start-End: 857-6013
gtaaaagtgacattctaaatgttcctcactctgcgaggcttattttttagggactttgctataattctgaaagacttagttttacagtacatctgaaagtaggagttttcagaagtatggctcttgggataaatttagattcttaattgtgaagctctgttaccacttgttagaaggcaggtcagctcacctgcttggggaggtaaatatatgaatgcactctcgagtaatttaatggagccctacctcaatgtacagaatgacagtatcacagatcaagaatggagtacgagtgattttcggctatggtgggggtaggtaggtcacttgtcccctgttgtctcttactatttgtaaagtgaagactatgattagtctttttgatcgggatggtttgagatgaataaagaataggcaggcaatttggatactttaggcttttcaagaacattagtaacattttttcttagatatttctcctaatacaatgagtgttgtgaaataacatggcagttattgttgagagaaaagccttcccagttatgtattgagtccttaggcgttttgaccttccctccactcttacagaacttggtggaaggggccactatgttttctacctccttccgtgcctttcacaaagccacatcctgcaccgtctacccttctctgtggatatttttccgcttggcaatttcctttcctgaggcacccacttgggacatctgaatctccatctccatgttgatggcccgtttgtgcttggacgtgttcttccacttgagactgagggttcatgtaatcaaagaagtttctttgttgtgtgtatctttacagaacacaacaggaattgaaaatgaatcagaacactactgagcctgtggcggccaccgagaccctggctgaggtacccgaacatgtgctgcgaggacttccggaggaagtgaggcttttcccttctgctgttgacaagacccggattggtgtctgggccactaaaccaattttaaaaggcaaaaaatttgggccatttgttggtgataagaaaaaaagatctcaggttaagaataatgtatacatgtgggaggtgtattacccaaatttgggatggatgtgcattgatgccactgatccagagaagggaaactggctgcgatatgtgaattgggcttgctcaggagaagagcaaaatttattcccactggaaatcaacagagccatttactataaaactttaaagccaatcgcgccgggcgaggagctcctggtctggtacaatggggaagacaaccctgagatagcagctgcgattgaggaagagcgagccagcgcccggagcaagcggagctcccccaagagccggaaagggaagaaaaaatcccaggaaaataaaaacaaaggaaacaaaatccaagacatacaactgaagacaagtgagccagatttcacctctgcaaatatgagagattctgcagaaggtcctaaagaagacgaagagaagccttcagcctcagcacttgagcagccggccaccctccaggaggtggccagtcaggaggtgcctccagaactagcaacccctgcccctgcctgggagccacagccagaaccagacgagcgattagaagcggcagcttgtgaggtgaatgatttgggggaagaggaggaggaggaagaggaggaggatgaagaagaagaagaagatgatgatgatgatgagttggaagacgagggggaagaagaagccagcatgccaaatgaaaattctgtgaaagagccagaaatacggtgtgatgagaagccagaagatttattagaggaaccaaaaacaacttcagaagaaactcttgaagactgctcagaggtaacacctgccatgcaaatccccagaactaaagaagaggccaatggtgatgtatttgaaacgtttatgtttccgtgtcaacattgtgaaaggaagtttacaaccaaacaggggcttgagcgtcacatgcatatccatatatccaccgtcaatcatgctttcaaatgcaagtactgtgggaaagcctttggcacacagattaaccggcggcgacatgagcggcgccatgaagcagggttaaagcggaaacccagccaaacactacagccgtcagaggatctggctgatggcaaagcatctggagaaaacgttgcttcaaaagatgattcgagtcctcccagtcttgggccagactgtctgatcatgaattcagagaaggcttcccaagacacaataaattcttctgtcgtagaagagaatggggaagttaaagaacttcatccgtgcaaatattgtaaaaaggtttttggaactcatactaatatgagacggcatcagcgtagagttcacgaacgtcatctgattcccaaaggtgtacggcgaaaaggaggccttgaagagccccagcctccagcagaacaggcccaggccacccagaacgtgtatgtaccaagcacagagccggaggaggaaggggaagcagatgatgtgtacatcatggacatttctagcaatatctctgaaaacttaaattactatattgatggtaaaattcaaactaataacaacactagtaactgtgatgtgattgagatggagtctgcttcggcagatttgtatggtataaattgtctgctcactccagttacagtggaaattactcaaaatataaagaccacacaggtccctgtaacagaagatcttcctaaagagcctttgggcagcacaaatagtgaggccaagaagcggagaactgcgagcccacctgcactgcccaaaattaaggccgaaacagactctgaccccatggtcccctcttgctctttaagtcttcctcttagcatatcaacaacagaggcagtgtctttccacaaagagaaaagtgtttatttgtcatcaaagctcaaacaacttcttcaaacccaagataaactaactcctgcagggatttcagcaactgaaatagctaaattaggtcctgtttgtgtgtctgctcctgcatcaatgttgcctgtgacctcaagtaggtttaagaggcggaccagctctcctcccagttctccacagcacagtcctgcccttcgagactttggaaagccaagtgatgggaaagcagcatggaccgatgccgggctgacttccaaaaaatccaaattagaaagtcacagcgactcaccagcatggagtttgtctgggagagatgagagagaaactgtgagccctccatgctttgatgaatataaaatgtctaaagagtggacagctagttctgcttttagcagtgtgtgcaaccagcagccactggatttatccagcggtgtcaaacagaaggctgagggtacaggcaagactccagtccagtgggaatctgtcttagatctcagtgtgcataaaaagcattgtagtgactctgaaggcaaggaattcaaagaaagtcattcagtgcagcctacgtgtagtgctgtaaagaaaaggaaaccaaccacctgcatgctgcagaaggttcttctcaatgaatataatggcatcgatttacctgtagaaaaccctgcagatgggaccaggagcccaagtccttgtaaatccctagaagctcagccagatcctgacctcggtccgggctctggtttccctgcccctactgttgagtccacacctgatgtttgtccttcatcacctgccctgcagacaccctccctttcatccggtcagctgcctcctctcttgatccccacagatccctcttcccctccaccctgtcccccggtattaactgttgccactccgccccctcccctccttcctaccgtacctcttccagccccctcttccagtgcatctccacacccatgcccctctccactctcaaatgccaccgcacagtccccacttccaattctgtccccaacagtgtccccctctccctctcccattcctcccgtggagcccctgatgtctgccgcctcacccgggcctccaacactttcttcttcctcctcttcatcttcctcctcctcttcgttttcttcttcatcttcctcctcttctccttctccacctcctctctccgcaatatcatctgttgtttcctctggtgataatctggaggcttctctccccatgatatctttcaaacaggaggaattagagaatgaaggtctgaaacccagggaagagccccagtctgctgctgaacaggatgttgttgttcaggaaacattcaacaaaaactttgtttgcaacgtctgtgaatcaccttttctttccattaaagatctaaccaaacatttatctattcatgctgaagaatggcccttcaaatgtgaattttgtgtgcagctttttaaggataaaacggacttgtcagaacatcgctttttgcttcatggagttgggaatatctttgtgtgttctgtttgtaaaaaagaatttgcttttttgtgcaatttgcagcagcaccagcgagatctccacccagataaggtgtgcacacatcacgagtttgaaagcgggactctgaggccccagaactttacagatcccagcaaggcccatgtagagcatatgcagagcttgccagaagatcctttagaaacttctaaagaagaagaggagttaaatgattcctctgaagagctttacacgactataaaaataatggcttctggaataaagacaaaagatccagatgttcgattgggcctcaatcagcattacccaagctttaaaccacctccatttcagtaccatcaccgtaaccccatggggattggtgtgacagccacaaatttcactacacacaatattccacagactttcactaccgccattcgctgcacaaagtgtggaaaaggtgtcgacaatatgccggagttgcacaaacatatcctggcttgtgcttctgcaagtgacaagaagaggtacacgcctaagaaaaacccagtaccattaaaacaaactgtgcaacccaaaaatggcgtggtggttttagataactctgggaaaaatgccttccgacgaatgggacagcccaaaaggcttaactttagtgttgagctcagcaaaatgtcgtcgaataagctcaaattaaatgcattgaagaaaaaaaatcagctagtacagaaagcaattcttcagaaaaacaaatctgcaaagcagaaggccgacttgaaaaatgcttgtgagtcatcctctcacatctgcccttactgtaatcgagagttcacttacattggaagcctgaataaacacgccgccttcagctgtcccaaaaaacccctttctcctcccaaaaaaaaagtttctcattcatctaagaaaggtggacactcatcacctgcaagtagtgacaaaaacagtaacagcaaccaccgcagacggacagcggatgcggagattaaaatgcaaagcatgcagactccgttgggcaagaccagagcccgcagctcaggccccacccaagtcccacttccctcctcatccttcaggtccaagcagaacgtcaagtttgcagcttcggtgaaatccaaaaaaccaagctcctcctctttaaggaactccagcccgataagaatggccaaaataactcatgttgaggggaaaaaacctaaagctgtggccaagaatcattctgctcagctttccagcaaaacatcacggagcctgcacgtgagggtacagaaaagcaaagctgttttacaaagcaaatccaccttggcgagtaagaaaagaacagaccggttcaatataaaatctagagagcggagtggggggccagtcacccggagccttcagctggcagctgctgctgacttgagtgagaacaagagagaggacggcagcgccaagcaggagctgaaggacttcagctacagcctccgcttggcgtcccgatgctctccaccagcggccccgtacatcaccaggcagtataggaaggtcaaagctccagctgcagcccagttccagggaccattcttcaaagagtagacactctggctgctccctgacagcacctgaagtgacctggaatcagtgaagccaaagggactggcagtctgccctgcagggagtaccgacctatcccagttgtgtgaggctgcgagagaaagggagtgcatgtgcgcgcgtgcatgtgtgcgtgcgtgtgtgttcacgtgttctcgtgcgggcgcgtgagtggtcttcaaacgagggtcccgatccccggggcggcaggaagggggccgactccacgctgtcctttgggatgatacttggatgcagctcttgggaccgtgttctgcagcccagccttcctgttggggtggggcctctcctactatgcaatttttcaagagctccttgaccctgctttttgcttcttgagttgtcttttgccattatggggactttggtttgacccaggggtcagccttaggaaggccttcaggaggaggccgagttccccttcagtaccacccctctctccccaccttccctctcccggcaacatctctgggaatcaacagcatattgacacgttggagccgagcctgaacatgcccctcggccccagcacatggaaaacccccttccttgcctaaggtgtctgagtttctggctcttgaggcatttccagacttgaaattctcatcagtccattgctcttgagtctttgcagagaacctcagatcaggtgcacctgggagaaagactttgtccccacttacagatctatctcctcccttgggaagggcagggaatggggacggtgtatggaggggagggatctcctgcgcccttcattgccacacttggtgggaccatgaacatctttagtgtctgagcttctcaaattagctgcaataggaaaaaaacaaattgggaaatgaaaaaaaaatgggaagattaaaaagcacagggggaagaagaagagatttcggaggccatcctgccaggggcggacggggctgactcctgctctctggaggacggtcagtccatgtctcggagaaacgggtgagctgagcttggcgtttggacccagttcagtgaggttcttgggttttgtgcctttggggcagaccccaggcaaggatgtctgagaccacttgggcgctgttttctcagctccaatttcaagagtgagctatcaaacccagagcggaaggagggagctctgatgagcacggtttgtcacacgataaagggattttttttttcagggctactacggttgatcttgcaactctgtaaatatgtatgtagacacttttaaaagcacgtatttatgtccctgactgtaaatgctccatttttaaagttttataacttgtgttatttaatgagtcagtcaatcggctgcagtatgggatctgataaggatctaggagaagggtctcatgcggaccctcacatgggcagaaaaatggtggtcattggccgacatcacagttttcctgtttcccacccagctaaaaaccgttgtttgctttaaattttcataaactggaatcctttcacccgctcctacagctaaccctcacaagcatgaagtgctgtggctgttccttatcctaatgatgcgcttttgtcccgtaaatgttaacactcatgaagcataccccggcctctcagttcttgagggcctccccaccgcagcagcaaggaaagctcacgaaccccaaacctggcaagtcacctgcagcccatggtgagctctgggaagtgtggttgaggccttggggtcactccttttttgcatgtgcaaatgtgctggtcacccttcaacgctcccagacggtcaggaaaactgttccaatcatgaaaaggggggatgattttgtaaaagtggcatttcctggtcagtggtggtcttcaagacgacagctctgtatctgccatgtgaagagaattaacaataaaagtgtgaagagcgattgtgaggaacaa

SEQ ID NO: 168567 - DNA, 7437 bp, Homo sapiens
  Payload ID: 13182
  Gene Symbol: PRDM2
  Gene Name: PR domain containing 2, with ZNF domain
  Uniprot ID: Q13029
  ENST ID: ENST00000311066
  CDS Start-End: 857-5905
gtaaaagtgacattctaaatgttcctcactctgcgaggcttattttttagggactttgctataattctgaaagacttagttttacagtacatctgaaagtaggagttttcagaagtatggctcttgggataaatttagattcttaattgtgaagctctgttaccacttgttagaaggcaggtcagctcacctgcttggggaggtaaatatatgaatgcactctcgagtaatttaatggagccctacctcaatgtacagaatgacagtatcacagatcaagaatggagtacgagtgattttcggctatggtgggggtaggtaggtcacttgtcccctgttgtctcttactatttgtaaagtgaagactatgattagtctttttgatcgggatggtttgagatgaataaagaataggcaggcaatttggatactttaggcttttcaagaacattagtaacattttttcttagatatttctcctaatacaatgagtgttgtgaaataacatggcagttattgttgagagaaaagccttcccagttatgtattgagtccttaggcgttttgaccttccctccactcttacagaacttggtggaaggggccactatgttttctacctccttccgtgcctttcacaaagccacatcctgcaccgtctacccttctctgtggatatttttccgcttggcaatttcctttcctgaggcacccacttgggacatctgaatctccatctccatgttgatggcccgtttgtgcttggacgtgttcttccacttgagactgagggttcatgtaatcaaagaagtttctttgttgtgtgtatctttacagaacacaacaggaattgaaaatgaatcagaacactactgagcctgtggcggccaccgagaccctggctgaggtacccgaacatgtgctgcgaggacttccggaggaagtgaggcttttcccttctgctgttgacaagacccggattggtgtctgggccactaaaccaattttaaaaggcaaaaaatttgggccatttgttggtgataagaaaaaaagatctcaggttaagaataatgtatacatgtgggaggtgtattacccaaatttgggatggatgtgcattgatgccactgatccagagaagggaaactggctgcgatatgtgaattgggcttgctcaggagaagagcaaaatttattcccactggaaatcaacagagccatttactataaaactttaaagccaatcgcgccgggcgaggagctcctggtctggtacaatggggaagacaaccctgagatagcagctgcgattgaggaagagcgagccagcgcccggagcaagcggagctcccccaagagccggaaagggaagaaaaaatcccaggaaaataaaaacaaaggaaacaaaatccaagacatacaactgaagacaagtgagccagatttcacctctgcaaatatgagagattctgcagaaggtcctaaagaagacgaagagaagccttcagcctcagcacttgagcagccggccaccctccaggaggtggccagtcaggaggtgcctccagaactagcaacccctgcccctgcctgggagccacagccagaaccagacgagcgattagaagcggcagcttgtgaggtgaatgatttgggggaagaggaggaggaggaagaggaggaggatgaagaagaagaagaagatgatgatgatgatgagttggaagacgagggggaagaagaagccagcatgccaaatgaaaattctgtgaaagagccagaaatacggtgtgatgagaagccagaagatttattagaggaaccaaaaacaacttcagaagaaactcttgaagactgctcagaggtaacacctgccatgcaaatccccagaactaaagaagaggccaatggtgatgtatttgaaacgtttatgtttccgtgtcaacattgtgaaaggaagtttacaaccaaacaggggcttgagcgtcacatgcatatccatatatccaccgtcaatcatgctttcaaatgcaagtactgtgggaaagcctttggcacacagattaaccggcggcgacatgagcggcgccatgaagcagggttaaagcggaaacccagccaaacactacagccgtcagaggatctggctgatggcaaagcatctggagaaaacgttgcttcaaaagatgattcgagtcctcccagtcttgggccagactgtctgatcatgaattcagagaaggcttcccaagacacaataaattcttctgtcgtagaagagaatggggaagttaaagaacttcatccgtgcaaatattgtaaaaaggtttttggaactcatactaatatgagacggcatcagcgtagagttcacgaacgtcatctgattcccaaaggtgtacggcgaaaaggaggccttgaagagccccagcctccagcagaacaggcccaggccacccagaacgtgtatgtaccaagcacagagccggaggaggaaggggaagcagatgatgtgtacatcatggacatttctagcaatatctctgaaaacttaaattactatattgatggtaaaattcaaactaataacaacactagtaactgtgatgtgattgagatggagtctgcttcggcagatttgtatggtataaattgtctgctcactccagttacagtggaaattactcaaaatataaagaccacacaggtccctgtaacagaagatcttcctaaagagcctttgggcagcacaaatagtgaggccaagaagcggagaactgcgagcccacctgcactgcccaaaattaaggccgaaacagactctgaccccatggtcccctcttgctctttaagtcttcctcttagcatatcaacaacagaggcagtgtctttccacaaagagaaaagtgtttatttgtcatcaaagctcaaacaacttcttcaaacccaagataaactaactcctgcagggatttcagcaactgaaatagctaaattaggtcctgtttgtgtgtctgctcctgcatcaatgttgcctgtgacctcaagtaggtttaagaggcggaccagctctcctcccagttctccacagcacagtcctgcccttcgagactttggaaagccaagtgatgggaaagcagcatggaccgatgccgggctgacttccaaaaaatccaaattagaaagtcacagcgactcaccagcatggagtttgtctgggagagatgagagagaaactgtgagccctccatgctttgatgaatataaaatgtctaaagagtggacagctagttctgcttttagcagtgtgtgcaaccagcagccactggatttatccagcggtgtcaaacagaaggctgagggtacaggcaagactccagtccagtgggaatctgtcttagatctcagtgtgcataaaaagcattgtagtgactctgaaggcaaggaattcaaagaaagtcattcagtgcagcctacgtgtagtgctgtaaagaaaaggaaaccaaccacctgcatgctgcagaaggttcttctcaatgaatataatggcatcgatttacctgtagaaaaccctgcagatgggaccaggagcccaagtccttgtaaatccctagaagctcagccagatcctgacctcggtccgggctctggtttccctgcccctactgttgagtccacacctgatgtttgtccttcatcacctgccctgcagacaccctccctttcatccggtcagctgcctcctctcttgatccccacagatccctcttcccctccaccctgtcccccggtattaactgttgccactccgccccctcccctccttcctaccgtacctcttccagccccctcttccagtgcatctccacacccatgcccctctccactctcaaatgccaccgcacagtccccacttccaattctgtccccaacagtgtccccctctccctctcccattcctcccgtggagcccctgatgtctgccgcctcacccgggcctccaacactttcttcttcctcctcttcatcttcctcctcctcttcgttttcttcttcatcttcctcctcttctccttctccacctcctctctccgcaatatcatctgttgtttcctctggtgataatctggaggcttctctccccatgatatctttcaaacaggaggaattagagaatgaaggtctgaaacccagggaagagccccagtctgctgctgaacaggatgttgttgttcaggaaacattcaacaaaaactttgtttgcaacgtctgtgaatcaccttttctttccattaaagatctaaccaaacatttatctattcatgctgaagaatggcccttcaaatgtgaattttgtgtgcagctttttaaggataaaacggacttgtcagaacatcgctttttgcttcatggagttgggaatatctttgtgtgttctgtttgtaaaaaagaatttgcttttttgtgcaatttgcagcagcaccagcgagatctccacccagataaggtgtgcacacatcacgagtttgaaagcgggactctgaggccccagaactttacagatcccagcaaggcccatgtagagcatatgcagagcttgccagaagatcctttagaaacttctaaagaagaagaggagttaaatgattcctctgaagagctttacacgactataaaaataatggcttctggaataaagacaaaagatccagatgttcgattgggcctcaatcagcattacccaagctttaaaccacctccatttcagtaccatcaccgtaaccccatggggattggtgtgacagccacaaatttcactacacacaatattccacagactttcactaccgccattcgctgcacaaagtgtggaaaaggtgtcgacaatatgccggagttgcacaaacatatcctggcttgtgcttctgcaagtgacaagaagaggtacacgcctaagaaaaacccagtaccattaaaacaaactgtgcaacccaaaaatggcgtggtggttttagataactctgggaaaaatgccttccgacgaatgggacagcccaaaaggcttaactttagtgttgagctcagcaaaatgtcgtcgaataagctcaaattaaatgcattgaagaaaaaaaatcagctagtacagaaagcaattcttcagaaaaacaaatctgcaaagcagaaggccgacttgaaaaatgcttgtgagtcatcctctcacatctgcccttactgtaatcgagagttcacttacattggaagcctgaataaacacgccgccttcagctgtcccaaaaaacccctttctcctcccaaaaaaaaagtttctcattcatctaagaaaggtggacactcatcacctgcaagtagtgacaaaaacagtaacagcaaccaccgcagacggacagcggatgcggagattaaaatgcaaagcatgcagactccgttgggcaagaccagagcccgcagctcaggccccacccaagtcccacttccctcctcatccttcaggtccaagcagaacgtcaagtttgcagcttcggtgaaatccaaaaaaccaagctcctcctctttaaggaactccagcccgataagaatggccaaaataactcatgttgaggggaaaaaacctaaagctgtggccaagaatcattctgctcagctttccagcaaaacatcacggagcctgcacgtgagggtacagaaaagcaaagctgttttacaaagcaaatccaccttggcgagtaagaaaagaacagaccggttcaatataaaatctagagagcggagtggggggccagtcacccggagccttcagctggcagctgctgctgacttgagtgagaacaagagagaggacggcagcgccaagcaggagctgaaggacttcaggaacttcctgtagaaaagcccccaaaacaaaacaaaccttaattgactaaaaagtattgcatgctcaacttaggataagcactacggcaaaggatacgaaatctaccaagcttgcaagaccagttgaagctgactcaaaaatcctaacattcagctgattgccggcaggcttagagtcaggcatctgctgcttcggtgggggcccaacgcgcatgctgggcgcccgggtgattgagatccaaagagaagggcactgtaagacaggccagatgaactggctcctcgtcatgggactggtacctcagatctgagcatggcccttgtttttggcacgtagcagagaaaggattgatttgaacttaaccttgcaaagcaagttgcctgttttagcagtagtttgttgtaggtttcagggatgacagatttggatgcactcatttaaaacgttttggtcacatatcagctcttgatgcctttcttttaaattaattatagacagagagaggcatttagctgatctcttacccctggtatttcttttttttgttgttttcgtttttttaaatcacaagtagattgccagcgtaatggagaggaaaccagattggatatggactcttttttatgcctattctggtgttgcgtttgtatatccaaatggacgttatcctctcagattcttatctggcactaatttataactattatattatcagagactatgtagcaatatatcagtgcacaggcgcatcccaggcctgtacagatgtatgtctacacgtaagtataaatgaatttgcataccaggttttacacttgcatctctaatagagattaaaaacaacaaattggcctcttcctaagtatattaatatcatttatccttacattttatgcctccccctaaattaatgactgagttggtggaaagcggctaggttttattcatactgttttttgttctcaacttcaaaagtaatctacctctgaaaaatttgtagtttaatatttgtttggtgaatttgtgccactttaatccttccactatcattcccattttgttacatttctgttatggggactttatgttgaaatattgtataaagcatttgtagcaatttaaaaataaaatatttaaaattatttaaattgttttggacgcttcaattgtattatatgtgatttacatttcactttttttgttggcgttgttaacccggagagtgctcctgtattgaactttgctgttagttattttattgcttctttttggagagtgctataaaagactattctaatgaaaacattaaaatttacaatttgacatacaaaaaggggttgtccattgattttaaccaatgtagcactgagagagagagaggttaattatagatagacaagagtggtgtttgttgtttttcccctcccagcattgaaatcattggggcttgtcagatgtattaaaaaaagatttgttgtgctattgctgcaaacacttaataactagaggagaatttaaacaatgcattttatattattgtaacc

SEQ ID NO: 168568 - DNA, 5797 bp, Homo sapiens
  Payload ID: 13182
  Gene Symbol: PRDM2
  Gene Name: PR domain containing 2, with ZNF domain
  Uniprot ID: Q13029
  ENST ID: ENST00000343137
  CDS Start-End: 222-4667
gagatagcagctgcgattgaggaagagcgagccagcgcccggagcaagcggagctcccccaagagccggaaagaccaagcggagcagccagctggcagtagcgccctgtaggacccccaggacccgatgggaagaaaaaatcccaggaaaataaaaacaaaggaaacaaaatccaagacatacaactgaagacaagtgagccagatttcacctctgcaaatatgagagattctgcagaaggtcctaaagaagacgaagagaagccttcagcctcagcacttgagcagccggccaccctccaggaggtggccagtcaggaggtgcctccagaactagcaacccctgcccctgcctgggagccacagccagaaccagacgagcgattagaagcggcagcttgtgaggtgaatgatttgggggaagaggaggaggaggaagaggaggaggatgaagaagaagaagaagatgatgatgatgatgagttggaagacgagggggaagaagaagccagcatgccaaatgaaaattctgtgaaagagccagaaatacggtgtgatgagaagccagaagatttattagaggaaccaaaaacaacttcagaagaaactcttgaagactgctcagaggtaacacctgccatgcaaatccccagaactaaagaagaggccaatggtgatgtatttgaaacgtttatgtttccgtgtcaacattgtgaaaggaagtttacaaccaaacaggggcttgagcgtcacatgcatatccatatatccaccgtcaatcatgctttcaaatgcaagtactgtgggaaagcctttggcacacagattaaccggcggcgacatgagcggcgccatgaagcagggttaaagcggaaacccagccaaacactacagccgtcagaggatctggctgatggcaaagcatctggagaaaacgttgcttcaaaagatgattcgagtcctcccagtcttgggccagactgtctgatcatgaattcagagaaggcttcccaagacacaataaattcttctgtcgtagaagagaatggggaagttaaagaacttcatccgtgcaaatattgtaaaaaggtttttggaactcatactaatatgagacggcatcagcgtagagttcacgaacgtcatctgattcccaaaggtgtacggcgaaaaggaggccttgaagagccccagcctccagcagaacaggcccaggccacccagaacgtgtatgtaccaagcacagagccggaggaggaaggggaagcagatgatgtgtacatcatggacatttctagcaatatctctgaaaacttaaattactatattgatggtaaaattcaaactaataacaacactagtaactgtgatgtgattgagatggagtctgcttcggcagatttgtatggtataaattgtctgctcactccagttacagtggaaattactcaaaatataaagaccacacaggtccctgtaacagaagatcttcctaaagagcctttgggcagcacaaatagtgaggccaagaagcggagaactgcgagcccacctgcactgcccaaaattaaggccgaaacagactctgaccccatggtcccctcttgctctttaagtcttcctcttagcatatcaacaacagaggcagtgtctttccacaaagagaaaagtgtttatttgtcatcaaagctcaaacaacttcttcaaacccaagataaactaactcctgcagggatttcagcaactgaaatagctaaattaggtcctgtttgtgtgtctgctcctgcatcaatgttgcctgtgacctcaagtaggtttaagaggcggaccagctctcctcccagttctccacagcacagtcctgcccttcgagactttggaaagccaagtgatgggaaagcagcatggaccgatgccgggctgacttccaaaaaatccaaattagaaagtcacagcgactcaccagcatggagtttgtctgggagagatgagagagaaactgtgagccctccatgctttgatgaatataaaatgtctaaagagtggacagctagttctgcttttagcagtgtgtgcaaccagcagccactggatttatccagcggtgtcaaacagaaggctgagggtacaggcaagactccagtccagtgggaatctgtcttagatctcagtgtgcataaaaagcattgtagtgactctgaaggcaaggaattcaaagaaagtcattcagtgcagcctacgtgtagtgctgtaaagaaaaggaaaccaaccacctgcatgctgcagaaggttcttctcaatgaatataatggcatcgatttacctgtagaaaaccctgcagatgggaccaggagcccaagtccttgtaaatccctagaagctcagccagatcctgacctcggtccgggctctggtttccctgcccctactgttgagtccacacctgatgtttgtccttcatcacctgccctgcagacaccctccctttcatccggtcagctgcctcctctcttgatccccacagatccctcttcccctccaccctgtcccccggtattaactgttgccactccgccccctcccctccttcctaccgtacctcttccagccccctcttccagtgcatctccacacccatgcccctctccactctcaaatgccaccgcacagtccccacttccaattctgtccccaacagtgtccccctctccctctcccattcctcccgtggagcccctgatgtctgccgcctcacccgggcctccaacactttcttcttcctcctcttcatcttcctcctcctcttcgttttcttcttcatcttcctcctcttctccttctccacctcctctctccgcaatatcatctgttgtttcctctggtgataatctggaggcttctctccccatgatatctttcaaacaggaggaattagagaatgaaggtctgaaacccagggaagagccccagtctgctgctgaacaggatgttgttgttcaggaaacattcaacaaaaactttgtttgcaacgtctgtgaatcaccttttctttccattaaagatctaaccaaacatttatctattcatgctgaagaatggcccttcaaatgtgaattttgtgtgcagctttttaaggataaaacggacttgtcagaacatcgctttttgcttcatggagttgggaatatctttgtgtgttctgtttgtaaaaaagaatttgcttttttgtgcaatttgcagcagcaccagcgagatctccacccagataaggtgtgcacacatcacgagtttgaaagcgggactctgaggccccagaactttacagatcccagcaaggcccatgtagagcatatgcagagcttgccagaagatcctttagaaacttctaaagaagaagaggagttaaatgattcctctgaagagctttacacgactataaaaataatggcttctggaataaagacaaaagatccagatgttcgattgggcctcaatcagcattacccaagctttaaaccacctccatttcagtaccatcaccgtaaccccatggggattggtgtgacagccacaaatttcactacacacaatattccacagactttcactaccgccattcgctgcacaaagtgtggaaaaggtgtcgacaatatgccggagttgcacaaacatatcctggcttgtgcttctgcaagtgacaagaagaggtacacgcctaagaaaaacccagtaccattaaaacaaactgtgcaacccaaaaatggcgtggtggttttagataactctgggaaaaatgccttccgacgaatgggacagcccaaaaggcttaactttagtgttgagctcagcaaaatgtcgtcgaataagctcaaattaaatgcattgaagaaaaaaaatcagctagtacagaaagcaattcttcagaaaaacaaatctgcaaagcagaaggccgacttgaaaaatgcttgtgagtcatcctctcacatctgcccttactgtaatcgagagttcacttacattggaagcctgaataaacacgccgccttcagctgtcccaaaaaacccctttctcctcccaaaaaaaaagtttctcattcatctaagaaaggtggacactcatcacctgcaagtagtgacaaaaacagtaacagcaaccaccgcagacggacagcggatgcggagattaaaatgcaaagcatgcagactccgttgggcaagaccagagcccgcagctcaggccccacccaagtcccacttccctcctcatccttcaggtccaagcagaacgtcaagtttgcagcttcggtgaaatccaaaaaaccaagctcctcctctttaaggaactccagcccgataagaatggccaaaataactcatgttgaggggaaaaaacctaaagctgtggccaagaatcattctgctcagctttccagcaaaacatcacggagcctgcacgtgagggtacagaaaagcaaagctgttttacaaagcaaatccaccttggcgagtaagaaaagaacagaccggttcaatataaaatctagagagcggagtggggggccagtcacccggagccttcagctggcagctgctgctgacttgagtgagaacaagagagaggacggcagcgccaagcaggagctgaaggacttcaggaacttcctgtagaaaagcccccaaaacaaaacaaaccttaattgactaaaaagtattgcatgctcaacttaggataagcactacggcaaaggatacgaaatctaccaagcttgcaagaccagttgaagctgactcaaaaatcctaacattcagctgattgccggcaggcttagagtcaggcatctgctgcttcggtgggggcccaacgcgcatgctgggcgcccgggtgattgagatccaaagagaagggcactgtaagacaggccagatgaactggctcctcgtcatgggactggtacctcagatctgagcatggcccttgtttttggcacgtagcagagaaaggattgatttgaacttaaccttgcaaagcaagttgcctgttttagcagtagtttgttgtaggtttcagggatgacagatttggatgcactcatttaaaacgttttggtcacatatcagctcttgatgcctttcttttaaattaattatagacagagagaggcatttagctgatctcttacccctggtatttcttttttttgttgttttcgtttttttaaatcacaagtagattgccagcgtaatggagaggaaaccagattggatatggactcttttttatgcctattctggtgttgcgtttgtatatccaaatggacgttatcctctcagattcttatctggcactaatttataactattatattatcagagactatgtagcaatatatcagtgcacaggcgcatcccaggcctgtacagatgtatgtctacacgtaagtataaatgaatttgcataccaggttttacacttgcatctctaatagagattaaaaacaacaaattggcctcttcctaagtatattaatatcatttatccttacattttatgcctccccctaaattaatgactgagttggtggaaagcggctaggttttattcatactgttttttgttctcaacttcaaaagtaatctacctctgaaaaatttgtagtttaatatttgtttggtgaatttgtgccactttaatccttccactatcattcccattttgttacatttctgttatggggactttatgttgaaatattgtataaagcatttgtagcaatttaaaaataaaatatttaaaatta

SEQ ID NO: 168569 - DNA, 2688 bp, Homo sapiens
  Payload ID: 13182
  Gene Symbol: PRDM2
  Gene Name: PR domain containing 2, with ZNF domain
  Uniprot ID: Q13029
  ENST ID: ENST00000376048
  CDS Start-End: 127-807
gcgaaacagcggcggcggcggcggccctcggtgctctgaggcgctggcgcggcgggcgcggggttcatgtaatcaaagaagtttctttgttgtgtgtatctttacagaacacaacaggaattgaaaatgaatcagaacactactgagcctgtggcggccaccgagaccctggctgaggtacccgaacatgtgctgcgaggacttccggaggaagtgaggcttttcccttctgctgttgacaagacccggattggtgtctgggccactaaaccaattttaaaaggcaaaaaatttgggccatttgttggtgataagaaaaaaagatctcaggttaagaataatgtatacatgtgggaggtgtattacccaaatttgggatggatgtgcattgatgccactgatccagagaagggaaactggctgcgatatgtgaattgggcttgctcaggagaagagcaaaatttattcccactggaaatcaacagagccatttactataaaactttaaagccaatcgcgccgggcgaggagctcctggtctggtacaatggggaagacaaccctgagatagcagctgcgattgaggaagagcgagccagcgcccggagcaagcggagctcccccaagagccggaaagctacagcctccgcttggcgtcccgatgctctccaccagcggccccgtacatcaccaggcagtataggaaggtcaaagctccagctgcagcccagttccagggaccattcttcaaagagtagacactctggctgctccctgacagcacctgaagtgacctggaatcagtgaagccaaagggactggcagtctgccctgcagggagtaccgacctatcccagttgtgtgaggctgcgagagaaagggagtgcatgtgcgcgcgtgcatgtgtgcgtgcgtgtgtgttcacgtgttctcgtgcgggcgcgtgagtggtcttcaaacgagggtcccgatccccggggcggcaggaagggggccgactccacgctgtcctttgggatgatacttggatgcagctcttgggaccgtgttctgcagcccagccttcctgttggggtggggcctctcctactatgcaatttttcaagagctccttgaccctgctttttgcttcttgagttgtcttttgccattatggggactttggtttgacccaggggtcagccttaggaaggccttcaggaggaggccgagttccccttcagtaccacccctctctccccaccttccctctcccggcaacatctctgggaatcaacagcatattgacacgttggagccgagcctgaacatgcccctcggccccagcacatggaaaacccccttccttgcctaaggtgtctgagtttctggctcttgaggcatttccagacttgaaattctcatcagtccattgctcttgagtctttgcagagaacctcagatcaggtgcacctgggagaaagactttgtccccacttacagatctatctcctcccttgggaagggcagggaatggggacggtgtatggaggggagggatctcctgcgcccttcattgccacacttggtgggaccatgaacatctttagtgtctgagcttctcaaattagctgcaataggaaaaaaacaaattgggaaatgaaaaaaaaatgggaagattaaaaagcacagggggaagaagaagagatttcggaggccatcctgccaggggcggacggggctgactcctgctctctggaggacggtcagtccatgtctcggagaaacgggtgagctgagcttggcgtttggacccagttcagtgaggttcttgggttttgtgcctttggggcagaccccaggcaaggatgtctgagaccacttgggcgctgttttctcagctccaatttcaagagtgagctatcaaacccagagcggaaggagggagctctgatgagcacggtttgtcacacgataaagggattttttttttcagggctactacggttgatcttgcaactctgtaaatatgtatgtagacacttttaaaagcacgtatttatgtccctgactgtaaatgctccatttttaaagttttataacttgtgttatttaatgagtcagtcaatcggctgcagtatgggatctgataaggatctaggagaagggtctcatgcggaccctcacatgggcagaaaaatggtggtcattggccgacatcacagttttcctgtttcccacccagctaaaaaccgttgtttgctttaaattttcataaactggaatcctttcacccgctcctacagctaaccctcacaagcatgaagtgctgtggctgttccttatcctaatgatgcgcttttgtcccgtaaatgttaacactcatgaagcataccccggcctctcagttcttgagggcctccccaccgcagcagcaaggaaagctcacgaaccccaaacctggcaagtcacctgcagcccatggtgagctctgggaagtgtggttgaggccttggggtcactccttttttgcatgtgcaaatgtgctggtcacccttcaacgctcccagacggtcaggaaaactgttccaatcatgaaaaggggggatgattttgtaaaagtggcatttcctggtcagtggtggtcttcaagacgacagctctgtatctgccatgtgaagagaattaacaataaaagtgtgaagagcg

SEQ ID NO: 168570 - DNA, 513 bp, Homo sapiens
  Payload ID: 13182
  Gene Symbol: PRDM2
  Gene Name: PR domain containing 2, with ZNF domain
  ENST ID: ENST00000407521
  CDS Start-End: 280-513
gaagagcgagccagcgcccggagcaagcggagctcccccaagagccggaaagtgttgtcctgtccctctgctgttccttgtcatcatttccatttcacttcccttgtgtttcattcctctttcttgtctagaccaagcggagcagccagctggcagtagcgccctgtaggacccccaggacccgatgggaagaaaaaatcccaggaaaataaaaacaaaggaaacaaaatccaagacatacaactgaagacaagtgagccagatttcacctctgcaaatatgagagattctgcagaaggtcctaaagaagacgaagagaagccttcagcctcagcacttgagcagccggccaccctccaggaggtggccagtcaggaggtgcctccagaactagcaacccctgcccctgcctgggagccacagccagaaccagacgagcgattagaagcggcagcttgtgaggtgaatgatttgggggaagaggaggaggaggaagaggaggaggatgaagaa

SEQ ID NO: 168571 - DNA, 6175 bp, Homo sapiens
  Payload ID: 13182
  Gene Symbol: PRDM2
  Gene Name: PR domain containing 2, with ZNF domain
  Uniprot ID: Q13029
  ENST ID: ENST00000413440
  CDS Start-End: 178-4623
gaagacaaccctgagatagcagctgcgattgaggaagagcgagccagcgcccggagcaagcggagctcccccaagagccggaaagggaagaaaaaatcccaggaaaataaaaacaaaggaaacaaaatccaagacatacaactgaagacaagtgagccagatttcacctctgcaaatatgagagattctgcagaaggtcctaaagaagacgaagagaagccttcagcctcagcacttgagcagccggccaccctccaggaggtggccagtcaggaggtgcctccagaactagcaacccctgcccctgcctgggagccacagccagaaccagacgagcgattagaagcggcagcttgtgaggtgaatgatttgggggaagaggaggaggaggaagaggaggaggatgaagaagaagaagaagatgatgatgatgatgagttggaagacgagggggaagaagaagccagcatgccaaatgaaaattctgtgaaagagccagaaatacggtgtgatgagaagccagaagatttattagaggaaccaaaaacaacttcagaagaaactcttgaagactgctcagaggtaacacctgccatgcaaatccccagaactaaagaagaggccaatggtgatgtatttgaaacgtttatgtttccgtgtcaacattgtgaaaggaagtttacaaccaaacaggggcttgagcgtcacatgcatatccatatatccaccgtcaatcatgctttcaaatgcaagtactgtgggaaagcctttggcacacagattaaccggcggcgacatgagcggcgccatgaagcagggttaaagcggaaacccagccaaacactacagccgtcagaggatctggctgatggcaaagcatctggagaaaacgttgcttcaaaagatgattcgagtcctcccagtcttgggccagactgtctgatcatgaattcagagaaggcttcccaagacacaataaattcttctgtcgtagaagagaatggggaagttaaagaacttcatccgtgcaaatattgtaaaaaggtttttggaactcatactaatatgagacggcatcagcgtagagttcacgaacgtcatctgattcccaaaggtgtacggcgaaaaggaggccttgaagagccccagcctccagcagaacaggcccaggccacccagaacgtgtatgtaccaagcacagagccggaggaggaaggggaagcagatgatgtgtacatcatggacatttctagcaatatctctgaaaacttaaattactatattgatggtaaaattcaaactaataacaacactagtaactgtgatgtgattgagatggagtctgcttcggcagatttgtatggtataaattgtctgctcactccagttacagtggaaattactcaaaatataaagaccacacaggtccctgtaacagaagatcttcctaaagagcctttgggcagcacaaatagtgaggccaagaagcggagaactgcgagcccacctgcactgcccaaaattaaggccgaaacagactctgaccccatggtcccctcttgctctttaagtcttcctcttagcatatcaacaacagaggcagtgtctttccacaaagagaaaagtgtttatttgtcatcaaagctcaaacaacttcttcaaacccaagataaactaactcctgcagggatttcagcaactgaaatagctaaattaggtcctgtttgtgtgtctgctcctgcatcaatgttgcctgtgacctcaagtaggtttaagaggcggaccagctctcctcccagttctccacagcacagtcctgcccttcgagactttggaaagccaagtgatgggaaagcagcatggaccgatgccgggctgacttccaaaaaatccaaattagaaagtcacagcgactcaccagcatggagtttgtctgggagagatgagagagaaactgtgagccctccatgctttgatgaatataaaatgtctaaagagtggacagctagttctgcttttagcagtgtgtgcaaccagcagccactggatttatccagcggtgtcaaacagaaggctgagggtacaggcaagactccagtccagtgggaatctgtcttagatctcagtgtgcataaaaagcattgtagtgactctgaaggcaaggaattcaaagaaagtcattcagtgcagcctacgtgtagtgctgtaaagaaaaggaaaccaaccacctgcatgctgcagaaggttcttctcaatgaatataatggcatcgatttacctgtagaaaaccctgcagatgggaccaggagcccaagtccttgtaaatccctagaagctcagccagatcctgacctcggtccgggctctggtttccctgcccctactgttgagtccacacctgatgtttgtccttcatcacctgccctgcagacaccctccctttcatccggtcagctgcctcctctcttgatccccacagatccctcttcccctccaccctgtcccccggtattaactgttgccactccgccccctcccctccttcctaccgtacctcttccagccccctcttccagtgcatctccacacccatgcccctctccactctcaaatgccaccgcacagtccccacttccaattctgtccccaacagtgtccccctctccctctcccattcctcccgtggagcccctgatgtctgccgcctcacccgggcctccaacactttcttcttcctcctcttcatcttcctcctcctcttcgttttcttcttcatcttcctcctcttctccttctccacctcctctctccgcaatatcatctgttgtttcctctggtgataatctggaggcttctctccccatgatatctttcaaacaggaggaattagagaatgaaggtctgaaacccagggaagagccccagtctgctgctgaacaggatgttgttgttcaggaaacattcaacaaaaactttgtttgcaacgtctgtgaatcaccttttctttccattaaagatctaaccaaacatttatctattcatgctgaagaatggcccttcaaatgtgaattttgtgtgcagctttttaaggataaaacggacttgtcagaacatcgctttttgcttcatggagttgggaatatctttgtgtgttctgtttgtaaaaaagaatttgcttttttgtgcaatttgcagcagcaccagcgagatctccacccagataaggtgtgcacacatcacgagtttgaaagcgggactctgaggccccagaactttacagatcccagcaaggcccatgtagagcatatgcagagcttgccagaagatcctttagaaacttctaaagaagaagaggagttaaatgattcctctgaagagctttacacgactataaaaataatggcttctggaataaagacaaaagatccagatgttcgattgggcctcaatcagcattacccaagctttaaaccacctccatttcagtaccatcaccgtaaccccatggggattggtgtgacagccacaaatttcactacacacaatattccacagactttcactaccgccattcgctgcacaaagtgtggaaaaggtgtcgacaatatgccggagttgcacaaacatatcctggcttgtgcttctgcaagtgacaagaagaggtacacgcctaagaaaaacccagtaccattaaaacaaactgtgcaacccaaaaatggcgtggtggttttagataactctgggaaaaatgccttccgacgaatgggacagcccaaaaggcttaactttagtgttgagctcagcaaaatgtcgtcgaataagctcaaattaaatgcattgaagaaaaaaaatcagctagtacagaaagcaattcttcagaaaaacaaatctgcaaagcagaaggccgacttgaaaaatgcttgtgagtcatcctctcacatctgcccttactgtaatcgagagttcacttacattggaagcctgaataaacacgccgccttcagctgtcccaaaaaacccctttctcctcccaaaaaaaaagtttctcattcatctaagaaaggtggacactcatcacctgcaagtagtgacaaaaacagtaacagcaaccaccgcagacggacagcggatgcggagattaaaatgcaaagcatgcagactccgttgggcaagaccagagcccgcagctcaggccccacccaagtcccacttccctcctcatccttcaggtccaagcagaacgtcaagtttgcagcttcggtgaaatccaaaaaaccaagctcctcctctttaaggaactccagcccgataagaatggccaaaataactcatgttgaggggaaaaaacctaaagctgtggccaagaatcattctgctcagctttccagcaaaacatcacggagcctgcacgtgagggtacagaaaagcaaagctgttttacaaagcaaatccaccttggcgagtaagaaaagaacagaccggttcaatataaaatctagagagcggagtggggggccagtcacccggagccttcagctggcagctgctgctgacttgagtgagaacaagagagaggacggcagcgccaagcaggagctgaaggacttcaggaacttcctgtagaaaagcccccaaaacaaaacaaaccttaattgactaaaaagtattgcatgctcaacttaggataagcactacggcaaaggatacgaaatctaccaagcttgcaagaccagttgaagctgactcaaaaatcctaacattcagctgattgccggcaggcttagagtcaggcatctgctgcttcggtgggggcccaacgcgcatgctgggcgcccgggtgattgagatccaaagagaagggcactgtaagacaggccagatgaactggctcctcgtcatgggactggtacctcagatctgagcatggcccttgtttttggcacgtagcagagaaaggattgatttgaacttaaccttgcaaagcaagttgcctgttttagcagtagtttgttgtaggtttcagggatgacagatttggatgcactcatttaaaacgttttggtcacatatcagctcttgatgcctttcttttaaattaattatagacagagagaggcatttagctgatctcttacccctggtatttcttttttttgttgttttcgtttttttaaatcacaagtagattgccagcgtaatggagaggaaaccagattggatatggactcttttttatgcctattctggtgttgcgtttgtatatccaaatggacgttatcctctcagattcttatctggcactaatttataactattatattatcagagactatgtagcaatatatcagtgcacaggcgcatcccaggcctgtacagatgtatgtctacacgtaagtataaatgaatttgcataccaggttttacacttgcatctctaatagagattaaaaacaacaaattggcctcttcctaagtatattaatatcatttatccttacattttatgcctccccctaaattaatgactgagttggtggaaagcggctaggttttattcatactgttttttgttctcaacttcaaaagtaatctacctctgaaaaatttgtagtttaatatttgtttggtgaatttgtgccactttaatccttccactatcattcccattttgttacatttctgttatggggactttatgttgaaatattgtataaagcatttgtagcaatttaaaaataaaatatttaaaattatttaaattgttttggacgcttcaattgtattatatgtgatttacatttcactttttttgttggcgttgttaacccggagagtgctcctgtattgaactttgctgttagttattttattgcttctttttggagagtgctataaaagactattctaatgaaaacattaaaatttacaatttgacatacaaaaaggggttgtccattgattttaaccaatgtagcactgagagagagagaggttaattatagatagacaagagtggtgtttgttgtttttcccctcccagcattgaaatcattggggcttgtcagatgtattaaaaaaagatttgttgtgctattgctgcaaacacttaataactagaggagaatttaaacaatgcattttatattattgtaaccaataaaaaactttctaaaca

SEQ ID NO: 168572 - DNA, 628 bp, Homo sapiens
  Payload ID: 13182
  Gene Symbol: PRDM2
  Gene Name: PR domain containing 2, with ZNF domain
  ENST ID: ENST00000484063
  CDS Start-End: 169-628
ggagtcaagatggcggcggcgcggccgcgggcgccggggccggcgaaacagcggcggcggcggcggccctcggtgctctgaggcgctggcgcggcgggcgcggggttcatgtaatcaaagaagtttctttgttgtgtgtatctttacagaacacaacaggaattgaaaatgaatcagaacactactgagcctgtggcggccaccgagaccctggctgaggtacccgaacatgtgctgcgaggacttccggaggaagtgaggcttttcccttctgctgttgacaagacccggattggtgtctgggccactaaaccaattttaaaaggcaaaaaatttgggccatttgttggtgataagaaaaaaagatctcaggtgtattacccaaatttgggatggatgtgcattgatgccactgatccagagaagggaaactggctgcgatatgtgaattgggcttgctcaggagaagagcaaaatttattcccactggaaatcaacagagccatttactataaaactttaaagccaatcgcgccgggcgaggagctcctggtctggtacaatggggaagacaaccctgagatagcagctgcgattgaggaagagcgagccagcgcccggagcaagc

SEQ ID NO: 168573 - DNA, 1100 bp, Homo sapiens
  Payload ID: 13182
  Gene Symbol: PRDM2
  Gene Name: PR domain containing 2, with ZNF domain
  ENST ID: ENST00000491134
  CDS Start-End: 1-135
gcggccaccgagaccctggctgaggtacccgaacatgtgctgcgaggacttccggaggaagtgaggcttttcccttctgctgttgacaagacccggattggtgtattacccaaatttgggatggatgtgcattgatgccactgatccagagaagggaaactggctgcgatatgtgaattgggcttgctcaggagaagagcaaaatttattcccactggaaatcaacagagccatttactataaaactttaaagccaatcgcgccgggcgaggagctcctggtctggtacaatggggaagacaaccctgagatagcagctgcgattgaggaagagcgagccagcgcccggagcaagcggagctcccccaagagccggaaagaccaagcggagcagccagctggcagtagcgccctgtaggacccccaggacccgatgggaagaaaaaatcccaggaaaataaaaacaaaggaaacaaaatccaagacatacaactgaagacaagtgagccagatttcacctctgcaaatatgagagattctgcagaaggaacttcctgtagaaaagcccccaaaacaaaacaaaccttaattgactaaaaagtattgcatgctcaacttaggataagcactacggcaaaggatacgaaatctaccaagcttgcaagaccagttgaagctgactcaaaaatcctaacattcagctgattgccggcaggcttagagtcaggcatctgctgcttcggtgggggcccaacgcgcatgctgggcgcccgggtgattgagatccaaagagaagggcactgtaagacaggccagatgaactggctcctcgtcatgggactggtacctcagatctgagcatggcccttgtttttggcacgtagcagagaaaggattgatttgaacttaaccttgcaaagcaagttgcctgttttagcagtagtttgttgtaggtttcagggatgacagatttggatgcactcatttaaaacgttttggtcacatatcagctcttgatgcctttcttttaaattaattatagacagagagaggcatttagctgatctcttacccctggtatttcttttttttgttgtttt

SEQ ID NO: 168574 - DNA, 705 bp, Homo sapiens
  Payload ID: 13182
  Gene Symbol: PRDM2
  Gene Name: PR domain containing 2, with ZNF domain
  ENST ID: ENST00000503842
  CDS Start-End: 202-390
ggaagagcgagccagcgcccggagcaagcggagctcccccaagagccggaaagaccaagcggagcagccagctggcagtagcgccctgtaggacccccaggacccgatgggaagaaaaaatcccaggaaaataaaaacaaaggaaacaaaatccaagacatacaactgaagacaagtgagccagatttcacctctgcaaatatgagagattctgcagaagctacagcctccgcttggcgtcccgatgctctccaccagcggccccgtacatcaccaggcagtataggaaggtcaaagctccagctgcagcccagttccagggaccattcttcaaagagtagacactctggctgctccctgacagcacctgaagtgacctggaatcagtgaagccaaagggactggcagtctgccctgcagggagtaccgacctatcccagttgtgtgaggctgcgagagaaagggagtgcatgtgcgcgcgtgcatgtgtgcgtgcgtgtgtgttcacgtgttctcgtgcgggcgcgtgagtggtcttcaaacgagggtcccgatccccggggcggcaggaagggggccgactccacgctgtcctttgggatgatacttggatgcagctcttgggaccgtgttctgcagcccagccttcctgttggggtggggcctctcctactatgcaatttttcaagagctccttgaccctgc

SEQ ID NO: 168575 - DNA, 568 bp, Homo sapiens
  Payload ID: 13182
  Gene Symbol: PRDM2
  Gene Name: PR domain containing 2, with ZNF domain
  ENST ID: ENST00000505823
  CDS Start-End: 145-333
gaagagcgagccagcgcccggagcaagcggagctcccccaagagccggaaagggaagaaaaaatcccaggaaaataaaaacaaaggaaacaaaatccaagacatacaactgaagacaagtgagccagatttcacctctgcaaatatgagagattctgcagaagctacagcctccgcttggcgtcccgatgctctccaccagcggccccgtacatcaccaggcagtataggaaggtcaaagctccagctgcagcccagttccagggaccattcttcaaagagtagacactctggctgctccctgacagcacctgaagtgacctggaatcagtgaagccaaagggactggcagtctgccctgcagggagtaccgacctatcccagttgtgtgaggctgcgagagaaagggagtgcatgtgcgcgcgtgcatgtgtgcgtgcgtgtgtgttcacgtgttctcgtgcgggcgcgtgagtggtcttcaaacgagggtcccgatccccggggcggcaggaagggggccgactccacgctgtcctttgggatgatacttggatgcagctcttggg

SEQ ID NO: 168576 - DNA, 646 bp, Homo sapiens
  Payload ID: 13182
  Gene Symbol: PRDM2
  Gene Name: PR domain containing 2, with ZNF domain
  ENST ID: ENST00000487453
  CDS Start-End: 582-646
tctcaaaaacaaagaaaaaaaaaggtgtttaaaatggtattttagaatttacgttttaagactaacaagcaaaatgactgttaaggttatgtctcaaatttttgtcaaaatctggtggtgttttttaggatttgtttttgctttgtattgtatttgatgtttctacttttaatctagatgttttcaatgatgctattttatgtctctgacctcatttttgtctgtttacatttttagctaattatgcttcccggtagtgattctctgttatggagtatgtaactttacgtgtatatagcagctttaagtcgtttttagtttgattttactaatgcagagataaaaggtgtcagaggcttgtagttctggaagctggtggaggtttgtctgggggagagcagcggagaaaaaggaggattgttacggaagaatggggatctgtctggatctgaagactgaaacaccagcttccagaaaaatagaaatctgggaagaaaaaatcccaggaaaataaaaacaaaggaaacaaaatccaagacatacaactgaagacaagtgagccagatttcacctctgcaaatatgagagattctgcagaaggtcctaaagaagacgaagagaagccttcagcctcagcacttgagca

SEQ ID NO: 168577 - DNA, 4210 bp, Homo sapiens
  Payload ID: 13183
  Gene Symbol: PRDM4
  Gene Name: PR domain containing 4
  Uniprot ID: Q9UKN5
  ENST ID: ENST00000228437
  CDS Start-End: 461-2866
ggctgaggatccggaaacgcgccgcagagggtgcggcccagaggaggccgcgggccgggaagggccgggcgggacgggaaacgttagggcagcggcccccggggtgagggggccgagcggacgggcagggccccgaggcgaactctgcccggatgaggaacaaagcagtggggcaggcgcgtgcgcccccagcgcagctggcaggttgggcagcccccttcccgaagcttctggacggaaggccccaggtgttccccgagatgccccaacccgtggcggggtgcacggccaccggccctcgggagaagttgggcggccccgggcgaccccggggacgagtggccgcgtcggtgcagcggttgtgagcaagatgtggtagcacgtgaccctggaacgcaaaccctgatgcctgttccccaccacccgagcgctcctttctctgatatttggccccaagccgatgcatcacaggatgaatgaaatgaacctgagtccagtggggatggagcagctgacttcatcctctgtgagcaatgccttgccagtctcaggaagtcacctgggattggctgcctcacccactcacagtgccatccctgccccaggcctcccagtggcaattccaaacctgggtccctccctgagctctctgccttctgctctgtctttaatgctaccaatgggtattggggatcgaggggtgatgtgtgggttacctgaaagaaactacaccctacctccaccaccttaccctcacctggagagcagttatttcagaaccattctacctggcattttatcttatttagctgacagaccacctccacagtacatccaccctaactctataaatgttgatggtaatacagcattatctatcaccaataacccttcagcactagatccctatcagtccaatggaaatgttggattagaaccaggcattgtttcaatagactctcgctctgtgaacacacatggtgcccaaagtcttcatcccagtgatggccatgaggtggccttggacacagcaatcactatggagaacgtttctagggttaccagcccaatttcgacagatggaatggcagaggagcttacgatggacggtgttgcaggcgagcattcccaaatcccaaatggctccagaagtcatgaacctctgtctgtggattctgtgagcaacaaccttgcagcagacgctgtaggacatggtggtgtgatacccatgcatgggaatggcctggagctccctgtggtcatggagacagaccacattgcaagtcgggtcaatggcatgtctgacagtgccctcagtgactccattcacactgtggccatgagcaccaactctgtaagcgtggcactctctacctcacacaaccttgcctccctagaatctgtttccctccatgaagttggcctcagcctagaacctgtggctgtctcctccatcacccaggaggttgctatggggacaggtcatgtagatgtatcttcagacagtctttcttttgtatcaccttcactgcaaatggaagactccaattcaaacaaggagaacatggcaaccttgtttacaatttggtgtactctgtgtgaccgcgcctatccctcggactgtcccgaacatggaccagtgacttttgttcctgacactccaatagagagcagagcaaggctttctctcccaaagcagcttgttctccgtcagtcaattgtgggagcagaagttggtgtatggactggagaaaccattcctgtgcggacttgctttggacctctaattggccagcagagtcactccatggaagtagcagaatggacagacaaggcagttaaccatatctggaagatataccacaatggtgtcctagaattctgcatcattacaactgatgaaaatgaatgtaattggatgatgtttgtgcgcaaagccaggaaccgggaagagcagaatttggtggcttatcctcatgatggaaaaatctttttctgcacctcacaagatatccctcctgaaaatgaactgcttttttattatagccgagattatgctcaacagattggtgttcctgaacacccagatgtgcatctctgtaactgtggcaaggagtgcaattcttacacagagttcaaagcccatctgaccagccacatccataaccatcttcctacccagggacatagcggcagccatgggccaagtcacagcaaagaaaggaagtggaagtgctcaatgtgcccccaagcttttatctctccttccaaacttcatgtccactttatgggtcacatgggtatgaagccccacaagtgtgatttctgtagcaaggcttttagtgatcccagcaacctgcggacccacctcaagatacatacaggtcagaagaactacaggtgtaccttgtgtgacaagtctttcacccagaaggctcacctggagtcccacatggttatccacactggggagaagaatcttaagtgtgattactgtgacaagttgtttatgcggaggcaggacctcaagcagcacgtgctcatccacactcaagaacgccagatcaagtgtcccaagtgtgataagctgttcttgagaacaaatcacttaaagaagcatctcaattctcatgaaggaaaacgggattatgtctgtgaaaaatgtacaaaggcttatctaaccaaataccatctcacccgccacctgaaaacctgcaaagggcccacctccagttcgtcagcaccagaggaggaagaagaggatgactcagaagaggaagatctagcagactctgtggggacagaagactgtaggattaacagtgctgtgtattcagcggatgagtctctttctgcacataaataaaaggaaaagaaacaagcaattttggatgaaaatgcaaatggaaaaatacacataaccagttatctactataatggtttttatataaaatggttcctgatttattttcagccagtaatcaaaacagactgggaatgaataaagcacttacagaagagtatcctaatgaaaacactttaaaacagattgggaaaactgagcatgtgtcctgttttaagtggtggactgggagggaagtgtcaacttctgaggtctttatttacatgataatctgggagatgcatttatgcctgaatcaaagctgccttctgctcaaacaaatcagatttatttcacattcttccattattccattttcctgctggtcctgtgacttggtaacattctaaacggtccttgccccatagccatcctgattgctgatagtgttttatgcagactcttgtgacttatactcaccacagaatggattgggacacagcagcataagtgtgctacttggcagctagtaagtttaaagcaggacctgccttaactgctcctggccacttggaagtttagggtagatcttgttttccaaagtttcggcaggtgcctggagggcaaataaaaaagcagcagtcagtcagtagtcagtgatggagagaacaagaggagagatgcctggcctctgcccaagaaattagctttgatggaagcctgagcaagtcacctggttattgtaacgtggagatctttgtaggtttagacatggctccctgtctccagtaaacatccagccattcagacaaagggggcctggagatacagagagcccaaataatgcctgctggattgtctcctgatgagtacatgtggactcacctgaggaagggaaggaagggaataatcttttatgtttcatttaccttatgaaaagtgttaaaacattgccaactcaaaataacattatttaatgcatgtgcaaagttaggtcttcccagttgtctcagtgctgaggaacctcatcagagaagcatggaagatgccaaaggatttttggaaggtaaagaaggctgaatagtgaccacatgggcctgttttcagggtcccagcttagttaagtcacccatgcacctggtcattgtgtctcccatgcacatccagcgtttctcagaagcagacccacccttaagttgacaggattgatggaacatgctctcctgctcaaggcacaacctctgggctggagtagaggactctggtgggaaggttttgctgctaatgtatttatggaatgaatgtatttcattcaaatctgtattcctctaggaaggattaaaattaaacttttttaaaatacagga

SEQ ID NO: 168578 - DNA, 2591 bp, Homo sapiens
  Payload ID: 13183
  Gene Symbol: PRDM4
  Gene Name: PR domain containing 4
  ENST ID: ENST00000550376
  CDS Start-End: 399-1349
acgcgcggaggggcctgggctgggagaagggcgacgcggtgcgcgggcgccgcttgcgggccgcggcggggagggcgcacgcacgaggggcggagcggcgggcgctgagagtggctgaggatccggaaacgcgccgcagagggttgggcagcccccttcccgaagcttctggacggaaggccccaggtgttccccgagatgccccaacccgtggcggggtgcacggccaccggccctcgggagaagttgggcggccccgggcgaccccggggacgagtggccgcgtcggtgcagcggttgtgagcaagatgtggtagcacgtgaccctggaacgcaaaccctgatgcctgttccccaccacccgagcgctcctttctctgatatttggccccaagccgatgcatcacaggatgaatgaaatgaacctgagtccagtggggatggagcagctgacttcatcctctgtgagcaatgccttgccagtctcaggaagtcacctgggattggctgcctcacccactcacagtgccatccctgccccaggcctcccagtggcaattccaaacctgggtccctccctgagctctctgccttctgctctgtctttaatgctaccaatgggtattggggatcgaggggtgatgtgtgggttacctgaaagaaactacaccctacctccaccaccttaccctcacctggagagcagttatttcagaaccattctacctggcattttatcttatttagctgacagaccacctccacagtacatccaccctaactctataaatgttgatggtaatacagcattatctatcaccaataacccttcagcactagatccctatcagtccaatggaaatgttggattagaaccaggcattgtttcaatagactctcgctctgtgaacacacatggtgcccaaagtcttcatcccagtgatggccatgaggtggccttggacacagcaatcactatggagaacgtttctagggttaccagcccaatttcgacagatggaatggcagaggagcttacgatggacggtgttgcaggcgagcattcccaaatcccaaatggctccagaagtcatgaacctctgtctgtggattctgtgagcaacaaccttgcagcagacgctgtaggacatggtggtgtgatacccatgcatgggaatggcctggagctccctgtggtcatggagacagaccacattgcaagtcgggtcaatggcatgtctgacagtgccctcagtgactccattcacactgtggccatgagcaccaactctggtgtactctgtgtgaccgcgcctatccctcggactgtcccgaacatggaccagtgacttttgttcctgacactccaatagagagcagagcaaggctttctctcccaaagcagcttgttctccgtcagtcaattgtgggagcagaagttggtgtatggactggagaaaccattcctgtgcggacttgctttggacctctaattggccagcagagtcactccatggaagtagcagaatggacagacaaggcagttaaccatatctggaagatataccacaatggtgtcctagaattctgcatcattacaactgatgaaaatgaatgtaattggatgatgtttgtgcgcaaagccaggaaccgggaagagcagaatttggtggcttatcctcatgatggaaaaatctttttctgcacctcacaagatatccctcctgaaaatgaactgcttttttattatagccgagattatgctcaacagattggtgttcctgaacacccagatgtgcatctctgtaactgtggcaaggagtgcaattcttacacagagttcaaagcccatctgaccagccacatccataaccatcttcctacccagggacatagcggcagccatgggccaagtcacagcaaagaaaggaagtggaagtgctcaatgtgcccccaagcttttatctctccttccaaacttcatgtccactttatgggtcacatgggtatgaagccccacaagtgtgatttctgtagcaaggcttttagtgatcccagcaacctgcggacccacctcaagatacatacaggtcagaagaactacaggtgtaccttgtgtgacaagtctttcacccagaaggctcacctggagtcccacatggttatccacactggggagaagaatcttaagtgtgattactgtgacaagttgtttatgcggaggcaggacctcaagcagcacgtgctcatccacactcaagaacgccagatcaagtgtcccaagtgtgataagctgttcttgagaacaaatcacttaaagaagcatctcaattctcatgaaggaaaacgggattatgtctgtgaaaaatgtacaaaggcttatctaaccaaataccatctcacccgccacctgaaaacctgcaaagggcccacctccagttcgtcagcaccagaggaggaagaagaggatgactcagaagaggaagatctagcagactctgtggggacagaagactgtaggattaacagtgctgtgtattcagcggatgagtctctttctgcacataaataaaaggaaaagaaacaagcaa

SEQ ID NO: 168579 - DNA, 640 bp, Homo sapiens
  Payload ID: 13183
  Gene Symbol: PRDM4
  Gene Name: PR domain containing 4
  ENST ID: ENST00000547188
  CDS Start-End: 414-640
ggggcggggcgcggcggcccggcctgcgggccgcgggcgggctaatccacagcccttgggtggcggtgtcggcagcgcctggggctttcgggtagctgggatgggggctgcgaccttgttgtggttttggtgaccgctcttgtccccactcccccaggttgggcagcccccttcccgaagcttctggacggaaggccccaggtgttccccgagatgccccaacccgtggcggggtgcacggccaccggccctcgggagaagttgggcggccccgggcgaccccggggacgagtggccgcgtcggtgcagcggttgtgagcaagatgtggtagcacgtgaccctggaacgcaaaccctgatgcctgttccccaccacccgagcgctcctttctctgatatttggccccaagccgatgcatcacaggatgaatgaaatgaacctgagtccagtggggatggagcagctgacttcatcctctgtgagcaatgccttgccagtctcaggaagtcacctgggattggctgcctcacccactcacagtgccatccctgccccaggcctcccagtggcaattccaaacctgggtccctccctgagctctctgccttctgctctgtctttaatgctaccaatgggtat

SEQ ID NO: 168580 - DNA, 837 bp, Homo sapiens
  Payload ID: 13183
  Gene Symbol: PRDM4
  Gene Name: PR domain containing 4
  ENST ID: ENST00000550659
  CDS Start-End: 1-837
cccatgcatgggaatggcctggagctccctgtggtcatggagacagaccacattgcaagtcgggtcaatggcatgtctgacagtgccctcagtgactccattcacactgtggccatgagcaccaactctgtaagcgtggcactctctacctcacacaaccttgcctccctagaatctgtttccctccatgaagttggcctcagcctagaacctgtggctgtctcctccatcacccaggaggttgctatggggacaggtcatgtagatgtatcttcagacagtctttcttttgtatcaccttcactgcaaatggaagactccaattcaaacaaggagaacatggcaaccttgtttacaatttggtgtactctgtgtgaccgcgcctatccctcggactgtcccgaacatggaccagtgacttttgttcctgacactccaatagagagcagagcaaggctttctctcccaaagcagcttgttctccgtcagtcaattgtgggagcagaagttgttggtgtccttccactgacaggtgtatggactggagaaaccattcctgtgcggacttgctttggacctctaattggccagcagagtcactccatggaagtagcagaatggacagacaaggcagttaaccatatctggaagatataccacaatggtgtcctagaattctgcatcattacaactgatgaaaatgaatgtaattggatgatgtttgtgcgcaaagccaggaaccgggaagagcagaatttggtggcttatcctcatgatggaaaaatctttttctgcacctcacaagatatccctcctgaaaatgaactgcttttttat

SEQ ID NO: 168581 - DNA, 5330 bp, Homo sapiens
  Payload ID: 13184
  Gene Symbol: PRDM5
  Gene Name: PR domain containing 5
  Uniprot ID: Q9NQX1
  ENST ID: ENST00000264808
  CDS Start-End: 242-2134
gcgcccccgcagcaggaatggcaggaacggatccgggccgagcccgacccgggacgaggaggggctgagccgcgggggatcctggaatcggcagggaggtggggattctgggaggaaaactccatttcctccttccctgccggtttctcccctctaccctggcaccccaaatttcgatgtgccgcctgccgggcgctaagcgccggtgttgagagaggcggcggccgccgcgcccgggaaaatgctgggcatgtacgtgccggacaggttctccctgaagtcctcccgggttcaggacggcatggggctctacacggcccgcagagtgcgaaagggtgaaaagttcggaccctttgctggagagaagagaatgcctgaagacttggatgaaaatatggattacaggttgatgtgggaggttcgtgggagtaagggagaagttttgtacattttggatgctaccaacccacggcactccaactggcttcgcttcgttcatgaggcaccatctcaggagcagaagaacttggctgccattcaagaaggagaaaacattttctatttggcagttgaagatatagaaacagacacggagcttctgattggctacctggatagtgacatggaggctgaggaggaagaacagcaaattatgacagtcatcaaagaaggggaagttgaaaattctagaagacaatcaacagcgggcagaaaagatcgccttggctgtaaagaggactatgcttgtcctcaatgtgaatcgagttttaccagtgaggatattcttgctgagcatctccagacattgcaccagaaacccacagaggagaaagaatttaagtgcaagaactgtgggaagaaattcccagttaagcaggctttgcaaagacatgttcttcagtgcacagcgaaaagcagtctaaaggagtcttcgcgaagttttcagtgctctgtttgcaattcttccttcagttcagcatcgagttttgagcagcaccaggagacttgccggggggatgccaggtttgtgtgcaaggctgacagctgtggaaagaggctgaagagcaaggatgccctgaaaagacaccaggaaaatgtccacactggagatcctaagaaaaagcttatatgttcagtgtgcaataaaaagtgttcttcagcatcaagcctacaggaacatagaaagattcatgagatatttgattgtcaagaatgtatgaagaaatttatttcagctaatcagctaaaacgtcatatgatcacccactcagaaaaacgaccctataattgcgagatttgtaataagtctttcaagaggcttgatcaagtgggtgctcacaaagtaatacacagcgaagacaaaccttacaaatgcaaactttgtggaaagggatttgcccacagaaatgtttacaagaatcataagaagacccactctgaggagagaccgttccaatgtgaagaatgtaaagctttgttccggaccccattttctttacagagacacctgctaatacataacagtgagaggactttcaagtgccatcactgcgatgctacctttaagaggaaggatacattaaatgttcatgtccaggtggttcatgaaagacacaagaagtataggtgtgagctatgtaataaggcctttgttacaccttcagtgcttagaagtcataagaaaacacatacaggagaaaaggagaaaatctgtccatattgtggccagaaatttgccagcagtggtacactcagagttcatatccggagccacacaggtgagcgtccctatcaatgtccttactgtgaaaaaggattcagtaaaaatgatggactgaagatgcacattcgtactcacaccagggagaagccgtacaagtgctcagagtgcagcaaggccttcagccagaagcgaggcctggatgagcacaagaggacgcacactggagaaaagccttttcagtgtgatgtttgtgatttggcttttagcctgaagaaaatgctgattcgacacaagatgactcataatcccaatcgtcccctggcagaatgccagttttgccataagaagtttacaaggaatgactacctcaaagtgcacatggacaatatccatggtgtagctgacagctaataggggctgtaaaggaattaaactattcagaagggctcctaatatgaatcccagatttttatcacctgatcagcataacagaagtagccaaaagtgacttactggtctcatagttcttatttgcctacatttagagtctgtagatgcatatgcaaccaaaaaaaagtcttacttttaacaagaaatggtataaatggaaaaaaaatacaactccatagccttgcaaaatgcaacttgtgctctgtcttataaaaatggagaaaggagtcatggctctctttcttggccatccctctgtaatgaagtttataatatacttccctaataggcctttttattttattgttattctttgtgtgtctgtgtgtctgtgtgtctgtatgtgtctgtgtgtgtgcactcacttgcaaatgccagttgttgcagctggttttaccaatttaaatagaaataaatcaagatatccaactatttctttgcagatgaggataagaataagttatcaaagtctcaagtttgataggaaaataaatagttgctattttataagacaaaccaagagctgagcttatctaatagctctgtgcaacaaatgagtttaaaatagatatttgataactaaaacatctattaaaatattgctcattttagaggattcttaggaaacattatttattctcatcattcagatgcagacattcatggtctggaatacttttataagttctacacaaaaatgaccatcacatttaaatattcagcaggctacccctcttgaatttagaccatttagctttagaaattaacagtataccaatatatataattaaaaatagaaaccaaatagattctctgtatttggcaacagagtggcagaacaatagtggcatctccacatttgttaggatgaacatagccctttcccctctccttccataaaagtgcacagaacatgttagtgcagatacagtcctcagaacattaacattccattttgcaaaagacattttccagaatcttggcagtaggtaattctgaaacacttttgaattaccttcaatcatcccatataattaggaatccagaatacaaagtacaaacttggcaattgttatgattgaaactgtcactgatgcttaagggaaattgaagcaagaagcataatttcttcctttaggttatatttcagcaaaatacttgacagcaacatacaatgaacagcttgtttggagagatgatatgatacaatgtaatagtgatgtcaaaataacctggaggaatatccaaaaaccagaaaaacgttaaaatgaagcccaactcatgaacctctctaactgaagcccagtcaaaagaaaggaagtatagttttaaggaagttatttggttctaatgagttaaggagaaaggttatctgagacacagttctttgacttcaggaatctcattttagaattatattcatgcccagttccagttttaaaaagaaacataaagattcaatgtagacatttgaatgttgtaaaatactaaatttgaaactcagaagagataacttttaaaaacataaatcctaaaattatagtttagaagatatttaagtatagttatatgtagtattttgaatctgaaattatagactgtattttataaaaataaattttggtcttgtttctcactatatcatttgtttcaacaatatatttttagatctaaagtgttttcattttaatatgatagtgtgtttaatatcatttgaatataaaaagacagctgtaaaatttgatagtgtgtattatttaagcacatcctgtatatttctttgaatgctgctttctctatatgggatgctttatatcccgattatgtgatgaatgtaaaacttgaaaggagtccaaattccaattttgtgtaatctcagtgagtcacagttcacatggctgctggggaaattaccctgaaaactgtggtgtcgctatgctgtggagtaaacagacaggcaagaggtgctgggctttatcctgctgaaggtttatagacatggaaatctttagaaaatggtgtagaaggacctacaccagagagtggtacaccactctctcctttcagaggactgaaaccaaaacaagtccttagtagactatttgtatgctgtaaatttttatccaaaagacaagtattcatgggtagtttcagatatattagcatttgcttgctaaaacttttaaattacttagtaataaccaaaaaaagacactattttaggcatgattgatcaattgaaagcatagataatcataaggaaaagtcttacagacaagctgaagtacaggtacctactttgaaatgtcttctgtttcctgctgtgaaagattttggctggggtattttcttgagaaaagaccagacccttaggtgcctataaagtctaagtaattgagacttagaaattggctaagtaaatttaagagacgttcaataatgtaggtgggttcagatacccttttataataactgtcttcttagtatattaacactcaagatgtttgtgtatctttaatttgcctttgtttcacaataactggcttttgttttccttttcatggtgtgttgttggctatatagaggcatttattggtaaattataatcagcagttgcaccatggaagtattcttggtgataaattcttggggttacatagtatagttaacatgttattttcaagaaacatgagtgtgtgtgtctgtgtgtgtgtgtctgaagagtatcacttatatgcagtgcatatacatgtaagtgcattactttgctcaaatatcttctgacctattacagtcaactcatgcatgagtgtgaacatgtattacagaaggtcttacagccttagtttctgttttagattttatgtgctgcttcctttctcaaacaaaagcatgaaaggaaagaggataagtactagaaatattcatttttttccttcacaaatctaaatgttgcttatgaaaactcatcttagagtaatgaatatgtggaagtgggtaggtaggaggaaatgtgcctctttaaaatcctaaaattttaccattgatattgacatttgtttgcgtgtatataaatggagcatgtgtaaatatagaattccaatagcattttttattttattataaatctataataaatatatataaatcactacca

SEQ ID NO: 168582 - DNA, 2492 bp, Homo sapiens
  Payload ID: 13184
  Gene Symbol: PRDM5
  Gene Name: PR domain containing 5
  Uniprot ID: Q9NQX1
  ENST ID: ENST00000394435
  CDS Start-End: 263-598
gcgcccaggcccgcgccccccgcgcccccgcagcaggaatggcaggaacggatccgggccgagcccgacccgggacgaggaggggctgagccgcgggggatcctggaatcggcagggaggtggggattctgggaggaaaactccatttcctccttccctgccggtttctcccctctaccctggcaccccaaatttcgatgtgccgcctgccgggcgctaagcgccggtgttgagagaggcggcggccgccgcgcccgggaaaatgctgggcatgtacgtgccggacaggttctccctgaagtcctcccgggttcaggacggcatggggctctacacggcccgcagagtgcgaaagggtgaaaagttcggaccctttgctggagagaagagaatgcctgaagacttggatgaaaatatggattacaggttgatgtgggaggttcgtgggagtaagggagaagttttgtacattttggatgctaccaacccacggcactccaactggcttcgcttcgttcatgaggcaccatctcaggagcagaagaacttggctgccattcaagacaagaatttgggacccgccgaatggcgaggctaaaagagctgtaacacagacaagactgagacctgctccttgcttgccacattgcgagtgaagagaaggagagaagagctgcagcctttcagggatcccagacctgggagctccccaagccagggctgtgactccttctttggggtgctgcagttcctggtgtctccgagcttctggatgccactgtgttccctggtgtcagctgtggaagctacttgcggtgtgcctgtcccagctgcagcctggcagagagctggcacctgtgctggcacctggagctgcccacccttctgcagcagccggcatatctgactgtgcattggccagaccccacactcactctcacaccccttgccgctccatgcagtctcccttggcaggtgtggaatccaggccattagtgtgagctgaacacagcctgccaggtcgagtgagcagaatgagctcagtgggctgaagcaaaaatttgggcaaaggcacgactggccacagaggtttccagccagaaaagcaacaccccaaagatcccataataataggagtgcaaaacctgttgtaaactgtgcatgccagggatctaggttgtgtgttccttatgagaatctagctaatgcctggtgatctgaggtggaacagttttatcccaaaaccatccccagccccatccctgtccatggaaaaactgtcttccacaaaacctgttcctgatgccaaaaaggttgggcactgctattctataccgctgtaggatgactatagttaacaataatatatagtttcaaaaagctagaaggaagacattgaatgttcccaacacaaagaaatgatacatgtttgagatgatggatatgctgattatcttgatctgatcactatacatgatatgtattgtaacatcactaggtaccccatgaatatgtacaattatgtgtcaagataaataagtaataaaataaaaagctttatcttattccccaaaaaaagacagcttgaggaaaggaaaaaggaagattactagcagagttgtaggctattgtctatggtactttactgcatgaagaaggtacagaggctgaatggaagaggggttgtaaaactggagtatgggctttcctttcacatggagctttgtttaacagaagtctagaaagtagatataagaatcattatcatggttagtttatgtcaaaactatacatactgtcttattatacttaattaaatgggtaatcatttgactagtgtgtctatgagttcgtaagttggtacttaatggttatattatttaattcacctcagtggacagagattaaaacagagtcattttctggttccttttcctgtggttaattaagtcctttgagatatggctgtatacactttatggtggtttacacatgtctgttttattagttttgcagacagtagacaggaacaaaaaggggcatagtcattcttgctgtgagttaaccctacacttctccaagcagtagaatgtaaactcaactaggcttttgagaactttccctcagtgacttaattaattccatgcccatttctggactttggaatatagcatgcatctatgtagcttgttttttactttatcaaatttaaaatgctcattatcgaacatttatatttttatattaaacttttgtaagtataacctgcttggtttcaaatatttcacatgcaacatgacattggttggaataatgttatgttgtatgtaaaagtgtaagttgtatgtaaaagattaatatcacaatcctttgaaatactttgcaccttgctattgaataaagttgatgacttttaattctgttgacataatctagaacccatagggaaactctatgataatgttttacttctagaaagtcagtcaataagt

SEQ ID NO: 168583 - DNA, 2338 bp, Homo sapiens
  Payload ID: 13184
  Gene Symbol: PRDM5
  Gene Name: PR domain containing 5
  Uniprot ID: Q9NQX1
  ENST ID: ENST00000428209
  CDS Start-End: 251-2050
gcgccccccgcgcccccgcagcaggaatggcaggaacggatccgggccgagcccgacccgggacgaggaggggctgagccgcgggggatcctggaatcggcagggaggtggggattctgggaggaaaactccatttcctccttccctgccggtttctcccctctaccctggcaccccaaatttcgatgtgccgcctgccgggcgctaagcgccggtgttgagagaggcggcggccgccgcgcccgggaaaatgctgggcatgtacgtgccggacaggttctccctgaagtcctcccgggttcaggacggcatggggctctacacggcccgcagagtgcgaaagggtgaaaagttcggaccctttgctggagagaagagaatgcctgaagacttggatgaaaatatggattacaggttgatgtgggaggttcgtgggagtaagggagaagttttgtacattttggatgctaccaacccacggcactccaactggcttcgcttcgttcatgaggcaccatctcaggagcagaagaacttggctgccattcaagaaggagaaaacattttctatttggcagttgaagatatagaaacagacacggagcttctgattggctacctggatagtgacatggaggctgaggaggaagaacagcaaattatgacagtcatcaaagaaggggaagttgaaaattctagaagacaatcaacagcgggcagaaaagatcgccttggctgtaaagaggactatgcttgtcctcaatgtgaatcgagttttaccagtgaggatattcttgctgagcatctccagacattgcaccagaaacccacagaggagaaagaatttaagtgcaagaactgtgggaagaaattcccagttaagcaggctttgcaaagacattttgagcagcaccaggagacttgccggggggatgccaggtttgtgtgcaaggctgacagctgtggaaagaggctgaagagcaaggatgccctgaaaagacaccaggaaaatgtccacactggagatcctaagaaaaagcttatatgttcagtgtgcaataaaaagtgttcttcagcatcaagcctacaggaacatagaaagattcatgagatatttgattgtcaagaatgtatgaagaaatttatttcagctaatcagctaaaacgtcatatgatcacccactcagaaaaacgaccctataattgcgagatttgtaataagtctttcaagaggcttgatcaagtgggtgctcacaaagtaatacacagcgaagacaaaccttacaaatgcaaactttgtggaaagggatttgcccacagaaatgtttacaagaatcataagaagacccactctgaggagagaccgttccaatgtgaagaatgtaaagctttgttccggaccccattttctttacagagacacctgctaatacataacagtgagaggactttcaagtgccatcactgcgatgctacctttaagaggaaggatacattaaatgttcatgtccaggtggttcatgaaagacacaagaagtataggtgtgagctatgtaataaggcctttgttacaccttcagtgcttagaagtcataagaaaacacatacaggagaaaaggagaaaatctgtccatattgtggccagaaatttgccagcagtggtacactcagagttcatatccggagccacacaggtgagcgtccctatcaatgtccttactgtgaaaaaggattcagtaaaaatgatggactgaagatgcacattcgtactcacaccagggagaagccgtacaagtgctcagagtgcagcaaggccttcagccagaagcgaggcctggatgagcacaagaggacgcacactggagaaaagccttttcagtgtgatgtttgtgatttggcttttagcctgaagaaaatgctgattcgacacaagatgactcataatcccaatcgtcccctggcagaatgccagttttgccataagaagtttacaaggaatgactacctcaaagtgcacatggacaatatccatggtgtagctgacagctaataggggctgtaaaggaattaaactattcagaagggctcctaatatgaatcccagatttttatcacctgatcagcataacagaagtagccaaaagtgacttactggtctcatagttcttatttgcctacatttagagtctgtagatgcatatgcaaccaaaaaaaagtcttacttttaacaagaaatggtataaatggaaaaaaaatacaactccatagccttgcaaaatgcaacttgtgctctgtcttataaaaatggagaaaggagtcatggctctctttcttggcc

SEQ ID NO: 168584 - DNA, 2259 bp, Homo sapiens
  Payload ID: 13184
  Gene Symbol: PRDM5
  Gene Name: PR domain containing 5
  Uniprot ID: Q9NQX1
  ENST ID: ENST00000515109
  CDS Start-End: 258-1763
caggcccgcgccccccgcgcccccgcagcaggaatggcaggaacggatccgggccgagcccgacccgggacgaggaggggctgagccgcgggggatcctggaatcggcagggaggtggggattctgggaggaaaactccatttcctccttccctgccggtttctcccctctaccctggcaccccaaatttcgatgtgccgcctgccgggcgctaagcgccggtgttgagagaggcggcggccgccgcgcccgggaaaatgctgggcatgtacgtgccggacaggttctccctgaagtcctcccgggttcaggacggcatggggctctacacggcccgcagagtgcgaaagggtgaaaagttcggaccctttgctggagagaagagaatgcctgaagacttggatgaaaatatggattacaggttgatgtgggaggttcgtgggagtaagggagaagttttgtacattttggatgctaccaacccacggcactccaactggcttcgcttcgttcatgaggcaccatctcaggagcagaagaacttggctgccattcaagaaggagaaaacattttctatttggcagttgaagatatagaaacagacacggagcttctgattggctacctggatagtgacatggaggctgaggaggaagaacagcaaattatgacagtcatcaaagaaggggaagttgaaaattctagaagacaatcaacagcgggcagaaaagatcgccttggctgtaaagaggactatgcttgtcctcaatgtgaatcgagttttaccagtgaggatattcttgctgagcatctccagacattgcaccagaaacccacagaggagaaagaatttaagtgcaagaactgtgggaagaaattcccagttaagcaggctttgcaaagacattttgagcagcaccaggagacttgccggggggatgccaggtttgtgtgcaaggctgacagctgtggaaagaggctgaagagcaaggatgccctgaaaagacaccaggaaaatgtccacactggagatcctaagaaaaagcttatatgttcagtgtgcaataaaaagtgttcttcagcatcaagcctacaggaacatagaaagattcatgagatatttgattgtcaagaatgtatgaagaaatttatttcagctaatcagctaaaacgtcatatgatcacccactcagaaaaacgaccctataattgcgagatttgtaataagtctttcaagaggcttgatcaagtgggtgctcacaaagtaatacacagcgaagacaaaccttacaaatgcaaactttgtggaaagggatttgcccacagaaatgtttacaagaatcataagaagacccactctgaggagagaccgttccaatgtgaagaatgtaaagctttgttccggaccccattttctttacagagacacctgctaatacataacagtgagaggactttcaagtgccatcactgcgatgctacctttaagaggaaggatacattaaatgttcatgtccaggtggttcatgaaagacacaagaagtataggtgtgagctatgtaataaggcctttgttacaccttcagtgcttagaagtcataagaaaacacatacaggagaaaaggagaaaatctgtccatattgtggccagaaatttgccagcagtggtacactcagagttcatatccggagccacacaggagaagccgtacaagtgctcagagtgcagcaaggccttcagccagaagcgaggcctggatgagcacaagaggacgcacactggagaaaagccttttcagtgtgatgtttgtgatttggcttttagcctgaagaaaatgctgattcgacacaagatgactcataatcccaatcgtcccctggcagaatgccagttttgccataagaagtttacaaggaatgactacctcaaagtgcacatggacaatatccatggtgtagctgacagctaataggggctgtaaaggaattaaactattcagaagggctcctaatatgaatcccagatttttatcacctgatcagcataacagaagtagccaaaagtgacttactggtctcatagttcttatttgcctacatttagagtctgtagatgcatatgcaaccaaaaaaaagtcttacttttaacaagaaatggtataaatggaaaaaaaatacaactccatagccttgcaaaatgcaacttgtgctctgtcttataaaaatggagaaaggagtcatggctctctttcttggcc

SEQ ID NO: 168585 - DNA, 1044 bp, Homo sapiens
  Payload ID: 13184
  Gene Symbol: PRDM5
  Gene Name: PR domain containing 5
  ENST ID: ENST00000502409
  CDS Start-End: 1-437
gaaaagatcgccttggctgtaaagaggactatgcttgtcctcaatgtgaatcgagttttaccagtgaggatattcttgctgagcatctccagacattgcaccagaaacccacagaggagaaagaatttaagtgcaagaactgtgggaagaaattcccagttaagcaggctttgcaaagacatgttcttcagtgcacagcgaaaagcagtctaaaggagtcttcgcgaagttttcagtgctctgtttgcaattcttccttcagttcagcatcgagttttgagcagcaccaggagacttgccggggggatgccaggtttgtgtgcaaggctgacagctgtggaaagaggctgaagagcaaggatgccctgaaaagacaccaggaaaatgtccacactgtattagtacatggaaaagtgaaaggcctgttttatatatgagaaaggtggtatatgaagctgtgaagatgtctcaaatttaaaaagaaagcatttacacagaatgggagaaaatatttgcaaactacccatctgacaagtgattaataaccagaatatataaagtgctcaaacaactcaataggaaaaaaatcaaataatctaatgaaaacatgaagaaaatatctgaatagacatttttcaaaagaagacaaatggccaacaggagatcctaagaaaaagcttatatgttcagtgtgcaataaaaagtgttcttcagcatcaagcctacaggaacatagaaagattcatgagatatttgattgtcaagaatgtatgaagaaatttatttcagctaatcagctaaaacgtcatatgatcacccactcagaaaaacgaccctataattgcgagatttgtaataagtctttcaagaggcttgatcaagtgggtgctcacaaagtaatacacagcgaagacaaaccttacaaatgcaaactttgtggaaagggatttgcccacagaaatgtttacaagaatcataagaagacccactctgaggagagaccgttccaatgtgaagaatgtaaagctttgttccggaccccat

SEQ ID NO: 168586 - DNA, 9267 bp, Homo sapiens
  Payload ID: 13185
  Gene Symbol: PRDM6
  Gene Name: PR domain containing 6
  Uniprot ID: Q9NQX0
  ENST ID: ENST00000407847
  CDS Start-End: 415-2202
ctctctcacacacacacacacacacacacacacacacacacacacacacacacacacacacacacacacactcactctattttgtgctgtcgtaaaacccacgtgtccagccgggaagctgccagagcgtggaaccaaggagccaggacgcggcagcggccaagcgcagcagcccacggcggttgagtcgggcgcccaggtccgtccgcactctcgcgccctccgcgggcctcccaattttctcgcttgcaggtcgggaggtttccgggcggcacaatctctaggactctcctcccgcgctgctcaggggcatgtagcgcacgcagggcgcacactctcgcgcacccgcacgctcaccgagacacccgcacgcacccaccggcagcaccgagttttcagttcgaggcgccggacatgctgaagcccggagaccccggcggttcggccttcctcaaagtggacccagcctacctgcagcactggcagcaactcttccctcacggaggcgcaggcccgctcaagggcagcggcgccgcgggtctcctgagcgcgccgcagcctcttcagccgccgccgccgcccccgcccccggagcgcgctgagcctccgccggacagcctgcgcccgcggcccgcctctctctcctccgcctcgtccacgccggcttcctcttccacctccgcctcctccgcctcctcctgcgctgctgcggccgctgccgccgcgctggctggtctctcggccctgccggtgtcgcagctgccggtgttcgcgcctctagccgccgctgccgtcgccgccgagccgctgccccccaaggaactgtgcctcggcgccacctccggccccgggcccgtcaagtgcggtggtggtggcggcggcggcggggagggtcgcggcgccccgcgcttccgctgcagcgcagaggagctggactattacctgtatggccagcagcgcatggagatcatcccgctcaaccagcacaccagcgaccccaacaaccgttgcgacatgtgcgcggacaaccgcaacggcgagtgccctatgcatgggccactgcactcgctgcgccggcttgtgggcaccagcagcgctgcggccgccgcgcccccgccggagctgccggagtggctgcgggacctgcctcgcgaggtgtgcctctgcaccagtactgtgcccggcctggcctacggcatctgcgcggcgcagaggatccagcaaggcacctggattggacctttccaaggcgtgcttctgcccccagagaaggtgcaggcaggcgccgtgaggaacacgcagcatctctgggagatatatgaccaggatgggacactacagcactttattgatggtggggaacctagtaagtcgagctggatgaggtatatccgatgtgcaaggcactgcggagaacagaatctaacagtagttcagtacaggtcgaatatattctaccgagcctgtatagatatccctaggggcaccgagcttctggtgtggtacaatgacagctatacgtctttctttgggatccccttacaatgcattgcccaggatgaaaacttaaatgtcccttcaacggtaatggaagccatgtgcagacaagacgccctgcagcccttcaacaaaagcagcaaactcgcccctaccacccagcagcgctccgttgttttcccccagactccgtgcagcaggaacttctctcttctggataagtctgggcccattgaatcaggatttaatcaaatcaacgtgaaaaaccagcgagtcctggcaagcccaacttccacaagccagctccactcggagttcagtgactggcatctttggaaatgtgggcagtgctttaagactttcacccagcggatcctcttacagatgcacgtgtgcacgcagaaccccgacagaccctaccaatgcggccactgctcccagtccttttcccagccttcagaactgaggaaccacgtggtcactcactctagtgaccggcctttcaagtgcggctactgtggtcgtgcctttgccggggccaccaccctcaacaaccacatccgaacccacactggagaaaagcccttcaagtgcgagaggtgtgagaggagcttcacgcaggccacccagctgagccgacaccagcggatgcccaatgagtgcaagccaataactgagagcccagaatcaatcgaagtggattaacggattgactggttggaattaaactgcaaggaaagtcatgattaaatgtcacggacacttaagcaaaaccaaagatttcctctgagcaactttcaatcagtcccagaaaaccaaaagcagtaataaaataagtaagatgttaagagatattgatcctggcatggaagtcagaccaggaaagagattatttatttatgacttagggatgagacttatttcagtggacaactaacctgggatggttaacatttccagtcccaccatgtattttgctttgtttctaaaaagctttttaaaaactgttatttaataccaaagggaggaatcgtatgggttcttctgcccaccgttgtgactaagaatgcacagggacttggttctcgttgcacctttttttagtaacatgtttcatggggacccactgtacagcccttcattctgctgtgtcagtttggcctggcctgacactggctgccccagcggggaccacggaagcagagtgagagccttcgctgagtcaatgctaccttcagccccagacgcatcccatttccatgtcttccatgctcactgctcatgcactttttacacggtttcttccaaacagcccggtcttgatgcaggagagtctggaaaaggaagaaaatggtttcagtttcaaaattcaaaggaaaaagttgaggacttattttgtcctgtcaagattgcaagaacatgtaaaatgtacggagcttcataatacgttatattgttccgaagcagctcgttgagaaacatttgttttcaataacattttagcttaaaaaaaaaaaaagaaaatgaaaataaagttctttggtttaaggctggagataaggtgttaggcttcattgtaatttttttagttgtttctgtgaaagtgttgaacatgtgaacaaaaatagtgccaaaccccatcgtcaaggcccttttagcaattttatctttcttcctcttgcagatgaaccccaggagccccctttcctctctcctgagtgtgggaggagcatgtctacaaacacaagtgaaaatagcccagacaaggagactttgagaggaggaaccatggagaaggttgtggttagaacagatagcccaggagcagctaattttatcaataggattactttgtcttttcttgagattgattaattgaaagagaaggaattctccacacaatttcactattctttgagtgctgagaatgtgagtttaatttcagctagcctgttggtggttcaacagtggtgctcaatgaaattgggtcacatttaatgaaatgatctagttttgggaagagctgatagctcccagcagcatctcagcgactgtctaccttgatggccagtttagataaaaactgttcagttttatctagagtgtttaataacaacagtttctgtttgtaaatttcatcatcacctgatatcaggacacagtcttttaaggaactccttgtctttgagctttcccattgtcttccctcaataaaaatgagacacataactgaactcactactaaaaggcaaggatactgtgtggtttagtttaatctattattatgtatctggctctgagaaaatctctcttcccttttaattttgcttctctattccttagcaccccagctaccacattttaaatggaattcaacagggtctaattaataagtgtttacagttattatttatatacgtatatatacatatatacacataataataatctctagaaccctgggccataaagaaaaaaatggctaattctgacctctgttgcccaatctcaagccattcacctagaattttcctccagttcttactatctcctggtcatgaaagtagtaaggaatctatgctgctgtataacagtagctgattgaaactattctctctggtagttaggaatgtgttctgattttacaattccctgccctaagtgatggatacgtttgcaaacaatgtgcgtcactgggaagtgtgaatgaaatgtagccatattaacctgaaacctgcaagaaaaggacagatcagcttcacagatgagtaagctgttccatttgttaaggttgaaagatttactcaaactttttgaaaacaacagtagggaatcacctgtatatttctaattttttttttcatttgaaaaatcagctcagccatttgccacatttcacagtggaacaccatgtactactcagttctcatgagcttcagaacgtgggagaatgagaaggcttccctcctcccttgatgtctggcatgggaaggttttccttaacaatgatctctctgccaccctgatagctttgctagctgatcccaaacttccactgaatgtggcagtaacctgtactccaaaacactcttctagtgttctgctccatttaaatctatttttatcctctattattaagagaaattgttggcatatatattccaccaaatttggtcagaaaatattttctgcctaacaaatagaaaattggatactctaattttccaggcatgtgggcacattcacaatttttacattgctgtcctattgccagcttctagcagaccagcctaggctgtctgtccacaaagacaggcttacacctggacattgacttggaaccctgaagcaggtactgagatcatttgggtccaaaatgattttaatctaagtgtatgctggggaggaggtttctctttgaaacttcctaacaattgctttagccttttctatttaaagtggacacacagtcccctgggatacagcaaatgggtggtagaaattgcagtcgtaaaatttgccagtttttcttattagtaacttcctaattagtagtgctataaagagagtaaatgctctgaatcactggggaaaggatatttaagataagaaaggtagtctgtcagagctgaatcagggtttggctcttgaagcaatccttctttactcttttctttcaatggggataaaataataataattttttcagaataagacttttcatcctagcgtatgttcctttatttagcagagtctaagacgaaaggtaatgccagggaaaagtcagggtgcaataggatgagagatggagctgcagacctttgcatttctagaaaaatctcaatatcccaaggcaaagttgtattttccccaggatatgtgcatacatttttcatagataagcttttcatttttgttttgtttttatctttaaaaatgacttttttggaggagatatacttctaaaaagttattgtatggctaattaaagctatgaaacttaatctcatataatttatataatttgattcagttggtacattttttattgtgttcatttaaatgtagccttcttgggaaactatgtataacaggaaaagatcatgacatcattgtgtcctcatagggctcataattgaattttaccttgtaaaaatttcattctggttcaggtatgcaaagatttatacgaacatttagcagttcatcaatttttaaatcagatgttcattgtttcattcatttattcaacaagtatttattgaactcttattttatataaagaccccattttatgtgttcaccataagcagcattatttaagtgactattcatgataaaataatattctcctcctaagtggctgctagtaaaatgggtattttagtcctttagaccattgtctcagtgaagttaaagattttgttccaactgggaaaatctgagagaggtaaattcatctggggaccagaaaatagcatattgcaaaacaagttaagatgcacaacttggttgtctttgcttaactcactgggctattggttgttagcagcagtatcaagagaccaggattagggcctgggtcttgggtttttatgaccccccctttcaatgataaggcaacaagttgggtacaaggctggagttgctcagggaaggagatctgcgaccctgaatgggtcagagttgcctcattagtggtaagcgttggcagtgtagtccctttccccggtgtgcagaagtaacattatttgttttgcactaatttaaaatttaaaatgcaagtatctattgagttgtttaaaatgggaatcatggcacgtctcacaaagagggcatttccagaacagcagggttaacgggtccctctgagtgtacccagcagcctgcgtttaggagcaaattcattgctctcatattaaggctatgcatgcctacagaaaccaggccaggaataagaaataaataatcacatttcctgaaatgtttatctgtttcttccttgacatgaatttaatttttatttcccagagtctttactagatcctgacatcagattttaaaagatactgagatatatgcttctttaaatgataactgtaagttccagaaatgttattcacttgtcaggatccttttaaggtgaagagctttggaaaattttatgcgctaactagatacctgggtgatcatcaacccaaagtttaaagttctcccctcactagcatttatctgaactaccacaaaacaacaacgcaggttactaggaaggcacctatttcagccctccccaagattgcattctacaaacccagagatcagctgtcaggtacaactggccagacagagccaaactgaaaagaatattgctttatctgtggaaaccttgccacagatgtttaacctgtagtccatggctgtgtttgacatttaaaatatttatttagtttcttcctttaaataataaatgccagatgtttcatcagatcaatatgtaaaacgataacaaaaaatatgtcggaaacaggtcaaagtcatgaaacatttgaattgtctttcctatagactgaatatgccaccactgcacttagaaaacctatggaggaaattttaatggaaaaataaggacattctgcgcttattcccacagaggttgatgggaatgatgatgattataaattatattgtgcaattactgccatgccttgttctaatgcttaatgtggattatctcttttaatccttagtaactctataacaaagatactatcattatccccttctcatatatgcttaacagttttagctttgtagcttctttagtttttttcctccttcaaagccataaacaggcaattgttaaaagaggaaaatacttctctatgtaaagcttttttttgagaacaagagcttttaaaaattaataaacacaagtataatttatttataaaatgtgtttgtggaaacaatactgaagtgctattaaaacacgtatcattatagatgctgattttgtcatgcccaaatctcattgctggacagaatttcaactattccattgctgtcaggcattgtttttgtttttctaagcaggaatctaaaattccacattgaaagaaaaaaaaataaccctctcaagtgtgatatacattaggacaaatggcaacaggcaggaagggcaggttgtgttggagggtggccagaagagaataaggttcgaacactatcgacaggtaaaaacacatcctcaacggggctaagtgaaatctcgttttctttctttgttctgactgaatgctaagtgagttactttccaggcatcaatggagtcattacgcagttgtgtgcattaagaatatgggcttatgttgttagcctgttggtttaaagcagtgcagcagaaagactggagtcattataggtttggtttgtcaaaggcacagatagtgtagttacatgcatgaggtactcaaggaaccagttcaagttctggggcacaatctagatgaaactgtgaggtttgttcaaaaagtaagtgtacaaaatttcatcatgaactggctttattacaactctttaccgtggtttattgaaaccacaatgtatactactttcctccagattctgattctaatgggcacatttgtttgttgaaatgataaatatattttccttgtcaaacatggtgggtcctggttgatatctcctgtttcctgccttgaaaaacatccttgttggtgcctttctcccactttggtacatcactcccaactgaaaacagtctagatataaactttaacaagctggagatctatttctacagcacaactctttcatgtttaaaagcaattatgccgtatcaggtgattgccacatgttggggaaagcagccatcttagagcaaaagtctgccaacccacagtccctgttgatccacatgtgggcattgtctaatgttaacaaaatcagcacttgtagacttactttctctgaacaatctagtacacttctctagtttctcccaacctggagaaaatgtatagcaaaagccagaggcaaaattattctccttagcagttctaagtatttcatgaaaaagccttcccccagtttaaatgcagaggctaaggtgatgactaacgaattaaggaaaactttggctcagatcagcaaaattattttggaaacttaatgtcccaagttaattattttttttatatcaaggggaagacatccagttctgtaggatgctaatagaagtgtgatatttagatgctattaggacattgtatacatttctttaatgtggttattttaagtttaggactgtaaatgttccctactggaatagaaatatgtctctctccaactttccaccaaataaaatggttagagtgaatgcccagtttcacatctgccttttggagtttggaaagcttaaacaagtcagttaagagaatgagaagaatctcactgtgggtgataaggagtgtgtagtttgctgtaagggccactgatatgacaagaatgattatcccacagtaagaatgggtaaaacttaataaagttttctaactttattaaactcacattatttaatgaaaaaataactgcaaaggaccaatgagatcatgcatgctgctgtattcttgtgatggaatctaccaggattaagttgtatttaaatgaaaaaacaggtacacatttagagatcattgaccaagaaatgtaaatatatttgattaataaaacgtttttatgatgactcga

SEQ ID NO: 168587 - DNA, 699 bp, Homo sapiens
  Payload ID: 13185
  Gene Symbol: PRDM6
  Gene Name: PR domain containing 6
  ENST ID: ENST00000434521
  CDS Start-End: 1-220
tgcggccgccgcgcccccgccggagctgccggagtggctgcgggacctgcctcgcgaggtgtgcctctgcaccagtactgtgcccggcctggcctacggcatctgcgcggcgcagaggatccagcaaggcacctggattggacctttccaaggcgtgcttctgcccccagagaaggtgcaggcaggcgccgtgaggaacacgcagcatctctgggagtaaatgtcccttcaacggtaatggaagccatgtgcagacaagacgccctgcagcccttcaacaaaagcagcaaactcgcccctaccacccagcagcgctccgttgttttcccccagactccgtgcagcaggaacttctctcttctggataagtctgggcccattgaatcaggatttaatcaaatcaacgtgaaaaaccagcgagtcctggcaagcccaacttccacaagccagctccactcggagttcagtgactggcatctttggaaatgtgggcagtgctttaagactttcacccagcggatcctcttacagatgcacgtgtgcacgcagaaccccgacagaccctaccaatgcggccactgctcccagtccttttcccagccttcagaactgaggaaccacgtggtcactcactctagtgaccggcctttcaagtgcggctactgtggtcgtgcctttgccggggccaccaccctcaac

SEQ ID NO: 168588 - DNA, 2008 bp, Homo sapiens
  Payload ID: 13186
  Gene Symbol: PRDM7
  Gene Name: PR domain containing 7
  Uniprot ID: Q9NQW5
  ENST ID: ENST00000449207
  CDS Start-End: 21-1499
ttctagacagtcccagcaccatgagccctgaaaggtcccaagaggagagcccagaaggagacacagagagaacagagcggaagcccatggtcaaagatgccttcaaagacatttccatatacttcaccaaggaagaatgggcagaaatgggagactgggagaaaactcgctataggaatgtgaaaatgaactataatgcactgattactgtaggtctcagagccactcgaccagctttcatgtgtcaccgaaggcaggccatcaaactccaggtggatgacacagaagattccgatgaagaatggacacctaggcagcaagtcaaacctccttggatggccttcagaggagaacagagtaaacaccagaagggaatgcccaaggcgtcattcaataatgaatctagtttgagagaattgtcaggaacgccaaatttactgaatacaagtgactcagagcaggctcagaaaccagtgtcccctcctggagaagcaagtacctctggacagcactctagactaaaactggaactcaggaggaaggagactgaaggaaagatgtatagcctgcgagaaagaaagggtcatgcatacaaagagatcagcgagccacaggatgatgactacctctattgtgagatgtgtcagaacttcttcattgacagctgtgctgctcatgggccccctacatttgtaaaggacagtgcagtggacaaggggcatcccaaccgttcagccctcagtctgcccccggggctgagaattgggccatcaggcatccctcaggctgggcttggagtatggaacgaggcatctgatctgccactgggtctgcactttggcccctatgagggccgaattacagaagacgaagaggcagccaacagtggatattcctggctaatcaccaaggggagaaactgctatgagtatgtggatggaaaagataaatcctcggccaactggatgaggtatgtgaactgtgcccgggatgatgaagagcagaacctggtggccttccagtaccacaggcagatcttctatagaacctgccgagtcattaggccaggctgtgaactgctggtctggtctggggatgagtatggccaggaactgggcatcagatcttctatagaacctgccgagtcattaggccaggctgtgaactgctggtctggtatggggatgagtatggccaggaactgggcatcaagtggggcagcaagtggaagaaagagctcatggcagggagagaaccaaagccagagatccatccatgtccctcatgctgtctggccttttcaagtcaaaaatttctcagtcaacatgtggaacgcaatcactcctctcagaacttcccaggaccatctgcaagaaaacttctccaaccagagaatccctgcccaggggatcagaatcaggagcggcaatattctgatccacgctgctgtaatgacaaaaccaaaggtcaagagatcaaagaaaggtccaaactcttgaataaaaggacatggcagagggagatttcaagggccttttctagcccacccaaaggacaaatggggagctctagagtgggagaaagaatgatggaagaagagtccagaacaggccagaaagtgaatccagggaacacaggcaaattatttgtgggggtaggaatctcaagaattgcgaaagtcaaatatggagagtgtgggcaaggtttcagtgataagtcagatgttattacacaccaaaggacacacacaggggggaagccctacgtctgcagagagtgtgggagggctttagccggaagtcagacctcctcagtcaccagaggacacacacaggggagaagccttatgtctgcagagagtgtgagcggggctttagccggaagtcagtcctcctcattcaccagaggacacacaggggagacgccccagtctgcaggaaggatgagtaagtcattagtaataaaaccttatctcaatagccacaagaagacaaacgtgatcaccaca

SEQ ID NO: 168589 - DNA, 706 bp, Homo sapiens
  Payload ID: 13186
  Gene Symbol: PRDM7
  Gene Name: PR domain containing 7
  ENST ID: ENST00000568473
  CDS Start-End: 16-432
gacagtcccagcaccatgagccctgaaaggtcccaagaggagagcccagaaggagacacagagagaacagagcggaagcccatggtcaaagatgccttcaaagacatttccatatacttcaccaaggaagaatgggcagaaatgggagactgggagaaaactcgctataggaatgtgaaaatgaactataatgcactgattactgtaggtctcagagccactcgaccagctttcatgtgtcaccgaaggcaggccatcaaactccaggtggatgacacagaagattccgatgaagaatggacacctaggcagcaagtcaaacctccttggatggccttcagaggagaacagagtaaacaccagaagattgtgagatgtgtcagaacttcttcattgacagctgtgctgctcatgggccccctacatttgtaaaggacagtgcagtggacaaggggcatcccaaccgttcagccctcagtctgcccccggggctgagaattgggccatcaggcatccctcaggctgggcttggagtatggaacgaggcatctgatctgccactgggtctgcactttggcccctatgagggccgaattacagaagacgaagaggcagccaacagtggatattcctggctaatcaccaaggggagaaactgctatgagtatgtggatggaaaagataaatcctcggccaactggatgag

SEQ ID NO: 168590 - DNA, 714 bp, Homo sapiens
  Payload ID: 13186
  Gene Symbol: PRDM7
  Gene Name: PR domain containing 7
  ENST ID: ENST00000564210
  CDS Start-End: 21-242
ttctagacagtcccagcaccatgagccctgaaaggtcccaagaggagagcccagaaggagacacagagagaacagagcggaagcccatggtctcagagccactcgaccagctttcatgtgtcaccgaaggcaggccatcaaactccaggtggatgacacagaagattccgatgaagaatggacacctaggcagcaagacagagtttcgctcttgtcaccccggctggagtgcaatggcgtgatctcagctcactaccacctccccatcccagaactcaggaggaaggagactgaaggaaagatgtatagcctgcgagaaagaaagggtcatgcatacaaagagatcagcgagccacaggatgatgactacctctattgtgagatgtgtcagaacttcttcattgacagctgtgctgctcatgggccccctacatttgtaaaggacagtgcagtggacaaggggcatcccaaccgttcagccctcagtctgcccccggggctgagaattgggccatcaggcatccctcaggctgggcttggagtatggaacgaggcatctgatctgccactgggtctgcactttggcccctatgagggccgaattacagaagacgaagaggcagccaacagtggatattcctggctaatcaccaaggggagaaactgctatgagtatgtggatggaaaagataaatcctcggccaactggatgag

SEQ ID NO: 168591 - DNA, 4095 bp, Homo sapiens
  Payload ID: 13187
  Gene Symbol: PRDM8
  Gene Name: PR domain containing 8
  Uniprot ID: Q9NQV8
  ENST ID: ENST00000339711
  CDS Start-End: 1232-3301
aaaagcagcatcagacaagagctttattaatcccttacacgagcaaatgcgatctctgacctactagacttgttttcctacaatttcacaaaaagcctcgctagaggaatgtgcaaggacagaagggaaactgaggagacccgcaactcattagcgaaataatagggtgcacttcaataaaaatgcggtcctgaagtggagcagactcaccggcaaggagcccggaaaatcgtcaggggcggcggcaaaatactatcaaatcagcctgggaagcatcttttcgctcagcaagttcaagagaacaaatatgttacaatccttgcctattcttgcctccacttcataatgtcataaaagccacctggggtgtcatttatcaacctctctccagcccactcttccaaaataacactacagtttcctacatgtgtatttttgccaggactccaaagagccttgctaaagtggaacaagcaaaatcctcccctggcctcctgggactgcagtcaccaggctgtcaaagcctcaataccccactgagttccagagaagggtctcaaagctgggagaggatcaaactaacatggagtagagaattgaactgtgaaaaagaagcccgagattccccagcgacgtggtgttgcagccccgttgaaggagtcaacttgcaggctgttaaagacctcaagtcattagcatcagctgctgcactaaaggggcaagtcagcgcctctaagtggcttagcgcacaaacgaggctcccgagacggcctcggcaactccatcccctcctccaccacccgctggatgtgaaaagctttccggagcccatcttgggggaagcttggtagtgttggcgctcctgaagagagacgacgcccgtttatcacccccaggcaactagctgcgcaaatcagcggtggctccagggctagagaatccctggagctaaccgcacccctctccctttcacggaacgcggactccggggaaatacgcacggggtccgcacgcgctgggtgtccagctctctgtcacagcttctccaagtgcctagtgaaacggggaaaggccctctccaatcattttggaagagcctaaaaggcggcaacaccaacacctcttgacatggaaatacactgatacaataggcaaaaggaaacactcgattgcatcttcccggttccaggtggccttatttgggagattctatactgaccttattcctgtgatggaggatactggcatccagcgaggcatctgggatggagatgccaaggctgtccaacaatgtctgacagatatttttaccagcgtttacaccacctgcgacatccctgagaatgctatatttggtccctgtgtcctgagccatacttccctatatgacagcatagctttcatagctctcaagtctactgacaagagaacagtaccgtatatctttcgggtagacacctcagcagcaaatggttcctcagaaggtctcatgtggctgcggttggtccaatcggccagagataaggaagagcagaaccttgaagcctacataaaaaacggacagctgttctaccgctctctccgcaggattgccaaagacgaggagttactagtttggtacgggaaagaactgactgagttactcttgctctgcccctctagatcccacaacaaaatgaatgggtcgtccccttacacatgcctggaatgcagccaacgtttccagtttgagttcccctatgtggcgcatctgcgtttccgctgccccaagagacttcacagcgctgatataagtccccaagacgaacaaggcggcggcgtgggcaccaaggaccacgggggcggcggcggcggtggcaaagaccagcagcagcagcagcaggaggcacctttaggcccgggtcccaagttttgcaaagccggccccctccaccactacccatccccctccccggaaagcagcaacccatccgctgccgccggcggcagcagcgcgaagccatccacagacttccacaacctggccagggagctggaaaactcccggggaggcagcagctgctccccagcccagagcctcagcagcggtagcggcagcggcggcggcggcggccaccaggaggcggagctgagtcccgacggcatcgccacgggcggcggcaaaggaaagaggaaattcccggaggaggcggcggagggcggcggtggcgctggtctggtagggggccggggccgcttcgtagagcggcccctcccggcctccaaggaggatctggtgtgcacaccgcagcagtaccgagcctcgggcagctacttcggcctggaagagaacggccgcctcttcgcgccgccaagtcccgagacgggcgaggcgaagcgcagcgccttcgtggaggtgaagaaggctgcccgcgcggccagcctgcaggaggaggggacagccgacggcgcgggagtcgcctccgaggaccaggacgctggcggcggcggcggctcctccacgcccgcggccgcgtcaccggtgggcgccgagaagctgctggccccgcggcctgggggcccgctgcccagccggctcgagggcggcagtcctgcgaggggcagcgccttcacttcggtgccgcagctgggcagcgcgggcagcaccagcggtgggggcggaacgggcgccggggccgcaggcggcgcgggcgggggccagggcgccgcgtcggacgagcgcaaaagcgccttctcgcagccagcacgctctttctcgcagctgtccccgctggtgctgggccagaagctgggcgcgctcgagccatgccaccccgccgacggcgtgggccccaccagactctatcccgccgccgcggaccctctagcggtgaagctccagggggccgcggacctgaacggaggttgcgggtccctgccgagcggcggcggcggcctgcctaagcagagccccttcctgtacgccaccgccttctggcccaagagctccgctgccgctgcagccgcggctgcggcggcggccgcggggcccttgcagctgcagctgccctcggcgctcacgctgctgccgccctccttcacctcgctgtgtctgcccgcgcagaactggtgcgccaagtgcaatgcctccttccgcatgacctccgacctggtgtaccatatgaggtcgcaccacaaaaaggagtatgcgatggagcccttggtgaagcggcggcgagaggagaaactcaagtgccccatctgcaatgagtccttcagggagcgccaccacctctccaggcacatgacctcgcataattgactcggaaaggaccccagctttccacgcgcgcgcaagcacagttaagccacctgcaggaataaacacgcgagaacatccaccgcttccttgcaccccgaaaccctgcacaaagacacatacattcaccgcccccccgcccccccaacgcgcacacacacgtcctctcctcccaggaacctcattcaaatatttacccgggacacacacccccccccacacacacacacagacacactcacacacaagagccaggatggtggagttttgattgggtgggttgtttgagggggttttcttttgaatgcacgcattttcactttccccaaaacaaaggtacattttttaaaatgtcatatattgcaacatattgatgcatttgtcatacgtttctacttaaattattaagcacttacgatttagatgtaataattatatgtaagggcaaaatttattttagatataaagtaaaggaggagggtgagatgctttctgcatttcttgatgacagtttgtgttcctacaaaaataaacaaaatgaataaaaagggatcaccattcaatttgagtttccagggggaagtgcatgtataatgaaatgataatggacttcaatgaagaatgtcatcaattatgtacatatgtattttcttttaatacaaagtgtaattttgtgccagtgaaatggagtctgaatagttatgtgtttcttttatccctggaaatatttattaaactttatagtttatccgagtatgttggatgctttgacaataaatgactattttcttcaaagc

SEQ ID NO: 168592 - DNA, 3124 bp, Homo sapiens
  Payload ID: 13187
  Gene Symbol: PRDM8
  Gene Name: PR domain containing 8
  Uniprot ID: Q9NQV8
  ENST ID: ENST00000415738
  CDS Start-End: 263-2332
gtcactgcatcgggtccatctgtacaactctctccgtttctccgtctctctccctccctccctccctccacccccccaatctttttctccccatctctccatctctctcttatctcttcaggaagagcctaaaaggcggcaacaccaacacctcttgacatggaaatacactgatacaataggcaaaaggaaacactcgattgcatcttcccggttccaggtggccttatttgggagattctatactgaccttattcctgtgatggaggatactggcatccagcgaggcatctgggatggagatgccaaggctgtccaacaatgtctgacagatatttttaccagcgtttacaccacctgcgacatccctgagaatgctatatttggtccctgtgtcctgagccatacttccctatatgacagcatagctttcatagctctcaagtctactgacaagagaacagtaccgtatatctttcgggtagacacctcagcagcaaatggttcctcagaaggtctcatgtggctgcggttggtccaatcggccagagataaggaagagcagaaccttgaagcctacataaaaaacggacagctgttctaccgctctctccgcaggattgccaaagacgaggagttactagtttggtacgggaaagaactgactgagttactcttgctctgcccctctagatcccacaacaaaatgaatgggtcgtccccttacacatgcctggaatgcagccaacgtttccagtttgagttcccctatgtggcgcatctgcgtttccgctgccccaagagacttcacagcgctgatataagtccccaagacgaacaaggcggcggcgtgggcaccaaggaccacgggggcggcggcggcggtggcaaagaccagcagcagcagcagcaggaggcacctttaggcccgggtcccaagttttgcaaagccggccccctccaccactacccatccccctccccggaaagcagcaacccatccgctgccgccggcggcagcagcgcgaagccatccacagacttccacaacctggccagggagctggaaaactcccggggaggcagcagctgctccccagcccagagcctcagcagcggtagcggcagcggcggcggcggcggccaccaggaggcggagctgagtcccgacggcatcgccacgggcggcggcaaaggaaagaggaaattcccggaggaggcggcggagggcggcggtggcgctggtctggtagggggccggggccgcttcgtagagcggcccctcccggcctccaaggaggatctggtgtgcacaccgcagcagtaccgagcctcgggcagctacttcggcctggaagagaacggccgcctcttcgcgccgccaagtcccgagacgggcgaggcgaagcgcagcgccttcgtggaggtgaagaaggctgcccgcgcggccagcctgcaggaggaggggacagccgacggcgcgggagtcgcctccgaggaccaggacgctggcggcggcggcggctcctccacgcccgcggccgcgtcaccggtgggcgccgagaagctgctggccccgcggcctgggggcccgctgcccagccggctcgagggcggcagtcctgcgaggggcagcgccttcacttcggtgccgcagctgggcagcgcgggcagcaccagcggtgggggcggaacgggcgccggggccgcaggcggcgcgggcgggggccagggcgccgcgtcggacgagcgcaaaagcgccttctcgcagccagcacgctctttctcgcagctgtccccgctggtgctgggccagaagctgggcgcgctcgagccatgccaccccgccgacggcgtgggccccaccagactctatcccgccgccgcggaccctctagcggtgaagctccagggggccgcggacctgaacggaggttgcgggtccctgccgagcggcggcggcggcctgcctaagcagagccccttcctgtacgccaccgccttctggcccaagagctccgctgccgctgcagccgcggctgcggcggcggccgcggggcccttgcagctgcagctgccctcggcgctcacgctgctgccgccctccttcacctcgctgtgtctgcccgcgcagaactggtgcgccaagtgcaatgcctccttccgcatgacctccgacctggtgtaccatatgaggtcgcaccacaaaaaggagtatgcgatggagcccttggtgaagcggcggcgagaggagaaactcaagtgccccatctgcaatgagtccttcagggagcgccaccacctctccaggcacatgacctcgcataattgactcggaaaggaccccagctttccacgcgcgcgcaagcacagttaagccacctgcaggaataaacacgcgagaacatccaccgcttccttgcaccccgaaaccctgcacaaagacacatacattcaccgcccccccgcccccccaacgcgcacacacacgtcctctcctcccaggaacctcattcaaatatttacccgggacacacacccccccccacacacacacacagacacactcacacacaagagccaggatggtggagttttgattgggtgggttgtttgagggggttttcttttgaatgcacgcattttcactttccccaaaacaaaggtacattttttaaaatgtcatatattgcaacatattgatgcatttgtcatacgtttctacttaaattattaagcacttacgatttagatgtaataattatatgtaagggcaaaatttattttagatataaagtaaaggaggagggtgagatgctttctgcatttcttgatgacagtttgtgttcctacaaaaataaacaaaatgaataaaaagggatcaccattcaatttgagtttccagggggaagtgcatgtataatgaaatgataatggacttcaatgaagaatgtcatcaattatgtacatatgtattttcttttaatacaaagtgtaattttgtgccagtgaaatggagtctgaatagttatgtgtttcttttatccctggaaatatttattaaactttatagtttatccgagtatgttggatgctttgacaataaatgactattttcttcaaa

SEQ ID NO: 168593 - DNA, 3706 bp, Homo sapiens
  Payload ID: 13187
  Gene Symbol: PRDM8
  Gene Name: PR domain containing 8
  Uniprot ID: Q9NQV8
  ENST ID: ENST00000504452
  CDS Start-End: 840-2909
ggcgtcccgcccccgccccggggaacgctgcctctgccgcaaagatgcccccttccgctggaaagcggtcataaaagccacctggggtgtcatttatcaacctctctccagcccactcttccaaaataacactacagtttcctacatgtgtatttttgccaggactccaaagagccttgctaaagtggaacaaggagtagagaattgaactgtgaaaaagaagcccgagattccccagcgacgtggtgttgcagccccgttgaaggagtcaacttgcaggctgttaaagacctcaagtcattagcatcagctgctgcactaaaggggcaagtcagcgcctctaagtggcttagcgcacaaacgaggctcccgagacggcctcggcaactccatcccctcctccaccacccgctggatgtgaaaagctttccggagcccatcttgggggaagcttggtagtgttggcgctcctgaagagagacgacgcccgtttatcacccccaggcaactagctgcgcaaatcagcggtggctccagggctagagaatccctggagctaaccgcacccctctccctttcacggaacgcggactccggggaaatacgcacggggtccgcacgcgctgggtgtccagctctctgtcacagcttctccaagtgcctagtgaaacggggaaaggccctctccaatcattttggaagagcctaaaaggcggcaacaccaacacctcttgacatggaaatacactgatacaataggcaaaaggaaacactcgattgcatcttcccggttccaggtggccttatttgggagattctatactgaccttattcctgtgatggaggatactggcatccagcgaggcatctgggatggagatgccaaggctgtccaacaatgtctgacagatatttttaccagcgtttacaccacctgcgacatccctgagaatgctatatttggtccctgtgtcctgagccatacttccctatatgacagcatagctttcatagctctcaagtctactgacaagagaacagtaccgtatatctttcgggtagacacctcagcagcaaatggttcctcagaaggtctcatgtggctgcggttggtccaatcggccagagataaggaagagcagaaccttgaagcctacataaaaaacggacagctgttctaccgctctctccgcaggattgccaaagacgaggagttactagtttggtacgggaaagaactgactgagttactcttgctctgcccctctagatcccacaacaaaatgaatgggtcgtccccttacacatgcctggaatgcagccaacgtttccagtttgagttcccctatgtggcgcatctgcgtttccgctgccccaagagacttcacagcgctgatataagtccccaagacgaacaaggcggcggcgtgggcaccaaggaccacgggggcggcggcggcggtggcaaagaccagcagcagcagcagcaggaggcacctttaggcccgggtcccaagttttgcaaagccggccccctccaccactacccatccccctccccggaaagcagcaacccatccgctgccgccggcggcagcagcgcgaagccatccacagacttccacaacctggccagggagctggaaaactcccggggaggcagcagctgctccccagcccagagcctcagcagcggtagcggcagcggcggcggcggcggccaccaggaggcggagctgagtcccgacggcatcgccacgggcggcggcaaaggaaagaggaaattcccggaggaggcggcggagggcggcggtggcgctggtctggtagggggccggggccgcttcgtagagcggcccctcccggcctccaaggaggatctggtgtgcacaccgcagcagtaccgagcctcgggcagctacttcggcctggaagagaacggccgcctcttcgcgccgccaagtcccgagacgggcgaggcgaagcgcagcgccttcgtggaggtgaagaaggctgcccgcgcggccagcctgcaggaggaggggacagccgacggcgcgggagtcgcctccgaggaccaggacgctggcggcggcggcggctcctccacgcccgcggccgcgtcaccggtgggcgccgagaagctgctggccccgcggcctgggggcccgctgcccagccggctcgagggcggcagtcctgcgaggggcagcgccttcacttcggtgccgcagctgggcagcgcgggcagcaccagcggtgggggcggaacgggcgccggggccgcaggcggcgcgggcgggggccagggcgccgcgtcggacgagcgcaaaagcgccttctcgcagccagcacgctctttctcgcagctgtccccgctggtgctgggccagaagctgggcgcgctcgagccatgccaccccgccgacggcgtgggccccaccagactctatcccgccgccgcggaccctctagcggtgaagctccagggggccgcggacctgaacggaggttgcgggtccctgccgagcggcggcggcggcctgcctaagcagagccccttcctgtacgccaccgccttctggcccaagagctccgctgccgctgcagccgcggctgcggcggcggccgcggggcccttgcagctgcagctgccctcggcgctcacgctgctgccgccctccttcacctcgctgtgtctgcccgcgcagaactggtgcgccaagtgcaatgcctccttccgcatgacctccgacctggtgtaccatatgaggtcgcaccacaaaaaggagtatgcgatggagcccttggtgaagcggcggcgagaggagaaactcaagtgccccatctgcaatgagtccttcagggagcgccaccacctctccaggcacatgacctcgcataattgactcggaaaggaccccagctttccacgcgcgcgcaagcacagttaagccacctgcaggaataaacacgcgagaacatccaccgcttccttgcaccccgaaaccctgcacaaagacacatacattcaccgcccccccgcccccccaacgcgcacacacacgtcctctcctcccaggaacctcattcaaatatttacccgggacacacacccccccccacacacacacacagacacactcacacacaagagccaggatggtggagttttgattgggtgggttgtttgagggggttttcttttgaatgcacgcattttcactttccccaaaacaaaggtacattttttaaaatgtcatatattgcaacatattgatgcatttgtcatacgtttctacttaaattattaagcacttacgatttagatgtaataattatatgtaagggcaaaatttattttagatataaagtaaaggaggagggtgagatgctttctgcatttcttgatgacagtttgtgttcctacaaaaataaacaaaatgaataaaaagggatcaccattcaatttgagtttccagggggaagtgcatgtataatgaaatgataatggacttcaatgaagaatgtcatcaattatgtacatatgtattttcttttaatacaaagtgtaattttgtgccagtgaaatggagtctgaatagttatgtgtttcttttatccctggaaatatttattaaactttatagtttatccgagtatgttggatgctttgacaataaatgactattttcttcaaagcaaa

SEQ ID NO: 168594 - DNA, 2514 bp, Homo sapiens
  Payload ID: 13187
  Gene Symbol: PRDM8
  Gene Name: PR domain containing 8
  ENST ID: ENST00000515013
  CDS Start-End: 1232-2514
aaaagcagcatcagacaagagctttattaatcccttacacgagcaaatgcgatctctgacctactagacttgttttcctacaatttcacaaaaagcctcgctagaggaatgtgcaaggacagaagggaaactgaggagacccgcaactcattagcgaaataatagggtgcacttcaataaaaatgcggtcctgaagtggagcagactcaccggcaaggagcccggaaaatcgtcaggggcggcggcaaaatactatcaaatcagcctgggaagcatcttttcgctcagcaagttcaagagaacaaatatgttacaatccttgcctattcttgcctccacttcataatgtcataaaagccacctggggtgtcatttatcaacctctctccagcccactcttccaaaataacactacagtttcctacatgtgtatttttgccaggactccaaagagccttgctaaagtggaacaagcaaaatcctcccctggcctcctgggactgcagtcaccaggctgtcaaagcctcaataccccactgagttccagagaagggtctcaaagctgggagaggatcaaactaacatggagtagagaattgaactgtgaaaaagaagcccgagattccccagcgacgtggtgttgcagccccgttgaaggagtcaacttgcaggctgttaaagacctcaagtcattagcatcagctgctgcactaaaggggcaagtcagcgcctctaagtggcttagcgcacaaacgaggctcccgagacggcctcggcaactccatcccctcctccaccacccgctggatgtgaaaagctttccggagcccatcttgggggaagcttggtagtgttggcgctcctgaagagagacgacgcccgtttatcacccccaggcaactagctgcgcaaatcagcggtggctccagggctagagaatccctggagctaaccgcacccctctccctttcacggaacgcggactccggggaaatacgcacggggtccgcacgcgctgggtgtccagctctctgtcacagcttctccaagtgcctagtgaaacggggaaaggccctctccaatcattttggaagagcctaaaaggcggcaacaccaacacctcttgacatggaaatacactgatacaataggcaaaaggaaacactcgattgcatcttcccggttccaggtggccttatttgggagattctatactgaccttattcctgtgatggaggatactggcatccagcgaggcatctgggatggagatgccaaggctgtccaacaatgtctgacagatatttttaccagcgtttacaccacctgcgacatccctgagaatgctatatttggtccctgtgtcctgagccatacttccctatatgacagcatagctttcatagctctcaagtctactgacaagagaacagtaccgtatatctttcgggtagacacctcagcagcaaatggttcctcagaaggtctcatgtggctgcggttggtccaatcggccagagataaggaagagcagaaccttgaagcctacataaaaaacggacagctgttctaccgctctctccgcaggattgccaaagacgaggagttactagtttggtacgggaaagaactgactgagttactcttgctctgcccctctagatcccacaacaaaatgaatgggtcgtccccttacacatgcctggaatgcagccaacgtttccagtttgagttcccctatgtggcgcatctgcgtttccgctgccccaagagacttcacagcgctgatataagtccccaagacgaacaaggcggcggcgtgggcaccaaggaccacgggggcggcggcggcggtggcaaagaccagcagcagcagcagcaggaggcacctttaggcccgggtcccaagttttgcaaagccggccccctccaccactacccatccccctccccggaaagcagcaacccatccgctgccgccggcggcagcagcgcgaagccatccacagacttccacaacctggccagggagctggaaaactcccggggaggcagcagctgctccccagcccagagcctcagcagcggtagcggcagcggcggcggcggcggccaccaggaggcggagctgagtcccgacggcatcgccacgggcggcggcaaaggaaagaggaaattcccggaggaggcggcggagggcggcggtggcgctggtctggtagggggccggggccgcttcgtagagcggcccctcccggcctccaaggaggatctggtgtgcacaccgcagcagtaccgagcctcgggcagctacttcggcctggaagagaacggccgcctcttcgcgccgccaagtcccgagacgggcgaggcgaagcgcagcgccttcgtggaggtgaagaaggctgcccgcgcggccagcctgcaggaggaggggacagccgacggcgcgggagtcgcctccgaggaccaggacgctggcggcggcggcggctcctccacgcccgcggccgc

SEQ ID NO: 168595 - DNA, 3691 bp, Homo sapiens
  Payload ID: 13188
  Gene Symbol: PRDM9
  Gene Name: PR domain containing 9
  Uniprot ID: Q9NQV7
  ENST ID: ENST00000296682
  CDS Start-End: 183-2867
ctctgagagaacgcccggccagggtgaacgccgcggcaggagagcacgggagattgtgaagagcatggggagcctttgtcgtgcagcgtgaaacccttgagcctttggcctaggagctgggagactcagggcccttctcacactcagaattggagcagggccttctagacagtcccagcaccatgagccctgaaaagtcccaagaggagagcccagaagaagacacagagagaacagagcggaagcccatggtcaaagatgccttcaaagacatttccatatacttcaccaaggaagaatgggcagagatgggagactgggagaaaactcgctataggaatgtgaaaaggaactataatgcactgattactataggtctcagagccactcgaccagctttcatgtgtcaccgaaggcaggccatcaaactccaggtggatgacacagaagattctgatgaagaatggacccctaggcagcaagtcaaacctccttggatggccttaagagtggaacagcgtaaacaccagaagggaatgcccaaggcgtcattcagtaatgaatctagtttgaaagaattgtcaagaacagcaaatttactgaatgcaagtggctcagagcaggctcagaaaccagtgtccccttctggagaagcaagtacctctggacagcactcaagactaaaactggaactcaggaagaaggagactgaaagaaagatgtatagcctgcgagaaagaaagggtcatgcatacaaagaggtcagcgagccgcaggatgatgattacctctattgtgagatgtgtcagaacttcttcattgacagctgtgctgcccatgggccccctacatttgtaaaggacagtgcagtggacaaggggcaccccaaccgttcagccctcagtctgcccccagggctgagaattgggccatcaggcatccctcaggctgggcttggagtatggaatgaggcatctgatctgccgctgggtctgcactttggcccttatgagggccgaattacagaagacgaagaggcagccaacaatggatactcctggctgatcaccaaggggagaaactgctatgagtatgtggatggaaaagataaatcctgggccaactggatgaggtatgtgaactgtgcccgggatgatgaagagcagaacctggtggccttccagtaccacaggcagatcttctatagaacctgccgagtcattaggccaggctgtgaactgctggtctggtatggggatgaatacggccaggaactgggcatcaagtggggcagcaagtggaagaaagagctcatggcagggagagaaccaaagccagagatccatccatgtccctcatgctgtctggccttttcaagtcagaaatttctcagtcaacatgtagaacgcaatcactcctctcagaacttcccaggaccatctgcaagaaaactcctccaaccagagaatccctgcccaggggatcagaatcaggagcagcaatatccagatccacacagccgtaatgacaaaaccaaaggtcaagagatcaaagaaaggtccaaactcttgaataaaaggacatggcagagggagatttcaagggccttttctagcccacccaaaggacaaatggggagctgtagagtgggaaaaagaataatggaagaagagtccagaacaggccagaaagtgaatccagggaacacaggcaaattatttgtgggggtaggaatctcaagaattgcaaaagtcaagtatggagagtgtggacaaggtttcagtgttaaatcagatgttattacacaccaaaggacacatacaggggagaagctctacgtctgcagggagtgtgggcggggctttagctggaagtcacacctcctcattcaccagaggatacacacaggggagaagccctatgtctgcagggagtgtgggcggggctttagctggcagtcagtcctcctcactcaccagaggacacacacaggggagaagccctatgtctgcagggagtgtgggcggggctttagccggcagtcagtcctcctcactcaccagaggagacacacaggggagaagccctatgtctgcagggagtgtgggcggggctttagccggcagtcagtcctcctcactcaccagaggagacacacaggggagaagccctatgtctgcagggagtgtgggcggggctttagctggcagtcagtcctcctcactcaccagaggacacacacaggggagaagccctatgtctgcagggagtgtgggcggggctttagctggcagtcagtcctcctcactcaccagaggacacacacaggggagaagccctatgtctgcagggagtgtgggcggggctttagcaataagtcacacctcctcagacaccagaggacacacacaggggagaagccctatgtctgcagggagtgtgggcggggctttcgcgataagtcacacctcctcagacaccagaggacacacacaggggagaagccctatgtctgcagggagtgtgggcggggctttagagataagtcaaacctcctcagtcaccagaggacacacacaggggagaagccctatgtctgcagggagtgtgggcggggctttagcaataagtcacacctcctcagacaccagaggacacacacaggggagaagccctatgtctgcagggagtgtgggcggggctttcgcaataagtcacacctcctcagacaccagaggacacacacaggggagaagccctacgtctgcagggagtgtgggcggggctttagcgataggtcaagcctctgctatcaccagaggacacacacaggggagaagccctacgtctgcagggaggatgagtaagtcattagtaataaaacctcatctcaatagccacaaaaagacaaatgtggtcaccacacacttgcacaccccagctgtgaggtggcttcagcggaagtctgctgaccccttatattccccgagagtataaagagatcggaaataactgattaaacaaatccgccactttcatgactagagatgaggaagaacaagggatagttctgtaagtgttcgggggacatcagcatgtgtggttctttcccgcactgatcccctccattttttgtttgtttttttgcctcctgttctaataaattttgtctccatacaaatctgaaccccaagtgtgtacctcattcttcccttatcactgaaggcaagaagagtccagaagggccacagagaactcatgtgttcagctcaagactccacaggaattcaacccccagaaagacataaacttggagtccgtctggtttaattattggagaatcgattcccaagtccaggaagagaaatgtaagattctagaaagtcgcagcaggaaagggagttccctggtctcctgggaagtgtggcttcttctcctaatggacacctctcctctgctgccatactctcccttggctccccagtctcctctcctgatctcctccaatctctgtagcccaagatgtgaaagccagacaagaacacgcgtgtgtgtatatatgtgttcgggtgtgggggtatgtgccctccgtgtaggtaactgtgtgagtgtggggggtttcaagggtgtgttaggaacaacgctcaaaatcctaaggaaactgaacactcgaacgaaggattcttagcaa

SEQ ID NO: 168596 - DNA, 558 bp, Homo sapiens
  Payload ID: 13188
  Gene Symbol: PRDM9
  Gene Name: PR domain containing 9
  ENST ID: ENST00000502755
  CDS Start-End: 258-558
aacttacaccacagttaaaggaacaccaaccctcccagatgagaatcagtgcaagaactctggcaattcaaaaagacacagtgtccccttggaagacccaggcctgcggagggacgtgaggagcagccccgacgcccgactcagtcgcaaacaccggagttggggaaaaccaagagcctttggcctaggagctgggagactcagggcccttctcacactcagaattggagcagggccttctagacagtcccagcaccatgagccctgaaaagtcccaagaggagagcccagaagaagacacagagagaacagagcggaagcccatggtcaaagatgccttcaaagacatttccatatacttcaccaaggaagaatgggcagagatgggagactgggagaaaactcgctataggaatgtgaaaaggaactataatgcactgattactataggtctcagagccactcgaccagctttcatgtgtcaccgaaggcaggccatcaaactccaggtggatgacacagaagattctgatgaagaatggacccctaggcagcaag

SEQ ID NO: 168597 - DNA, 1537 bp, Homo sapiens
  Payload ID: 13188
  Gene Symbol: PRDM9
  Gene Name: PR domain containing 9
  ENST ID: ENST00000635252
  CDS Start-End: 305-1537
gactggaagtttcctgaggtctcccagccatgcagaactagatctggacagtatcaagaggactcacaagaacgttgaaatatccagggcatataaaaaatgtgaagctttttataccacccttaggcctgcagaggcaggaagcaaacatcttgttactagatcgtgaagtaagagacagtgtctgctgctctgttgccagagctggatcacattggcaccatcacggctcactgcagcctcgacctctgggctcaagtgaatctcccgctgcagcctcccgaatagctgaaactacagacacatgccaccatacccaggtctcagagccactcgaccagctttcatgtgtcaccgaaggcaggccatcaaactccaggtggatgacacagaagattctgatgaagaatggacccctaggcagcaagtcaaacctccttggatggccttaagagtggaacagcgtaaacaccagaagggaatgcccaaggcgtcattcagtaatgaatctagtttgaaagaattgtcaagaacagcaaatttactgaatgcaagtggctcagagcaggctcagaaaccagtgtccccttctggagaagcaagtacctctggacagcactcaagactaaaactggaactcaggaagaaggagactgaaagaaagatgtatagcctgcgagaaagaaagggtcatgcatacaaagaggtcagcgagccgcaggatgatgattacctctattgtgagatgtgtcagaacttcttcattgacagctgtgctgcccatgggccccctacatttgtaaaggacagtgcagtggacaaggggcaccccaaccgttcagccctcagtctgcccccagggctgagaattgggccatcaggcatccctcaggctgggcttggagtatggaatgaggcatctgatctgccgctgggtctgcactttggcccttatgagggccgaattacagaagacgaagaggcagccaacaatggatactcctggctgatcaccaaggggagaaactgctatgagtatgtggatggaaaagataaatcctgggccaactggatgaggtatgtgaactgtgcccgggatgatgaagagcagaacctggtggccttccagtaccacaggcagatcttctatagaacctgccgagtcattaggccaggctgtgaactgctggtctggtatggggatgaatacggccaggaactgggcatcaagtggggcagcaagtggaagaaagagctcatggcagggagagaaccaaagccagagatccatccatgtccctcatgctgtctggccttttcaagtcagaaatttctcagtcaacatgtagaacgcaatcactcctctcagaacttcccaggaccatctgcaagaaaactcctccaaccagagaatccctgcccaggggatcagaatcaggagcagcaatatccagatccacacagccgtaatgacaaaaccaaaggtcaagagatcaaagaaaggtccaaactcttgaataaaaggacatggcagagg

SEQ ID NO: 168598 - DNA, 801 bp, Homo sapiens
  Payload ID: 13189
  Gene Symbol: PRAF2
  Gene Name: PRA1 domain family, member 2
  ENST ID: ENST00000376386
  CDS Start-End: 3-485
ggatgtcggaggtgcggctgccaccgctacgcgccctggacgactttgttctggggtcggcgcgtctggcggctccggatccatgcgacccgcagcgatggtgccaccgcgtcatcaacaacctcctctactaccaaaccaactaccttctctgcttcggcatcggcctcgctctcgccgggtacgtgcggccacttcatacgctcctgagcgcgctggtagtggcggtggccctcggcgtgctggtgtgggcagctgagacccgcgcagctgtgcgccgctgccgccgcagccaccctgcagcctgcctggccgcagtgcttgccgtcggcctcctggtgctctgggtcgcgggcggcgcttgcaccttcctgttcagcatcgccgggccggtgcttcgtgagtctccactaccccgagatagccaggaaagcagccagagcatgcttaaggcaccaggccagccctgccggtccccgggttgagagggggctgggaaacccgagggcctcgccacgcccccgctaaaagcgccttcccgggcttcgttcccccttctgggaacaccccttttattatcgcctttcctatctcactcttggtgttaagtgccttccactggccacgtccccgttaccgggcgtcttccctggccatgcccacgttgccaagccaattactcggccacgctttcagtatctgaggcgtcctggctgctcaccactccattggcctgcctgcgcgccaattcccttcggtgggccccggttggctgcaggctgaggtctattccactgacca

SEQ ID NO: 168599 - DNA, 1334 bp, Homo sapiens
  Payload ID: 13189
  Gene Symbol: PRAF2
  Gene Name: PRA1 domain family, member 2
  Uniprot ID: O60831
  ENST ID: ENST00000553851
  CDS Start-End: 85-621
cggtgtgccccgcggtggcgaggggcgtaacggttgttgtagtccggccccctcctggctggtccagccacattaaccggcaggatgtcggaggtgcggctgccaccgctacgcgccctggacgactttgttctggggtcggcgcgtctggcggctccggatccatgcgacccgcagcgatggtgccaccgcgtcatcaacaacctcctctactaccaaaccaactaccttctctgcttcggcatcggcctcgctctcgccgggtacgtgcggccacttcatacgctcctgagcgcgctggtagtggcggtggccctcggcgtgctggtgtgggcagctgagacccgcgcagctgtgcgccgctgccgccgcagccaccctgcagcctgcctggccgcagtgcttgccgtcggcctcctggtgctctgggtcgcgggcggcgcttgcaccttcctgttcagcatcgccgggccggtgcttctgatcctggtgcacgcctcgttgcgcctgcgcaaccttaagaacaagattgagaacaagatcgagagcattggtctcaagcggacgccaatgggcctgctactagaggcactgggacaagagcaggaggctggatcctaggcccctgggatctgtacccaggacctggagaataccaccccacccccagcccataattgggacccagagccctttcccagcacttaaaacaggagcctagagccccctgcccaaacaaaacaggacatctgtgaccgccctacccccacgccagccccaaactaagatatccctcacacccagcccccattacctagggacaagagtcttccccagccttgaacccaggaccaagagccacctacatccagccccaaaactggcttcaggccagagcatccatggccaatttcaaattgtgaacccagagacactcccatccacccttctccatgctcatccccaaactggggcctggggcaaggcactctcaaatcttgaaccctggaccaaagcttttccagaccccaccctaccttccaacccaggtcaagacattgccaaatcttgaactcagaacccaagtgttccatgcccctgtgtggatggagtcgggtatcctgactgttggacccctggtccaggtgatcccgaccctcaccagtcccatttgcctccctccagctctgcttaggcattttgcccctcaccccaatgttccacaccatcgacaaccaaggggtgaggtggggacaggcctcagcagggaatggggcgtatatgttagtgttgctgcaacaataaagcctgttgcatctctcatgccaatttga

SEQ ID NO: 168600 - DNA, 2755 bp, Homo sapiens
  Payload ID: 13190
  Gene Symbol: PJA1
  Gene Name: praja ring finger 1, E3 ubiquitin protein ligase
  Uniprot ID: Q8NG27
  ENST ID: ENST00000361478
  CDS Start-End: 379-2310
acaatcacttccgccgccgcagtcgccgcccgccccgctgctgtctggcgggggaggagctcgggaccgggagcagcggctctggcggtcgtggcggtcggagatccgagagctctgcttctctgaaaagcgtgtggctttctggacttggtctacacctgacagtcactggaatgctactccaggccttagaagaaagtgaaactaattttaaaggccccttattctttctgttacctgcctgctgaagtgaaaataaatctccctgctcctttattctaaactgattttactttcccatctcaaaaacgtgtgcagggagcaggagccctcctacccgagccccagctgtattggaaaccctcctaagtcagagtgatgggtcaggaatctagcaagcctgtatggcccaatccaacaggagggtatcagtccaatacaggtaggaggtatggaagaaggcatgcttatgtcagtttcaggccacccacgagccagcgggaaaggattgccagccagagaaagacgaactccgaagtcccaatgcacagatcagcccccagtcaaaccaccaagaggagccgatcgccattttccactactcgtcgtagttgggacgacagcgagagttcgggaaccaacctgaatattgataatgaggactattccaggtatccgccaagagagtacagagcttcgggtagcagaagaggaatggcctatggacatattgactcttatggggcagatgatagtgaggaggagggggctgggcctgttgagcgaccgccagtgagagggaaaactggcaagtttaaagatgataagctgtatgacccagagaaaggggcaaggtctttggctgggccacctccacatttctctagttttagccgtgatgtgagagaggagcgagacaagttagacccagtccctgcagcaagatgctcagctagcagagctgacttcctgccacaaagtagtgtggcctcacagtcgtcttctgaaggcaagctggctacaaaaggtgacagctcggagagggagagaagggagcaaaatttacctgcacgtcccagcagggctcctgtgagtatttgtggtggtggggaaaacacctcaaagagtgcagaggaacctgtggtcaggcccaaaatcagaaacctggcaagtccaaactgcgtgaaaccaaaaattttttttgatactgatgatgatgacgatatgccacacagtacttccaggtggagggataccgccaatgacaatgagggccactcggatggcctggcaagaagagggagaggcgagagttcaagtggctatcccgagccaaagtaccctgaagacaaacgggaagcgaggagtgaccaagtgaaaccagaaaaggtgccgagacgacgacgcaccatggccgaccctgacttctggacgcacagtgatgattactacaaatactgcgacgaagactctgacagtgacaaagagtggattgctgctctgcgtcggaaatatcgaagccgagagcaaaccctgtcctccagtggcgaaagctgggagactctgccggggaaagaagagcgggaacctccacaggctaaggtgagtgccagcactggcaccagccctggccccggtgctagtgccagtgccggggctggcgccggggccagtgctggcagcaatggcagcaattaccttgaagaagttcgagaaccatctcttcaggaagagcaggcatccctggaagaaggagaaattccttggctccagtaccatgagaatgacagtagcagtgagggggataatgattctggtcacgagttgatgcaacctggggtattcatgctggatggaaacaacaaccttgaagatgactccagtgtgagcgaagacctagaagtggattggagcctctttgatggatttgcagatgggttaggagtggctgaagccatttcctatgtggaccctcagttcctcacctacatggcacttgaagaacgcctggcccaggcaatggaaactgcccttgcgcacttggagtctctcgcagtggatgtagaggtggccaatccaccagcaagcaaggagagcattgacgctcttcccgagatcctggtcactgaagatcatggcgcagttggtcaggagatgtgctgccccatctgctgtagcgaatatgtgaagggggaggtggcaactgagctgccgtgccaccactatttccacaagccgtgtgtgtccatctggcttcagaagtcaggcacctgccccgtgtgccgctgcatgttccctcccccactctaaagaccaaggccgtttactcctggtctgattattttccccatctgaaatccacaatactgcaggagccctcttgaaattaacaatggaaataaaaccaatcagtcagttagcctaaacctattgattcctcgtgattatttccaatgtgaaaacagttgtgtatgattgcattaaaaatcatatcatcttttagaggttagaaaagggaaaactaaactttctaaatgctacttgagattgcagtaagaagatacgttttctaacctgaaagttaaatcgcatttgttttcttcagtagaatgggaatgtgttgctgttacttgtaatgtcaagtttatctgttaaatatgtccaaaaggcaaaatcatttttgttgcatgttatgggtcgatgttcctgtaattgcagtgccgtaaaagcttattaaagttgttcttttggtttt

SEQ ID NO: 168601 - DNA, 2672 bp, Homo sapiens
  Payload ID: 13190
  Gene Symbol: PJA1
  Gene Name: praja ring finger 1, E3 ubiquitin protein ligase
  Uniprot ID: Q8NG27
  ENST ID: ENST00000374571
  CDS Start-End: 490-2256
aggatgtgatgtagtaacgtaattactctcacattggacttaatcagaaagaatttgcagattttattttatttattaaaaaaccagaaggcaatatagctaaatgtttaacattagttaaagctgggtgtttgtgacatttttcgctgtccttttctgtatccttgacgatttcatcatttaagatgaaataatgctttcgggcccaccctgatttgtggagagcagctgccgcccccgccacatcaaggaggcgggctccagctgacttcacaatcacttccgccgccgcagtcgccgcccgccccgctgctgtctggcgggggaggagctcgggaccgggagcagcggctctggcggtcgtggcggtcggagatccgagagctctgcttctctgaaaagcgtgtggctttctggacttgtttcaggccacccacgagccagcgggaaaggattgccagccagagaaagacgaactccgaagtcccaatgcacagatcagcccccagtcaaaccaccaagaggagccgatcgccattttccactactcgtcgtagttgggacgacagcgagagttcgggaaccaacctgaatattgataatgaggactattccaggtatccgccaagagagtacagagcttcgggtagcagaagaggaatggcctatggacatattgactcttatggggcagatgatagtgaggaggagggggctgggcctgttgagcgaccgccagtgagagggaaaactggcaagtttaaagatgataagctgtatgacccagagaaaggggcaaggtctttggctgggccacctccacatttctctagttttagccgtgatgtgagagaggagcgagacaagttagacccagtccctgcagcaagatgctcagctagcagagctgacttcctgccacaaagtagtgtggcctcacagtcgtcttctgaaggcaagctggctacaaaaggtgacagctcggagagggagagaagggagcaaaatttacctgcacgtcccagcagggctcctgtgagtatttgtggtggtggggaaaacacctcaaagagtgcagaggaacctgtggtcaggcccaaaatcagaaacctggcaagtccaaactgcgtgaaaccaaaaattttttttgatactgatgatgatgacgatatgccacacagtacttccaggtggagggataccgccaatgacaatgagggccactcggatggcctggcaagaagagggagaggcgagagttcaagtggctatcccgagccaaagtaccctgaagacaaacgggaagcgaggagtgaccaagtgaaaccagaaaaggtgccgagacgacgacgcaccatggccgaccctgacttctggacgcacagtgatgattactacaaatactgcgacgaagactctgacagtgacaaagagtggattgctgctctgcgtcggaaatatcgaagccgagagcaaaccctgtcctccagtggcgaaagctgggagactctgccggggaaagaagagcgggaacctccacaggctaaggtgagtgccagcactggcaccagccctggccccggtgctagtgccagtgccggggctggcgccggggccagtgctggcagcaatggcagcaattaccttgaagaagttcgagaaccatctcttcaggaagagcaggcatccctggaagaaggagaaattccttggctccagtaccatgagaatgacagtagcagtgagggggataatgattctggtcacgagttgatgcaacctggggtattcatgctggatggaaacaacaaccttgaagatgactccagtgtgagcgaagacctagaagtggattggagcctctttgatggatttgcagatgggttaggagtggctgaagccatttcctatgtggaccctcagttcctcacctacatggcacttgaagaacgcctggcccaggcaatggaaactgcccttgcgcacttggagtctctcgcagtggatgtagaggtggccaatccaccagcaagcaaggagagcattgacgctcttcccgagatcctggtcactgaagatcatggcgcagttggtcaggagatgtgctgccccatctgctgtagcgaatatgtgaagggggaggtggcaactgagctgccgtgccaccactatttccacaagccgtgtgtgtccatctggcttcagaagtcaggcacctgccccgtgtgccgctgcatgttccctcccccactctaaagaccaaggccgtttactcctggtctgattattttccccatctgaaatccacaatactgcaggagccctcttgaaattaacaatggaaataaaaccaatcagtcagttagcctaaacctattgattcctcgtgattatttccaatgtgaaaacagttgtgtatgattgcattaaaaatcatatcatcttttagaggttagaaaagggaaaactaaactttctaaatgctacttgagattgcagtaagaagatacgttttctaacctgaaagttaaatcgcatttgttttcttcagtagaatgggaatgtgttgctgttacttgtaatgtcaagtttatctgttaaatatgtccaaaaggcaaaatcatttttgttgcatgttatgggtcgatgttcctgtaattgcagtgccgtaa

SEQ ID NO: 168602 - DNA, 2692 bp, Homo sapiens
  Payload ID: 13190
  Gene Symbol: PJA1
  Gene Name: praja ring finger 1, E3 ubiquitin protein ligase
  Uniprot ID: Q8NG27
  ENST ID: ENST00000374583
  CDS Start-End: 308-2239
gtcagattctcctctaagtctggctttcctgcaaacccagtcttgtaatcattttgccaacattaaaaatgtgttccaggtctacacctgacagtcactggaatgctactccaggccttagaagaaagtgaaactaattttaaaggccccttattctttctgttacctgcctgctgaagtgaaaataaatctccctgctcctttattctaaactgattttactttcccatctcaaaaacgtgtgcagggagcaggagccctcctacccgagccccagctgtattggaaaccctcctaagtcagagtgatgggtcaggaatctagcaagcctgtatggcccaatccaacaggagggtatcagtccaatacaggtaggaggtatggaagaaggcatgcttatgtcagtttcaggccacccacgagccagcgggaaaggattgccagccagagaaagacgaactccgaagtcccaatgcacagatcagcccccagtcaaaccaccaagaggagccgatcgccattttccactactcgtcgtagttgggacgacagcgagagttcgggaaccaacctgaatattgataatgaggactattccaggtatccgccaagagagtacagagcttcgggtagcagaagaggaatggcctatggacatattgactcttatggggcagatgatagtgaggaggagggggctgggcctgttgagcgaccgccagtgagagggaaaactggcaagtttaaagatgataagctgtatgacccagagaaaggggcaaggtctttggctgggccacctccacatttctctagttttagccgtgatgtgagagaggagcgagacaagttagacccagtccctgcagcaagatgctcagctagcagagctgacttcctgccacaaagtagtgtggcctcacagtcgtcttctgaaggcaagctggctacaaaaggtgacagctcggagagggagagaagggagcaaaatttacctgcacgtcccagcagggctcctgtgagtatttgtggtggtggggaaaacacctcaaagagtgcagaggaacctgtggtcaggcccaaaatcagaaacctggcaagtccaaactgcgtgaaaccaaaaattttttttgatactgatgatgatgacgatatgccacacagtacttccaggtggagggataccgccaatgacaatgagggccactcggatggcctggcaagaagagggagaggcgagagttcaagtggctatcccgagccaaagtaccctgaagacaaacgggaagcgaggagtgaccaagtgaaaccagaaaaggtgccgagacgacgacgcaccatggccgaccctgacttctggacgcacagtgatgattactacaaatactgcgacgaagactctgacagtgacaaagagtggattgctgctctgcgtcggaaatatcgaagccgagagcaaaccctgtcctccagtggcgaaagctgggagactctgccggggaaagaagagcgggaacctccacaggctaaggtgagtgccagcactggcaccagccctggccccggtgctagtgccagtgccggggctggcgccggggccagtgctggcagcaatggcagcaattaccttgaagaagttcgagaaccatctcttcaggaagagcaggcatccctggaagaaggagaaattccttggctccagtaccatgagaatgacagtagcagtgagggggataatgattctggtcacgagttgatgcaacctggggtattcatgctggatggaaacaacaaccttgaagatgactccagtgtgagcgaagacctagaagtggattggagcctctttgatggatttgcagatgggttaggagtggctgaagccatttcctatgtggaccctcagttcctcacctacatggcacttgaagaacgcctggcccaggcaatggaaactgcccttgcgcacttggagtctctcgcagtggatgtagaggtggccaatccaccagcaagcaaggagagcattgacgctcttcccgagatcctggtcactgaagatcatggcgcagttggtcaggagatgtgctgccccatctgctgtagcgaatatgtgaagggggaggtggcaactgagctgccgtgccaccactatttccacaagccgtgtgtgtccatctggcttcagaagtcaggcacctgccccgtgtgccgctgcatgttccctcccccactctaaagaccaaggccgtttactcctggtctgattattttccccatctgaaatccacaatactgcaggagccctcttgaaattaacaatggaaataaaaccaatcagtcagttagcctaaacctattgattcctcgtgattatttccaatgtgaaaacagttgtgtatgattgcattaaaaatcatatcatcttttagaggttagaaaagggaaaactaaactttctaaatgctacttgagattgcagtaagaagatacgttttctaacctgaaagttaaatcgcatttgttttcttcagtagaatgggaatgtgttgctgttacttgtaatgtcaagtttatctgttaaatatgtccaaaaggcaaaatcatttttgttgcatgttatgggtcgatgttcctgtaattgcagtgccgtaaaagcttattaaagttgttcttttggttttacatggta

SEQ ID NO: 168603 - DNA, 2115 bp, Homo sapiens
  Payload ID: 13190
  Gene Symbol: PJA1
  Gene Name: praja ring finger 1, E3 ubiquitin protein ligase
  Uniprot ID: Q8NG27
  ENST ID: ENST00000374584
  CDS Start-End: 295-1662
gcggtcgtggcggtcggagatccgagagctctgcttctctgaaaagcgtgtggctttctggacttggtctacacctgacagtcactggaatgctactccaggccttagaagaaagtgaaactaattttaaaggccccttattctttctgttacctgcctgctgaagtgaaaataaatctccctgctcctttattctaaactgattttactttcccatctcaaaaacgtgtgcagggagcaggagccctcctacccgagccccagctgtattggaaaccctcctaagtcagagtgatgggtcaggaatctagcaagcctgtatggcccaatccaacaggagggtatcagtccaatacaggtaggaggtatggaagaaggcatgcttatgtcagtttcaggccacccacgagccagcgggaaaggattgccagccagagaaagacgaactccgaagtcccaatgcacagatcagcccccagtcaaaccaccaagaggagccgatcgccattttccactactcgtcgtagttgggacgacagcgagagttcgggaaccaacctgaatattgataatgaggactattccagtacttccaggtggagggataccgccaatgacaatgagggccactcggatggcctggcaagaagagggagaggcgagagttcaagtggctatcccgagccaaagtaccctgaagacaaacgggaagcgaggagtgaccaagtgaaaccagaaaaggtgccgagacgacgacgcaccatggccgaccctgacttctggacgcacagtgatgattactacaaatactgcgacgaagactctgacagtgacaaagagtggattgctgctctgcgtcggaaatatcgaagccgagagcaaaccctgtcctccagtggcgaaagctgggagactctgccggggaaagaagagcgggaacctccacaggctaaggtgagtgccagcactggcaccagccctggccccggtgctagtgccagtgccggggctggcgccggggccagtgctggcagcaatggcagcaattaccttgaagaagttcgagaaccatctcttcaggaagagcaggcatccctggaagaaggagaaattccttggctccagtaccatgagaatgacagtagcagtgagggggataatgattctggtcacgagttgatgcaacctggggtattcatgctggatggaaacaacaaccttgaagatgactccagtgtgagcgaagacctagaagtggattggagcctctttgatggatttgcagatgggttaggagtggctgaagccatttcctatgtggaccctcagttcctcacctacatggcacttgaagaacgcctggcccaggcaatggaaactgcccttgcgcacttggagtctctcgcagtggatgtagaggtggccaatccaccagcaagcaaggagagcattgacgctcttcccgagatcctggtcactgaagatcatggcgcagttggtcaggagatgtgctgccccatctgctgtagcgaatatgtgaagggggaggtggcaactgagctgccgtgccaccactatttccacaagccgtgtgtgtccatctggcttcagaagtcaggcacctgccccgtgtgccgctgcatgttccctcccccactctaaagaccaaggccgtttactcctggtctgattattttccccatctgaaatccacaatactgcaggagccctcttgaaattaacaatggaaataaaaccaatcagtcagttagcctaaacctattgattcctcgtgattatttccaatgtgaaaacagttgtgtatgattgcattaaaaatcatatcatcttttagaggttagaaaagggaaaactaaactttctaaatgctacttgagattgcagtaagaagatacgttttctaacctgaaagttaaatcgcatttgttttcttcagtagaatgggaatgtgttgctgttacttgtaatgtcaagtttatctgttaaatatgtccaaaaggcaaaatcatttttgttgcatgttatgggtcgatgttcctgtaattgcagtgccgtaaaagcttattaaagttgttcttttggttttacatggta

SEQ ID NO: 168604 - DNA, 574 bp, Homo sapiens
  Payload ID: 13190
  Gene Symbol: PJA1
  Gene Name: praja ring finger 1, E3 ubiquitin protein ligase
  ENST ID: ENST00000590146
  CDS Start-End: 141-574
gagcagcggctctggcggtcgtggcggtcggagatccgagagctctgcttctctgaaaagcgtgtggctttctggacttgggagcaggagccctcctacccgagccccagctgtattggaaaccctcctaagtcagagtgatgggtcaggaatctagcaagcctgtatggcccaatccaacaggagggtatcagtccaatacaggtaggaggtatggaagaaggcatgcttatgtcagtttcaggccacccacgagccagcgggaaaggattgccagccagagaaagacgaactccgaagtcccaatgcacagatcagcccccagtcaaaccaccaagaggagccgatcgccattttccactactcgtcgtagttgggacgacagcgagagttcgggaaccaacctgaatattgataatgaggactattccaggtatccgccaagagagtacagagcttcgggtagcagaagaggaatggcctatggacatattgactcttatggggcagatgatagtgaggaggagggggctgggcctgttgagcgaccgccagtgagagggaaaactggcaa

SEQ ID NO: 168605 - DNA, 544 bp, Homo sapiens
  Payload ID: 13190
  Gene Symbol: PJA1
  Gene Name: praja ring finger 1, E3 ubiquitin protein ligase
  ENST ID: ENST00000471141
  CDS Start-End: 1-203
tagacccagtccctgcagcaagatgctcagctagcagagctgacttcctgccacaaagtagtgtggcctcacagtcgtcttctgaaggcaagctggctacaaaaggtgacagctcggagagggagagaagggagcaaaatttacctgcacgagccctcttgaaattaacaatggaaataaaaccaatcagtcagttagcctaaacctattgattcctcgtgattatttccaatgtgaaaacagttgtgtatgattgcattaaaaatcatatcatcttttagaggttagaaaagggaaaactaaactttctaaatgctacttgagattgcagtaagaagatacgttttctaacctgaaagttaaatcgcatttgttttcttcagtagaatgggaatgtgttgctgttacttgtaatgtcaagtttatctgttaaatatgtccaaaaggcaaaatcatttttgttgcatgttatgggtcgatgttcctgtaattgcagtgccgtaaaagcttattaaagttgttcttttggttttacatggtataa

SEQ ID NO: 168606 - DNA, 4889 bp, Homo sapiens
  Payload ID: 13191
  Gene Symbol: PJA2
  Gene Name: praja ring finger 2, E3 ubiquitin protein ligase
  Uniprot ID: O43164
  ENST ID: ENST00000361189
  CDS Start-End: 241-2367
cctctgcttccgccgccgccaccgccgccgccgccgccacagccgccagccgcttcgcgttcggcgggggaggagttggaggcggagaagaaggcggtggtggcgggtggaggttcgagcgctgttctcgctccggagccgctgcacatttcggaatcttctgcggcttgtccatagtgtgaataaaaactaaatcacatctataattctactgaactggtcacacagacgctgccatatatgtcacagtacactgaaaaggagccagcagcaatggaccaagaatctggtaaggctgtctggcccaaaccagcaggagggtatcagacaattacaggcaggagatatggaagaagacatgcttatgtcagttttaaaccatgtatgaccagacatgaaagaagcttaggtcgggctggtgatgactatgaagtgttggaactagatgatgttccaaaggaaaattcctcaggttccagtcctttggatcaagttgattcttctttacccagtgaacctatatttgaaaaaagtgaaacagaaattcccacttgtggttcagcattgaatcaaaccactgagagcagtcaatcctttgttgcagtacatcacagtgaggaaggcagggataccttaggaagcagtacaaatcttcataatcactctgagggagagtatattccaggagcttgtagtgcttcaagtgtccaaaatggaattgcattggttcatacagactcttatgatccagatggcaaacatggagaagataatgaccatcttcaactttctgcagaagtcgtggaaggtagtagataccaggaatcattaggcaatacagtatttgagttggaaaacagagaggcagaggcatacactggtctttcaccaccagttccctcatttaactgtgaagtaagagatgagtttgaagagttagattctgtaccattagtgaaaagttctgctggtgatactgagtttgtccatcagaatagccaggaaattcagaggtcttctcaagatgaaatggttagtacgaaacaacaaaataatactagccaggaaagacagacagaacattcacctgaagatgcagcctgtggtccagggcatatttgtagtgaacaaaataccaatgatagggaaaagaaccatggaagttctcctgaacaggtagtgaggccaaaagttagaaaactgataagttcaagccaggtggaccaagaaacaggttttaataggcatgaggcgaaacaaagaagtgttcaaagatggagagaggctttggaagttgaggaaagtggctcagatgacctcttaataaaatgtgaagaatatgatggagagcatgactgtatgttcttggatccaccatactcaagagttattacacaaagggaaacagaaaataaccaaatgacatcagaaagtggagccacagcaggaaggcaagaggtggataacaccttttggaatggctgtggagattattaccaactctatgacaaagatgaagatagttctgaatgcagtgatggggaatggtctgcttctttgcctcatcgattttctggtacagaaaaagatcaatcctcaagtgatgaaagctgggagactctgccaggaaaagatgagaatgaacctgagctacaaagtgatagcagtggccctgaagaagaaaaccaagaattatctcttcaggaaggggaacagacatccttggaagagggagaaattccttggttacagtacaatgaagtcaatgaaagcagcagtgatgagggaaatgaacctgccaatgaatttgcacagccagctttcatgttggatggtaacaataacctggaggatgactccagtgtgagtgaagacttagatgtggattggagcctatttgatggctttgcagatggactaggagttgctgaagctatttcatatgtggatcctcagttccttacctacatggcactagaagaacgcttagcccaggctatggagactgctctggcccatttagagtctcttgcagtggatgttgaggtggccaatccaccagctagtaaggaaagcattgatggtcttccagagacccttgttcttgaagatcacactgctattggtcaggaacaatgctgtccaatctgttgcagtgagtatattaaggatgatatagcaacagagttgccctgtcaccatttctttcacaaaccttgtgtctcaatttggctacaaaagtcgggaacatgccctgtgtgccgccgtcatttcccacctgcggttattgaagcatctgcagctccttcctctgagcctgatcctgatgccccaccttcaaatgacagtattgcagaagcaccctaaaccttgacagttgaaatgagatcagtgtatcaaagtaaatctgcaaattccttctaaatttcatgtgcaaataattatatataaatatatttaaaaatgctatatatagtatatgccatagtttagaaagaatattaacctttctaaactaaatttaggtttgcagaaagtattaaacatttttaagctgaatgttgagacagtgcatccattttctttagttgaatatgtttgtattaattgtaaagccaagcttatcagttgactctctccagaataaataatcatctgtgtggcatacgttattggctttgtctgtaatactgccactaagtgattataattaagctgtcctgtttgcatcaaatgtaaagactgtgttcacaaccgtagtaaaatttggtttcattggaaatgaaacaaattctaaagtatgctttttcactagtccctttgattttgctatatcataacctcttggttcatatgctgagaaatttttcagaaagtccatttttgtttaaaattagaacttttcagaatgccaaatgaaggctaaaattttggccagaacattacaaaagttttaaatcgtagacgtaactccccctgaaataaagttaggtagtaaaatccttaatgaaaccagtggatgtgcttaacgtaaggttagtaaagcatacaaagaatctagtgtgctcagggcttggtacaatgagctgaattagatggccttatgaaactctttctaacctcttacccaacctgtttctccttggttaaaattatacttgaaggcccagaacactcatggcacatttgtttaatattgcttatagttagtttaaggtaattttgcttctacagtattttggaaggtctgaaaacttgcacagggtcatctttgtaattatataaccccaaactaagatgcacaatgtctccttcaggtgatcacacacagtggacgagtatgtgcaaacatggacataatagttcacttacaaatgtgatttgatgttaacactagagaatgatgactgtagaacatttgagcaagtaaaatagtaaagcacatagtgagtgtatgtccgtctaactggtacattgataatttagtttgggcacataaaaggaatatttatatggcttcccaaatgcagagttacatcttattcgtgtatttctctgagtatttatatcccgtctccttttttcattcttaaaaataaatgaattttcactgttggcacatatgaggcttaaatataaggaacataacacttgcattctaatttttgcatatattgtaaatgtgtctggtatttacagcaaaatactgtgtatccttttatgggtaaaacaaaagtgaacattgcatgcatgtaatgtgatgaatttgtaatttaggagttctttggggcttctgtgacttgggaaatgcttacattcaggccttaatgttgcattagctagcatgttttccctctgatgtatatagtcactgttgtataaactaatctttgcttgttttctactctgtgatctttccatatcatatttcattaatgatcagttagtgtcaaggagtcaaaacagattaaaattaatttcatgtgtatatggtggaaatttgtggctagtgtgatttttgtttgtttccttttaagtactgttgatcagttgtgacacttactggttaaacttacgttgctaaagatttctctataataagccacacattatatttagactatattaagggaccttggttttcttctagatagcagctgtcccaaagaaaatatttcttctttgtctgttaagatttagctattatctgccagttgttaagaggttttggttccaaactcaaccagcaatgttgagagctgaacttaagatagctgttgtactttttgctttccatctgttactgtccttcattcttggctccctactatctataaacagctgctgtgaagaagaaaagttgaataagagttggcttaaattttaaaaaagaaaaagaaaattgaggttttaggattttcatggtaacaagctctggtataagctaaggctggcaagttcagatactaaaatattatttgatcatatcttggatccttttgaaaaagttaagactatatgaaggtaaattagaaataagtatgaatattaataaaatagcatttatcttatttctctattttatgttgtgacttaacctaattttatttttttaacattttcttatttcttataatatgaatgctgatatttaaaggtagatctatgtggtattctttgtgtttcttaattgtttaactcttaagattatttgtgatctggatttatgtatttgttagatacatacgaattgttaaaatggaatgcaagtttttcaaaagcccaggtctaaatgtaatggttggtttattgttctataaccccagcccatcattttctgtgtaaatcataaacaataaacagaatatactcggtggtcatttctaata

SEQ ID NO: 168607 - DNA, 4645 bp, Homo sapiens
  Payload ID: 13191
  Gene Symbol: PJA2
  Gene Name: praja ring finger 2, E3 ubiquitin protein ligase
  Uniprot ID: O43164
  ENST ID: ENST00000361557
  CDS Start-End: 1-2127
atgtcacagtacactgaaaaggagccagcagcaatggaccaagaatctggtaaggctgtctggcccaaaccagcaggagggtatcagacaattacaggcaggagatatggaagaagacatgcttatgtcagttttaaaccatgtatgaccagacatgaaagaagcttaggtcgggctggtgatgactatgaagtgttggaactagatgatgttccaaaggaaaattcctcaggttccagtcctttggatcaagttgattcttctttacccagtgaacctatatttgaaaaaagtgaaacagaaattcccacttgtggttcagcattgaatcaaaccactgagagcagtcaatcctttgttgcagtacatcacagtgaggaaggcagggataccttaggaagcagtacaaatcttcataatcactctgagggagagtatattccaggagcttgtagtgcttcaagtgtccaaaatggaattgcattggttcatacagactcttatgatccagatggcaaacatggagaagataatgaccatcttcaactttctgcagaagtcgtggaaggtagtagataccaggaatcattaggcaatacagtatttgagttggaaaacagagaggcagaggcatacactggtctttcaccaccagttccctcatttaactgtgaagtaagagatgagtttgaagagttagattctgtaccattagtgaaaagttctgctggtgatactgagtttgtccatcagaatagccaggaaattcagaggtcttctcaagatgaaatggttagtacgaaacaacaaaataatactagccaggaaagacagacagaacattcacctgaagatgcagcctgtggtccagggcatatttgtagtgaacaaaataccaatgatagggaaaagaaccatggaagttctcctgaacaggtagtgaggccaaaagttagaaaactgataagttcaagccaggtggaccaagaaacaggttttaataggcatgaggcgaaacaaagaagtgttcaaagatggagagaggctttggaagttgaggaaagtggctcagatgacctcttaataaaatgtgaagaatatgatggagagcatgactgtatgttcttggatccaccatactcaagagttattacacaaagggaaacagaaaataaccaaatgacatcagaaagtggagccacagcaggaaggcaagaggtggataacaccttttggaatggctgtggagattattaccaactctatgacaaagatgaagatagttctgaatgcagtgatggggaatggtctgcttctttgcctcatcgattttctggtacagaaaaagatcaatcctcaagtgatgaaagctgggagactctgccaggaaaagatgagaatgaacctgagctacaaagtgatagcagtggccctgaagaagaaaaccaagaattatctcttcaggaaggggaacagacatccttggaagagggagaaattccttggttacagtacaatgaagtcaatgaaagcagcagtgatgagggaaatgaacctgccaatgaatttgcacagccagctttcatgttggatggtaacaataacctggaggatgactccagtgtgagtgaagacttagatgtggattggagcctatttgatggctttgcagatggactaggagttgctgaagctatttcatatgtggatcctcagttccttacctacatggcactagaagaacgcttagcccaggctatggagactgctctggcccatttagagtctcttgcagtggatgttgaggtggccaatccaccagctagtaaggaaagcattgatggtcttccagagacccttgttcttgaagatcacactgctattggtcaggaacaatgctgtccaatctgttgcagtgagtatattaaggatgatatagcaacagagttgccctgtcaccatttctttcacaaaccttgtgtctcaatttggctacaaaagtcgggaacatgccctgtgtgccgccgtcatttcccacctgcggttattgaagcatctgcagctccttcctctgagcctgatcctgatgccccaccttcaaatgacagtattgcagaagcaccctaaaccttgacagttgaaatgagatcagtgtatcaaagtaaatctgcaaattccttctaaatttcatgtgcaaataattatatataaatatatttaaaaatgctatatatagtatatgccatagtttagaaagaatattaacctttctaaactaaatttaggtttgcagaaagtattaaacatttttaagctgaatgttgagacagtgcatccattttctttagttgaatatgtttgtattaattgtaaagccaagcttatcagttgactctctccagaataaataatcatctgtgtggcatacgttattggctttgtctgtaatactgccactaagtgattataattaagctgtcctgtttgcatcaaatgtaaagactgtgttcacaaccgtagtaaaatttggtttcattggaaatgaaacaaattctaaagtatgctttttcactagtccctttgattttgctatatcataacctcttggttcatatgctgagaaatttttcagaaagtccatttttgtttaaaattagaacttttcagaatgccaaatgaaggctaaaattttggccagaacattacaaaagttttaaatcgtagacgtaactccccctgaaataaagttaggtagtaaaatccttaatgaaaccagtggatgtgcttaacgtaaggttagtaaagcatacaaagaatctagtgtgctcagggcttggtacaatgagctgaattagatggccttatgaaactctttctaacctcttacccaacctgtttctccttggttaaaattatacttgaaggcccagaacactcatggcacatttgtttaatattgcttatagttagtttaaggtaattttgcttctacagtattttggaaggtctgaaaacttgcacagggtcatctttgtaattatataaccccaaactaagatgcacaatgtctccttcaggtgatcacacacagtggacgagtatgtgcaaacatggacataatagttcacttacaaatgtgatttgatgttaacactagagaatgatgactgtagaacatttgagcaagtaaaatagtaaagcacatagtgagtgtatgtccgtctaactggtacattgataatttagtttgggcacataaaaggaatatttatatggcttcccaaatgcagagttacatcttattcgtgtatttctctgagtatttatatcccgtctccttttttcattcttaaaaataaatgaattttcactgttggcacatatgaggcttaaatataaggaacataacacttgcattctaatttttgcatatattgtaaatgtgtctggtatttacagcaaaatactgtgtatccttttatgggtaaaacaaaagtgaacattgcatgcatgtaatgtgatgaatttgtaatttaggagttctttggggcttctgtgacttgggaaatgcttacattcaggccttaatgttgcattagctagcatgttttccctctgatgtatatagtcactgttgtataaactaatctttgcttgttttctactctgtgatctttccatatcatatttcattaatgatcagttagtgtcaaggagtcaaaacagattaaaattaatttcatgtgtatatggtggaaatttgtggctagtgtgatttttgtttgtttccttttaagtactgttgatcagttgtgacacttactggttaaacttacgttgctaaagatttctctataataagccacacattatatttagactatattaagggaccttggttttcttctagatagcagctgtcccaaagaaaatatttcttctttgtctgttaagatttagctattatctgccagttgttaagaggttttggttccaaactcaaccagcaatgttgagagctgaacttaagatagctgttgtactttttgctttccatctgttactgtccttcattcttggctccctactatctataaacagctgctgtgaagaagaaaagttgaataagagttggcttaaattttaaaaaagaaaaagaaaattgaggttttaggattttcatggtaacaagctctggtataagctaaggctggcaagttcagatactaaaatattatttgatcatatcttggatccttttgaaaaagttaagactatatgaaggtaaattagaaataagtatgaatattaataaaatagcatttatcttatttctctattttatgttgtgacttaacctaattttatttttttaacattttcttatttcttataatatgaatgctgatatttaaaggtagatctatgtggtattctttgtgtttcttaattgtttaactcttaagattatttgtgatctggatttatgtatttgttagatacatacgaattgttaaaatggaatgcaagtttttcaaaagcccaggtctaaatgtaatggttggtttattgttctataaccccagcccatcattttctgtgtaaatcataaacaataaacagaatatactcggtggtcatttct

SEQ ID NO: 168608 - DNA, 2160 bp, Homo sapiens
  Payload ID: 13192
  Gene Symbol: PRAMEF1
  Gene Name: PRAME family member 1
  Uniprot ID: O95521
  ENST ID: ENST00000332296
  CDS Start-End: 104-1528
acccacagcactcattcctggagctactggttggtttcctgagaggtcccagaactctgcgaagtgagtccagcgctgagattttccttgcagatctatcaggatgagcatccaggccccacccagactactggagctggcagggcagagcctgctgagagaccaggccttgtccatctctgccatggaggagctgcccagggtgctctatctcccactcttcatggaggccttcagcaggagacacttccagactctgacggtgatggttcaggcctggcccttcacctgcctccctctgggatcactgatgaagacgcttcatttggagaccttaaaagcattgctggaagggcttcatatgctgcttacacagaaggatcgccccaggaggtggaaacttcaagtgctggatttgcgggatgttgacgagaatttctgggccagatggcctggagcctgggccctgtcctgcttcccagagaccacgagtaagaggcagacagcagaggactgtccaaggatgggagagcaccagcccttaaaggtgttcatagacatctgcctcaaggaaataccccaggatgaatgcctgagatacctcttccagtgggtttaccaaaggagaggtttagtacacctgtgctgtagtaagctggtcaattatctaacgccgattaaatatctcagaaagtcattgaaaataatatacctgaatagtattcaagagctggaaattcgcaacatgtcctggccacgtctgataagaaagcttcgttgttacctgaaggagatgaagaatcttcgcaaactcgttttctccaggtgccatcattacacgtcagataatgaactcgaaggacggttagttgccaaattcagctctgtgttcctcaggctggaacaccttcagttgcttaaaataaaattgatcaccttcttcagtgggcacctggaacagctgatcaggtgcctccagaaccccttggagaacttggaattaacttatggctacctattggaagaagacatgaagtgtctctcccagtacccaagcctcggttacctaaagcatctgaatctcagctacgtgctgctgttccgcatcagtcttgaacccctcggagctctgctggagaaaattgctgcctctctcaaaaccctcatcttggagggctgtcagatccactactcccaactcagtgccatcctgcctggcctgagccgctgctcccagctcaccaccttctactttggcagaaattgcatgtctattgacgccctgaaggacctgctgcgccacaccagtgggctgagcaagttaagcctggagacgtatcctgcccctgaggagagtttgaattccttggttcgtgtcaattgggagatcttcaccccacttcgggctgagctgatgtgtacactgagggaagtcaggcagcccaagaggatcttcattggccccaccccctgcccttcctgtggctcatcaccgtctgaggaactggagctccatctttgctgctagggaaggcgtgcccagtggggtagagaaatccaaagttctcttccaggcacttggacactaaaatctactatgtgggtgcaaactatttttctcttttcttatttatttcattttttaataattccaaaatttttattaaagacaatttgagacagggtttcgctgtgttgctccagctggtctcaaactgctgggcttatgggatcctcctgcctcagcttcctaaagtgctgggattactggcatgagtgactgtgtccaggccacatgcaacttaaaggaagcacaggcaagtgttcagtgtgagggaaaaaacataacagcagggggcaaggttggaggaaaatgttgaggtgacatcagtgagaacttcagggacccgtgtcctagagtcggaaagagaagctaaagttctacagtgatgagactgttatccctgcaaggatggttaccaaggaatatcagcaataaagagcacctgaatgaaaacttttaacctgttgtgcaatttatccatcagaaatctctagttatcgagttacggatggaaaaataacgaaatactaatttgtctgtgattgagtttcagttgtagaacatcaaagcaaccaaataaaaattagatcattttg

SEQ ID NO: 168609 - DNA, 1525 bp, Homo sapiens
  Payload ID: 13193
  Gene Symbol: PRAMEF10
  Gene Name: PRAME family member 10
  Uniprot ID: O60809
  ENST ID: ENST00000235347
  CDS Start-End: 81-1505
ttcctgcttagttcttcctgaggtctgagcaccctccaaactgagtccagatctgagttttccctcggagatttgtcagaatgagcctccaggccccatccagactgctggagctggcagggcagagcctgctgaggaaccagttcttgaccatcttcaccctggatgagctgcccagggaggtcttccctctgatgttcatggaggccttcagcatgagacgttttgaggccctgaagctgatggtgcaggcctggcccttcctccgcctccctctgggatccctgatgaagacacctcatctggagaccttgcaagctgtcctgaggggacttgatacactggtggcccagaaggttcgccccaggaggtggaaacttcaagtgctggatttgagggatgttgatgagaatttctggaccatatggtctggagccagggtcctctcctgctccccagaggccatgagtaagaggcagacagtggaggactgtccaaggatgggagagcgccagcccttgaaggtgttcatagacctctgcctaaaggaaagtacactggatgaatgcctgagctacctttttgggtggatccactacagaagaggcctagtgcacctgtgttgtagtaaggtgcagaattactcaatgcccacttcaagtttcagaaatctattggaaaggatatacccagacagtatccaggagttggaagtctggaaaaagtgctctctcaataaaacgggaaagtttgccccttacctgagccagatgagcaatcttcgtgaactctttttagccttcggttatgagcgtgagttgtacgtgagcgtccagtggccgtgcattcctgacttggactctccattcctctgcctgtactacccccagatgctttatataaaaaagatcagtaatatcaaagagcacctggagcacctgctcaggtacctcaagaaccccttgggggcctttatattcagtgatgcttacctaactgatcgggacatggagtgtctgtctcagtacccaagcctcagtcagctaaaggagctgcgtctgattcatatcctaatgtggaccaccaatcttgagccccttggagttctgctggagaaagttgctgctactctcaagaccctcgtcttaaaggactgtcggatccaggacccccaactcagggtcctcctgcctgccctgagccactgttcccagctcaccaccttcaactttcatggaaatgagacctccatgaatgctctgaaagacctgctgcgtcacacacgtgggctgagcaagttaggcctggagttgtatcctgcccctctggagagtcttgactacaagggtcatgtcaattgggagatcctcaccccaattcgggctgagctgatgcgtacactcagggaagtcaggcagcccaagaggatcttctttggtcccgtcccttgccctaactgtggctcatggccatctgagaaagtggacttccatctttgctcctagggaaggcctggttcgtggga

SEQ ID NO: 168610 - DNA, 1525 bp, Homo sapiens; identical to SEQ ID NO: 168609
  Payload ID: 13193
  Gene Symbol: PRAMEF10
  Gene Name: PRAME family member 10
  ENST ID: ENST00000632873
  CDS Start-End: 81-1505

SEQ ID NO: 168611 - DNA, 1845 bp, Homo sapiens
  Payload ID: 13194
  Gene Symbol: PRAMEF11
  Gene Name: PRAME family member 11
  ENST ID: ENST00000619922
  CDS Start-End: 72-1508
ttcctgcttggttcttcctgaggtctgagcaccttctagactacatccagatctgttttccctgcagattcatgaagatgagcatccggattccacccagactcctggagcttgcggggcggagcctgctgagggaccaagccttggccgtctccaccctggaggagctgcccacggaacttttccccccactgttcatggaggccttcagcaggagacgctgtgaggccctgaagctgatggtgcaggcctggcccttccgccgcctccctctgaggcctctgataaagatgccttgtctggaggccttccaagctgtgctcgatgggctggatgcactgcttacccaaggggttcgtcccaggagatggaaacttcaagtgctggatttacaggatgtctgtgagaacttctggatggtttggtctgaagctatggcccatgggtgcttcctcaatgccaagaggaacaaaaaaccagtgcaggactgtccaaggatgagaggacggcagcccttgactgtgtttgtagaactttggctcaagaacaggactctggatgaatacctcacctgcctccttctatgggtcaagcagaggagagatttactacacctgtgctgtaagaagctgaaaattttgggaatgcccttccgcaatatcagaagcatcctgaaaatggtgaacctagactgtatccaggaggtggaagtgaattgcaagtggatactgcccatcctgacacagtttaccccatacctgggccacttgaggaatcttcagaagctcgttctctcccacatggatgtctctcgctacgtttccccagagcagaagaaggagattgttacccagttcaccactcagttcctcaagctgcgctgcctccaaaagctttatatgaactctgtttctttcctcgaaggccacctggaccagctgctcagctgtctgaagacctcgttaaaggtcctcacaataactaactgtgtgcttttggaatcagacttgaagcatctatcccagtgcccgagtatcagtcaactaaagaccctggacctgagtggcatcagactgaccaattacagtcttgtgcctctccaaattctcctagaaaaagttgcagccacccttgagtacctggatttagatgactgtggcatcatagactcccaagtcaacgccatcctgcctgccctgagccgctgctttgagctcaacaccttcagcttctgtggaaatcccatctgcatggccaccctggagaacctgctgagccacacaatcatactcaaaaacttatgcctggagctgtatcctgccccgcaggaaagttatggtgctgatggtactctctgctggagcagatttgctcaaattagggctgagctgatgaagaaagtgaggcacttaaggcaccccaagaggatcttgttctgtactgacaactgccctgaccatggcgacaggtcattttatgacctggaggcagatcaatactgctgttgaatgcctgcctatttggatgggtatgtcaaacgctttcttctggacacttggaaactaaaacctaggtcttaggtacatcctaaagggagcacagaacccatcgtttcacacatgggctctgaaagtgggaaaggaaagctgatcaagcaggggcaggacttgggggaaatgttgccatggattcaatgggactttgggaacctgtatcctgtagagtcgaaaatgggaatctgaatgtctagagtggaattcaggcttgagaatacatgagggagttactcttgcatggatggttgtaaagaaacaatcagaaataaaggaaaactgagcagaatct

SEQ ID NO: 168612 - DNA, 1845 bp, Homo sapiens; identical to SEQ ID NO: 168611
  Payload ID: 13194
  Gene Symbol: PRAMEF11
  Gene Name: PRAME family member 11
  ENST ID: ENST00000633392
  CDS Start-End: 72-1508

SEQ ID NO: 168613 - DNA, 1786 bp, Homo sapiens
  Payload ID: 13195
  Gene Symbol: PRAMEF12
  Gene Name: PRAME family member 12
  Uniprot ID: O95522
  ENST ID: ENST00000357726
  CDS Start-End: 28-1479
gatgtttttttctctagattcatcaggatgagcctccaggccccacctagactcctggagctggctgagcagagtctgctgagagaccgggccttggccatccccaccctggaggagctgcccagggagctctttcccccactgttcatggaggcctttaccaggagatgctgcgagaccctgacaactatggtgcaggcctggcccttcacctgccttcctctagggtccctgatgaagtcatgtaatctagagatctttcgagctgtgctggaggggcttgatgcactgcttgcccagaaggttcgccccaggcggtggaaacttcaagtgttggacttgcggaatgtggatgagaacttctggggcatatggtctggagcttctgcactctccccagaggccctgagtaagagacgaacagcagggaactgtccaaggccgggtgggcagcagcccttgatggtgatcctagacctttgcttcaagaatgggacgctggatgaatgcctcacccacttcttagagtggggcaagcagagaaaaggcttactgcacgtgtgttgcaaggagctgcagatttttggaatagccatccacaggatcatagaggtcctgaacacggtggagctagactgtatccaggaggtggaagtgtgctgcccgtgggagctgtccattcttataaggttcgccccttacctgggccagatgaggaatctccgcaaacttgttctcttcaacatccatgtctctgcctgcattcccctagacaggaaggagcagtttgtcatccagttcacctctcagttcctcaagctggactacttccagaagctttacatgcactctgtctctttcctcgaaggccacctggaccagctgctcaggtgtctccaggcccccttggagacagtcgtaatgaccgaatgcctgctgtcagagtcggacctgaagcatctctcttggtgcccgagcatccgtcagctaaaagagctagacctgaggggcatcacactgacccatttcagtcctgagcccctctcagttctgctggagcaagctgaggccaccctgcagaccctggacttagaggactgtgggatcgtggattcccaactcagcgccatcctgcctgccctgagccgctgctcccagctcagcaccttcagcttctgtgggaacctcatctccatggccgccctggagaacctgctgcgccacaccgtcgggctgagcaagctaagcctggagctgtatcctgcccctctggagagttatgatgcccagggtgctctctgctggggaagattttctcaacttggggctgagctgatgaagacactgagggacttaaggcagcccaagataattgtgttcagcactgtcccctgccctcgctgtggcatcagggcctcctatgacctggagcccagtcactgtctgttgaatgcctgctgtcagggtggatttatttaaagctttcttctggtcatttggcaactgaatcctaggccatgagtgtatgtcaaagggagcacagacccatcgtttcatatgcctgctcaatgtgaaccggaaaggaaaggggatgcaggaagggagggactgggggaaaagttgagttggagtcaataggagctttagagacctgtgtcccagagaatcagaaatgggaatctgaattgctagaatgagaatcaggtaggagagacacatgagacagttacccctgcacggatggttgtaaagaaacagtcagaaataaagggaagctgagtggaaa

SEQ ID NO: 168614 - DNA, 1690 bp, Homo sapiens
  Payload ID: 13196
  Gene Symbol: PRAMEF14
  Gene Name: PRAME family member 14
  ENST ID: ENST00000334600
  CDS Start-End: 104-1528
acccacagcactcattcctggagctactgcttggttccctgagaggtcccagaactctgcaaagtgagtccagcgctgagatttttcttgcagatctatcaggatgagcatccaggccccacccagactcctggagctggcagggcagagcctgctgagagaccaggccttgtccatctctgccatggaggagctgcccagggtgctctatctcccactcttcatggaggccttccgcaggagacacttccagactctgacggtgatggtgcaggcctggcccttcacctgcctccctctgggatcactgatgaagacgcttcatttggagaccttaaaagcattgctggaagggcttcatatgctgcttacacagaaggatcgccccaggaggtggaaacttcaagtgctggatttgcgggatgttgatgagaatttctgggccagatggcctggagcctgggccctgtcctgcttcccagagaccatgagtaagaggcagacagcagaggactgtccaaggatgggagagcaccagcccttaaaggtgttcatagacatctgcctcaaggaaataccccaggatgaatgcctgagatacctctttcagtgggtttaccaaaggagaggtttagtacacctgtgctgtagtaagctggtcaattatctaacgccgattaaacatctcagaaagtcattgaaaataatatacctgaatagtattcaacagctggaaattcgcaacatgtcctggccacgtctgataagaaagcttcgttgttacctgaaggagatgaagaatcttcgcaaactcgttttctccaggtgccatcattccatgtcagataatgaactcgaaggacggttagtcaccaaattcagctctgtgttcctcaggctggaacacctccagttgcttaaaataaaattgatcaccttcttcagtgggcacctggaacagctgatcaggtgcctccagaaccccttggagaacttggaattaacttatggctacctattggaagaagacatgaagtgtctctcccagtacccaagcctcggttacctaaagcatctgaatctcagctacgtgctgctgttccgcatcagtcttgaacccctcggagctctgctagagaaaattgctgcctctctcgaaaccctcatcttggagggctgtcagatccactactcccaactcagtgccatcctgcctggcctgagccactgctcccagctcaccaccttctactttggcagaaattgtatgtctatgggtgccctgaaggacctgttgtgccacaccagtgggctgagcaagttaagcctggagacgtatcctgcccctgaggagagtttgaattccttggttcgtgtcgattgggagatcttcgccctacttcgggctgagctgatgtgtacactgagggaagtcaggcagcccaagaggatcttcattggtcccaccccctgcccttcctgtggctcatcaccgtctgaggaactggagctccatctttgctgctagggaaggcgtgcctagcggggtagagaaatccaaagttctcttccaggcactgggacactaaaatctactatgtaggtgcaaactatttttctcttttcttatttatttcattttttaataattccaaaatttttattaaagacaatttgagacagggtttct

SEQ ID NO: 168615 - DNA, 1865 bp, Homo sapiens
  Payload ID: 13197
  Gene Symbol: PRAMEF15
  Gene Name: PRAME family member 15
  Uniprot ID: Q5VWM5
  ENST ID: ENST00000376152
  CDS Start-End: 95-1531
acccaaagtcttcaagcctggagttcctgcttggttcttcctgaggtctgagcaccttctagactacatccagatctgttttccctgcagattcatgaagatgagcatccggactccacccagactcctggagcttgcagggcggagcctgctgagggaccaagctttggccatgtccaccctggaggagctgcccacagaacttttccccccactgttcatggaggccttcagcaggagacgctgtgaggccctgaagctgatggtgcaggcctggcccttccgccgcctccctctgaggcctctgataaagatgccttgtctggaggccttccaagctgtgctcgatgggcttgatgcactgcttacccaaggggttcgtcccaggaggtggaaactccaagtgctggatttacaggatgtctgtgagaacttctggatggtttggtctgaagctatggcccatgggtgcttcctcaatgccaagaggaacaaaaaaccagtgcaggactgtccaaggatgagaggacggcagcccttgactgtgttcgtagaactttggctcaagaacaggactctggatgaatacctcacctacctccttctatgggtcaagcagaggaaagatttactacacctgtgctgtaagaagctgaaaattttgggaatgcccttccgcaatatcagaagcatcctgaaaatggtgaacctagactgtatccaggaggtggaagtgaattgcaagtgggtactgcccatcctgacacagtttaccccatacctgggccacatgaggaatcttcagaagctcgttctctcccacatggatgtctctcgctacgtttccccagagcagaagaaggagattgttacccagttcaccactcagttcctcaagctgcgctgcctccaaaagctttatatgaactctgtttctttcctcgaaggccacctggaccagctgctcagctgtctgaagacctcgttaaaagtcctcacaataactaactgtgtgcttttggaatcagacttgaagcatctatcccagtgcccgagtatcagtcaactaaagaccctggacctgagtggcatcagactgaccaattatagtcttgtgcctctccaaattctcctagaaaaagttgcagccacccttgagtacctggatttagatgactgtggcatcatagactcccaagtcaacgccatcctgcctgccctgagccgctgctttgagctcaacaccttcagcttctgtggaaatcccatctgcatggccaccctggagaacctgctgagccacacaatcatactcaaaaacttatgtgtggagctgtatcctgccccccgagagagttatggtgctgatggtactctctgctggagcagatttgctcaaattagggctgagctgatgaacagagtgagggacttaaggcaccccaagaggatcttgttctgtactgactactgccctgactgtggcaacaggtcattttatgacctggaggcagatcaatactgctgttgaatgcctgcctatttggatgggtatgtcaaacgctttcttctggacacttggaaactaaaacctaggtcttaggtacatcctaaagggagcacagaacccatcatttcacacataggctctgaaagtgggaaaggaaagctgatcaagcaggggccggacttgggggaaatgttgccatggattcgatgggactttggggacctgtgtcctgtagattcgaaaatgggaatctgaatgtctagagtggaattcaggcttgagaatacatgagggagttactcttgcatggatggttgtaaagaaacaatcagaaataaaggaaaactgagcagaa

SEQ ID NO: 168616 - DNA, 1600 bp, Homo sapiens
  Payload ID: 13197
  Gene Symbol: PRAMEF15
  Gene Name: PRAME family member 15
  ENST ID: ENST00000613530
  CDS Start-End: 100-1530
acccaaagtcttcaagtctggagttcctgcttagttcttcctgaggtctgagcaccctccaaactgagtccagatctggtaagtcactaatctctgaagatgagcatccggactccacccagactcctggagcttgcagggcggagcctgctgagggaccaagctttggccatgtccaccctggaggagctgcccacagaacttttccccccactgttcatggaggccttcagcaggagacgctgtgaggccctgaagctgatggtgcaggcctggcccttccgccgcctccctctgaggcctctgataaagatgccttgtctggaggccttccaagctgtgctcgatgggcttgatgcactgcttacccaaggggttcgtcccaggaggtggaaactccaagtgctggatttacaggatgtctgtgagaacttctggatggtttggtctgaagctatggcccatgggtgcttcctcaatgccaagaggaacaaaaaaccagtgcaggactgtccaaggatgagaggacggcagcccttgactgtgttcgtagaactttggctcaagaacaggactctggatgaatacctcacctacctccttctatgggtcaagcagaggaaagatttactacacctgtgctgtaagaagctgaaaattttgggaatgcccttccgcaatatcagaagcatcctgaaaatggtgaacctagactgtatccaggaggtggaagtgaattgcaagtgggtactgcccatcctgacacagtttaccccatacctgggccacatgaggaatcttcagaagctcgttctctcccacatggatgtctctcgctacgtttccccagagcagaagaaggagattgttacccagttcaccactcagttcctcaagctgcgctgcctccaaaagctttatatgaactctgtttctttcctcgaaggccacctggaccagctgctcagctgtctgaagacctcgttaaaagtcctcacaataactaactgtgtgcttttggaatcagacttgaagcatctatcccagtgcccgagtatcagtcaactaaagaccctggacctgagtggcatcagactgaccaattatagtcttgtgcctctccaaattctcctagaaaaagttgcagccacccttgagtacctggatttagatgactgtggcatcatagactcccaagtcaacgccatcctgcctgccctgagccgctgctttgagctcaacaccttcagcttctgtggaaatcccatctgcatggccaccctggagaacctgctgagccacacaatcatactcaaaaacttatgtgtggagctgtatcctgccccccgagagagttatggtgctgatggtactctctgctggagcagatttgctcaaattagggctgagctgatgaacagagtgagggacttaaggcaccccaagaggatcttgttctgtactgactactgccctgactgtggcaacaggtcattttatgacctggaggcagatcaatactgctgttgaatgcctgcctatttggatgggtatgtcaaacgctttcttctggacacttggaaactaaaacctaggtctt

SEQ ID NO: 168617 - DNA, 1578 bp, Homo sapiens
  Payload ID: 13198
  Gene Symbol: PRAMEF17
  Gene Name: PRAME family member 17
  Uniprot ID: Q5VTA0
  ENST ID: ENST00000376098
  CDS Start-End: 27-1451
gagtttttcactggagatttgtcagaatgagcctccagtccccatccagactcctggagctggcaggccagagcctgctgaggaaccagttcttgaccatcttcatcctggacgagctgcccagggaggtcttccctctgatgttcatggaggcctccagcatgagacattttgaggccctgaagctgatggtgcaggcctggcccttcctccgcctccctctgggatccctgatgaagacacctcatctggagaccttgcaagctgtgctgaagggacttgatacactgctggcccagaagcttcgccccaggaggtggaaacttcaagtgctggatttgcgggatgttgatgggaatttctggactatatggtctggagccagggccctctcctgctccccagaggccatgagtaagaggcagacagtggaggactatccaaggacgggagagcaccagcccttgaaggtgttcatagacctctgccaaaaggaaagtacactggatgaatgcctgagctacctctgcaggtggatccactacagaagaggtctagtgcacctgtgttgtaataaggtgcagaattactcaatgcccacttcaagtttcagaaatttattgaaaagggtatacccagacagtatccaggagttggaaattaagagaaagtgctctctgaataaaacaggaaagtttgccccttacttgagccagatgagcaatcttcgcaaactctttttagccttcggttatgacgatgagttatatgtaagcggccaacagcagttcgttcctgacttggactgtccattcctctgcctgtactaccctcagatgctttatataagaaagatcagtaatatcaaagagcacctggagcacctgctcaggtgcctcaagaaccccttgggaacctttatattctgtcatgcttacctagctgatcaggacatggagtgtctgtctcagtacccaagcctcagtcagctaaaggagctgcatctgattcatatcctaatgtggactaccaatcttgagccccttggagctctgctagagaaagttgctgctactctcgagatcctcacgttaaaggactgtcagatccaggactcccagctcagggtcctcctgcctgccctgagccgctgctcccagctcaccaccttctactttcgcggaaatgagacctccacgaatgctctgaaagacctgctgtgtcacacaggtgggctgagcaagttaggtctggagttgtatcctgcccctctggagtgtcttgacaacaggggtcatgtcaattgggagatcctcgccccaattcgggctgagctgatgtgtacactcagggaagtcaggcagcccaagaggatcttttttggtcccatcccctgcccttcctgtggctcatggccatctgagaaagtggacttccatctttgctcttagtgaaggcctgattagtgggatggatatgctttcttcaggacccttaggcactaaaatctaggacacaggtgggtttttttgtttttttgttttttttttgatggagtctcgctctgtccctcaggct

SEQ ID NO: 168618 - DNA, 1440 bp, Homo sapiens
  Payload ID: 13199
  Gene Symbol: PRAMEF18
  Gene Name: PRAME family member 18
  ENST ID: ENST00000540591
  CDS Start-End: 1-1440
atgagcttccaggccccacgcagactcctggagctggcagggcagagcctgctgagggaccaggccttggccatctccgtcctggatgagctgcccagggagctcttccccccactgttcgtggaggccttcactagcagacgctgcgaggttctgaaggtgatggtgcaggcctggcccttcccctgcctccctctggggtccctgatgaagacgcctgatctggagatcttacattatgtagtggatgggattgattgcctgcttgcccaaaaggttcgccccaggaggtggaaacttcaagtgctggaaatgcgggatgttgatgagaatttttggaccatatggtctggagccaggctcctgtcctgctccccagaggccatgagtaagagacagacagtggaggactgtccaaggacaggagagaagcagcccttgaaggtgttcatggatgtttgcctcaaggaaaaattcatggatgaagatctgagcttcttctctgggtgggtgcagcacagaagaggttcagtacacctgtgctgtactaaggtggtgaattattcaatgagcattctaaatttcagaaacatattggaaacagtatacccagacagtatccaagtgttggaaatttggaacatgtgctggctgtgtatgatagtagagtttagccgttacctgagccagatgaggaatcttcgcaaactcttcatctctgatggctgtcgttacctgctaagctctgacagccaagaacagttagttgctgaattcagctctgtgctcctcaggctggagaacctccagatgctttatgtaagaagggtctgcttcttcagaggccacctggaccagctgatcaggtgcctcaggagcccgttggagacattggcattaacttatggcttcctagaagaagaggacttgaaatgcctgccccggtacccaagtctcagtcaactgaagcagctgaatctgagtcatggtgcactgcgcttcatccgtcttgagcccctccgagctctgctagagaaagttgctgccactcttcagaccctcttcttagtggactgtgggattgggtactccaaactcagggtcatcctgcctgccctgagccgctgctccaacctcaccactttctgttttcacggcaatgacacgtccatggatgctctgaaggacctgctgcgccacacaggcaggctgagcaatttgagcctggaaacatatcctgcccctcgggagagtcttgacaacaggggtcgtgtcattttggagctcctcaccccacttcaggctgagctgatgcgtatactgagggaagtaagggagcccaaaaggatcttctttggtccggtgtcctgcccttgctgtggcacttcgcccactgagcaactggagttcaatttttgcttgtggggaaggcctgcctag

SEQ ID NO: 168619 - DNA, 2104 bp, Homo sapiens
  Payload ID: 13199
  Gene Symbol: PRAMEF18
  Gene Name: PRAME family member 18
  ENST ID: ENST00000624297
  CDS Start-End: 22-1467
gatttgttttcttgcagatttatcaggatgagcttccaggccccacgcagactcctggagctggcagggcagagcctgctgagggaccaggccttggccatctccgtcctggatgagctgcccagggagctcttccccccactgttcgtggaggccttcactagcagacgctgcgaggttctgaaggtgatggtgcaggcctggcccttcccctgcctccctctggggtccctgatgaagacgcctgatctggagatcttacattatgtagtggatgggattgattgcctgcttgcccaaaaggttcgccccaggaggtggaaacttcaagtgctggaaatgcgggatgttgatgagaatttttggaccatatggtctggagccaggctcctgtcctgctccccagaggccatgagtaagagacagacagtggaggactgtccaaggacaggagagaagcagcccttgaaggtgttcatggatgtttgcctcaaggaaaaattcatggatgaagatctgagcttcttctctgggtgggtgcagcacagaagaggttcagtacacctgtgctgtactaaggtggtgaattattcaatgagcattctaaatttcagaaacatattggaaacagtatacccagacagtatccaagtgttggaaatttggaacatgtgctggctgtgtatgatagtagagtttagccgttacctgagccagatgaggaatcttcgcaaactcttcatctctgatggctgtcgttacctgctaagctctgacagccaagaacagttagttgctgaattcagctctgtgctcctcaggctggagaacctccagatgctttatgtaagaagggtctgcttcttcagaggccacctggaccagctgatcaggtgcctcaggagcccgttggagacattggcattaacttatggcttcctagaagaagaggacttgaaatgcctgccccggtacccaagtctcagtcaactgaagcagctgaatctgagtcatggtgcactgcgcttcatccgtcttgagcccctccgagctctgctagagaaagttgctgccactcttcagaccctcttcttagtggactgtgggattgggtactccaaactcagggtcatcctgcctgccctgagccgctgctccaacctcaccactttctgttttcacggcaatgacacgtccatggatgctctgaaggacctgctgcgccacacaggcaggctgagcaatttgagcctggaaacatatcctgcccctcgggagagtcttgacaacaggggtcgtgtcattttggagctcctcaccccacttcaggctgagctgatgcgtatactgagggaagtaagggagcccaaaaggatcttctttggtccggtgtcctgcccttgctgtggcacgtcgcccactgagcaactggagtccaatttttgcttgtggggaaggcctgcctagtggggtggaggtataaaaagctttttctccaggcacttggaaactaaaatctgggacatagatgtcttttatttttctttttccttattttacaattttacagcttttatttaaaaatttgaaacagggtttccctatgttgtccaggctggtctcaaactcttacgcttaagggagccccctgcttggcctcccaagattctgggattacaggcataagcagctgtgccgggtctataggtgtattataaagggaacagagaaacctctgtttcaggcatgtgctttctgtgagtggaaaacaaaaaacaaaaaatcccagcagggggcagcactggggaaaaagttgaatggagtcactgagactcagggatctgtgtcctagacagtcagaaatagaaagctgaagttctagagtgagggagttatctcagcaaggatggatacaaagaaacgtcggaagtagagggaacctaaatggaaactctctgctgtccttcatgattgattagcctgtttcagcaatttatacatcagaaatctttagttcctgatgaattaaaaaaagaggtactagttcatctgtgatttaggttcatctgcaggaaataaaggaatcaaaataaacttcatgttg

SEQ ID NO: 168620 - DNA, 2104 bp, Homo sapiens; identical to SEQ ID NO: 168619
  Payload ID: 13199
  Gene Symbol: PRAMEF18
  Gene Name: PRAME family member 18
  ENST ID: ENST00000632307
  CDS Start-End: 22-1467

SEQ ID NO: 168621 - DNA, 1233 bp, Homo sapiens
  Payload ID: 13200
  Gene Symbol: PRAMEF19
  Gene Name: PRAME family member 19
  Uniprot ID: Q5SWL8
  ENST ID: ENST00000376101
  CDS Start-End: 1-1233
atgaagacgcctgatctggagatcttacattatgtagtggatgggattgattgcctgcttgcccaaaaggttcgccccaggaggtggaaacttcaagtgctggaaatgcgggatgttgatgagaatttttggaccatatggtctggagccaggcccctgtcctgctccccagaggccatgagtaagagacagacagtggaggactgtccaaggacaggagagaagcagcccttgaaggtgttcatggatgtttgcctcaaggaaaaatccgtggatgaagatctgagcttcttctctgggtgggtgcagcacagaagacgttcagtacacctgtgctgtactaaggtggtaaattattcaatgaacattctaaatttcagaaacatattagaaacagtatacccagacagtatccaagtattggaaatttggaacatgtgctggccgtgtatggtagcagaggttagccgttacctgagccagatgaagaatcttcgaaaactcttcatctccgatggctgtggttacctgccaagctttgagagccaaggacagttagttgctgaattcagctctgtgttcctcaggctggagtacctccagatgctttatatgagaaggatccgcttcttcgaaggctacctggaccagctgatcaggtgcctcaagagcccgttggagacattggcattaacttatggctccctagatgaagaggacttgaaatgtctgccctggtacccaagtctcagtcaactgaagcagctgaatctgagtcatggtacactgcgcttcatccgtcttgagcccctccgagctctgctagagaaagttgctgccactcttcagaccctcttcttagtggactgtgggattggggactccaaactcagggtcatcctgcctgccctgagccgctgctccaacctcaccactttctgctttcacggcaatgacacgtccatggatggtctgaaggacctgctgcgccacacaggcaggctgagcaatttgagcctggaaacatatcctgcccctcgggagagtcttgacaacaggggtcgtgtcatttcggagctcctcaccccacttcaggctgagctgatgcgtatactgagggaagtaagggagcccaacaggatcttctttggtcccgtctcctgcccttgctgtggcatgtcacccactgagcaactggagttcaatttttgcttgcggggaaggcctgcctag

SEQ ID NO: 168622 - DNA, 1339 bp, Homo sapiens
  Payload ID: 13201
  Gene Symbol:
  Gene Name: PRAME family member 19 [Source:EntrezGene
  Acc:645414]
  ENST ID: ENST00000633764
  CDS Start-End: 1-702
gtaaaagaagagaaagtgcaccaaacctgtgcgtttcacagaggaagctctgtcctcacattagtgaacatgaatgatcctctctctgattccctgtctgtaaaaggttgttttgaactccaggaaaggtgcctcaggagcccgttggagacattggcattaacttatggcttcctagaagaagaggacttgaaatgcctgccccggtacccaagtctcagtcaactgaagcagctgaatctgagtcatggtgcactgcgcttcatccgtcttgagcccctccgagctctgctagagaaagttgctgccactcttcagaccctcttcttagtggactgtgggattgggtactccaaactcagggtcatcctgcctgccctgagccgctgctccaacctcaccactttctgttttcacggcaatgacacgtccatggatgctctgaaggacctgctgcgccacacaggcaggctgagcaatttgagcctggaaacatatcctgcccctcgggagagtcttgacaacaggggtcgtgtcattttggagctcctcaccccacttcaggctgagctgatgcgtatactgagggaagtaagggagcccaaaaggatcttctttggtccggtgtcctgcccttgctgtggcacttcgcccactgagcaactggagttcaatttttgcttgtggggaaggcctgcctagtggggtggaggtataaaaagctttttctccaggcacttggaaactaaaatctgggacatagatgtcttttatttttctttttccttattttacaattttacagcttttatttaaaaatttgagacagggtttccctatgttgtccaggctggtctcaaactcttacgcttaagggagccccctgcttggcctcccaagattctgggattacaggcataagcagctgtgccgggtctataggtgcattataaagggaacagagaaacctctgtttcaggcatgtgctttctgtgagtggaaaacaaaaaacaaaaaatcccagcagggggcagcactggggaaaaagttgaatggagtcactgagactcagggatctgtgtcctagacagtcagaaatagaaagctgaagttctagagtgagggagttatctcagcaaggatggatacaaagaaacgtcggaagtagagggaacctaaatggaaactctctgctgtccttcatgattgattagcctgtttcagcaatttatacatcagaaatctttagttcctgatgaattaaaaaaagaggtactagttcatctgtgatttagtttcatctgcaggaaataaaggaatcaaaataaacttcatgttg

SEQ ID NO: 168623 - DNA, 2125 bp, Homo sapiens
  Payload ID: 13201
  Gene Symbol:
  Gene Name: PRAME family member 19 [Source:EntrezGene
  Acc:645414]
  ENST ID: ENST00000631823
  CDS Start-End: 49-1488
ctgataagtttgtcttctctggatttgttttcttgcagatttatcaggatgagcttccaggccccacgcagactcctggagctggcagggcagagcctgctgagggaccaggccttggccatctccgtcctggatgagctgcccagggagctcttccccccactgttcgtggaggccttcactagcagacgctgcgaggttctgaaggtgatggtgcaggcctggcccttcccctgcctccctctggggtccctgatgaagacgcctgatctggagatcttacattatgtagtggatgggattgattgcctgcttgcccaaaaggttcgccccaggaggtggaaacttcaagtgctggaaatgcgggatgttgatgagaatttttggaccatatggtctggagccaggcccctgtcctgctccccagaggccatgagtaagagacagacagtggaggactgtccaaggacaggagagaagcagcccttgaaggtgttcatggatgtttgcctcaaggaaaaattcatggatgaagatctgagcttcttctctgggtgggtgcagcacagaagaggttcagtacacctgtgctgtactaaggtggtgaattattcaatgagcattctaaatttcagaaacatattggaaacagtatacccagacagtatccaagtgttggaaatttggaacatgtgctggctgtgtatgatagtagagtttagccgttacctgagccagatgaggaatcttcgcaaactcttcatctccgatggctgtcgttacctgctaagctctgacagccaagaacagttagttgctgaattcagctctgtgctcctcaggctggagaacctccagatgctttatgtaagaagggtctgcttcttcagaggccacctggaccagctgatcaggtgcctcaggagcccgttggagacattggcattaacttatggcttcctagaagaagaggacttgaaatgcctgccccggtacccaagtctcagtcaactgaagcagctgaatctgagtcatggtgcactgcgcttcatccgtcttgagcccctccgagctctgctagagaaagttgctgccactcttcagaccctcttcttagtggactgtgggattgggtactccaaactcagggtcatcctgcctgccctgagccgctgctccaacctcaccactttctgttttcacggcaatgacacgtccatggatgctctgaaggacctgctgcgccacacaggcaggctgagcaatttgagcctggaaacatatcctgcccctcgggagagtcttgacaacaggggtcgtgtcattttggagctcctcaccccacttcaggctgagctgatgcgtatactgagggaagtaagggagcccaaaaggatcttctttggtccggtgtcctgcccttgctgtggcacttcgcccactgagcaactggagttcaatttttgcttgtggggaaggcctgcctagtggggtggaggtataaaaagctttttctccaggcacttggaaactaaaatctgggacatagatgtcttttatttttctttttccttattttacaattttacagcttttatttaaaaatttgagacagggtttccctatgttgtccaggctggtctcaaactcttacgcttaagggagccccctgcttggcctcccaagattctgggattacaggcataagcagctgtgccgggtctataggtgcattataaagggaacagagaaacctctgtttcaggcatgtgctttctgtgagtggaaaacaaaaaacaaaaaatcccagcagggggcagcactggggaaaaagttgaatggagtcactgagactcagggatctgtgtcctagacagtcagaaatagaaagctgaagttctagagtgagggagttatctcagcaaggatggatacaaagaaacgtcggaagtagagggaacctaaatggaaactctctgctgtccttcatgattgattagcctgtttcagcaatttatacatcagaaatctttagttcctgatgaattaaaaaaagaggtactagttcatctgtgatttagtttcatctgcaggaaataaaggaatcaaaataaacttcatgttg

SEQ ID NO: 168624 - DNA, 1642 bp, Homo sapiens
  Payload ID: 13202
  Gene Symbol: PRAMEF2
  Gene Name: PRAME family member 2
  Uniprot ID: O60811
  ENST ID: ENST00000240189
  CDS Start-End: 88-1512
cctgaagctactggttggttccctgagaggtcccagaactctgcaaagtgagtccagcgctgagatttttcttgcagatccatcaggatgagcatccaggccccaccgagactactggagctggcggggcagagcctgctgagagaccaggccttgtccatctctgccatggaggagctgcccagggtgctctatctcccactcttcagggaggccttcagcaggagacacttccagactctgacggtgatggtgcaggcctggcctttcacctgcctccctctggtatcgctgatgaagacgcttcatctggagccattgaaagcattgctggaagggcttcatatgctgcttacacagaaggatcgccccaggaggtggaaacttcaagtgctggatttgcgggatgttgatgagaatttctgggccagatggcctggagcctgggccctgtcctgcttcccagaggccatgagtaagaggcagacagcagaggactgtccaaggacgggagagcaccagcccttaaaggtgttcatagacatctgcctcaaggaaataccccaggatgaatgcctgagatacctcttccagtgggtttaccaaaggagaggtttagtacacctgtgctgtagtaagctggtcaattatctaacgccaattaaatatctcagaaagtcattgaaaataatatacattaatagtattggggagctggaaattcacaacacgtgctggccacatctgataagaaagctttattgttacctgaaggagatgaagactctttgcaaactcgttttctccaggtgccatcattacacgtcagataatgaactcgagggatggttagtcaccagattcacctctgtgttcctcaggctggaacacctccagttgcttaaaataaaattgatcaccttcttcagtgggcacctggaacagctgatcaggtgcctccagaaccccttggagaacttggaattaacttgtggcaacctattagaagaggacttgaagtgtctctcccagttcccaagcctcggttacctaaagcatctgaatctcagctacgtgctgctgttccgcatcagtcttgaacccctaggagctctgctagagaaaattgctgcctctctcgagaccctcgtgttagagggctgtcagatccactactcccaactcagtgccatcctgcctggcctgagctgctgctcccagctcaccaccttctactttggcagcaattgcatgtctattgacgccctgaaggacctgctgcgccacaccagtgggctgagcaagttaagcctggagacgtatcctgcccctgaggagagtttgaattccttggttcgtgtcaattgggagatcttcaccccacttcgggctgagctgatgtgtacactgagggaattcaggcagcccaagaggatcttcattggccccaccccctgcccttcctgtggctcatcaccgtctgaggaactggagctccatctttgctgctagggaaggcgtgcccagtggggtagagaaatccaaagttctcttccaggcacttggacactaaaatctactatgtaggtgcaaactatttttctcttttcttatttatttcattttttaataattccaaaat

SEQ ID NO: 168625 - DNA, 1642 bp, Homo sapiens; identical to SEQ ID NO: 168624
  Payload ID: 13202
  Gene Symbol: PRAMEF2
  Gene Name: PRAME family member 2
  Uniprot ID: O60811
  ENST ID: ENST00000632257
  CDS Start-End: 88-1512

SEQ ID NO: 168626 - DNA, 1597 bp, Homo sapiens
  Payload ID: 13203
  Gene Symbol: PRAMEF20
  Gene Name: PRAME family member 20
  Uniprot ID: Q5VT98
  ENST ID: ENST00000316412
  CDS Start-End: 100-1527
acccaaagtcttcaagcctggagtttctgcttggtttttcctgaggtctgagcaccctgcaaactgagtccagatctggtaagtccctaatctctgaagatgagcatccggactccacccagactcctggagctggcggggcggagcctgctgagggacgaggccttggccatctccaccctggaggagctgcccacggaactttttcccccattgttcatggaggccttcagcaggagacactgtgaggccctgaagctgatggtgcaggcctggcctttcctccgccttcctctggggtctctgatgaaaaggccttgcccagagaccttccaagctgtgctcgatgggcttgatgcactgcttacccacagggttcgtctcaggaggtggaaacttcaagtgctggatttacaggatgtcagtgagaacttctggatggtttggtctgaagccatggcccgtaggtgcttaccaaatgccatgatgaacagaaaaccactgcaggactgtccaaggatgagaggacagcagcccttgactgtgttcatagacctttgcctcaagaacaggactctggatgaatacttcacctgcctctttctatgggtcaagcagagggaaggtttagtacacctgtgctgtaagaagctgaaaatgttgggaatgctcttccacaatatcagaaacatcctgaaaacagtcaacctagactgtatccaggaggtggaagtgaattgcaattggacactgcccgtcctggcagagtttaccccatacctcggccagatgaggaatcttcggaagctcgttctctctgacatagattctcgctacatttccccagagcagaagaaggagtttgttacccagttcaccactcagttcctcaagctgcgctgcctccaaaagctttatatgaactctgtttctttcctcgaaggccacctggaccagatgctcagctgtctaaagacctcgttaaacatcctcgcaataactaactgtgtgcttttggaatcagacttgaagcatctgtccaagtacccgagcattggtcaactaaagaccctggacctgagtggcaccagactggccaatttcagccttgtgccgctccaagttctcctagaaaaagttgcagccacccttgagtacctggacttagatgactgtggcatcgtagactcccaagtcaacgccatcctgcctgccctgagccgctgctttgagctcaccaccttcagcttccgtggaaatcccatctccacggccaccctggagaacctgctgtgccacacaatcagactcaacaacttatgcctggagctgtatcctgccccgcgggagagttatgatgttcgtggtatcgtctgccggagcagatttgcccaacttggggctgagctgatggggagagtgagggccttaagggagcccgagaggatcttgttctgtaccgactactgccctcagtgtggcaacaggtcactttacgacctggaggtagatcggtgttgctgttgaatgcctgcctatttgggtggatatatcaaactcttttttctgaacacttgaaaactaaaacctaggtctt

SEQ ID NO: 168627 - DNA, 1502 bp, Homo sapiens
  Payload ID: 13203
  Gene Symbol: PRAMEF20
  Gene Name: PRAME family member 20
  Uniprot ID: Q5VT98
  ENST ID: ENST00000602960
  CDS Start-End: 5-1432
gaagatgagcatccggactccacccagactcctggagctggcggggcggagcctgctgagggacgaggccttggccatctccaccctggaggagctgcccacggaactttttcccccattgttcatggaggccttcagcaggagacactgtgaggccctgaagctgatggtgcaggcctggcctttcctccgccttcctctggggtctctgatgaaaaggccttgcccagagaccttccaagctgtgctcgatgggcttgatgcactgcttacccacagggttcgtctcaggaggtggaaacttcaagtgctggatttacaggatgtcagtgagaacttctggatggtttggtctgaagccatggcccgtaggtgcttaccaaatgccatgatgaacagaaaaccactgcaggactgtccaaggatgagaggacagcagcccttgactgtgttcatagacctttgcctcaagaacaggactctggatgaatacttcacctgcctctttctatgggtcaagcagagggaaggtttagtacacctgtgctgtaagaagctgaaaatgttgggaatgctcttccacaatatcagaaacatcctgaaaacagtcaacctagactgtatccaggaggtggaagtgaattgcaattggacactgcccgtcctggcagagtttaccccatacctcggccagatgaggaatcttcggaagctcgttctctctgacatagattctcgctacatttccccagagcagaagaaggagtttgttacccagttcaccactcagttcctcaagctgcgctgcctccaaaagctttatatgaactctgtttctttcctcgaaggccacctggaccagatgctcagctgtctaaagacctcgttaaacatcctcgcaataactaactgtgtgcttttggaatcagacttgaagcatctgtccaagtacccgagcattggtcaactaaagaccctggacctgagtggcaccagactggccaatttcagccttgtgccgctccaagttctcctagaaaaagttgcagccacccttgagtacctggacttagatgactgtggcatcgtagactcccaagtcaacgccatcctgcctgccctgagccgctgctttgagctcaccaccttcagcttccgtggaaatcccatctccacggccaccctggagaacctgctgtgccacacaatcagactcaacaacttatgcctggagctgtatcctgccccgcgggagagttatgatgttcgtggtatcgtctgccggagcagatttgcccaacttggggctgagctgatggggagagtgagggccttaagggagcccgagaggatcttgttctgtaccgactactgccctcagtgtggcaacaggtcactttacgacctggaggtagatcggtgttgctgttgaatgcctgcctatttgggtggatatatcaaactcttttttctgaacacttgaaaactaaaacctaggtctt

SEQ ID NO: 168628 - DNA, 1840 bp, Homo sapiens
  Payload ID: 13204
  Gene Symbol: PRAMEF25
  Gene Name: PRAME family member 25
  ENST ID: ENST00000632549
  CDS Start-End: 72-1508
tacctgcctggttcttcctgaggtctgagcaccttctagactacatccagatctgttttccctgcagattcatgaagatgagcatccggactccacccagactcctggagctggcggggcggagcgtgctgagggaccaagccttggccatgtccaccctggaggagctgcccacagaacttttccccccactgttcatggaggccttcagcaggagacgctgtgaggccctgaagctgatggtacaggcctggcccttccgccgcctccctctgaggcctctgataaagatgccttgtctggagaccttccaagctgtgctcaatgggcttgatgcactgcttacccacggggttcgtcccaggaggtggaaacttcaagtgctggatttacaggatgtctgtgagaacttctggatggtttggtctgaagctatggcccgtgggtgcttcctcaatgccaagaggaacaaaaaaccagtgcaggactgtccaaggatgagaggacggcagcccttgactgtgttcgtagaactttggctcaagaacaggactctggatgaacacctcacctgcctccttctatgggtcaagcagaggaaagatttactacacctgtgctgtaagaagctgaaaattttgggaatgcccttccgcaatatcagaagcatcctgaaaatggtgaacctagactgtatccaggaggtggaagtgaattgcaagtgggtactgcccatcctgacacagtttaccccatacctgggccacatgaggaatcttcagaagctcgttctctcccacatggatgtctctcgctacgtttccccagagcagaagaaggagattgttacccagttcaccactcagttcctcaagctgcactgcctccaaaagctttatatgaactctgtttctttcctcgaaggccacctggaccagctgctcagctgtctgaagacctcgttaaaggtcctcacaataactaactgtgtgcttttggaatcagacttgaagcatctatcccagtgcccgagtatcagtcaactaaagaccctggacctgagtggcatcagactgaccaattacagtcttgtgcctctccaaattctcctagaaaaagttgcagccacccttgagtacctggatttagatgactgtggcatcatagactcccaagtcaacgccatcctgcctgccctgagccgctgctttgagctcaacaccttcagcttctgtggaaatcccatctccatggccaccctggagaacctgctgagccacacaatcatactcaaaaacttatgcctggagctgtatcctgccccacgggagagttatggtgctgatggtactctctgctggagcagatttgctcaaattagggctgagctgatgaacagagtgagggacttaaggcaccccaagaggatctttttctgtattgataactgccctgactgtggcaacaggtcattttatgacctggaggcagatcaatactgctgttgaatgcctgcctatttggatgggtatgtcaaacgctttcttctggacacttggaaactaaaacctaggtcttaggtacatcctaaagggagcacagaacccatcatttcacacataggctctgaaagtgggaaaggaaagctgatcaagcaggggcaggacttgggggaaatgttgccatggattcgatgggactttggggacctgtatcctgtagagtcgaaaatgggaatctgaatgtctagagtggagttcaggcttgagaatacatgagggagttactcttgcatggatggttgtaaagaaacaatcagaaataaaggaaaactgagcag

SEQ ID NO: 168629 - DNA, 1863 bp, Homo sapiens
  Payload ID: 13204
  Gene Symbol: PRAMEF25
  Gene Name: PRAME family member 25
  Uniprot ID: A6NGN4
  ENST ID: ENST00000633532
  CDS Start-End: 95-1531
acccaaagtcttcaagcctggagttcctgcctggttcttcctgaggtctgagcaccttctaaactacatccagatctgttttccctgcagattcatgaagatgagcatccggactccacccagactcctggagctggcggggcggagcgtgctgagggaccaagccttggccatgtccaccctggaggagctgcccacagaacttttccccccactgttcatggaggccttcagcaggagacgctgtgaggccctgaagctgatggtacaggcctggcccttccgccgcctccctctgaggcctctgataaagatgccttgtctggagaccttccaagctgtgctcaatgggcttgatgcactgcttacccacggggttcgtcccaggaggtggaaacttcaagtgctggatttacaggatgtctgtgagaacttctggatggtttggtctgaagctatggcccgtgggtgcttcctcaatgccaagaggaacaaaaaaccagtgcaggactgtccaaggatgagaggacggcagcccttgactgtgttcgtagaactttggctcaagaacaggactctggatgaacacctcacctgcctccttctatgggtcaagcagaggaaagatttactacacctgtgctgtaagaagctgaaaattttgggaatgcccttccgcaatatcagaagcatcctgaaaatggtgaacctagactgtatccaggaggtggaagtgaattgcaagtgggtactgcccatcctgacacagtttaccccatacctgggccacatgaggaatcttcagaagctcgttctctcccacatggatgtctctcgctacgtttccccagagcagaagaaggagattgttacccagttcaccactcagttcctcaagctgcactgcctccaaaagctttatatgaactctgtttctttcctcgaaggccacctggaccagctgctcagctgtctgaagacctcgttaaaggtcctcacaataactaactgtgtgcttttggaatcagacttgaagcatctatcccagtgcccgagtatcagtcaactaaagaccctggacctgagtggcatcagactgaccaattacagtcttgtgcctctccaaattctcctagaaaaagttgcagccacccttgagtacctggatttagatgactgtggcatcatagactcccaagtcaacgccatcctgcctgccctgagccgctgctttgagctcaacaccttcagcttctgtggaaatcccatctccatggccaccctggagaacctgctgagccacacaatcatactcaaaaacttatgcctggagctgtatcctgccccacgggagagttatggtgctgatggtactctctgctggagcagatttactcagattagggctgagctgatgaagagagttagggacttaaggcaccccaagaggatcttgttcggtactgactactgccctgactgtggcaacaggtcattttatgacctggaggcagatcaatactgctgttgaatgcctgcctatttggatgggtatgtcaaacgctttcttctggacacttggaaactaaaacctaggtcttaggtacatcctaaagggagcacagaacccatcgtttcacacatgggctctgaaagtgggaaaggaatgctgatcaagcaggggcaggacttgggggaaatgttgccatggattcgatgggactttgggaacgtgtatcctgtagagtcgaaaatgggaatctgaatgtctagagtggaattcaggcttgagaatacatgagggagttactcttgcatggatggttgtaaagaaacaatcagaaataaaggaaaactgagcag

SEQ ID NO: 168630 - DNA, 1840 bp, Homo sapiens
  Payload ID: 13205
  Gene Symbol:
  Gene Name: PRAME family member 25 [Source:EntrezGene
  Acc:441873]
  Uniprot ID: A6NGN4
  ENST ID: ENST00000619661
  CDS Start-End: 72-1508
ttcctgcctggttcttcctgaggtctgagcaccttctaaactacatccagatctgttttccctgcagattcatgaagatgagcatccggactccacccagactcctggagctggcggggcggagcgtgctgagggaccaagccttggccatgtccaccctggaggagctgcccacagaacttttccccccactgttcatggaggccttcagcaggagacgctgtgaggccctgaagctgatggtacaggcctggcccttccgccgcctccctctgaggcctctgataaagatgccttgtctggagaccttccaagctgtgctcaatgggcttgatgcactgcttacccacggggttcgtcccaggaggtggaaacttcaagtgctggatttacaggatgtctgtgagaacttctggatggtttggtctgaagctatggcccgtgggtgcttcctcaatgccaagaggaacaaaaaaccagtgcaggactgtccaaggatgagaggacggcagcccttgactgtgttcgtagaactttggctcaagaacaggactctggatgaacacctcacctgcctccttctatgggtcaagcagaggaaagatttactacacctgtgctgtaagaagctgaaaattttgggaatgcccttccgcaatatcagaagcatcctgaaaatggtgaacctagactgtatccaggaggtggaagtgaattgcaagtgggtactgcccatcctgacacagtttaccccatacctgggccacatgaggaatcttcagaagctcgttctctcccacatggatgtctctcgctacgtttccccagagcagaagaaggagattgttacccagttcaccactcagttcctcaagctgcactgcctccaaaagctttatatgaactctgtttctttcctcgaaggccacctggaccagctgctcagctgtctgaagacctcgttaaaggtcctcacaataactaactgtgtgcttttggaatcagacttgaagcatctatcccagtgcccgagtatcagtcaactaaagaccctggacctgagtggcatcagactgaccaattacagtcttgtgcctctccaaattctcctagaaaaagttgcagccacccttgagtacctggatttagatgactgtggcatcatagactcccaagtcaacgccatcctgcctgccctgagccgctgctttgagctcaacaccttcagcttctgtggaaatcccatctccatggccaccctggagaacctgctgagccacacaatcatactcaaaaacttatgcctggagctgtatcctgccccacgggagagttatggtgctgatggtactctctgctggagcagatttactcagattagggctgagctgatgaagagagttagggacttaaggcaccccaagaggatcttgttcggtactgactactgccctgactgtggcaacaggtcattttatgacctggaggcagatcaatactgctgttgaatgcctgcctatttggatgggtatgtcaaacgctttcttctggacacttggaaactaaaacctaggtcttaggtacatcctaaagggagcacagaacccatcgtttcacacatgggctctgaaagtgggaaaggaatgctgatcaagcaggggcaggacttgggggaaatgttgccatggattcgatgggactttgggaacgtgtatcctgtagagtcgaaaatgggaatctgaatgtctagagtggaattcaggcttgagaatacatgagggagttactcttgcatggatggttgtaaagaaacaatcagaaataaaggaaaactgagcag

SEQ ID NO: 168631 - DNA, 1600 bp, Homo sapiens
  Payload ID: 13205
  Gene Symbol:
  Gene Name: PRAME family member 25 [Source:EntrezGene
  Acc:441873]
  ENST ID: ENST00000618988
  CDS Start-End: 100-1530
acccaaagtcttcaagcctggagttcctgcttggttcttcctgaggtctgaacaccctgcaaactgagcccagatctggtaagtcactaatttctgaagatgagcatccggactccacccagactcctggagctggcggggcggagcgtgctgagggaccaagccttggccatgtccaccctggaggagctgcccacagaacttttccccccactgttcatggaggccttcagcaggagacgctgtgaggccctgaagctgatggtacaggcctggcccttccgccgcctccctctgaggcctctgataaagatgccttgtctggagaccttccaagctgtgctcaatgggcttgatgcactgcttacccacggggttcgtcccaggaggtggaaacttcaagtgctggatttacaggatgtctgtgagaacttctggatggtttggtctgaagctatggcccgtgggtgcttcctcaatgccaagaggaacaaaaaaccagtgcaggactgtccaaggatgagaggacggcagcccttgactgtgttcgtagaactttggctcaagaacaggactctggatgaacacctcacctgcctccttctatgggtcaagcagaggaaagatttactacacctgtgctgtaagaagctgaaaattttgggaatgcccttccgcaatatcagaagcatcctgaaaatggtgaacctagactgtatccaggaggtggaagtgaattgcaagtgggtactgcccatcctgacacagtttaccccatacctgggccacatgaggaatcttcagaagctcgttctctcccacatggatgtctctcgctacgtttccccagagcagaagaaggagattgttacccagttcaccactcagttcctcaagctgcactgcctccaaaagctttatatgaactctgtttctttcctcgaaggccacctggaccagctgctcagctgtctgaagacctcgttaaaggtcctcacaataactaactgtgtgcttttggaatcagacttgaagcatctatcccagtgcccgagtatcagtcaactaaagaccctggacctgagtggcatcagactgaccaattacagtcttgtgcctctccaaattctcctagaaaaagttgcagccacccttgagtacctggatttagatgactgtggcatcatagactcccaagtcaacgccatcctgcctgccctgagccgctgctttgagctcaacaccttcagcttctgtggaaatcccatctccatggccaccctggagaacctgctgagccacacaatcatactcaaaaacttatgcctggagctgtatcctgccccacgggagagttatggtgctgatggtactctctgctggagcagatttactcagattagggctgagctgatgaagagagttagggacttaaggcaccccaagaggatcttgttcggtactgactactgccctgactgtggcaacaggtcattttatgacctggaggcagatcaatactgctgttgaatgcctgcctatttggatgggtatgtcaaacgctttcttctggacacttggaaactaaaacctaggtctt

SEQ ID NO: 168632 - DNA, 1840 bp, Homo sapiens
  Payload ID: 13205
  Gene Symbol:
  Gene Name: PRAME family member 25 [Source:EntrezGene
  Acc:441873]
  ENST ID: ENST00000615936
  CDS Start-End: 198-1508
tacctgcctggttcttcctgaggtctgagcaccttctagactacatccagatctgttttccctgcagattcatgaagatgagcatccggactccacccagactcctggagctggcggggcggagcgtgctgagggaccaagccttggccatgtccaccctggaggagctgcccacagaacttttccccccactgttcatggaggccttcagcaggagacgctgtgaggccctgaagctgatggtacaggcctggcccttccgccgcctccctctgaggcctctgataaagatgccttgtctggagaccttccaagctgtgctcaatgggcttgatgcactgcttacccacggggttcgtcccaggaggtggaaacttcaagtgctggatttacaggatgtctgtgagaacttctggatggtttggtctgaagctatggcccgtgggtgcttcctcaatgccaagaggaacaaaaaaccagtgcaggactgtccaaggatgagaggacggcagcccttgactgtgttcgtagaactttggctcaagaacaggactctggatgaacacctcacctgcctccttctatgggtcaagcagaggaaagatttactacacctgtgctgtaagaagctgaaaattttgggaatgcccttccgcaatatcagaagcatcctgaaaatggtgaacctagactgtatccaggaggtggaagtgaattgcaagtgggtactgcccatcctgacacagtttaccccatacctgggccacatgaggaatcttcagaagctcgttctctcccacatggatgtctctcgctacgtttccccagagcagaagaaggagattgttacccagttcaccactcagttcctcaagctgcactgcctccaaaagctttatatgaactctgtttctttcctcgaaggccacctggaccagctgctcagctgtctgaagacctcgttaaaggtcctcacaataactaactgtgtgcttttggaatcagacttgaagcatctatcccagtgcccgagtatcagtcaactaaagaccctggacctgagtggcatcagactgaccaattacagtcttgtgcctctccaaattctcctagaaaaagttgcagccacccttgagtacctggatttagatgactgtggcatcatagactcccaagtcaacgccatcctgcctgccctgagccgctgctttgagctcaacaccttcagcttctgtggaaatcccatctccatggccaccctggagaacctgctgagccacacaatcatactcaaaaacttatgcctggagctgtatcctgccccacgggagagttatggtgctgatggtactctctgctggagcagatttactcagattagggctgagctgatgaagagagttagggacttaaggcaccccaagaggatcttgttcggtactgactactgccctgactgtggcaacaggtcattttatgacctggaggcagatcaatactgctgttgaatgcctgcctatttggatgggtatgtcaaacgctttcttctggacacttggaaactaaaacctaggtcttaggtacatcctaaagggagcacagaacccatcgtttcacacatgggctctgaaagtgggaaaggaatgctgatcaagcaggggcaggacttgggggaaatgttgccatggattcgatgggactttgggaacgtgtatcctgtagagtcgaaaatgggaatctgaatgtctagagtggaattcaggcttgagaatacatgagagagttactcttgcatggatggttgtaaagaaacaatcagaaataaaggaaaactgagcag

SEQ ID NO: 168633 - DNA, 1600 bp, Homo sapiens; identical to SEQ ID NO: 168631
  Payload ID: 13205
  Gene Symbol:
  Gene Name: PRAME family member 25 [Source:EntrezGene
  Acc:441873]
  ENST ID: ENST00000615797
  CDS Start-End: 100-1530

SEQ ID NO: 168634 - DNA, 1863 bp, Homo sapiens
  Payload ID: 13205
  Gene Symbol:
  Gene Name: PRAME family member 25 [Source:EntrezGene
  Acc:441873]
  Uniprot ID: A6NGN4
  ENST ID: ENST00000614839
  CDS Start-End: 95-1531
acccaaagtcttcaagcctggagtacctgcctggttcttcctgaggtctgagcaccttctagactacatccagatctgttttccctgcagattcatgaagatgagcatccggactccacccagactcctggagctggcggggcggagcgtgctgagggaccaagccttggccatgtccaccctggaggagctgcccacagaacttttccccccactgttcatggaggccttcagcaggagacgctgtgaggccctgaagctgatggtacaggcctggcccttccgccgcctccctctgaggcctctgataaagatgccttgtctggagaccttccaagctgtgctcaatgggcttgatgcactgcttacccacggggttcgtcccaggaggtggaaacttcaagtgctggatttacaggatgtctgtgagaacttctggatggtttggtctgaagctatggcccgtgggtgcttcctcaatgccaagaggaacaaaaaaccagtgcaggactgtccaaggatgagaggacggcagcccttgactgtgttcgtagaactttggctcaagaacaggactctggatgaacacctcacctgcctccttctatgggtcaagcagaggaaagatttactacacctgtgctgtaagaagctgaaaattttgggaatgcccttccgcaatatcagaagcatcctgaaaatggtgaacctagactgtatccaggaggtggaagtgaattgcaagtgggtactgcccatcctgacacagtttaccccatacctgggccacatgaggaatcttcagaagctcgttctctcccacatggatgtctctcgctacgtttccccagagcagaagaaggagattgttacccagttcaccactcagttcctcaagctgcactgcctccaaaagctttatatgaactctgtttctttcctcgaaggccacctggaccagctgctcagctgtctgaagacctcgttaaaggtcctcacaataactaactgtgtgcttttggaatcagacttgaagcatctatcccagtgcccgagtatcagtcaactaaagaccctggacctgagtggcatcagactgaccaattacagtcttgtgcctctccaaattctcctagaaaaagttgcagccacccttgagtacctggatttagatgactgtggcatcatagactcccaagtcaacgccatcctgcctgccctgagccgctgctttgagctcaacaccttcagcttctgtggaaatcccatctccatggccaccctggagaacctgctgagccacacaatcatactcaaaaacttatgcctggagctgtatcctgccccacgggagagttatggtgctgatggtactctctgctggagcagatttactcagattagggctgagctgatgaagagagttagggacttaaggcaccccaagaggatcttgttcggtactgactactgccctgactgtggcaacaggtcattttatgacctggaggcagatcaatactgctgttgaatgcctgcctatttggatgggtatgtcaaacgctttcttctggacacttggaaactaaaacctaggtcttaggtacatcctaaagggagcacagaacccatcgtttcacacatgggctctgaaagtgggaaaggaatgctgatcaagcaggggcaggacttgggggaaatgttgccatggattcgatgggactttgggaacgtgtatcctgtagagtcgaaaatgggaatctgaatgtctagagtggaattcaggcttgagaatacatgagggagttactcttgcatggatggttgtaaagaaacaatcagaaataaaggaaaactgagcag

SEQ ID NO: 168635 - DNA, 1863 bp, Homo sapiens
  Payload ID: 13205
  Gene Symbol:
  Gene Name: PRAME family member 25 [Source:EntrezGene
  Acc:441873]
  Uniprot ID: A6NGN4
  ENST ID: ENST00000613059
  CDS Start-End: 95-1531
acccaaagtcttcaagcctggagttcctgcctggttcttcctgaggtctgagcaccttctaaactacatccagatctgttttccctgcagattcatgaagatgagcatccggactccacccagactcctggagctggcggggcggagcgtgctgagggaccaagccttggccatgtccaccctggaggagctgcccacagaacttttccccccactgttcatggaggccttcagcaggagacgctgtgaggccctgaagctgatggtacaggcctggcccttccgccgcctccctctgaggcctctgataaagatgccttgtctggagaccttccaagctgtgctcaatgggcttgatgcactgcttacccacggggttcgtcccaggaggtggaaacttcaagtgctggatttacaggatgtctgtgagaacttctggatggtttggtctgaagctatggcccgtgggtgcttcctcaatgccaagaggaacaaaaaaccagtgcaggactgtccaaggatgagaggacggcagcccttgactgtgttcgtagaactttggctcaagaacaggactctggatgaacacctcacctgcctccttctatgggtcaagcagaggaaagatttactacacctgtgctgtaagaagctgaaaattttgggaatgcccttccgcaatatcagaagcatcctgaaaatggtgaacctagactgtatccaggaggtggaagtgaattgcaagtgggtactgcccatcctgacacagtttaccccatacctgggccacatgaggaatcttcagaagctcgttctctcccacatggatgtctctcgctacgtttccccagagcagaagaaggagattgttacccagttcaccactcagttcctcaagctgcactgcctccaaaagctttatatgaactctgtttctttcctcgaaggccacctggaccagctgctcagctgtctgaagacctcgttaaaggtcctcacaataactaactgtgtgcttttggaatcagacttgaagcatctatcccagtgcccgagtatcagtcaactaaagaccctggacctgagtggcatcagactgaccaattacagtcttgtgcctctccaaattctcctagaaaaagttgcagccacccttgagtacctggatttagatgactgtggcatcatagactcccaagtcaacgccatcctgcctgccctgagccgctgctttgagctcaacaccttcagcttctgtggaaatcccatctccatggccaccctggagaacctgctgagccacacaatcatactcaaaaacttatgcctggagctgtatcctgccccacgggagagttatggtgctgatggtactctctgctggagcagatttactcagattagggctgagctgatgaagagagttagggacttaaggcaccccaagaggatcttgttcggtactgactactgccctgactgtggcaacaggtcattttatgacctggaggcagatcaatactgctgttgaatgcctgcctatttggatgggtatgtcaaacgctttcttctggacacttggaaactaaaacctaggtcttaggtacatcctaaagggagcacagaacccatcgtttcacacatgggctctgaaagtgggaaaggaatgctgatcaagcaggggcaggacttgggggaaatgttgccatggattcgatgggactttgggaacgtgtatcctgtagagtcgaaaatgggaatctgaatgtctagagtggaattcaggcttgagaatacatgagagagttactcttgcatggatggttgtaaagaaacaatcagaaataaaggaaaactgagcag

SEQ ID NO: 168636 - DNA, 1600 bp, Homo sapiens; identical to SEQ ID NO: 168631
  Payload ID: 13205
  Gene Symbol:
  Gene Name: PRAME family member 25 [Source:EntrezGene
  Acc:441873]
  ENST ID: ENST00000634064
  CDS Start-End: 100-1530

SEQ ID NO: 168637 - DNA, 1863 bp, Homo sapiens; identical to SEQ ID NO: 168634
  Payload ID: 13205
  Gene Symbol:
  Gene Name: PRAME family member 25 [Source:EntrezGene
  Acc:441873]
  Uniprot ID: A6NGN4
  ENST ID: ENST00000632559
  CDS Start-End: 95-1531

SEQ ID NO: 168638 - DNA, 1840 bp, Homo sapiens; identical to SEQ ID NO: 168630
  Payload ID: 13205
  Gene Symbol:
  Gene Name: PRAME family member 25 [Source:EntrezGene
  Acc:441873]
  Uniprot ID: A6NGN4
  ENST ID: ENST00000634012
  CDS Start-End: 72-1508

SEQ ID NO: 168639 - DNA, 1840 bp, Homo sapiens; identical to SEQ ID NO: 168628
  Payload ID: 13206
  Gene Symbol: PRAMEF26
  Gene Name: PRAME family member 26
  ENST ID: ENST00000621259
  CDS Start-End: 72-1508

SEQ ID NO: 168640 - DNA, 1863 bp, Homo sapiens; identical to SEQ ID NO: 168629
  Payload ID: 13206
  Gene Symbol: PRAMEF26
  Gene Name: PRAME family member 26
  Uniprot ID: A6NGN4
  ENST ID: ENST00000624207
  CDS Start-End: 95-1531

SEQ ID NO: 168641 - DNA, 1863 bp, Homo sapiens
  Payload ID: 13207
  Gene Symbol: PRAMEF27
  Gene Name: PRAME family member 27
  ENST ID: ENST00000436041
  CDS Start-End: 95-1531
acccaaagtcttcaagcctggagttcctgcctggttcttcctgaggtctgagcaccttctaaactacatccagatctgttttccctgcagattcatgaagatgagcatccggactccacccagactcctggagcttgcggggcggagcctgctgagggaccaagccttggccatgtccaccctggaggagctgcccacagaacttttccccccactgttcatggaggccttcagcaggagatgctgtgaggccctgaagctgatggtgcaggcctggcccttccgccgcctccctctgaggcctctgataaagatgccttgtctggaggccttccaagctgtgctcgatgggcttgatgcactgcttacccaaggggtttgtcccaggaggtggaaacttcaagtgctggatttacaggatgtctgtgagaacttctggatggtttggtctgaagctatggcccgtgggtccttcctcaatgccaagaggaacaaaacaccagtgcaggactgtccaaggatgagaggacagcagcccttgactgtgttcgtagaactttggctcaagaacaggactctggatgaatacctcacctacctccttctatgggtcaagcagaggaaagatttactacacctgtgctgtaagaagctgaaaattttgggaatgcccttccgcaatatcagaagcatcctgaaaatggtgaacctagactgtatccaggaggtggaagtgaattgcaagtgggtactgcccatcctgacacagtttaccccatacctgggccacatgaggaatcttcagaagctcgttctctctcacatggatgtctctcgctacgtttccccagagcagaagaaggagattgttacccagttcaccactcagttcctcaagctgcactgcctccaaaagctttatatgaactctgtttctttcctcgaaggccacctggaccagctgctcagctgtctgaagacctcgttaaaggtcctcacaataactaactgtgtgcttttggaatcagacttgaagcatctatcccagtgcccgagtatcagtcaactaaagaccctggacctgagtggcatcagactgaccaattacagtcttgtgcctctccaaattctcctagaaaaagttgcagccacccttgagtacttggatttagatgactgtggcatcatagactcccaagtcaacgccatcctgcctgccctgagccgctgctttgagctcaatgccttcagcttctgtggaaatcccatctccatggccaccctggagaacctgctgagccacacaatcatactcaaaaacttatgcgtggaggtgtatcctgccccgcgggagagttatggtgctgatggtactctctgctggaacagatttgctcaaattagggctgagctgatgaacagagtgagggacttaaggcaccccaagaggatctttttctgtattgataactgccctgactgtggcaacaggtcattttatgacctggaggcagatcaatactgctgttgaatgcctgcctatttggatgggtatgtcaaacgctttcttctggacacttggaaactaaaacctaggtcttaggtacatcctaaagggagcacagaacccatcatttcacacataggctctgaaagtgggaaaggaaagctgatcaagcaggggcaggacttgggggaaatgttgccatggattcgatgggactttggggacctgtatcctgtagagtcgaaaatgggaatctgaatgtctagagtggagttcaggcttgagaatacatgagggagttactcttgcatggatggttgtaaagaaacaatcagaaataaaggaaaactgagcag

SEQ ID NO: 168642 - DNA, 1863 bp, Homo sapiens; identical to SEQ ID NO: 168641
  Payload ID: 13207
  Gene Symbol: PRAMEF27
  Gene Name: PRAME family member 27
  ENST ID: ENST00000631964
  CDS Start-End: 95-1531

SEQ ID NO: 168643 - DNA, 1604 bp, Homo sapiens
  Payload ID: 13208
  Gene Symbol: PRAMEF33P
  Gene Name: PRAME family member 33, pseudogene
  ENST ID: ENST00000621403
  CDS Start-End: 81-1505
ttcctgcttagttcttcctgaggtctgagcaccctccaaactgagtccagatctgagtttttcctcggagatttgtcagaatgagcctccaggccccatccagactgctggagctggcagggcagagcctgctgaggaaccagttcttgaccatcttcaccctggatgagctgcccagggaggtcttccctctgatgttcatggaggccttcagcatgagacgttttgaggccctgaagctgatggtgcaggcctggcccttcctccgcctccctctgggatccctgatgaagacacctcatctggagaccttgcaagctgtcctgaggggacttgatacactggtggcccagaaggttcgccccaggaggtggaaacttcaagtgctggatttgcaggatgttgatgagaatttctggaccatatggtctggagccagggtcctctcctgctccccagaggccatgagtaagaggcagacagtggaggactgtccaaggatgggagagcaccagcccttgaaggtgttcatagacctctgcctaaaggaaagtacactggatgaatgcctgagctacctttttgggtggatccactacagaagaggcctagtgcacctgtgttgtagtaaggtgcagaattactcaatgcccacttcaagtttcagaaatctattggaaaggatatacccagacagtatccaggagttggaagtctggaaaaagtgctctctcaataaaacgggaaagtttgccccttacctgagccagatgagcaatcttcgtgaactctttttagccttcggttatgagcgtgagttgtacgtgagcgtccagtggccgtgcattcctgacttggactctccattcctctgcctgtactacccccagatgctttatataaaaaagatcagtaatatcaaagagcacctggagcacctgctcaggtacctcaagaaccccttgggggcctttatattcagtgatgcttacctagctgatcgggacatggagtgtctgtctcagtacccaagcctcagtcagctaaaggagctgcgtctgattcatatcctaatgtggaccaccaatcttcagccccttggagctctgctagagaaagttgctgctactctcaagaccctcgtcttaaaggactgtcggatccaggacccccaactcagggtcctcctgcctgccctgagccactgttcccagctcaccaccttcaactttcatggaaatgagacctccatgaatgctctgaaagacctgctgcgtcacacacgtgggctgagcaagttaggcctggagttgtatcctgcccctctggagagtcttgactacaagggtcatgtcaattgggagatcctcaccccaattcgggctgagctgatgcgtacactcagggaagtcaggcagcccaagaggatcttctttggtcccgtcccttgccctacctgtggctcatggccatctgagaaagtggacttccatctttgctcctagggaaggcctggttcgtgggatggataagcttttttctggacacttgggaactaaaatattgtacatgggtgcattttttaaaattttattttatttttt

SEQ ID NO: 168644 - DNA, 1828 bp, Homo sapiens
  Payload ID: 13209
  Gene Symbol: PRAMEF4
  Gene Name: PRAME family member 4
  Uniprot ID: O60810
  ENST ID: ENST00000235349
  CDS Start-End: 72-1508
ttcctgcttggttcttcctgagatctgagaaccttctagactacatccagatctgttttccctgcagattcatgaagatgagcatctggactccacccagactcctggagcttgcagggcggagcctgctaagggaccaagctttggccatgtccaccctggaggagctgcccacagaacttttccccccactgttcatggaggccttcagcaggagacgctgtgaggccctgaagctgatggtgcagtcctggcccttccgccgcctccctctgaggcctctgataaagatgccttgtctggaggccttccaagctgtgctcgatgggctggatgcactgcttaacctaggggttcgtcccaggaggtggaaacttcaagtgctggatttacaggatgtctgtgagaacttctggatggtttggtctgaagctatggcccatgggtgcttcctcaatgccaagaggaacaaaaaaccagtggaggactgtccaaggatgaaaggacggcagcccttgactgtgttcgtagaactttggctcaagaacaggactctggatgaatacctcacctgcctccttctatgggtcaagcagaggaaagatttactacacctgtgctgtaagaagctgaaaattttgggaatgcccttccgcaatatcagaagcatcctgaaaatggtgaacctagactgtatccaggaggtggaagtgaattgcaagtgggtactgcccatcctgacacagtttaccccatacctgggccacatgaggaatcttcagaaactcattctctcccacatggatgtctctcgctacgtttccccagagcagaagaaggagattgttacccagttcaccactcagttcctcaagctgcgctgcctccaaaagctttatatgaactctgtttctttcctcgaaggccacctggaccagctgctcagctgtctgaagacctcgttaaagttcctcacaataactaactgtgtgcttttggaatcagacttgaagcatctatcccagtgcccgagtatcagtcaactaaagaccctggacctgagtggcatcagactgaccaattacagtcttgtgcctctccaaattctcctagaaaaagttgcagccacccttgagtacctggatttagatgactgtggcatcatagactcccaagtcaacgccatcttgcctgccctgagccgctgctttgagctcaacaccttcagcttctgtggaaatcccatctgcatggccaccctggagaacctgctgagccacacaatcatactcaaaaacttatgcgtggagctgtatcctgccccccgggagagttatggtgctgatggtactctctgctggagcagatttgctcaaattagggctgagctgatgaacagagtgagggacttaaggcaccccaagaggatcttgttctgtactgactactgccctgactgtggcaacaggtcattttatgacctggaggcagatcaatactgctgttgaatgcctgcctatttggatgggtatgtcaaacgctttcttctggacacttggaaactaaaacctaggtcttaggtacatcctaaagggagcacagaacccatcatttcacacataggctctgaaagtgggaaaggaaagctgatcaagcaggggccggacttgggggaaatgttgccatggattcgatgggactttggggacctgtgtcctgtagagtcgaaaatgggaatctgaatgtctagagtggaattcaggcttgagaatacatgagggagttactcttgcatggatggttgtaaagaaacaatcagaaataaagg

SEQ ID NO: 168645 - DNA, 1828 bp, Homo sapiens; identical to SEQ ID NO: 168644
  Payload ID: 13209
  Gene Symbol: PRAMEF4
  Gene Name: PRAME family member 4
  ENST ID: ENST00000632563
  CDS Start-End: 72-1508

SEQ ID NO: 168646 - DNA, 1699 bp, Homo sapiens
  Payload ID: 13210
  Gene Symbol: PRAMEF5
  Gene Name: PRAME family member 5
  ENST ID: ENST00000618079
  CDS Start-End: 81-1517
agcctggagttcctgcctggttcttcctgaggtctgagcaccttctaaactacatccagatctgttttccctgcagattcatgaagatgagcatccggactccacccagactcctggagcttgcggggcggagcctgctgagggaccaagccttggccatgtccaccctggaggagctgcccacagaacttttccccccactgttcatggaggccttcagcaggagatgctgtgaggccctgaagctgatggtgcaggcctggcccttccgccgcctccctctgaggcctctgataaagatgccttgtctggaggccttccaagctgtgctcgatgggcttgatgcactgcttacccaaggggtttgtcccaggaggtggaaacttcaagtgctggatttacaggatgtctgtgagaacttctggatggtttggtctgaagctatggcccatgggtgcttcctcaatgccaagaggaacaaaaaaccagtgcaggactgtccaaggatgagaggacagcagcccttgactgtgttcgtagaactttggctcaagaacaggactctggatgaatacctcacctgcctccttctatgggtcaagcagaggaaagatttactacacctgtgctgtaagaagctgaaaattttgggaatgcccttccgcaatatcagaagcatcctgaaaatggtgaacctagactgtatccaggaggtggaagtgaattgcaagtgggtactgcccatcctgacacagtttaccccatacctgggccacatgaggaatcttcagaagctcgttctctcccacatggatgtctctcgctacgtttccccagagcagaagaaggagattgttacccagttcaccactcagttcctcaagctgtgctgcctccaaaagctttctatgaactctgtttctttcctcgaaggccacctggaccagctgctcagctgtctgaagacctcgttaaaggtcctcacaataactaactgtgtgcttttggaatcagacttgaagcatctatcccagtgcccgagtatcagtcaactaaagaccctggacctgagtggcatcagactgaccaattacagtcttgtgcctctccaaattctcctagaaaaagttgcagccacccttgagtacctggatttagatgactgtggcatcatagactcccaagtcaacgccatcctgcctgccctgagccgctgctttgagctcaacaccttcagcttctgtggaaatcccatctccatggccaccctggagaacctgctgagccacacaatcatactcaaaaacttatgcgtggagctgtatcctgccccccgggagagttatgatgctgatggtactctctgctggagcagatttcctcaaattagggctgagctgatgaagagagtgagggacttaaggcaccccaagaggatcttgttctgtactgactgctgccctgactgtggcaacaggtcattttatgacctggaggcagatcaatgctgctgttgaatgcctgcctatttgggtggatatgtcaaacgctttcttctggacacttggaaactaaaacctaggtcttaggtacatcctatagggagcacagaacccatcatttcacacatgggctctgaaagtgggaaaggaaaggtgatcaagcaggggcaggacttgggggaagtgttgccatggat

SEQ ID NO: 168647 - DNA, 1720 bp, Homo sapiens
  Payload ID: 13210
  Gene Symbol: PRAMEF5
  Gene Name: PRAME family member 5
  Uniprot ID: Q5TYX0
  ENST ID: ENST00000622421
  CDS Start-End: 87-1517
agcctggagttcctgcttggttcttcctgaggactgagcaccttctagactacatccagatctgttttccctgcagattcgtgaagatgagcatccggactccacccagactcctggagcttgcagggcggagcctgctgagggaccaagccttggccatgtccaccctggaggagctgcccacagaacttttccccccactgttcatggaggccttcagcaggagacgctgtgaggccctgaagctgatggtgcaggcctggcccttccgccgcctccctctgaggcctctgataaagatgccttgtctggaggccttccaagctgtgctcgatgggctggatgcactgcttacccaaggggttcatcccaggaggtggaaacttcaagtgctggatttacaggatgtctgtgagaacttctggatggtttggtctgaagctatggcccatgggtgcttcctcaatgccaagaggaacaaaaaaccagtgcaggactgtccaaggatgagaggacagcagcccttgactgtgttcgtagaactttggctcaagaacaggactctggatgaatacctcacctgcctccttctatgggtcaagcagaggaaagatttactacacctgtgctgtaagaagctgaaaattttgggaatgcccttccgcaatatcagaagcatcctgaaaatggtgaacctagactgtatccaggaggtggaagtgaattgcaagtgggtactgcccatcctgacacagtttaccccatacctgggccacatgaggaatcttcagaagctcgttctctcccacatggatgtctctcgctacgtttccccagagcagaagaaggagattgttacccagttcaccactcagttcctcaagctgtgctgcctccaaaagctttctatgaactctgtttctttcctcgaaggccacctggaccagctgctcagctgtctgaagacctcgttaaaggtcctcacaataactaactgtgtgcttttggaatcagacttgaagcatctatcccagtgcccgagtatcagtcaactaaagaccctggacctgagtggcatcagactgaccaattacagtcttgtgcctctccaaattctcctagaaaaagttgcagccacccttgagtacctggatttagatgactgtggcatcatagactcccaagtcaacgccatcctgcctgccctgagccgctgctttgagctcaacaccttcagcttctgtggaaatcccatctccatggccaccctggagaacctgctgagccacacaatcatactcaaaaacttatgcgtggagctgtatcctgccccccgggagagttatgatgctgatggtactctctgctggagcagatttcctcaaattagggctgagctgatgaagagagtgagggacttaaggcaccccaagaggatcttgttctgtactgactgctgccctgactgtggcaacaggtcattttatgacctggaggcagatcaatgctgctgttgaatgcctgcctatttgggtggatatgtcaaacgctttcttctggacacttggaaactaaaacctaggtcttaggtacatcctatagggagcacagaacccatcatttcacacatgggctctgaaagtgggaaaggaaaggtgatcaagcaggggcaggacttgggggaagtgttgccatggattcgatgggactttggggacct

SEQ ID NO: 168648 - DNA, 1855 bp, Homo sapiens
  Payload ID: 13210
  Gene Symbol: PRAMEF5
  Gene Name: PRAME family member 5
  Uniprot ID: Q5TYX0
  ENST ID: ENST00000621481
  CDS Start-End: 101-1531
acccaaagtcttcaagcctggagttcctgcttggttcttcctgaggactgagcaccttctagactacatccagatctgttttccctgcagattcgtgaagatgagcatccggactccacccagactcctggagcttgcagggcggagcctgctgagggaccaagccttggccatgtccaccctggaggagctgcccacagaacttttccccccactgttcatggaggccttcagcaggagacgctgtgaggccctgaagctgatggtgcaggcctggcccttccgccgcctccctctgaggcctctgataaagatgccttgtctggaggccttccaagctgtgctcgatgggctggatgcactgcttacccaaggggttcatcccaggaggtggaaacttcaagtgctggatttacaggatgtctgtgagaacttctggatggtttggtctgaagctatggcccatgggtgcttcctcaatgccaagaggaacaaaaaaccagtgcaggactgtccaaggatgagaggacagcagcccttgactgtgttcgtagaactttggctcaagaacaggactctggatgaatacctcacctgcctccttctatgggtcaagcagaggaaagatttactacacctgtgctgtaagaagctgaaaattttgggaatgcccttccgcaatatcagaagcatcctgaaaatggtgaacctagactgtatccaggaggtggaagtgaattgcaagtgggtactgcccatcctgacacagtttaccccatacctgggccacatgaggaatcttcagaagctcgttctctcccacatggatgtctctcgctacgtttccccagagcagaagaaggagattgttacccagttcaccactcagttcctcaagctgtgctgcctccaaaagctttctatgaactctgtttctttcctcgaaggccacctggaccagctgctcagctgtctgaagacctcgttaaaggtcctcacaataactaactgtgtgcttttggaatcagacttgaagcatctatcccagtgcccgagtatcagtcaactaaagaccctggacctgagtggcatcagactgaccaattacagtcttgtgcctctccaaattctcctagaaaaagttgcagccacccttgagtacctggatttagatgactgtggcatcatagactcccaagtcaacgccatcctgcctgccctgagccgctgctttgagctcaacaccttcagcttctgtggaaatcccatctccatggccaccctggagaacctgctgagccacacaatcatactcaaaaacttatgcgtggagctgtatcctgccccccgggagagttatgatgctgatggtactctctgctggagcagatttcctcaaattagggctgagctgatgaagagagtgagggacttaaggcaccccaagaggatcttgttctgtactgactgctgccctgactgtggcaacaggtcattttatgacctggaggcagatcaatgctgctgttgaatgcctgcctatttgggtggatatgtcaaacgctttcttctggacacttggaaactaaaacctaggtcttaggtacatcctatagggagcacagaacccatcatttcacacatgggctctgaaagtgggaaaggaaaggtgatcaagcaggggcaggacttgggggaagtgttgccatggattcgatgggactttggggacctgtgtcctgtagagtggaaaatgggaatttgaatgtctagagtggaggcttgagaatacttgagggagttactcttggatgcatggttgtaaagaaacaatcagaaataaaggaaaactgag

SEQ ID NO: 168649 - DNA, 1720 bp, Homo sapiens; identical to SEQ ID NO: 168647
  Payload ID: 13210
  Gene Symbol: PRAMEF5
  Gene Name: PRAME family member 5
  Uniprot ID: Q5TYX0
  ENST ID: ENST00000633074
  CDS Start-End: 87-1517

SEQ ID NO: 168650 - DNA, 1720 bp, Homo sapiens
  Payload ID: 13211
  Gene Symbol: PRAMEF6
  Gene Name: PRAME family member 6
  Uniprot ID: Q5VXH4
  ENST ID: ENST00000376189
  CDS Start-End: 87-1517
agcctggagttcctgcttggttcttcctgaggactgagcaccttctagactacatccagatctgttttccctgcagattcgtgaagatgagcatccggactccacccagactcctggagcttgcagggcggagcctgctgagggaccaagccttggccatgtccaccctggaggagctgcccacagaacttttccccccactgttcatggaggccttcagcaggagacgctgtgaggccctgaagctgatggtgcaggcctggcccttccgccgcctccctctgaggcctctgataaagatgccttgtctggaggccttccaagctgtgctcgatgggctggatgcactgcttacccaaggggttcatcccaggaggtggaaacttcaagtgctggatttacaggatgtctgtgagaacttctggatggtttggtctgaagctatggcccgtgggtgcttcctcaatgccaagaggaacaaaacaccagtgcaggactgtccaaggatgagaggacagcagcccttgactgtgttcgtagaactttggctcaagaacaggactctggatgaatacctcacctgcctccttctatgggtcaagcagaggaaagatttactacacctgtgctgtaagaagctgaaaattttgggaatgcccttccgcaatatcagaagcatcctgaaaatggtgaacctagactgtatccaggaggtggaagtgaattgcaagtgggtactgcccatcctgacacagtttaccccatacctgggccacatgaggaatcttcagaagctcgttctctcccacatggatgtctctcgctacgtttccccagagcagaagaaggagattgttacccagttcaccactcagttcctcaagctgtgctgcctccaaaagctttctatgaactctgtttctttcctcgaaggccacctggaccagctgctcagctgtctgaagacctcgttaaaggtcctcacaataactaactgtgtgcttttggaatcagacttgaagcatctatcccagtgcccgagtatcagtcaactaaagaccctggacctgagtggcatcagactgaccaattacagtcttgtgcctctccaaattctcctagaaaaagttgcagccacccttgagtacctggatttagatgactgtggcatcatagactcccaagtcaacgccatcctgcctgccctgagccgctgctttgagctcaacaccttcagcttctgtggaaatcccatctccatggccaccctggagaacctgctgagccacacaatcatactcaaaaacttatgcgtggagctgtatcctgccccccgggagagttatgatgctgatggtactctctgctggagcagatttgctcaaattagggctgagctgatgaagagagtgagggacttaaggcaccccaagaggatcttgttctgtactgactgctgccctgactgtggcaacaggtcattttatgacctggaggcagatcaatgctgctgttgaatgcctgcctatttgggtggatatgtcaaacgctttcttctggacacttggaaactaaaacctaggtcttaggtacatcctatagggagcacagaacccatcatttcacacatgggctctgaaagtgggaaagggaaggtgatcaagcaggggcaggacttgggggaagtgttgccatggattcgatgggactttggggacct

SEQ ID NO: 168651 - DNA, 1720 bp, Homo sapiens
  Payload ID: 13211
  Gene Symbol: PRAMEF6
  Gene Name: PRAME family member 6
  Uniprot ID: Q5VXH4
  ENST ID: ENST00000415464
  CDS Start-End: 87-1517
agcctagagttcctgcttggttcttcctgaggactgagcaccttctagactacatccagatctgttttccctgcagattcgtgaagatgagcatccggactccacccagactcctggagcttgcagggcggagcctgctgagggaccaagccttggccatgtccaccctggaggagctgcccacagaacttttccccccactgttcatggaggccttcagcaggagacgctgtgaggccctgaagctgatggtgcaggcctggcccttccgccgcctccctctgaggcctctgataaagatgccttgtctggaggccttccaagctgtgctcgatgggctggatgcactgcttacccaaggggttcatcccaggaggtggaaacttcaagtgctggatttacaggatgtctgtgagaacttctggatggtttggtctgaagctatggcccgtgggtgcttcctcaatgccaagaggaacaaaacaccagtgcaggactgtccaaggatgagaggacagcagcccttgactgtgttcgtagaactttggctcaagaacaggactctggatgaatacctcacctgcctccttctatgggtcaagcagaggaaagatttactacacctgtgctgtaagaagctgaaaattttgggaatgcccttccgcaatatcagaagcatcctgaaaatggtgaacctagactgtatccaggaggtggaagtgaattgcaagtgggtactgcccatcctgacacagtttaccccatacctgggccacatgaggaatcttcagaagctcgttctctcccacatggatgtctctcgctacgtttccccagagcagaagaaggagattgttacccagttcaccactcagttcctcaagctgtgctgcctccaaaagctttctatgaactctgtttctttcctcgaaggccacctggaccagctgctcagctgtctgaagacctcgttaaaggtcctcacaataactaactgtgtgcttttggaatcagacttgaagcatctatcccagtgcccgagtatcagtcaactaaagaccctggacctgagtggcatcagactgaccaattacagtcttgtgcctctccaaattctcctagaaaaagttgcagccacccttgagtacctggatttagatgactgtggcatcatagactcccaagtcaacgccatcctgcctgccctgagccgctgctttgagctcaacaccttcagcttctgtggaaatcccatctccatggccaccctggagaacctgctgagccacacaatcatactcaaaaacttatgcgtggagctgtatcctgccccccgggagagttatgatgctgatggtactctctgctggagcagatttgctcaaattagggctgagctgatgaagagagtgagggacttaaggcaccccaagaggatcttgttctgtactgactgctgccctgactgtggcaacaggtcattttatgacctggaggcagatcaatgctgctgttgaatgcctgcctatttgggtggatatgtcaaacgctttcttctggacacttggaaactaaaacctaggtcttaggtacatcctatagggagcacagaacccatcatttcacacatgggctctgaaagtgggaaagggaaggtgatcaagcaggggcaggacttgggggaagtgttgccatggattcgatgggactttggggacct

SEQ ID NO: 168652 - DNA, 1600 bp, Homo sapiens
  Payload ID: 13211
  Gene Symbol: PRAMEF6
  Gene Name: PRAME family member 6
  ENST ID: ENST00000613225
  CDS Start-End: 100-1530
acccaaagtcttcaagcctggagttcctgcctggttcttcctgaggtctgagcaccttctaaactacatccagatctggtaagtcactaatttctgaagatgagcatccggactccacccagactcctggagcttgcggggcggagcctgctgagggaccaagccttggccatgtccaccctggaggagctgcccacagaacttttccccccactgttcatggaggccttcagcaggagatgctgtgaggccctgaagctgatggtgcaggcctggcccttccgccgcctccctctgaggcctctgataaagatgccttgtctggaggccttccaagctgtgctcgatgggcttgatgcactgcttacccaaggggtttgtcccaggaggtggaaacttcaagtgctggatttacaggatgtctgtgagaacttctggatggtttggtctgaagctatggcccgtgggtgcttcctcaatgccaagaggaacaaaacaccagtgcaggactgtccaaggatgagaggacagcagcccttgactgtgttcgtagaactttggctcaagaacaggactctggatgaatacctcacctgcctccttctatgggtcaagcagaggaaagatttactacacctgtgctgtaagaagctgaaaattttgggaatgcccttccgcaatatcagaagcatcctgaaaatggtgaacctagactgtatccaggaggtggaagtgaattgcaagtgggtactgcccatcctgacacagtttaccccatacctgggccacatgaggaatcttcagaagctcgttctctcccacatggatgtctctcgctacgtttccccagagcagaagaaggagattgttacccagttcaccactcagttcctcaagctgtgctgcctccaaaagctttctatgaactctgtttctttcctcgaaggccacctggaccagctgctcagctgtctgaagacctcgttaaaggtcctcacaataactaactgtgtgcttttggaatcagacttgaagcatctatcccagtgcccgagtatcagtcaactaaagaccctggacctgagtggcatcagactgaccaattacagtcttgtgcctctccaaattctcctagaaaaagttgcagccacccttgagtacctggatttagatgactgtggcatcatagactcccaagtcaacgccatcctgcctgccctgagccgctgctttgagctcaacaccttcagcttctgtggaaatcccatctccatggccaccctggagaacctgctgagccacacaatcatactcaaaaacttatgcgtggagctgtatcctgccccccgggagagttatgatgctgatggtactctctgctggagcagatttgctcaaattagggctgagctgatgaagagagtgagggacttaaggcaccccaagaggatcttgttctgtactgactgctgccctgactgtggcaacaggtcattttatgacctggaggcagatcaatgctgctgttgaatgcctgcctatttgggtggatatgtcaaacgctttcttctggacacttggaaactaaaacctaggtctt

SEQ ID NO: 168653 - DNA, 1720 bp, Homo sapiens; identical to SEQ ID NO: 168650
  Payload ID: 13211
  Gene Symbol: PRAMEF6
  Gene Name: PRAME family member 6
  ENST ID: ENST00000632295
  CDS Start-End: 87-1517

SEQ ID NO: 168654 - DNA, 1600 bp, Homo sapiens; identical to SEQ ID NO: 168652
  Payload ID: 13211
  Gene Symbol: PRAMEF6
  Gene Name: PRAME family member 6
  ENST ID: ENST00000633076
  CDS Start-End: 100-1530

SEQ ID NO: 168655 - DNA, 1720 bp, Homo sapiens; identical to SEQ ID NO: 168651
  Payload ID: 13211
  Gene Symbol: PRAMEF6
  Gene Name: PRAME family member 6
  ENST ID: ENST00000632388
  CDS Start-End: 87-1517

SEQ ID NO: 168656 - DNA, 1560 bp, Homo sapiens
  Payload ID: 13212
  Gene Symbol: PRAMEF7
  Gene Name: PRAME family member 7
  Uniprot ID: Q5VXH5
  ENST ID: ENST00000330881
  CDS Start-End: 69-1493
tttggcctgagagtgatgccttttctctggatttgtcctctagagttttcccttgcagattcatcaagatgagcatcagggccccacccagactcctggagctggcaaggcagaggctgctgagggaccaggccttggccatctccaccatggaggagctgcccagggagctcttccccacgctgttcatggaggccttcagcaggagacgctgtgaaaccctgaaaacaatggtgcaggcctggcctttcacccgcctccctctagggtccctgatgaagtcgcctcatctggagtcattaaaatctgtgctggaaggggttgatgtgctgttgacccaagaggttcgccccaggcagtcaaaacttcaagtgctggacttgaggaatgtggatgagaacttctgcgacatattttctggagctactgcatccttcccggaggctctgagtcagaagcaaacagcagataactgtccagggacaggcaggcagcagccattcatggtgttcatagacctttgtctcaagaacaggacactagatgaatgcctcacccacctcttagagtggggcaagcagagaaaaggcttactgcatgtgtgttgcaaggagctgcaggtttttggaatgcccatccacagtatcatagaggtcctgaacatggtggagcttgactgtatccaggaggtggaagtgtgctgcccctgggagctgtccactcttgtgaagtttgccccttacctgggccagatgaggaatctccgcaaacttgttctcttcaacatccgtgcatctgcctgcattcccccagacaacaaggggcagttcattgcccgattcacctctcagttcctcaagctggactatttccagaatctgtctatgcactccgtctctttcctcgaaggccacctggaccagctgctcaggtgtctccaggcctccttggagatggtcgttatgaccgactgcctgctgtcagagtcagacttgaagcatctctcttggtgcccgagcatccgtcaattaaaggagctggacctgaggggtgtcacgctgacccatttcagccctgagcccctcacaggtctgctggagcaagctgtggccaccctgcagaccctggacttagaggactgtgggatcatggattcccaactcagcgccatcctgcctgtcctgagccgctgctcccagctcagcaccttcagcttctgtgggaacctcatctccatggctgcccttgagaacctgctgcgccacaccgtcgggctgagcaagctaagcctggagctgtatcctgcccctctggagagttatgacacccagggtgctctctgctgggggagatttgctgaacttggggctgagctgatgaacacactgagggacttaaggcagcccaagatcattgtgttctgcaccgtcccctgccctcgctgtggcatcagggcctcctatgacctggagcccagtcactgcctctgttgaatgcctgccatcagggtggatatatttcaagctttcttctggtcatttcggagctgaaacctaggcc

SEQ ID NO: 168657 - DNA, 1592 bp, Homo sapiens
  Payload ID: 13212
  Gene Symbol: PRAMEF7
  Gene Name: PRAME family member 7
  ENST ID: ENST00000355096
  CDS Start-End: 99-1523
acccaaagccctggtgcctggaactactgcttgattctctgagagatcccagcaccctacaaactgagtccagatctggtaagtcaccacctccttagatgagcatcagggccccacccagactcctggagctggcaaggcagaggctgctgagggaccaggccttggccatctccaccatggaggagctgcccagggagctcttccccacgctgttcatggaggccttcagcaggagacgctgtgaaaccctgaaaacaatggtgcaggcctggcctttcacccgcctccctctagggtccctgatgaagtcgcctcatctggagtcattaaaatctgtgctggaaggggttgatgtgctgttgacccaagaggttcgccccaggcagtcaaaacttcaagtgctggacttgaggaatgtggatgagaacttctgcgacatattttctggagctactgcatccttcccggaggctctgagtcagaagcaaacagcagataactgtccagggacaggcaggcagcagccattcatggtgttcatagacctttgtctcaagaacaggacactagatgaatgcctcacccacctcttagagtggggcaagcagagaaaaggcttactgcatgtgtgttgcaaggagctgcaggtttttggaatgcccatccacagtatcatagaggtcctgaacatggtggagcttgactgtatccaggaggtggaagtgtgctgcccctgggagctgtccactcttgtgaagtttgccccttacctgggccagatgaggaatctccgcaaacttgttctcttcaacatccgtgcatctgcctgcattcccccagacaacaaggggcagttcattgcccgattcacctctcagttcctcaagctggactatttccagaatctgtctatgcactccgtctctttcctcgaaggccacctggaccagctgctcaggtgtctccaggcctccttggagatggtcgttatgaccgactgcctgctgtcagagtcagacttgaagcatctctcttggtgcccgagcatccgtcaattaaaggagctggacctgaggggtgtcacgctgacccatttcagccctgagcccctcacaggtctgctggagcaagctgtggccaccctgcagaccctggacttagaggactgtgggatcatggattcccaactcagcgccatcctgcctgtcctgagccgctgctcccagctcagcaccttcagcttctgtgggaacctcatctccatggctgcccttgagaacctgctgcgccacaccgtcgggctgagcaagctaagcctggagctgtatcctgcccctctggagagttatgacacccagggtgctctctgctgggggagatttgctgaacttggggctgagctgatgaacacactgagggacttaaggcagcccaagatcattgtgttctgcaccgtcccctgccctcgctgtggcatcagggcctcctatgacctggagcccagtcactgcctctgttgaatgcctgccatcagggtggatatatttcaagctttcttctggtcatttcggagctgaaacctaggccat

SEQ ID NO: 168658 - DNA, 1592 bp, Homo sapiens; identical to SEQ ID NO: 168657
  Payload ID: 13212
  Gene Symbol: PRAMEF7
  Gene Name: PRAME family member 7
  ENST ID: ENST00000616979
  CDS Start-End: 99-1523

SEQ ID NO: 168659 - DNA, 1560 bp, Homo sapiens; identical to SEQ ID NO: 168656
  Payload ID: 13212
  Gene Symbol: PRAMEF7
  Gene Name: PRAME family member 7
  ENST ID: ENST00000633146
  CDS Start-End: 69-1493

SEQ ID NO: 168660 - DNA, 1844 bp, Homo sapiens
  Payload ID: 13213
  Gene Symbol: PRAMEF8
  Gene Name: PRAME family member 8
  Uniprot ID: Q5VWM4
  ENST ID: ENST00000357367
  CDS Start-End: 84-1508
gaactactgcttgattctctgagagatcccagcaccctacaaactgagtccagatctgagttttcccttgcagattcatcaagatgagcatcagggccccacccagactcctggagctggcaaggcagaggctgctgagggaccaggccttggccatctccaccatggaggagctgcccagggagctcttccccacactgttcatggaggccttcagcaggagacgctgtgaaaccctgaaaacaatggtgcaggcctggcctttcacccgcctccctctagggtccctgatgaagtcgcctcatctggagtcattaaaatctgtgctggaaggggttgatgtgctgttgacccaagaggttcgccccaggcagtcaaaacttcaagtgctggacttgaggaatgtggatgagaacttctgcgacatattttctggagctactgcatccttcccggaggctctgagtcagaagcaaacagcagataactgtccagggacaggcaggcagcagccattcatggtgttcatagacctttgtctcaagaacaggacactagatgaatgcctcacccacctcttagagtggggcaagcagagaaaaggcttactgcatgtgtgttgcaaggagctgcaggtttttggaatgcccatccacagtatcatagaggtcctgaacatggtggagcttgactgtatccaggaggtggaagtgtgctgcccctgggagctgtccactcttgtgaagtttgccccttacctgggccagatgaggaatctccgcaaacttgttctcttcaacatccgtgcatctgcctgcattcccccagacaacaaggggcagttcattgcccgattcacctctcagttcctcaagctggactatttccagaatctgtctatgcactccgtctctttcctcgaaggccacctggaccagctgctcaggtgtctccaggcctccttggagatggtcgttatgaccgactgcctgctgtcagagtcggacttgaagcatctctcttggtgcccgagcatccgtcaattaaaggagctggacctgaggggtgtcacgctgacccatttcagccctgagcccctcacaggtctgctggagcaagttgtggccaccctgcagaccctggacttagaggactgtgggatcatggattcccaactcagcgccatcctgcctgtcctgagccgctgctcccagctcagcaccttcagcttctgtgggaacctcatctccatggctgcccttgagaacctgctgcgccacaccgtcgggctgagcaagctaagcctggagctgtatcctgcccctctggagagttatgacacccagggagctctctgctgggggagatttgctgaacttggggctgagctgatgaacacactgagggacttaaggcagcccaagatcattgtgttctgcaccgtcccctgccctcgctgtggcatcagggcctcctatgacctggagcccagtcactgcctctgttgaatgcctgccatcagggtggatatatttcaagctttcttctggtcatttcggagctgaaacctaggccatgagtgcatgttaaagggagcacagacccatcgtttcaaatgcctcctcagtgtgaatgggaaaggaatgaggatgcaggaggggcaggactgggggaaaagttgacttggagtggatgggctctttagagacctgtgtcccagagaatcagaaatgggaatctgaattgctagagtgagaatcagggaggagagacacatgagagggttacccctgcacagatggttgtaaagtaacagtcagaaataaagggaaactgagtggaaa

SEQ ID NO: 168661 - DNA, 1560 bp, Homo sapiens
  Payload ID: 13213
  Gene Symbol: PRAMEF8
  Gene Name: PRAME family member 8
  Uniprot ID: Q5VWM4
  ENST ID: ENST00000611408
  CDS Start-End: 69-1493
tttggcctgagagtgatgccttttctctggatttgtcctctagagttttcccttgcagattcatcaagatgagcatcagggccccacccagactcctggagctggcaaggcagaggctgctgagggaccaggccttggccatctccaccatggaggagctgcccagggagctcttccccacactgttcatggaggccttcagcaggagacgctgtgaaaccctgaaaacaatggtgcaggcctggcctttcacccgcctccctctagggtccctgatgaagtcgcctcatctggagtcattaaaatctgtgctggaaggggttgatgtgctgttgacccaagaggttcgccccaggcagtcaaaacttcaagtgctggacttgaggaatgtggatgagaacttctgcgacatattttctggagctactgcatccttcccggaggctctgagtcagaagcaaacagcagataactgtccagggacaggcaggcagcagccattcatggtgttcatagacctttgtctcaagaacaggacactagatgaatgcctcacccacctcttagagtggggcaagcagagaaaaggcttactgcatgtgtgttgcaaggagctgcaggtttttggaatgcccatccacagtatcatagaggtcctgaacatggtggagcttgactgtatccaggaggtggaagtgtgctgcccctgggagctgtccactcttgtgaagtttgccccttacctgggccagatgaggaatctccgcaaacttgttctcttcaacatccgtgcatctgcctgcattcccccagacaacaaggggcagttcattgcccgattcacctctcagttcctcaagctggactatttccagaatctgtctatgcactccgtctctttcctcgaaggccacctggaccagctgctcaggtgtctccaggcctccttggagatggtcgttatgaccgactgcctgctgtcagagtcggacttgaagcatctctcttggtgcccgagcatccgtcaattaaaggagctggacctgaggggtgtcacgctgacccatttcagccctgagcccctcacaggtctgctggagcaagttgtggccaccctgcagaccctggacttagaggactgtgggatcatggattcccaactcagcgccatcctgcctgtcctgagccgctgctcccagctcagcaccttcagcttctgtgggaacctcatctccatggctgcccttgagaacctgctgcgccacaccgtcgggctgagcaagctaagcctggagctgtatcctgcccctctggagagttatgacacccagggagctctctgctgggggagatttgctgaacttggggctgagctgatgaacacactgagggacttaaggcagcccaagatcattgtgttctgcaccgtcccctgccctcgctgtggcatcagggcctcctatgacctggagcccagtcactgcctctgttgaatgcctgccatcagggtggatatatttcaagctttcttctggtcatttcggagctgaaacctaggcc

SEQ ID NO: 168662 - DNA, 1558 bp, Homo sapiens
  Payload ID: 13213
  Gene Symbol: PRAMEF8
  Gene Name: PRAME family member 8
  Uniprot ID: Q5VWM4
  ENST ID: ENST00000616484
  CDS Start-End: 67-1491
tctgagagatcccagcaccctacaaactgagtccagatctgagttttcccttgcagattcatcaagatgagcatcagggccccacccagactcctggagctggcaaggcagaggctgctgagggaccaggccttggccatctccaccatggaggagctgcccagggagctcttccccacactgttcatggaggccttcagcaggagacgctgtgaaaccctgaaaacaatggtgcaggcctggcctttcacccgcctccctctagggtccctgatgaagtcgcctcatctggagtcattaaaatctgtgctggaaggggttgatgtgctgttgacccaagaggttcgccccaggcagtcaaaacttcaagtgctggacttgaggaatgtggatgagaacttctgcgacatattttctggagctactgcatccttcccggaggctctgagtcagaagcaaacagcagataactgtccagggacaggcaggcagcagccattcatggtgttcatagacctttgtctcaagaacaggacactagatgaatgcctcacccacctcttagagtggggcaagcagagaaaaggcttactgcatgtgtgttgcaaggagctgcaggtttttggaatgcccatccacagtatcatagaggtcctgaacatggtggagcttgactgtatccaggaggtggaagtgtgctgcccctgggagctgtccactcttgtgaagtttgccccttacctgggccagatgaggaatctccgcaaacttgttctcttcaacatccgtgcatctgcctgcattcccccagacaacaaggggcagttcattgcccgattcacctctcagttcctcaagctggactatttccagaatctgtctatgcactccgtctctttcctcgaaggccacctggaccagctgctcaggtgtctccaggcctccttggagatggtcgttatgaccgactgcctgctgtcagagtcggacttgaagcatctctcttggtgcccgagcatccgtcaattaaaggagctggacctgaggggtgtcacgctgacccatttcagccctgagcccctcacaggtctgctggagcaagttgtggccaccctgcagaccctggacttagaggactgtgggatcatggattcccaactcagcgccatcctgcctgtcctgagccgctgctcccagctcagcaccttcagcttctgtgggaacctcatctccatggctgcccttgagaacctgctgcgccacaccgtcgggctgagcaagctaagcctggagctgtatcctgcccctctggagagttatgacacccagggagctctctgctgggggagatttgctgaacttggggctgagctgatgaacacactgagggacttaaggcagcccaagatcattgtgttctgcaccgtcccctgccctcgctgtggcatcagggcctcctatgacctggagcccagtcactgcctctgttgaatgcctgccatcagggtggatatatttcaagctttcttctggtcatttcggagctgaaacctaggcc

SEQ ID NO: 168663 - DNA, 1592 bp, Homo sapiens
  Payload ID: 13213
  Gene Symbol: PRAMEF8
  Gene Name: PRAME family member 8
  Uniprot ID: Q5VWM4
  ENST ID: ENST00000614831
  CDS Start-End: 99-1523
acccaaagccctggtgcctggaactactgcttgattctctgagagatcccagcaccctacaaactgagtccagatctggtaagtcaccacctccttagatgagcatcagggccccacccagactcctggagctggcaaggcagaggctgctgagggaccaggccttggccatctccaccatggaggagctgcccagggagctcttccccacactgttcatggaggccttcagcaggagacgctgtgaaaccctgaaaacaatggtgcaggcctggcctttcacccgcctccctctagggtccctgatgaagtcgcctcatctggagtcattaaaatctgtgctggaaggggttgatgtgctgttgacccaagaggttcgccccaggcagtcaaaacttcaagtgctggacttgaggaatgtggatgagaacttctgcgacatattttctggagctactgcatccttcccggaggctctgagtcagaagcaaacagcagataactgtccagggacaggcaggcagcagccattcatggtgttcatagacctttgtctcaagaacaggacactagatgaatgcctcacccacctcttagagtggggcaagcagagaaaaggcttactgcatgtgtgttgcaaggagctgcaggtttttggaatgcccatccacagtatcatagaggtcctgaacatggtggagcttgactgtatccaggaggtggaagtgtgctgcccctgggagctgtccactcttgtgaagtttgccccttacctgggccagatgaggaatctccgcaaacttgttctcttcaacatccgtgcatctgcctgcattcccccagacaacaaggggcagttcattgcccgattcacctctcagttcctcaagctggactatttccagaatctgtctatgcactccgtctctttcctcgaaggccacctggaccagctgctcaggtgtctccaggcctccttggagatggtcgttatgaccgactgcctgctgtcagagtcggacttgaagcatctctcttggtgcccgagcatccgtcaattaaaggagctggacctgaggggtgtcacgctgacccatttcagccctgagcccctcacaggtctgctggagcaagttgtggccaccctgcagaccctggacttagaggactgtgggatcatggattcccaactcagcgccatcctgcctgtcctgagccgctgctcccagctcagcaccttcagcttctgtgggaacctcatctccatggctgcccttgagaacctgctgcgccacaccgtcgggctgagcaagctaagcctggagctgtatcctgcccctctggagagttatgacacccagggagctctctgctgggggagatttgctgaacttggggctgagctgatgaacacactgagggacttaaggcagcccaagatcattgtgttctgcaccgtcccctgccctcgctgtggcatcagggcctcctatgacctggagcccagtcactgcctctgttgaatgcctgccatcagggtggatatatttcaagctttcttctggtcatttcggagctgaaacctaggccat

SEQ ID NO: 168664 - DNA, 1706 bp, Homo sapiens
  Payload ID: 13213
  Gene Symbol: PRAMEF8
  Gene Name: PRAME family member 8
  Uniprot ID: Q5VWM4
  ENST ID: ENST00000621519
  CDS Start-End: 79-1503
ggtgatcatatttggcctgagagtgatgccttttctctggatttgtcctctagagttttcccttgcagattcatcaagatgagcatcagggccccacccagactcctggagctggcaaggcagaggctgctgagggaccaggccttggccatctccaccatggaggagctgcccagggagctcttccccacactgttcatggaggccttcagcaggagacgctgtgaaaccctgaaaacaatggtgcaggcctggcctttcacccgcctccctctagggtccctgatgaagtcgcctcatctggagtcattaaaatctgtgctggaaggggttgatgtgctgttgacccaagaggttcgccccaggcagtcaaaacttcaagtgctggacttgaggaatgtggatgagaacttctgcgacatattttctggagctactgcatccttcccggaggctctgagtcagaagcaaacagcagataactgtccagggacaggcaggcagcagccattcatggtgttcatagacctttgtctcaagaacaggacactagatgaatgcctcacccacctcttagagtggggcaagcagagaaaaggcttactgcatgtgtgttgcaaggagctgcaggtttttggaatgcccatccacagtatcatagaggtcctgaacatggtggagcttgactgtatccaggaggtggaagtgtgctgcccctgggagctgtccactcttgtgaagtttgccccttacctgggccagatgaggaatctccgcaaacttgttctcttcaacatccgtgcatctgcctgcattcccccagacaacaaggggcagttcattgcccgattcacctctcagttcctcaagctggactatttccagaatctgtctatgcactccgtctctttcctcgaaggccacctggaccagctgctcaggtgtctccaggcctccttggagatggtcgttatgaccgactgcctgctgtcagagtcggacttgaagcatctctcttggtgcccgagcatccgtcaattaaaggagctggacctgaggggtgtcacgctgacccatttcagccctgagcccctcacaggtctgctggagcaagttgtggccaccctgcagaccctggacttagaggactgtgggatcatggattcccaactcagcgccatcctgcctgtcctgagccgctgctcccagctcagcaccttcagcttctgtgggaacctcatctccatggctgcccttgagaacctgctgcgccacaccgtcgggctgagcaagctaagcctggagctgtatcctgcccctctggagagttatgacacccagggagctctctgctgggggagatttgctgaacttggggctgagctgatgaacacactgagggacttaaggcagcccaagatcattgtgttctgcaccgtcccctgccctcgctgtggcatcagggcctcctatgacctggagcccagtcactgcctctgttgaatgcctgccatcagggtggatatatttcaagctttcttctggtcatttcggagctgaaacctaggccatgagtgcatgttaaagggagcacagacccatcgtttcaaatgcctcctcagtgtgaatgggaaaggaatgaggatgcaggaggggcaggactgggggaaaagttgacttggagtggatgggctctttagagacct

SEQ ID NO: 168665 - DNA, 1592 bp, Homo sapiens; identical to SEQ ID NO: 168663
  Payload ID: 13213
  Gene Symbol: PRAMEF8
  Gene Name: PRAME family member 8
  ENST ID: ENST00000631760
  CDS Start-End: 99-1523

SEQ ID NO: 168666 - DNA, 1706 bp, Homo sapiens; identical to SEQ ID NO: 168664
  Payload ID: 13213
  Gene Symbol: PRAMEF8
  Gene Name: PRAME family member 8
  ENST ID: ENST00000632952
  CDS Start-End: 79-1503

SEQ ID NO: 168667 - DNA, 1844 bp, Homo sapiens; identical to SEQ ID NO: 168660
  Payload ID: 13213
  Gene Symbol: PRAMEF8
  Gene Name: PRAME family member 8
  ENST ID: ENST00000632222
  CDS Start-End: 84-1508

SEQ ID NO: 168668 - DNA, 1863 bp, Homo sapiens
  Payload ID: 13214
  Gene Symbol: PRAMEF9
  Gene Name: PRAME family member 9
  ENST ID: ENST00000612758
  CDS Start-End: 95-1531
acccaaagtcttcaagcctggagttcctgcctggttcttcctgaggtctgagcaccttctaaactacatccagatctgttttccctgcagattcatgaagatgagcatccggactccacccagactcctggagcttgcggggcggagcctgctgagggaccaagccttggccatgtccaccctggaggagctgcccacagaacttttccccccactgttcatggaggccttcagcaggagatgctgtgaggccctgaagctgatggtgcaggcctggcccttccgccgcctccctctgaggcctctgataaagatgccttgtctggaggccttccaagctgtgctcgatgggcttgatgcactgcttacccaaggggtttgtcccaggaggtggaaacttcaagtgctggatttacaggatgtctgtgagaacttctggatggtttggtctgaagctatggcccgtgggtccttcctcaatgccaagaggaacaaaacaccagtgcaggactgtccaaggatgagaggacagcagcccttgactgtgttcgtagaactttggctcaagaacaggactctggatgaatacctcacctacctccttctatgggtcaagcagaggaaagatttactacacctgtgctgtaagaagctgaaaattttgggaatgcccttccgcaatatcagaagcatcctgaaaatggtgaacctagactgtatccaggaggtggaagtgaattgcaagtgggtactgcccatcctgacacagtttaccccatacctgggccacatgaggaatcttcagaagctcgttctctctcacatggatgtctctcgctacgtttccccagagcagaagaaggagattgttacccagttcaccactcagttcctcaagctgcactgcctccaaaagctttatatgaactctgtttctttcctcgaaggccacctggaccagctgctcagctgtctgaagacctcgttaaagttcctcacaataactaactgtgtgcttttggaatcagacttgaagcatctatcccagtgcccgagtatcagtcaactaaagaccctggacctgagtggcatcagactgaccaattacagtcttgtgcctctccaaattctcctagaaaaagttgcagccacccttgagtacttggatttagatgactgtggcatcatagactcccaagtcaacgccatcctgcctgccctgagccgctgctttgagctcaatgccttcagcttctgtggaaatcccatctccatggccaccctggagaacctgctgagccacacaatcatactcaaaaacttatgcgtggaggtgtatcctgccccgcgggagagttatggtgctgatggtactctctgctggaacagatttgctcaaattagggctgagctgatgaacagagtgagggacttaaggcaccccaagaggatctttttctgtattgataactgccctgactgtggcaacaggtcattttatgacctggaggcagatcaatactgctgttgaatgcctgcctatttggatgggtatgtcaaacgctttcttctggacacttggaaactaaaacctaggtcttaggtacatcctaaagggagcacagaacccatcatttcacacataggctctgaaagtgggaaaggaaagctgatcaagcaggggcaggacttgggggaaatgttgccatggattcgatgggactttggggacctgtatcctgtagagtcgaaaatgggaatctgaatgtctagagtggaattcaggcttgagaatacatgagggagttactcttgcatggatggttgtaaagaaacaatcagaaataaaggaaaactgagcag

SEQ ID NO: 168669 - DNA, 1863 bp, Homo sapiens
  Payload ID: 13214
  Gene Symbol: PRAMEF9
  Gene Name: PRAME family member 9
  ENST ID: ENST00000415919
  CDS Start-End: 95-1531
acccaaagtcttcaagcctggagttcctgcttggttcttcctgaggtctgagcaccttctaaactacatccagatctgttttccctgcagattcatgaagatgagcatccggactccacccagactcctggagctggcggggcggagcctgctgagggaccaagccttggccatgtccaccctggaggagctgcccacagaacttttccccccactgttcatggaggccttcagcaggagacgctgtgaggccctgaagctgatggtgcaggcctggcccttccgccgcctccctctgaggcctctgataaagatgccttgtctggaggccttccaagctgtgctcgatgggctggatgcactgcttacccaaggggtttgtcccaggaggtggaaacttcaagtgctggatttacaggatgtctgtgagaacttctggatggtttggtctgaagctatggcccgtgggtccttcctcaatgccaagaggaacaaaacaccagtgcaggactgtccaaggatgagaggacagcagcccttgactgtgttcgtagaactttggctcaagaacaggactctggatgaatacctcacctacctccttctatgggtcaagcagaggaaagatttactacacctgtgctgtaagaagctgaaaattttgggaatgcccttccgcaatatcagaagcatcctgaaaatggtgaacctagactgtatccaggaggtggaagtgaattgcaagtgggtactgcccatcctgacacagtttaccccatacctgggccacatgaggaatcttcagaagctcgttctctcccacatggatgtctctcgctacgtttccccagagcagaagaaggagattgttacccagttcaccactcagttcctcaagctgcactgcctccaaaagctttatatgaactctgtttctttcctcgaaggccacctggaccagctgctcagctgtctgaagacctcgttaaaggtcctcacaataactaactgtgtgcttttggaatcagacttgaagcatctatcccagtgcccgagtatcagtcaactaaagaccctggacctgagtggcatcagactgaccaattacagtcttgtgcctctccaaattctcctagaaaaagttgcagccacccttgagtacttggatttagatgactgtggcatcatagactcccaagtcaacgccatcctgcctgccctgagccgctgctttgagctcaatgccttcagcttctgtggaaatcccatctccatggccaccctggagaacctgctgagccacacaatcatactcaaaaacttatgcgtggaggtgtatcctgccccgcgggagagttatggtgctgatggtactctctgctggagcagatttgctcaaattagggctgagctgatgaacagagtgagggacttaaggcaccccaagaggatctttttctgtattgacaactgccctgactgtggcaacaggtcattttatgacctggaggcagatcaatactgctgttgaatgcctgcctatttggatgggtatgtcaaacgctttcttctggacacttggaaactaaaacctaggtcttaggtacatcctaaagggagcacagaacccatcatttcacacataggctctgaaagtgggaaaggaaagctgatcaagcaggggcaggacttgggggaaatgttgccatggattcgatgggactttggggacctgtatcctgtagagtcgaaaatgggaatctgaatgtctagagtggaattcaggcttgagaatacatgagggagttactcttgcatggatggttgtaaagaaacaatcagaaataaaggaaaactgagcag

SEQ ID NO: 168670 - DNA, 1863 bp, Homo sapiens; identical to SEQ ID NO: 168669
  Payload ID: 13214
  Gene Symbol: PRAMEF9
  Gene Name: PRAME family member 9
  ENST ID: ENST00000633914
  CDS Start-End: 95-1531

SEQ ID NO: 168671 - DNA, 1865 bp, Homo sapiens; identical to SEQ ID NO: 168615
  Payload ID: 13215
  Gene Symbol:
  Gene Name: PRAMEF9
  ENST ID: ENST00000632181
  CDS Start-End: 95-1531

SEQ ID NO: 168672 - DNA, 1600 bp, Homo sapiens; identical to SEQ ID NO: 168616
  Payload ID: 13215
  Gene Symbol:
  Gene Name: PRAMEF9
  ENST ID: ENST00000633191
  CDS Start-End: 100-1530

SEQ ID NO: 168673 - DNA, 1080 bp, Homo sapiens
  Payload ID: 13216
  Gene Symbol: PTCRA
  Gene Name: pre T-cell antigen receptor alpha
  Uniprot ID: Q6ISU1
  ENST ID: ENST00000304672
  CDS Start-End: 82-927
tagaaggcagtcttgtgggtgcctcctcccccagccgcaactcaggtctgcagctgggtcctgcctccttccgagtgggccatggccggtacatggctgctacttctcctggcccttgggtgtccagccctacccacaggtgtgggcggcacaccctttccttctctggccccaccaatcatgctgctggtggatggaaagcagcagatggtggtggtctgcctggtccttgatgttgcaccccctggccttgacagccccatctggttctcagccggcaatggcagtgcactggatgccttcacctatggcccttccccagcaacggatggcacctggaccaacttggcccatctctccctgccttctgaggagctggcatcctgggagcctttggtctgccacactgggcctggggctgagggtcacagcaggagtacacagcccatgcatctgtcaggagaggcttctacagccaggacctgcccccaggagcctctcagggggacaccgggtggggcgctgtggctgggggtcctgcggctgctgctcttcaagctgctgctgtttgacctgctcctgacctgcagctgcctgtgcgaccccgcgggcccgctgccttcccccgcaaccaccacccgcctgcgagccctcggctcccatcgactgcacccggccacggagactgggggacgagaggccaccagctcacccagaccccagcctcgggaccgccgctggggtgacacccctccgggtcggaagcccgggagcccagtatggggggaagggtcttacctcagcagttaccccacttgcccagcacaggcctggtgctcaagatctgccctcagggctccttcctccagtcttggagcattttttgcaggtgacctgcctcctcctctgcaggctggagctgcctgagggcagggctctacctcccctgcgtcacactgtgtgaggctgtgtctctgccatccaaaagggggccccttgagaatggtgatccacccagttacaggggcatttagggagcagatgactgagaacattaaaaaagaacttaaatgacacagc

SEQ ID NO: 168674 - DNA, 759 bp, Homo sapiens
  Payload ID: 13216
  Gene Symbol: PTCRA
  Gene Name: pre T-cell antigen receptor alpha
  Uniprot ID: Q6ISU1
  ENST ID: ENST00000446507
  CDS Start-End: 82-606
tagaaggcagtcttgtgggtgcctcctcccccagccgcaactcaggtctgcagctgggtcctgcctccttccgagtgggccatggccggtacatggctgctacttctcctggcccttgggtgtccagccctacccacaggagaggcttctacagccaggacctgcccccaggagcctctcagggggacaccgggtggggcgctgtggctgggggtcctgcggctgctgctcttcaagctgctgctgtttgacctgctcctgacctgcagctgcctgtgcgaccccgcgggcccgctgccttcccccgcaaccaccacccgcctgcgagccctcggctcccatcgactgcacccggccacggagactgggggacgagaggccaccagctcacccagaccccagcctcgggaccgccgctggggtgacacccctccgggtcggaagcccgggagcccagtatggggggaagggtcttacctcagcagttaccccacttgcccagcacaggcctggtgctcaagatctgccctcagggctccttcctccagtcttggagcattttttgcaggtgacctgcctcctcctctgcaggctggagctgcctgagggcagggctctacctcccctgcgtcacactgtgtgaggctgtgtctctgccatccaaaagggggccccttgagaatggtgatccacccagttacaggggcatttagggagcagatgactgagaacattaaaaaagaacttaaatgacacagc

SEQ ID NO: 168675 - DNA, 1005 bp, Homo sapiens
  Payload ID: 13216
  Gene Symbol: PTCRA
  Gene Name: pre T-cell antigen receptor alpha
  Uniprot ID: Q6ISU1
  ENST ID: ENST00000441198
  CDS Start-End: 82-852
tagaaggcagtcttgtgggtgcctcctcccccagccgcaactcaggtctgcagctgggtcctgcctccttccgagtgggccatggccggtacatggctgctacttctcctggcccttgggtgtccagccctacccacaggtcctgtttccttcccttcctcaccagaggctgccacaacaggccccatctggttctcagccggcaatggcagtgcactggatgccttcacctatggcccttccccagcaacggatggcacctggaccaacttggcccatctctccctgccttctgaggagctggcatcctgggagcctttggtctgccacactgggcctggggctgagggtcacagcaggagtacacagcccatgcatctgtcaggagaggcttctacagccaggacctgcccccaggagcctctcagggggacaccgggtggggcgctgtggctgggggtcctgcggctgctgctcttcaagctgctgctgtttgacctgctcctgacctgcagctgcctgtgcgaccccgcgggcccgctgccttcccccgcaaccaccacccgcctgcgagccctcggctcccatcgactgcacccggccacggagactgggggacgagaggccaccagctcacccagaccccagcctcgggaccgccgctggggtgacacccctccgggtcggaagcccgggagcccagtatggggggaagggtcttacctcagcagttaccccacttgcccagcacaggcctggtgctcaagatctgccctcagggctccttcctccagtcttggagcattttttgcaggtgacctgcctcctcctctgcaggctggagctgcctgagggcagggctctacctcccctgcgtcacactgtgtgaggctgtgtctctgccatccaaaagggggccccttgagaatggtgatccacccagttacaggggcatttagggagcagatgactgagaacattaaaaaagaacttaaatgacacagc

SEQ ID NO: 168676 - DNA, 1125 bp, Homo sapiens
  Payload ID: 13216
  Gene Symbol: PTCRA
  Gene Name: pre T-cell antigen receptor alpha
  ENST ID: ENST00000616441
  CDS Start-End: 82-972
tagaaggcagtcttgtgggtgcctcctcccccagccgcaactcaggtctgcagctgggtcctgcctccttccgagtgggccatggccggtacatggctgctacttctcctggcccttgggtgtccagccctacccacaggtgtgggcggcacaccctttccttctctggccccaccaatcatgctgctggtggatggaaagcagcagatggtggtggtctgcctggtccttgatgttgcaccccctggccttgacagccccatctggttctcagccggcaatggcagtgcactggatgccttcacctatggcccttccccagcaacggatggcacctggaccaacttggcccatctctccctgccttctgaggagctggcatcctgggagcctttggtctgccacactgggcctggggctgagggtcacagcaggagtacacagcccatgcatctgtcaggagaggcttctacagccaggacctgcccccaggagcctctcagggggggctgcgggctcctgcgggctcctgagcggttcctcctcgcagggacaccgggtggggcgctgtggctgggggtcctgcggctgctgctcttcaagctgctgctgtttgacctgctcctgacctgcagctgcctgtgcgaccccgcgggcccgctgccttcccccgcaaccaccacccgcctgcgagccctcggctcccatcgactgcacccggccacggagactgggggacgagaggccaccagctcacccagaccccagcctcgggaccgccgctggggtgacacccctccgggtcggaagcccgggagcccagtatggggggaagggtcttacctcagcagttaccccacttgcccagcacaggcctggtgctcaagatctgccctcagggctccttcctccagtcttggagcattttttgcaggtgacctgcctcctcctctgcaggctggagctgcctgagggcagggctctacctcccctgcgtcacactgtgtgaggctgtgtctctgccatccaaaagggggccccttgagaatggtgatccacccagttacaggggcatttagggagcagatgactgagaacattaaaaaagaacttaaatgacacagc

SEQ ID NO: 168677 - DNA, 626 bp, Homo sapiens
  Payload ID: 13217
  Gene Symbol: VPREB1
  Gene Name: pre-B lymphocyte 1
  ENST ID: ENST00000302273
  CDS Start-End: 24-458
ggccacaggagtcagagctctgcatgtctgcaccatgtcctgggctcctgtcctgctcatgctgtttgtctactgcacagccggtgctgcatcagccgccggccatgtcctcggcccttggaaccacaatccgcctcacctgcaccctgaggaacgaccatgacatcggtgtgtacagcgtctactggtaccagcagaggccgggccaccctcccaggttcctgctgagatatttctcacaatcagacaagagccagggcccccaggtcccccctcgcttctctggatccaaagatgtggccaggaacagggggtatttgagcatctctgagctgcagcctgaggacgaggctatgtattactgtgctatgggggcccgcagctcggagaaggaggagagggagagggagtgggaggaagaaatggaacccactgcagccaggacacgtgtcccttgaactgaagacagcagaggcacgcatccccttggagagactgtcatggaagagggtggagtcgccgcccgaagcgccgaggaggctgagccactcagcatctcctggtcctgcagtgttgctgtaaatccccattggagactgcattagggaattaaagctgcttgtcac

SEQ ID NO: 168678 - DNA, 755 bp, Homo sapiens
  Payload ID: 13217
  Gene Symbol: VPREB1
  Gene Name: pre-B lymphocyte 1
  Uniprot ID: P12018
  ENST ID: ENST00000403807
  CDS Start-End: 140-577
agaaagtctgggatggtagtggccaggaacggggtgtgccacggccccacctctcagagcagggaggaggatgctgggccagcccttggggaccccaggcaccgtggccacaggagtcagagctctgcatgtctgcaccatgtcctgggctcctgtcctgctcatgctgtttgtctactgcacaggttgtggtcctcagccggtgctgcatcagccgccggccatgtcctcggcccttggaaccacaatccgcctcacctgcaccctgaggaacgaccatgacatcggtgtgtacagcgtctactggtaccagcagaggccgggccaccctcccaggttcctgctgagatatttctcacaatcagacaagagccagggcccccaggtcccccctcgcttctctggatccaaagatgtggccaggaacagggggtatttgagcatctctgagctgcagcctgaggacgaggctatgtattactgtgctatgggggcccgcagctcggagaaggaggagagggagagggagtgggaggaagaaatggaacccactgcagccaggacacgtgtcccttgaactgaagacagcagaggcacgcatccccttggagagactgtcatggaagagggtggagtcgccgcccgaagcgccgaggaggctgagccactcagcatctcctggtcctgcagtgttgctgtaaatccccattggagactgcattagggaattaaagctgcttgtcactttttgctga

SEQ ID NO: 168679 - DNA, 610 bp, Homo sapiens
  Payload ID: 13218
  Gene Symbol: VPREB3
  Gene Name: pre-B lymphocyte 3
  Uniprot ID: Q9UKI3
  ENST ID: ENST00000248948
  CDS Start-End: 106-477
gcatgctctgttgtggtccagtggccttcccagccctgtgccccaaagcacctggagcatatagccttgcagaacttctacttgcctgcctccctgcctctggccatggcctgccggtgcctcagcttccttctgatggggaccttcctgtcagtttcccagacagtcctggcccagctggatgcactgctggtcttcccaggccaagtggctcaactctcctgcacgctcagcccccagcacgtcaccatcagggactacggtgtgtcctggtaccagcagcgggcaggcagtgcccctcgatatctcctctactaccgctcggaggaggatcaccaccggcctgctgacatccccgatcgattctcggcagccaaggatgaggcccacaatgcctgtgtcctcaccattagtcccgtgcagcctgaagacgacgcggattactactgctctgttggctacggctttagtccctaggggtggggtgtgagatgggtgcctcccctctgcctcccatttctgcccctgaccttgggtcccttttaaactttctctgagccttgcttcccctctgtaaaatgggttaataatattcaacatgtcaacaaca

SEQ ID NO: 168680 - DNA, 503 bp, Homo sapiens
  Payload ID: 13218
  Gene Symbol: VPREB3
  Gene Name: pre-B lymphocyte 3
  ENST ID: ENST00000398465
  CDS Start-End: 47-370
tatagccttgcagaacttctacttgcctgcctccctgcctctggccatggcctgccggtgcctcagcttccttctgatggggaccttcctgtcaggccaagtggctcaactctcctgcacgctcagcccccagcacgtcaccatcagggactacggtgtgtcctggtaccagcagcgggcaggcagtgcccctcgatatctcctctactaccgctcggaggaggatcaccaccggcctgctgacatccccgatcgattctcggcagccaaggatgaggcccacaatgcctgtgtcctcaccattagtcccgtgcagcctgaagacgacgcggattactactgctctgttggctacggctttagtccctaggggtggggtgtgagatgggtgcctcccctctgcctcccatttctgcccctgaccttgggtcccttttaaactttctctgagccttgcttcccctctgtaaaatgggttaataatattcaacatgtcaacaaca

SEQ ID NO: 168681 - DNA, 734 bp, Homo sapiens
  Payload ID: 13219
  Gene Symbol: PBX1
  Gene Name: pre-B-cell leukemia homeobox 1
  ENST ID: ENST00000340699
  CDS Start-End: 225-734
aatgcatatttgcaaaaggattaagccacagatttaagcgccgggagcccatttctgccttgcaaaggagaccggactgaaaaacctaaagccagctctgatttcttttcgccaagtgggaaggatttgaagacaagcttgaaggataaaaagccttggtgcttcccaggagccgagccgaggagcagaagaggaagagccgggggctgccgtagcctttggagatggacgagcagcccaggctgatgcattcccatgctggggtcgggatggccggacaccccggcctgtcccagcacttgcaggatggggccggagggaccgagggggagggcgggaggaagcaggacattggagacattttacagcaaattatgaccatcacagaccagagtttggatgaggcgcaggccagaaaacatgctttaaactgccacagaatgaagcctgccttgtttaatgtgttgtgtgaaatcaaagaaaaaacagttttgagtatccgaggagcccaggaggaggaacccacagacccccagctgatgcggctggacaacatgctgttagcggaaggcgtggcggggcctgagaagggcggagggtcggcggcagcggcggcagcggcggcggcttctggaggggcaggttcagacaactcagtggagcattcagattacagagccaaactctcacagatcagacaaatctaccatacggagctggagaaatacgagcag

SEQ ID NO: 168682 - DNA, 1459 bp, Homo sapiens
  Payload ID: 13219
  Gene Symbol: PBX1
  Gene Name: pre-B-cell leukemia homeobox 1
  Uniprot ID: P40424
  ENST ID: ENST00000367897
  CDS Start-End: 1-1044
atggacgagcagcccaggctgatgcattcccatgctggggtcgggatggccggacaccccggcctgtcccagcacttgcaggatggggccggagggaccgagggggagggcgggaggaagcaggacattggagacattttacagcaaattatgaccatcacagaccagagtttggatgaggcgcaggccagaaaacatgctttaaactgccacagaatgaagcctgccttgtttaatgtgttgtgtgaaatcaaagaaaaaacagttttgagtatccgaggagcccaggaggaggaacccacagacccccagctgatgcggctggacaacatgctgttagcggaaggcgtggcggggcctgagaagggcggagggtcggcggcagcggcggcagcggcggcggcttctggaggggcaggttcagacaactcagtggagcattcagattacagagccaaactctcacagatcagacaaatctaccatacggagctggagaaatacgagcaggcctgcaacgagttcaccacccacgtgatgaatctcctgcgagagcaaagccggaccaggcccatctccccaaaggagattgagcggatggtcagcatcatccaccgcaagttcagctccatccagatgcagctcaagcagagcacgtgcgaggcggtgatgatcctgcgttcccgatttctggatgcgcggcggaagagacggaatttcaacaagcaagcgacagaaatcctgaatgaatatttctattcccatctcagcaacccttaccccagtgaggaagccaaagaggagttagccaagaagtgtggcatcacagtctcccaggtatcaaactggtttggaaataagcgaatccggtacaagaagaacataggtaaatttcaagaggaagccaatatttatgctgccaaaacagctgtcactgctaccaatgtgtcagcccatggaagccaagctaactcgccctcaactcccaactcggctggtggatacccttcgccatgttatcagccagacaggaggatacagtgatggactcgcagccagtcagatgtacagtccgcagggcatcagtgctaatggaggttggcaggatgctactaccccttcatcagtgacctcccctacagaaggccctggcagtgttcactctgatacctccaactgatctcccagcaatcgcatcccggctgaccctgtgccccagttggggcaggggcaggagggagggtttctctcccaacgctgaagcggtcagactggaggtcgaagcaatcagcaaacacaataagagtctccttctcttctcttctttgggatgctatttcagccaatctggacacttctttatactctcttcccttttttttctgggtagaagccacccttccctgcctccagctgtcagcctggttttcgtcatcttccctgcccctgtgcctctgtc

SEQ ID NO: 168683 - DNA, 6636 bp, Homo sapiens
  Payload ID: 13219
  Gene Symbol: PBX1
  Gene Name: pre-B-cell leukemia homeobox 1
  Uniprot ID: P40424
  ENST ID: ENST00000420696
  CDS Start-End: 189-1481
atcctcccaccatcctctaaagaggcaaagggattttttttttcttttggtcttcttttttcccccttccctgtttatcctgaaaaggatttgaagacaagcttgaaggataaaaagccttggtgcttcccaggagccgagccgaggagcagaagaggaagagccgggggctgccgtagcctttggagatggacgagcagcccaggctgatgcattcccatgctggggtcgggatggccggacaccccggcctgtcccagcacttgcaggatggggccggagggaccgagggggagggcgggaggaagcaggacattggagacattttacagcaaattatgaccatcacagaccagagtttggatgaggcgcaggccagaaaacatgctttaaactgccacagaatgaagcctgccttgtttaatgtgttgtgtgaaatcaaagaaaaaacagttttgagtatccgaggagcccaggaggaggaacccacagacccccagctgatgcggctggacaacatgctgttagcggaaggcgtggcggggcctgagaagggcggagggtcggcggcagcggcggcagcggcggcggcttctggaggggcaggttcagacaactcagtggagcattcagattacagagccaaactctcacagatcagacaaatctaccatacggagctggagaaatacgagcaggcctgcaacgagttcaccacccacgtgatgaatctcctgcgagagcaaagccggaccaggcccatctccccaaaggagattgagcggatggtcagcatcatccaccgcaagttcagctccatccagatgcagctcaagcagagcacgtgcgaggcggtgatgatcctgcgttcccgatttctggatgcgcggcggaagagacggaatttcaacaagcaagcgacagaaatcctgaatgaatatttctattcccatctcagcaacccttaccccagtgaggaagccaaagaggagttagccaagaagtgtggcatcacagtctcccaggtatcaaactggtttggaaataagcgaatccggtacaagaagaacataggtaaatttcaagaggaagccaatatttatgctgccaaaacagctgtcactgctaccaatgtgtcagcccatggaagccaagctaactcgccctcaactcccaactcggctggttcttccagttcttttaacatgtcaaactctggagatttgttcatgagcgtgcagtcactcaatggggattcttaccaaggggcccaggttggagccaacgtgcaatcacaggtggatacccttcgccatgttatcagccagacaggaggatacagtgatggactcgcagccagtcagatgtacagtccgcagggcatcagtgctaatggaggttggcaggatgctactaccccttcatcagtgacctcccctacagaaggccctggcagtgttcactctgatacctccaactgatctcccagcaatcgcatcccggctgaccctgtgccccagttggggcaggggcaggagggagggtttctctcccaacgctgaagcggtcagactggaggtcgaagcaatcagcaaacacaataagagtctccttctcttctcttctttgggatgctatttcagccaatctggacacttctttatactctcttcccttttttttctgggtagaagccacccttccctgcctccagctgtcagcctggttttcgtcatcttccctgcccctgtgcctctgtcctagactcccggggtccccgccctctctcatatcactgaaggatattttcaacaattagaggaatttaaagaggaaaaaaattacaaagaaaataataaaagtgtttgtacgttttcatgctggtggtttgaggagccaaatttacctcactcgaatccctcactccctatgttaacaggcaatccttctctgtttctcttattactctcactacctcttagcaggaatactccacattgccctattcattccaggcctccctgcttcctcttgctcttcctccctggggacagtactgattggaacactttcctcctcttccttcctagccccagctattcactggggactgtcatagctgggattctaaaggtgccacatttttcagtttcatctccactaggttggttcccgggcaggaagtcaggcagcagggaaggacacgggaacagcaggtggagaattcctacagtctttcttaccctgctagcaatagctctcagtttcagaggcacagtctttggagaccattcagcactgagaaagcaatatttagaacctattgcaaaactgggcctgagttaggcatggtgatgaatgcatcagcaaggaatagaaagttcttatcgtgaaacccttcaacctcaactatgccttcatagacacacacgttcatgcacatgtaggcacatgtaccatctcacatcttcactttcccgagatgccatatacaattacctacattaataactgtagcactatgccttttgagcccgagagagggaattagtgactctaagtgaaggtcactgacacagagaagcagtatgtgtctggggcttccaggacctgcaggcccactagcgtgcacttaccagaatggcatacacaggacctgatcatgaggaagaccaggtttccagtgtaaactactcttgttcccaccacctctggagcactcagggagccccatacagtacttacaatgtctttaatggacttgattctgtttaattttttgttttatattaggcacactgtattaattttccaaaatgttataccacactatgttcttggtcctgacctattgctctggaggaaagagttgtataagaacgtggctcatgtgaacttttgctagcttcatttgaggacctgagaatcatggggaaagggaaggtaatgttttcattgaaatcatcacagtgatttttattccctgggaacacagcgtgtactaaaaatacatgagaaaatagcatgtatatgaaagctattctcaaaagtcacctgagctcaccatcttcatagccaaccctaccagttataaagatggcagctctatcacttgattaagtgggaggtggtcaaatattttggtgcctcattttcttcatctgtgagatgggaactgttatgcctggcttactaagagtcttgtgagagactgagaagttgattttgttcatatccaatctgtaaatgcgaagtcaggggaagtaatgtccctgaaataaacgggttcatgccatctagggacaataaatggttttcttgttgtaacttctggttaatatcagtaccttgatgtcatcaccgtgatgacaaagagaagagttattgttgatcttcttggttttggtctgtctcttttcttaggataaagaaaaacttccaaactagaaaaacaggccctggttcccttagtttgcacttgaacccaatatgttgccttgtacatacttggtccctgtcacattgactgcttgggaggcttccagggagaagtatgagaccctgaggggtgagaatgggcagctagcaagaacatggaaattctgcttggcactacagtcataaatagaaaacactgtgtgtgctcaggggagcaggggatgccactgaagaaactcaagggaatgtgtatttgaaggaaatgcaaaaactaagtatttagcaaaatgaaattatgccttgatgactaaaaggcactagaaaggttgtgtctactaacttcagccctaatcagaacagatgcctagaaggagcatttttgtgacaacttcatagtgattagaatcagtggagaactccatcttagtggcaggaatataatgaaactacccacgcaagaacatggttgaatcacatttgcttgacttagggcaaagtacgaaagagagacaaaagggttctcttggaaacaagaagagtgactccagatgtggcctgaataattgccatgttaagttaatgcaaaagatcagaacagggctacatttgcacaggcagtttctctccgggccgtagttttcactgatgatcacctttcacagcattttccccaaccagcatttcacttagtcttctctatacccagcacctcccccggcacccccggcaagcccactatcacttccgacttccaacgtggcatccgtgagatctgtccacattaggcgaagcaggagaacactgagagcagcaggatgggtttggaaagagcatgcctctggaaacacagcttcctgggaattcacatgaggccagtcctacagagagcaagatgcaccccaggatttcttcattttctaatagatgtgggagtgctccattttccccgacagcgaatttcccctgagaaacgatactagaccctgggtttgcccaccttgtaactcttccttatctcctccttttcatccctaatccatcctccctctggcatggaattgacgcccgtgcagtacatttgccaagtggcaccttctttcaatttatgttttattttgctatggtggtgattctttatttgctggttgtcttttctcacacatctttctctctgtctctctctttcctgctctttgtttttctgcccagaaaaacctgacttcgataccaaaaaagatgaaactacagaaactcaaatttaaaaaaaactttaaaagaaacaaaaaaatactcaacgattctttcagctttattaacattttccattgtttcttgcgacttgtgtctcgttctttgtagtattgatgatgaacatttgataatgaatgttcttgtatattcagataaagaaaaaaaaaaccaaaaaagcggtctgaatttaatagtgtttataataaaaattttaaaaatgaccctcatagcacgcaaaacaggatggggaatttcccctcttctttctgtgacaatgcgcatcattcctgcattagtttttaacaccagactacctacattcatcatttccctcatttttcttttattttcttgcatttgtgaattagttcaagaatgctagaaaagtgtcgagttgtgcacatccatttcttgtttcacaatgtttaaaagtgacagtaattcattttgtaaactaaaaaaaaaaaaaaaaaggttggaatagtgagcataataggtacaacctaacacattattatgtttattaactttgagacccagaaataaattcttttcttttcttgattcttgctcttaaaaatacaaaaaaaaaaatgttttgttttgtgttatttttggtttgtttattggggggctttttttaattgtcaggattatgatcttgctgtttttcttcaatatgtatacaaggtgatgtgaaaagatgacttgggcagaggagtaagaacaagtaggcttgttcttctactttgcttcagaattcagttaatgccaaaagcgaagatcaagcccatgttgatgtctcgttgctcacctgcatttccagagagtgtgacactcatgcagtccctgagaaaaataaaatcagggacatacttctccttttagccttttaaaaattcaaaaacgtttagtccaagggaactttttatgctatcaggaaaggtttttgctgtttttgattctgattatcacagccaagtactttgttttatttctccctaattaataactacattccatgaggcctcttccaaccaaagaggccttttcttccaggagagtcccgcaggagatgctggtatgatgggcaccattggttaagtaaactacatgcaggaagaagtccttggggccagtctgccagctgagtcctggttttggatgaagagttaatgagatattgggccaggctcaatgctgtagttttaatgctaagaggttacgtttacttcacagagtacacctcttagtaacctctgacttaggcagctgcttaaagcaaattgcaaaactggcttgatttggaatgtttttattagaggaaaaaagaaagccatattatctggaaaaaaattcattttaaataccatcattcaacaaattatgttcagaaagtggtcagaacttaagcaagaaaagtaaagaaagaatgcagaattgtggagcaatgctttaggaaatatttctacctgaacacttgtactcttgaagtcacaacaaaataatgatgagcttttcacatcacctttatggtttcaatccctagctcaaagcttcctggaatcttttattttttgtaaacttttttttcttttgttaaaataaataaaacattcaatgtttttctccttttctctcttattacttctttcctttggcattttcaatttgaaatgctttcctttggttgttggttttattctccccctacccctccccttttcttattattcagaatataaacctgcaaagctctgctctgttttggttttgaaagtttaagcttttctgcttctgtgagagcacaggcttctgtcccttttgattccaactgaacttttgtgttctctaatgatactaacacggtgtaggttttacagtctcctaatttgtactggtaatgcatattccaaataaatagtttcttttgttgcaaaaaaaaat

SEQ ID NO: 168684 - DNA, 6175 bp, Homo sapiens
  Payload ID: 13219
  Gene Symbol: PBX1
  Gene Name: pre-B-cell leukemia homeobox 1
  ENST ID: ENST00000540236
  CDS Start-End: 2-1030
agttttgagtatccgaggagcccaggaggaggaacccacagacccccagctgatgcggctggacaacatgctgttagcggaaggcgtggcggggcctgagaagggcggagggtcggcggcagcggcggcagcggcggcggcttctggaggggcaggttcagacaactcagtggagcattcagattacagagccaaactctcacagatcagacaaatctaccatacggagctggagaaatacgagcaggcctgcaacgagttcaccacccacgtgatgaatctcctgcgagagcaaagccggaccaggcccatctccccaaaggagattgagcggatggtcagcatcatccaccgcaagttcagctccatccagatgcagctcaagcagagcacgtgcgaggcggtgatgatcctgcgttcccgatttctggatgcgcggcggaagagacggaatttcaacaagcaagcgacagaaatcctgaatgaatatttctattcccatctcagcaacccttaccccagtgaggaagccaaagaggagttagccaagaagtgtggcatcacagtctcccaggtatcaaactggtttggaaataagcgaatccggtacaagaagaacataggtaaatttcaagaggaagccaatatttatgctgccaaaacagctgtcactgctaccaatgtgtcagcccatggaagccaagctaactcgccctcaactcccaactcggctggttcttccagttcttttaacatgtcaaactctggagatttgttcatgagcgtgcagtcactcaatggggattcttaccaaggggcccaggttggagccaacgtgcaatcacaggtggatacccttcgccatgttatcagccagacaggaggatacagtgatggactcgcagccagtcagatgtacagtccgcagggcatcagtgctaatggaggttggcaggatgctactaccccttcatcagtgacctcccctacagaaggccctggcagtgttcactctgatacctccaactgatctcccagcaatcgcatcccggctgaccctgtgccccagttggggcaggggcaggagggagggtttctctcccaacgctgaagcggtcagactggaggtcgaagcaatcagcaaacacaataagagtctccttctcttctcttctttgggatgctatttcagccaatctggacacttctttatactctcttcccttttttttctgggtagaagccacccttccctgcctccagctgtcagcctggttttcgtcatcttccctgcccctgtgcctctgtcctagactcccggggtccccgccctctctcatatcactgaaggatattttcaacaattagaggaatttaaagaggaaaaaaattacaaagaaaataataaaagtgtttgtacgttttcatgctggtggtttgaggagccaaatttacctcactcgaatccctcactccctatgttaacaggcaatccttctctgtttctcttattactctcactacctcttagcaggaatactccacattgccctattcattccaggcctccctgcttcctcttgctcttcctccctggggacagtactgattggaacactttcctcctcttccttcctagccccagctattcactggggactgtcatagctgggattctaaaggtgccacatttttcagtttcatctccactaggttggttcccgggcaggaagtcaggcagcagggaaggacacgggaacagcaggtggagaattcctacagtctttcttaccctgctagcaatagctctcagtttcagaggcacagtctttggagaccattcagcactgagaaagcaatatttagaacctattgcaaaactgggcctgagttaggcatggtgatgaatgcatcagcaaggaatagaaagttcttatcgtgaaacccttcaacctcaactatgccttcatagacacacacgttcatgcacatgtaggcacatgtaccatctcacatcttcactttcccgagatgccatatacaattacctacattaataactgtagcactatgccttttgagcccgagagagggaattagtgactctaagtgaaggtcactgacacagagaagcagtatgtgtctggggcttccaggacctgcaggcccactagcgtgcacttaccagaatggcatacacaggacctgatcatgaggaagaccaggtttccagtgtaaactactcttgttcccaccacctctggagcactcagggagccccatacagtacttacaatgtctttaatggacttgattctgtttaattttttgttttatattaggcacactgtattaattttccaaaatgttataccacactatgttcttggtcctgacctattgctctggaggaaagagttgtataagaacgtggctcatgtgaacttttgctagcttcatttgaggacctgagaatcatggggaaagggaaggtaatgttttcattgaaatcatcacagtgatttttattccctgggaacacagcgtgtactaaaaatacatgagaaaatagcatgtatatgaaagctattctcaaaagtcacctgagctcaccatcttcatagccaaccctaccagttataaagatggcagctctatcacttgattaagtgggaggtggtcaaatattttggtgcctcattttcttcatctgtgagatgggaactgttatgcctggcttactaagagtcttgtgagagactgagaagttgattttgttcatatccaatctgtaaatgcgaagtcaggggaagtaatgtccctgaaataaacgggttcatgccatctagggacaataaatggttttcttgttgtaacttctggttaatatcagtaccttgatgtcatcaccgtgatgacaaagagaagagttattgttgatcttcttggttttggtctgtctcttttcttaggataaagaaaaacttccaaactagaaaaacaggccctggttcccttagtttgcacttgaacccaatatgttgccttgtacatacttggtccctgtcacattgactgcttgggaggcttccagggagaagtatgagaccctgaggggtgagaatgggcagctagcaagaacatggaaattctgcttggcactacagtcataaatagaaaacactgtgtgtgctcaggggagcaggggatgccactgaagaaactcaagggaatgtgtatttgaaggaaatgcaaaaactaagtatttagcaaaatgaaattatgccttgatgactaaaaggcactagaaaggttgtgtctactaacttcagccctaatcagaacagatgcctagaaggagcatttttgtgacaacttcatagtgattagaatcagtggagaactccatcttagtggcaggaatataatgaaactacccacgcaagaacatggttgaatcacatttgcttgacttagggcaaagtacgaaagagagacaaaagggttctcttggaaacaagaagagtgactccagatgtggcctgaataattgccatgttaagttaatgcaaaagatcagaacagggctacatttgcacaggcagtttctctccgggccgtagttttcactgatgatcacctttcacagcattttccccaaccagcatttcacttagtcttctctatacccagcacctcccccggcacccccggcaagcccactatcacttccgacttccaacgtggcatccgtgagatctgtccacattaggcgaagcaggagaacactgagagcagcaggatgggtttggaaagagcatgcctctggaaacacagcttcctgggaattcacatgaggccagtcctacagagagcaagatgcaccccaggatttcttcattttctaatagatgtgggagtgctccattttccccgacagcgaatttcccctgagaaacgatactagaccctgggtttgcccaccttgtaactcttccttatctcctccttttcatccctaatccatcctccctctggcatggaattgacgcccgtgcagtacatttgccaagtggcaccttctttcaatttatgttttattttgctatggtggtgattctttatttgctggttgtcttttctcacacatctttctctctgtctctctctttcctgctctttgtttttctgcccagaaaaacctgacttcgataccaaaaaagatgaaactacagaaactcaaatttaaaaaaaactttaaaagaaacaaaaaaatactcaacgattctttcagctttattaacattttccattgtttcttgcgacttgtgtctcgttctttgtagtattgatgatgaacatttgataatgaatgttcttgtatattcagataaagaaaaaaaaaaccaaaaaagcggtctgaatttaatagtgtttataataaaaattttaaaaatgaccctcatagcacgcaaaacaggatggggaatttcccctcttctttctgtgacaatgcgcatcattcctgcattagtttttaacaccagactacctacattcatcatttccctcatttttcttttattttcttgcatttgtgaattagttcaagaatgctagaaaagtgtcgagttgtgcacatccatttcttgtttcacaatgtttaaaagtgacagtaattcattttgtaaactaaaaaaaaaaaaaaaaaggttggaatagtgagcataataggtacaacctaacacattattatgtttattaactttgagacccagaaataaattcttttcttttcttgattcttgctcttaaaaatacaaaaaaaaaaatgttttgttttgtgttatttttggtttgtttattggggggctttttttaattgtcaggattatgatcttgctgtttttcttcaatatgtatacaaggtgatgtgaaaagatgacttgggcagaggagtaagaacaagtaggcttgttcttctactttgcttcagaattcagttaatgccaaaagcgaagatcaagcccatgttgatgtctcgttgctcacctgcatttccagagagtgtgacactcatgcagtccctgagaaaaataaaatcagggacatacttctccttttagccttttaaaaattcaaaaacgtttagtccaagggaactttttatgctatcaggaaaggtttttgctgtttttgattctgattatcacagccaagtactttgttttatttctccctaattaataactacattccatgaggcctcttccaaccaaagaggccttttcttccaggagagtcccgcaggagatgctggtatgatgggcaccattggttaagtaaactacatgcaggaagaagtccttggggccagtctgccagctgagtcctggttttggatgaagagttaatgagatattgggccaggctcaatgctgtagttttaatgctaagaggttacgtttacttcacagagtacacctcttagtaacctctgacttaggcagctgcttaaagcaaattgcaaaactggcttgatttggaatgtttttattagaggaaaaaagaaagccatattatctggaaaaaaattcattttaaataccatcattcaacaaattatgttcagaaagtggtcagaacttaagcaagaaaagtaaagaaagaatgcagaattgtggagcaatgctttaggaaatatttctacctgaacacttgtactcttgaagtcacaacaaaataatgatgagcttttcacatcacctttatggtttcaatccctagctcaaagcttcctggaatcttttattttttgtaaacttttttttcttttgttaaaataaataaaacattcaatgtttttctccttttctctcttattacttctttcctttggcattttcaatttgaaatgctttcctttggttgttggttttattctccccctacccctccccttttcttattattcagaatataaacctgcaaagctctgctctgttttggttttgaaagtttaagcttttctgcttctgtgagagcacaggcttctgtcccttttgattccaactgaacttttgtgttctctaatgatactaacacggtgtaggttttacagtctcctaatttgtactggtaatgcatattccaaataaatagtttcttttgttgc

SEQ ID NO: 168685 - DNA, 3225 bp, Homo sapiens
  Payload ID: 13219
  Gene Symbol: PBX1
  Gene Name: pre-B-cell leukemia homeobox 1
  ENST ID: ENST00000560641
  CDS Start-End: 402-1379
agagtactctcctctgcttctacctccgggaaccccgttaccccccagcccacacaccaccaccccagttttgggtggggagaaggcaaagagtgggaagataagaacacatgtagagatgataaaatgtcattggctccaagagacaagcttccgaaatccatggtggttgaagaacatcaaagaggagcaattatttcagtcattagggcagttccacctgttctaattgaacatttttaggatgtagaagatgcatcatacattggtatctattcagaaggtggggacatctgctgtctgtcatgtatctgggagatgtttatctcaacaggaggcaataataatatgttttgagtatccgaggagcccaggaggaggaacccacagacccccagctgatgcggctggacaacatgctgttagcggaaggcgtggcggggcctgagaagggcggagggtcggcggcagcggcggcagcggcggcggcttctggaggggcaggttcagacaactcagtggagcattcagattacagagccaaactctcacagatcagacaaatctaccatacggagctggagaaatacgagcaggcctgcaacgagttcaccacccacgtgatgaatctcctgcgagagcaaagccggaccaggcccatctccccaaaggagattgagcggatggtcagcatcatccaccgcaagttcagctccatccagatgcagctcaagcagagcacgtgcgaggcggtgatgatcctgcgttcccgatttctggatgcgcggcggaagagacggaatttcaacaagcaagcgacagaaatcctgaatgaatatttctattcccatctcagcaacccttaccccagtgaggaagccaaagaggagttagccaagaagtgtggcatcacagtctcccaggtatcaaactggtttggaaataagcgaatccggtacaagaagaacataggtaaatttcaagaggaagccaatatttatgctgccaaaacagctgtcactgctaccaatgtgtcagcccatggaagccaagctaactcgccctcaactcccaactcggctggttcttccagttcttttaacatgtcaaactctggagatttgttcatgagcgtgcagtcactcaatggggattcttaccaaggggcccaggttggagccaacgtgcaatcacaggtggatacccttcgccatgttatcagccagacaggaggatacagtgatggactcgcagccagtcagatgtacagtccgcagggcatcagtgctaatggaggttggcaggatgctactaccccttcatcagtgacctcccctacagaaggccctggcagtgttcactctgatacctccaactgatctcccagcaatcgcatcccggctgaccctgtgccccagttggggcaggggcaggagggagggtttctctcccaacgctgaagcggtcagactggaggtcgaagcaatcagcaaacacaataagagtctccttctcttctcttctttgggatgctatttcagccaatctggacacttctttatactctcttcccttttttttctgggtagaagccacccttccctgcctccagctgtcagcctggttttcgtcatcttccctgcccctgtgcctctgtcctagactcccggggtccccgccctctctcatatcactgaaggatattttcaacaattagaggaatttaaagaggaaaaaaattacaaagaaaataataaaagtgtttgtacgttttcatgctggtggtttgaggagccaaatttacctcactcgaatccctcactccctatgttaacaggcaatccttctctgtttctcttattactctcactacctcttagcaggaatactccacattgccctattcattccaggcctccctgcttcctcttgctcttcctccctggggacagtactgattggaacactttcctcctcttccttcctagccccagctattcactggggactgtcatagctgggattctaaaggtgccacatttttcagtttcatctccactaggttggttcccgggcaggaagtcaggcagcagggaaggacacgggaacagcaggtggagaattcctacagtctttcttaccctgctagcaatagctctcagtttcagaggcacagtctttggagaccattcagcactgagaaagcaatatttagaacctattgcaaaactgggcctgagttaggcatggtgatgaatgcatcagcaaggaatagaaagttcttatcgtgaaacccttcaacctcaactatgccttcatagacacacacgttcatgcacatgtaggcacatgtaccatctcacatcttcactttcccgagatgccatatacaattacctacattaataactgtagcactatgccttttgagcccgagagagggaattagtgactctaagtgaaggtcactgacacagagaagcagtatgtgtctggggcttccaggacctgcaggcccactagcgtgcacttaccagaatggcatacacaggacctgatcatgaggaagaccaggtttccagtgtaaactactcttgttcccaccacctctggagcactcagggagccccatacagtacttacaatgtctttaatggacttgattctgtttaattttttgttttatattaggcacactgtattaattttccaaaatgttataccacactatgttcttggtcctgacctattgctctggaggaaagagttgtataagaacgtggctcatgtgaacttttgctagcttcatttgaggacctgagaatcatggggaaagggaaggtaatgttttcattgaaatcatcacagtgatttttattccctgggaacacagcgtgtactaaaaatacatgagaaaatagcatgtatatgaaagctattctcaaaagtcacctgagctcaccatcttcatagccaaccctaccagttataaagatggcagctctatcacttgattaagtgggaggtggtcaaatattttggtgcctcattttcttcatctgtgagatgggaactgttatgcctggcttactaagagtcttgtgagagactgagaagttgattttgttcatatccaatctgtaaatgcgaagtcaggggaagtaatgtccctgaaataaacgggttcatgccatctagggacaataaatggttttcttgttgtaa

SEQ ID NO: 168686 - DNA, 630 bp, Homo sapiens
  Payload ID: 13219
  Gene Symbol: PBX1
  Gene Name: pre-B-cell leukemia homeobox 1
  ENST ID: ENST00000559578
  CDS Start-End: 152-630
gaattaaatttgaaaacacacagaccgagaggcagacagttcctaggctgtggtcgttgcatggattttacaaaactgttaacctacacctttggctttgctgtgttcattgtcctgggaagaattaaaacatgctttaaactgccacagaatgaagcctgccttgtttaatgtgttgtgtgaaatcaaagaaaaaacagttttgagtatccgaggagcccaggaggaggaacccacagacccccagctgatgcggctggacaacatgctgttagcggaaggcgtggcggggcctgagaagggcggagggtcggcggcagcggcggcagcggcggcggcttctggaggggcaggttcagacaactcagtggagcattcagattacagagccaaactctcacagatcagacaaatctaccatacggagctggagaaatacgagcaggcctgcaacgagttcaccacccacgtgatgaatctcctgcgagagcaaagccggaccaggcccatctccccaaaggagattgagcggatggtcagcatcatccaccgcaagttcagctccatccagatgcagctcaagcagagcacgtgcgaggcggtgatgatcctgcgttcccgatttctgga

SEQ ID NO: 168687 - DNA, 572 bp, Homo sapiens
  Payload ID: 13219
  Gene Symbol: PBX1
  Gene Name: pre-B-cell leukemia homeobox 1
  ENST ID: ENST00000482110
  CDS Start-End: 187-572
gataatgaactagcacatgggctgcatcaggaagccctggggacctcgcagaagttgagagtgtggagtgggagaatgggaggagtaatatattaaccttactgatacacaaagttgctccttctttttcttgcagttttgagtatccgaggagcccaggaggaggaacccacagacccccagctgatgcggctggacaacatgctgttagcggaaggcgtggcggggcctgagaagggcggagggtcggcggcagcggcggcagcggcggcggcttctggaggggcaggttcagacaactcagtggagcattcagattacagagccaaactctcacagatcagacaaatctaccatacggagctggagaaatacgagcaggcctgcaacgagttcaccacccacgtgatgaatctcctgcgagagcaaagccggaccaggcccatctccccaaaggagattgagcggatggtcagcatcatccaccgcaagttcagctccatccagatgcagctcaagcagagcacgtgcgaggcggtgatgatcctgcgttcccgatttctggatgcgcg

SEQ ID NO: 168688 - DNA, 2866 bp, Homo sapiens
  Payload ID: 13219
  Gene Symbol: PBX1
  Gene Name: pre-B-cell leukemia homeobox 1
  ENST ID: ENST00000559240
  CDS Start-End: 1-1020
atggacgagcagcccaggctgatgcattcccatgctggggtcgggatggccggacaccccggcctgtcccagcacttgcaggatggggccggagggaccgagggggagggcgggaggaagcaggacattggagacattttacagcaaattatgaccatcacagaccagagtttggatgaggcgcaggccagaaaacatgctttaaactgccacagaatgaagcctgccttgtttaatgtgttgtgtgaaatcaaagaaaaaacagttttgagtatccgaggagcccaggaggaggaacccacagacccccagctgatgcggctggacaacatgctgttagcggaaggcgtggcggggcctgagaagggcggagggtcggcggcagcggcggcagcggcggcggcttctggaggggcaggttcagacaactcagtggagcattcagattacagagccaaactctcacagatcagacaaatctaccatacggagctggagaaatacgagcaggcctgcaacgagttcaccacccacgtgatgaatctcctgcgagagcaaagccggaccaggcccatctccccaaaggagattgagcggatggtcagcatcatccaccgcaagttcagctccatccagatgcagctcaagcagagcacgtgcgaggcggtgatgatcctgcgttcccgatttctggatgcgcggcggaagagacggaatttcaacaagcaagcgacagaaatcctgaatgaatatttctattcccatctcagcaacccttaccccagtgaggaagccaaagaggagttagccaagaagtgtggcatcacagtctcccaggtggatacccttcgccatgttatcagccagacaggaggatacagtgatggactcgcagccagtcagatgtacagtccgcagggcatcagtgctaatggaggttggcaggatgctactaccccttcatcagtgacctcccctacagaaggccctggcagtgttcactctgatacctccaactgatctcccagcaatcgcatcccggctgaccctgtgccccagttggggcaggggcaggagggagggtttctctcccaacgctgaagcggtcagactggaggtcgaagcaatcagcaaacacaataagagtctccttctcttctcttctttgggatgctatttcagccaatctggacacttctttatactctcttcccttttttttctgggtagaagccacccttccctgcctccagctgtcagcctggttttcgtcatcttccctgcccctgtgcctctgtcctagactcccggggtccccgccctctctcatatcactgaaggatattttcaacaattagaggaatttaaagaggaaaaaaattacaaagaaaataataaaagtgtttgtacgttttcatgctggtggtttgaggagccaaatttacctcactcgaatccctcactccctatgttaacaggcaatccttctctgtttctcttattactctcactacctcttagcaggaatactccacattgccctattcattccaggcctccctgcttcctcttgctcttcctccctggggacagtactgattggaacactttcctcctcttccttcctagccccagctattcactggggactgtcatagctgggattctaaaggtgccacatttttcagtttcatctccactaggttggttcccgggcaggaagtcaggcagcagggaaggacacgggaacagcaggtggagaattcctacagtctttcttaccctgctagcaatagctctcagtttcagaggcacagtctttggagaccattcagcactgagaaagcaatatttagaacctattgcaaaactgggcctgagttaggcatggtgatgaatgcatcagcaaggaatagaaagttcttatcgtgaaacccttcaacctcaactatgccttcatagacacacacgttcatgcacatgtaggcacatgtaccatctcacatcttcactttcccgagatgccatatacaattacctacattaataactgtagcactatgccttttgagcccgagagagggaattagtgactctaagtgaaggtcactgacacagagaagcagtatgtgtctggggcttccaggacctgcaggcccactagcgtgcacttaccagaatggcatacacaggacctgatcatgaggaagaccaggtttccagtgtaaactactcttgttcccaccacctctggagcactcagggagccccatacagtacttacaatgtctttaatggacttgattctgtttaattttttgttttatattaggcacactgtattaattttccaaaatgttataccacactatgttcttggtcctgacctattgctctggaggaaagagttgtataagaacgtggctcatgtgaacttttgctagcttcatttgaggacctgagaatcatggggaaagggaaggtaatgttttcattgaaatcatcacagtgatttttattccctgggaacacagcgtgtactaaaaatacatgagaaaatagcatgtatatgaaagctattctcaaaagtcacctgagctcaccatcttcatagccaaccctaccagttataaagatggcagctctatcacttgattaagtgggaggtggtcaaatattttggtgcctcattttcttcatctgtgagatgggaactgttatgcctggcttactaagagtcttgtgagagactgagaagttgattttgttcatatccaatctgtaaatgcgaagtcaggggaagtaatgtccctgaaataaacgggttcatgccatctagggacaataaatggttttcttgttgtaa

SEQ ID NO: 168689 - DNA, 454 bp, Homo sapiens
  Payload ID: 13219
  Gene Symbol: PBX1
  Gene Name: pre-B-cell leukemia homeobox 1
  ENST ID: ENST00000559560
  CDS Start-End: 162-454
aaagaacagcaggagacaagtggtgagagcagctcccacaatgctgtgacagtccctttatcttaggacttttaccaaagaattaaccccagggcaagcgatggcagcaagttttgagtatccgaggagcccaggaggaggaacccacagacccccagctgatgcggctggacaacatgctgttagcggaaggcgtggcggggcctgagaagggcggagggtcggcggcagcggcggcagcggcggcggcttctggaggggcaggttcagacaactcagtggagcattcagattacagagccaaactctcacagatcagacaaatctaccatacggagctggagaaatacgagcaggcctgcaacgagttcaccacccacgtgatgaatctcctgcgagagcaaagccggaccaggcccatctccccaaaggagattgagcggatggtcagcat

SEQ ID NO: 168690 - DNA, 577 bp, Homo sapiens
  Payload ID: 13219
  Gene Symbol: PBX1
  Gene Name: pre-B-cell leukemia homeobox 1
  ENST ID: ENST00000558837
  CDS Start-End: 162-577
gagtgtctgatttctcagatatgaccatatccagttctgggctccagccctgacctgttccttggctatcagaactatcataaggccagatcagcttaactcatctccaagttttgagtatccgaggagcccaggaggaggaacccacagacccccagctgatgcggctggacaacatgctgttagcggaaggcgtggcggggcctgagaagggcggagggtcggcggcagcggcggcagcggcggcggcttctggaggggcaggttcagacaactcagtggagcattcagattacagagccaaactctcacagatcagacaaatctaccatacggagctggagaaatacgagcaggcctgcaacgagttcaccacccacgtgatgaatctcctgcgagagcaaagccggaccaggcccatctccccaaaggagattgagcggatggtcagcatcatccaccgcaagttcagctccatccagatgcagctcaagcagagcacgtgcgaggcggtgatgatcctgcgttcccgatttctggatgcgcggcggaagagacggaatttcaacaagcaagc

SEQ ID NO: 168691 - DNA, 834 bp, Homo sapiens
  Payload ID: 13219
  Gene Symbol: PBX1
  Gene Name: pre-B-cell leukemia homeobox 1
  ENST ID: ENST00000485769
  CDS Start-End: 432-644
ctgacggggctgctggagtttgcagagacacggaggaggagagagcctgtgctttgcctgccgccgcggctgggggagatctggcttttgcaacagcccaccccctttgagatcactctggcccggagtgggggtggggggcagcggggggtggggggggaaagtttgcattgcaatccccctgccttcctctcctttctcccgatcaatgcatatttgcaaaaggattaagccacagatttaagcgccgggagcccatttctgccttgcaaaggagaccggactgaaaaacctaaagccagctctgatttcttttcgccaagtgggaaggatttgaagacaagcttgaaggataaaaagccttggtgcttcccaggagccgagccgaggagcagaagaggaagagccgggggctgccgtagcctttggagatggacgagcagcccaggctgatgcattcccatgctggggtcgggatggccggacaccccggcctgtcccagcacttgcaggatggggccggagggaccgagggggagggcgggaggaagcaggacattggagacattttacagcaaattatgaccatcacagaccagagtttggatgaggcgcaggccagcaactacatggcggaggagtaaaatttgaaggagcgttgttatcgaaagtgtaatcgcccatgccgagatgtggctgtgtacatatttgtgtgtgtgtgtgtgaatataggggtattcatttatatccacacaaacacacaggcatgccgaaaatactgccaactgatccaaaagcggccctcggcactttttactgctttaaaaaagtatc

SEQ ID NO: 168692 - DNA, 6062 bp, Homo sapiens
  Payload ID: 13219
  Gene Symbol: PBX1
  Gene Name: pre-B-cell leukemia homeobox 1
  ENST ID: ENST00000612123
  CDS Start-End: 2-781
agttttgagtatccgaggagcccaggaggaggaacccacagacccccagctgatgcggctggacaacatgctgttagcggaaggcgtggcggggcctgagaagggcggagggtcggcggcagcggcggcagcggcggcggcttctggaggggcaggttcagacaactcagtggagcattcagattacagagccaaactctcacagatcagacaaatctaccatacggagctggagaaatacgagcaggcctgcaacgagttcaccacccacgtgatgaatctcctgcgagagcaaagccggaccaggcccatctccccaaaggagattgagcggatggtcagcatcatccaccgcaagttcagctccatccagatgcagctcaagcagagcacgtgcgaggcggtgatgatcctgcgttcccgatttctggatgcgcggcggaagagacggaatttcaacaagcaagcgacagaaatcctgaatgaatatttctattcccatctcagcaacccttaccccagtgaggaagccaaagaggagttagccaagaagtgtggcatcacagtctcccaggtatcaaactggtttggaaataagcgaatccggtacaagaagaacataggtaaatttcaagaggaagccaatatttatgctgccaaaacagctgtcactgctaccaatgtgtcagcccatggaagccaagctaactcgccctcaactcccaactcggctggtggatacccttcgccatgttatcagccagacaggaggatacagtgatggactcgcagccagtcagatgtacagtccgcagggcatcagtgctaatggaggttggcaggatgctactaccccttcatcagtgacctcccctacagaaggccctggcagtgttcactctgatacctccaactgatctcccagcaatcgcatcccggctgaccctgtgccccagttggggcaggggcaggagggagggtttctctcccaacgctgaagcggtcagactggaggtcgaagcaatcagcaaacacaataagagtctccttctcttctcttctttgggatgctatttcagccaatctggacacttctttatactctcttcccttttttttctgggtagaagccacccttccctgcctccagctgtcagcctggttttcgtcatcttccctgcccctgtgcctctgtcctagactcccggggtccccgccctctctcatatcactgaaggatattttcaacaattagaggaatttaaagaggaaaaaaattacaaagaaaataataaaagtgtttgtacgttttcatgctggtggtttgaggagccaaatttacctcactcgaatccctcactccctatgttaacaggcaatccttctctgtttctcttattactctcactacctcttagcaggaatactccacattgccctattcattccaggcctccctgcttcctcttgctcttcctccctggggacagtactgattggaacactttcctcctcttccttcctagccccagctattcactggggactgtcatagctgggattctaaaggtgccacatttttcagtttcatctccactaggttggttcccgggcaggaagtcaggcagcagggaaggacacgggaacagcaggtggagaattcctacagtctttcttaccctgctagcaatagctctcagtttcagaggcacagtctttggagaccattcagcactgagaaagcaatatttagaacctattgcaaaactgggcctgagttaggcatggtgatgaatgcatcagcaaggaatagaaagttcttatcgtgaaacccttcaacctcaactatgccttcatagacacacacgttcatgcacatgtaggcacatgtaccatctcacatcttcactttcccgagatgccatatacaattacctacattaataactgtagcactatgccttttgagcccgagagagggaattagtgactctaagtgaaggtcactgacacagagaagcagtatgtgtctggggcttccaggacctgcaggcccactagcgtgcacttaccagaatggcatacacaggacctgatcatgaggaagaccaggtttccagtgtaaactactcttgttcccaccacctctggagcactcagggagccccatacagtacttacaatgtctttaatggacttgattctgtttaattttttgttttatattaggcacactgtattaattttccaaaatgttataccacactatgttcttggtcctgacctattgctctggaggaaagagttgtataagaacgtggctcatgtgaacttttgctagcttcatttgaggacctgagaatcatggggaaagggaaggtaatgttttcattgaaatcatcacagtgatttttattccctgggaacacagcgtgtactaaaaatacatgagaaaatagcatgtatatgaaagctattctcaaaagtcacctgagctcaccatcttcatagccaaccctaccagttataaagatggcagctctatcacttgattaagtgggaggtggtcaaatattttggtgcctcattttcttcatctgtgagatgggaactgttatgcctggcttactaagagtcttgtgagagactgagaagttgattttgttcatatccaatctgtaaatgcgaagtcaggggaagtaatgtccctgaaataaacgggttcatgccatctagggacaataaatggttttcttgttgtaacttctggttaatatcagtaccttgatgtcatcaccgtgatgacaaagagaagagttattgttgatcttcttggttttggtctgtctcttttcttaggataaagaaaaacttccaaactagaaaaacaggccctggttcccttagtttgcacttgaacccaatatgttgccttgtacatacttggtccctgtcacattgactgcttgggaggcttccagggagaagtatgagaccctgaggggtgagaatgggcagctagcaagaacatggaaattctgcttggcactacagtcataaatagaaaacactgtgtgtgctcaggggagcaggggatgccactgaagaaactcaagggaatgtgtatttgaaggaaatgcaaaaactaagtatttagcaaaatgaaattatgccttgatgactaaaaggcactagaaaggttgtgtctactaacttcagccctaatcagaacagatgcctagaaggagcatttttgtgacaacttcatagtgattagaatcagtggagaactccatcttagtggcaggaatataatgaaactacccacgcaagaacatggttgaatcacatttgcttgacttagggcaaagtacgaaagagagacaaaagggttctcttggaaacaagaagagtgactccagatgtggcctgaataattgccatgttaagttaatgcaaaagatcagaacagggctacatttgcacaggcagtttctctccgggccgtagttttcactgatgatcacctttcacagcattttccccaaccagcatttcacttagtcttctctatacccagcacctcccccggcacccccggcaagcccactatcacttccgacttccaacgtggcatccgtgagatctgtccacattaggcgaagcaggagaacactgagagcagcaggatgggtttggaaagagcatgcctctggaaacacagcttcctgggaattcacatgaggccagtcctacagagagcaagatgcaccccaggatttcttcattttctaatagatgtgggagtgctccattttccccgacagcgaatttcccctgagaaacgatactagaccctgggtttgcccaccttgtaactcttccttatctcctccttttcatccctaatccatcctccctctggcatggaattgacgcccgtgcagtacatttgccaagtggcaccttctttcaatttatgttttattttgctatggtggtgattctttatttgctggttgtcttttctcacacatctttctctctgtctctctctttcctgctctttgtttttctgcccagaaaaacctgacttcgataccaaaaaagatgaaactacagaaactcaaatttaaaaaaaactttaaaagaaacaaaaaaatactcaacgattctttcagctttattaacattttccattgtttcttgcgacttgtgtctcgttctttgtagtattgatgatgaacatttgataatgaatgttcttgtatattcagataaagaaaaaaaaaaccaaaaaagcggtctgaatttaatagtgtttataataaaaattttaaaaatgaccctcatagcacgcaaaacaggatggggaatttcccctcttctttctgtgacaatgcgcatcattcctgcattagtttttaacaccagactacctacattcatcatttccctcatttttcttttattttcttgcatttgtgaattagttcaagaatgctagaaaagtgtcgagttgtgcacatccatttcttgtttcacaatgtttaaaagtgacagtaattcattttgtaaactaaaaaaaaaaaaaaaaaggttggaatagtgagcataataggtacaacctaacacattattatgtttattaactttgagacccagaaataaattcttttcttttcttgattcttgctcttaaaaatacaaaaaaaaaaatgttttgttttgtgttatttttggtttgtttattggggggctttttttaattgtcaggattatgatcttgctgtttttcttcaatatgtatacaaggtgatgtgaaaagatgacttgggcagaggagtaagaacaagtaggcttgttcttctactttgcttcagaattcagttaatgccaaaagcgaagatcaagcccatgttgatgtctcgttgctcacctgcatttccagagagtgtgacactcatgcagtccctgagaaaaataaaatcagggacatacttctccttttagccttttaaaaattcaaaaacgtttagtccaagggaactttttatgctatcaggaaaggtttttgctgtttttgattctgattatcacagccaagtactttgttttatttctccctaattaataactacattccatgaggcctcttccaaccaaagaggccttttcttccaggagagtcccgcaggagatgctggtatgatgggcaccattggttaagtaaactacatgcaggaagaagtccttggggccagtctgccagctgagtcctggttttggatgaagagttaatgagatattgggccaggctcaatgctgtagttttaatgctaagaggttacgtttacttcacagagtacacctcttagtaacctctgacttaggcagctgcttaaagcaaattgcaaaactggcttgatttggaatgtttttattagaggaaaaaagaaagccatattatctggaaaaaaattcattttaaataccatcattcaacaaattatgttcagaaagtggtcagaacttaagcaagaaaagtaaagaaagaatgcagaattgtggagcaatgctttaggaaatatttctacctgaacacttgtactcttgaagtcacaacaaaataatgatgagcttttcacatcacctttatggtttcaatccctagctcaaagcttcctggaatcttttattttttgtaaacttttttttcttttgttaaaataaataaaacattcaatgtttttctccttttctctcttattacttctttcctttggcattttcaatttgaaatgctttcctttggttgttggttttattctccccctacccctccccttttcttattattcagaatataaacctgcaaagctctgctctgttttggttttgaaagtttaagcttttctgcttctgtgagagcacaggcttctgtcccttttgattccaactgaacttttgtgttctctaatgatactaacacggtgtaggttttacagtctcctaatttgtactggtaatgcatattccaaataaatagtttcttttgttgc

SEQ ID NO: 168693 - DNA, 1769 bp, Homo sapiens
  Payload ID: 13219
  Gene Symbol: PBX1
  Gene Name: pre-B-cell leukemia homeobox 1
  Uniprot ID: P40424
  ENST ID: ENST00000627490
  CDS Start-End: 80-1342
ataaaaagccttggtgcttcccaggagccgagccgaggagcagaagaggaagagccgggggctgccgtagcctttggagatggacgagcagcccaggctgatgcattcccatgctggggtcgggatggccggacaccccggcctgtcccagcacttgcaggatggggccggagggaccgagggggagggcgggaggaagcaggacattggagacattttacagcaaattatgaccatcacagaccagagtttggatgaggcgcaggccagaaaacatgctttaaactgccacagaatgaagcctgccttgtttaatgtgttgtgtgaaatcaaagaaaaaacagttttgagtatccgaggagcccaggaggaggaacccacagacccccagctgatgcggctggacaacatgctgttagcggaaggcgtggcggggcctgagaagggcggagggtcggcggcagcggcggcagcggcggcggcttctggaggggcaggttcagacaactcagtggagcattcagattacagagccaaactctcacagatcagacaaatctaccatacggagctggagaaatacgagcaggcctgcaacgagttcaccacccacgtgatgaatctcctgcgagagcaaagccggaccaggcccatctccccaaaggagattgagcggatggtcagcatcatccaccgcaagttcagctccatccagatgcagctcaagcagagcacgtgcgaggcggtgatgatcctgcgttcccgatttctggatgcgcggcggaagagacggaatttcaacaagcaagcgacagaaatcctgaatgaatatttctattcccatctcagcaacccttaccccagtgaggaagccaaagaggagttagccaagaagtgtggcatcacagtctcccaggtatcaaactggtttggaaataagcgaatccggtacaagaagaacataggtaaatttcaagaggaagccaatatttatgctgccaaaacagctgtcactgctaccaatgtgtcagcccatggaagccaagctaactcgccctcaactcccaactcggctggttcttccagttcttttaacatgtcaaactctggagatttgttcatgagcgtgcagtcactcaatggggattcttaccaaggggcccaggttggagccaacgtgcaatcacaggtggatacccttcgccatgttatcagccagacaggaggatacagtgatggactcgcagccagtcagatgtacagtccgcagggcatcagtcacctcccccggcacccccggcaagcccactatcacttccgacttccaacgtggcatccgtgagatctgtccacattaggcgaagcaggagaacactgagagcagcaggatgggtttggaaagagcatgcctctggaaacacagcttcctgggaattcacatgaggccagtcctacagagagcaagatgcaccccaggatttcttcattttctaatagatgtgggagtgctccattttccccgacagcgaatttcccctgagaaacgatactagaccctgggtttgcccaccttgtaactcttccttatctcctccttttcatccctaatccatcctccctctggcatggaattgacgcccgtgcagtacatttgccaagtggcaccttctttcaatttatgttttattttgctatggtggtgattctttatttgctggttgtcttttctcacacatctttctctctgtctctctctttcctgctctttg

SEQ ID NO: 168694 - DNA, 3205 bp, Homo sapiens
  Payload ID: 13220
  Gene Symbol: PBX2
  Gene Name: pre-B-cell leukemia homeobox 2
  Uniprot ID: P40425
  ENST ID: ENST00000375050
  CDS Start-End: 272-1564
ctctctcacacacacccccgcttgggcctcctctctctctccggctccattttctccgccgccgggggccggggtctcctgtggggggcccagccggtatcccaggtctcccttcagtgccggggtgaacccccgggggagccgggagccgggggcagacgggcgggggttggggcggagggagcagcggccccagcgagtttggggggagaagtaaccaggcggggggaggggcggagcagggagggggcctcagggcccccccccagctatggacgaacggctactggggccgccccctccaggcgggggccgggggggcctgggattggtgagtggggagcctgggggccctggcgagcctcccggtggcggagaccccggtgggggtagcgggggggtcccgggaggccgagggaagcaagacatcggggacattctgcagcagataatgaccatcaccgaccagagcctggacgaggcccaggccaagaaacacgccctaaactgccaccgaatgaagcctgctctctttagcgtcctgtgtgaaatcaaggagaaaactggcctcagcattcggagctcccaggaggaggagccggtggacccacagctgatgcgcttggacaacatgcttctggcagagggtgtggctgggcccgagaaagggggcggctcagcagcagcagctgcagccgctgcagcctctggtggtggtgtgtcccctgacaactccatcgaacactcggactatcgcagcaaacttgcccagatccgtcacatataccactcggagctggagaagtatgagcaggcatgtaatgagttcacgacccatgtcatgaacctgctgagggagcagagccgcaccaggcccgtggcccccaaagagatggaacgcatggtgagcatcatccatcgaaagttcagcgccatccagatgcagctgaagcagagcacctgcgaggctgtgatgatcctgcgctcccgtttcctggatgccagacgaaagcgccgtaacttcagcaaacaggccactgaggtcctaaatgagtatttctactcccacctgagtaacccatatcctagtgaggaggccaaggaggagcttgccaagaagtgtggcatcaccgtgtctcaggtctccaactggtttggcaacaagaggattcgctataagaaaaacatcggaaagttccaagaggaggcaaacatctatgctgtcaagaccgccgtgtcagtcacccaggggggccacagccgcaccagctccccgacacccccttcctctgcaggctctggcggctctttcaatctctcaggatctggagacatgtttctggggatgcctgggctcaacggagattcctattctgcttcccaggtggaatcactccgacactcgatggggccagggggctatggggataacctcgggggaggccagatgtacagcccacgggaaatgagggcaaatggcagctggcaagaggctgtgaccccctcttcagtgacatccccaacggagggaccagggagtgttcactctgatacctccaactgatcttgcccctcagggtcacaggggtgggggctctcacaaggcgacttgaagaggacgcaggcttccagaggacaaaccccaatacaggagaagcacaagacagagaagggccaatggggtcatcccctccctaacgagactctctgtgctgggggtgctaattacatggcaggaagaatggggcctctaaggggagtgtggggtctgtctctcccttttttccatctttttcctctctcgctttctttcttacacagaaacatacacataccgagaaacctatttctcagacccctttttctcctctgtctttctctctccctctcccacacctcacacacacatactcccacttgcaactattctgtttctctcctgggctcccccactttcccttccccaccccacttgtatgctctggaatctgtggagacgccagccctgcccaatcagagatgccaaaaatggggacatgacttctggacagaggacatgggccacgcccccatgcatccccacccccgcccctccggacggcttacttacctcatacgcagctcatcttaaaccaatagaatcgctcggtggacgagagtgtctgactcagatatctacctcggagggagtttctgctactttagggaattattgactgggctttggggttgaacttttttttttttaaagaaagaaaaagaaaccctgggatccatctgttttttttgttgttgttgttgtttttgttgttgttggtggtggtggtggtggtggttcttaatttttaatttagtttggggaagtagcttgtttttttttttataaatatgttgatttcttgtctttttttttttttatttcttactttcccatattaggggtgatagccaaaggggttctggtaagagaaagggggacaaacagaactggtaaagaggcccccctggctccaggcctgtccatcaggaagtaaattttacagggcaccaagctttgccccctaaaatcccttaggtgttctttgttcatgcaggcaggtttctgccgcatttgatgtggaggcagtgaagggcttgccctgctggcctctcatcccccttcttcccacaacccttgggcagggctggactcagtaattttgaggaaattgaagatgccatcttcccctgtgagtgacatgtctttaattttttaaaaaactactatttgaaaattggagggggaagaatgggaagggagttattgccaaatatgttaaatatgggttggggtgcttgtatatgtatcttcctcaatttccccataaatgaggtatctttttgtcacaccaaaatcaaggggtagggagagggaggaggttgcaaaaagccagatgtgggggaaaagtaacatcaacactgtcccatcctcagccctgaactagctaccatctgatcccctcagacattctcaggattttacaagactgtcagagtggggaacccctcccattaaagatccgggcaggactggggacaggttggaagtgtgatgggtgggggggtgggaggcatgggccgggggcagttctctcctcacttgtaaacttgtgtagtttcacagaaaaaaaacaaaatgcagttttaaataaagaaatttcttttt

SEQ ID NO: 168695 - DNA, 3210 bp, Homo sapiens
  Payload ID: 13220
  Gene Symbol: PBX2
  Gene Name: pre-B-cell leukemia homeobox 2
  Uniprot ID: P40425
  ENST ID: ENST00000383270
  CDS Start-End: 272-1564
ctctctcacacacacccccgcttgggcctcctctctctctccggctccattttctccgccgccgggggccggggtctcctgtggggggcccagccggtatcccaggtctcccttcagtgccggggtgaacccccgggggagccgggagccgggggcagacgggcgggggttggggcggagggagcagcggccccagcgagtttggggggagaagtaaccaggcggggggaggggcggagcagggagggggcctcagggcccccccccagctatggacgaacggctactggggccgccccctccaggcgggggccgggggggcctaggattggtgagtggggagcctgggggccctggcgagcctcccggtggcggagaccccggtgggggtagcgggggggtcccgggaggccgagggaagcaagacatcggggacattctgcagcagataatgaccatcaccgaccagagcctggacgaggcccaggccaagaaacacgccctaaactgccaccgaatgaagcctgctctctttagcgtcctgtgtgaaatcaaggagaaaactggcctcagcattcggagctcccaggaggaggagccggtggacccacagctgatgcgcttggacaacatgcttctggcagagggtgtggctgggcccgagaaagggggcggctcagcagcagcagctgcagccgctgcagcctctggtggtggtgtgtcccctgacaactccatcgaacactcggactatcgcagcaaacttgcccagatccgtcacatataccactcggagctggagaagtatgagcaggcatgtaatgagttcacgacccatgtcatgaacctgctgagggagcagagccgcaccaggcccgtggcccccaaagagatggaacgcatggtgagcatcatccatcgaaagttcagcgccatccagatgcagctgaagcagagcacctgcgaggctgtgatgatcctgcgctcccgtttcctggatgccagacgaaagcgccgtaacttcagcaaacaggccactgaggtcctaaatgagtatttctactcccacctgagtaacccatatcctagtgaggaggccaaggaggagcttgccaagaagtgtggcatcaccgtgtctcaggtctccaactggtttggcaacaagaggattcgctataagaaaaacatcggaaagttccaagaggaggcaaacatctatgctgtcaagaccgccgtgtcagtcacccaggggggccacagccgcaccagctccccgacacccccttcctctgcaggctctggcggctctttcaatctctcaggatctggagacatgtttctggggatgcctgggctcaacggagattcctattctgcttcccaggtggaatcactccgacactcgatggggccagggggctatggggataacctcgggggaggccagatgtacagcccacgggaaatgagggcaaatggcagctggcaagaggctgtgaccccctcttcagtgacatccccaacggagggaccagggagtgttcactctgatacctccaactgatcttgcccctcagggtcacaggggtgggggctctcacaaggcgacttgaagaggacgcaggcttccagaggacaaaccccaatacaggagaagcacaagacagagaagggccaatggggtcatcccctccctaacgagactctctgtgctgggggtgctaattacatggcaggaagaatggggcctctaaggggagtgtggggtctgtctctcccttttttccatctttttcctctctcgctttctttcttacacagaaacatacacataccgagaaacctatttctcagacccctttttctcctctgtctttctctctccctctcccacacctcacacacacatactcccacttgcaactattctgtttctctcctgggctcccccactttcccttccccaccccacttgtatgctctggaatctgtggagacgccagccctgcccaatcagagatgccaaaaatggggacatgacttctggacagaggacatgggccacgcccccatgcatccccacccccgcccctccggacggcttacttacctcatacgcagctcatcttaaaccaatagaatcgctcggtggacgagagtgtctgactcagatatctacctcggagggagtttctgctactttagggaattattgactgggctttggggttgaacttttttttttttaaagaaagaaaaagaaaccctgggatccatctgttttttttgttgttgttgttgtttttgttgttgttgttggtggtggtggtggtggttcttaatttttaatttagtttggggaagtagcttgtttttttttttataaatatgttgatttcttgtcttttttttttatttcttactttcccatattaggggtgatagccaaaggggttctggtaagagaaagggggacaaacagaactggtaaagaggcccccctggctccaggcctgtccatcaggaagtaaattttacagggcaccaagctttgccccctaaaatcccttaggtgttctttgttcatgcaggcaggtttctgccgcatttgatgtggaggcagtgaagggcttgccctgctggcctctcatcccccttcttcccacaacccttgggcagggctggactcagtaattttgaggaaattgaagatgccatcttcccctgtgagtgacatgtctttaattttttaaaaaactactatttgaaaattggagggggaagaatgggaagggagttattgccaaatatgttaaatatgggttggggtgcttgtatatgtatcttcctcaatttccccataaatgaggtatctttttgtcacaccaaaatcaaggggtagggagagggaggaggttgcaaaaagccagatgtgggggaaaagtaacatcaacactgtcccatcctcagccctgaactagctaccatctgatcccctcagacattctcaggattttacaagactgtcagagtggggaacccctcccattaaagatccgggcaggactggggacaggttggaagtgtgatgggtgggggggtgggaggcatgggccgggggcagttctctcctcacttgtaaacttgtgtagtttcacagaaaaaaaacaaaatgcagttttaaataaagaaatttcttttttccctggg

SEQ ID NO: 168696 - DNA, 3202 bp, Homo sapiens
  Payload ID: 13220
  Gene Symbol: PBX2
  Gene Name: pre-B-cell leukemia homeobox 2
  Uniprot ID: P40425
  ENST ID: ENST00000431537
  CDS Start-End: 272-1564
ctctctcacacacacccccgcttgggcctcctctctctctccggctccattttctccgccgccgggggccggggtctcctgtggggggcccagccggtatcccaggtctcccttcagtgccggggtgaacccccgggggagccgggagccgggggcagacgggcgggggttggggcggagggagcagcggccccagcgagtttggggggagaagtaaccaggcggggggaggggcggagcagggagggggcctcagggcccccccccagctatggacgaacggctactggggccgccccctccaggcgggggccgggggggcctgggattggtgagtggggagcctgggggccctggcgagcctcccggtggcggagaccccggtgggggtagcgggggggtcccgggaggccgagggaagcaagacatcggggacattctgcagcagataatgaccatcaccgaccagagcctggacgaggcccaggccaagaaacacgccctaaactgccaccgaatgaagcctgctctctttagcgtcctgtgtgaaatcaaggagaaaactggcctcagcattcggagctcccaggaggaggagccggtggacccacagctgatgcgcttggacaacatgcttctggcagagggtgtggctgggcccgagaaagggggcggctcagcagcagcagctgcagccgctgcagcctctggtggtggtgtgtcccctgacaactccatcgaacactcggactatcgcagcaaacttgcccagatccgtcacatataccactcggagctggagaagtatgagcaggcatgtaatgagttcacgacccatgtcatgaacctgctgagggagcagagccgcaccaggcccgtggcccccaaagagatggaacgcatggtgagcatcatccatcgaaagttcagcgccatccagatgcagctgaagcagagcacctgcgaggctgtgatgatcctgcgctcccgtttcctggatgccagacgaaagcgccgtaacttcagcaaacaggccactgaggtcctaaatgagtatttctactcccacctgagtaacccatatcctagtgaggaggccaaggaggagcttgccaagaagtgtggcatcaccgtgtctcaggtctccaactggtttggcaacaagaggattcgctataagaaaaacatcggaaagttccaagaggaggcaaacatctatgctgtcaagaccgccgtgtcagtcacccaggggggccacagccgcaccagctccccgacacccccttcctctgcaggctctggcggctctttcaatctctcaggatctggagacatgtttctggggatgcctgggctcaacggagattcctattctgcttcccaggtggaatcactccgacactcgatggggccagggggctatggggataacctcgggggaggccagatgtacagcccacgggaaatgagggcaaatggcagctggcaagaggctgtgaccccctcttcagtgacatccccaacggagggaccagggagtgttcactctgatacctccaactgatcttgcccctcagggtcacaggggtgggggctctcacaaggcgacttgaagaggacgcaggcttccagaggacaaaccccaatacaggagaagcacaagacagagaagggccaatggggtcatcccctccctaacgagactctctgtgctgggggtgctaattacatggcaggaagaatggggcctctaaggggagtgtggggtctgtctctcccttttttccatctttttcctctctcgctttctttcttacacagaaacatacacataccgagaaacctatttctcagacccctttttctcctctgtctttctctctccctctcccacacctcacacacacatactcccacttgcaactattctgtttctctcctgggctcccccactttcccttccccaccccacttgtatgctctggaatctgtggagacgccagccctgcccaatcagagatgccaaaaatggggacatgacttctggacagaggacatgggccacgcccccatgcatccccacccccgcccctccggacggcttacttacctcatacgcagctcatcttaaaccaatagaatcgctcggtggacgagagtgtctgactcagatatctacctcggagggagtttctgctactttagggaattattgactgggctttggggttgaacttttttttttttaaagaaagaaaaagaaaccctgggatccatctgttttttttgttgttgttgttgtttttgttgttgttggtggtggtggtggtggtggttcttaatttttaatttagtttggggaagtagcttgtttttttttttataaatatgttgatttcttgtcttttttttttatttcttactttcccatattaggggtgatagccaaaggggttctggtaagagaaagggggacaaacagaactggtaaagaggcccccctggctccaggcctgtccatcaggaagtaaattttacagggcaccaagctttgccccctaaaatcccttaggtgttctttgttcatgcaggcaggtttctgccgcatttgatgtggaggcagtgaagggcttgccctgctggcctctcatcccccttcttcccacaacccttgggcagggctggactcagtaattttgaggaaattgaagatgccatcttcccctgtgagtgacatgtctttaattttttaaaaaactactatttgaaaattggagggggaagaatgggaagggagttattgccaaatatgttaaatatgggttggggtgcttgtatatgtatcttcctcaatttccccataaatgaggtatctttttgtcacaccaaaatcaaggggtagggagagggaggaggttgcaaaaagccagatgtgggggaaaagtaacatcaacactgtcccatcctcagccctgaactagctaccatctgatcccctcagacattctcaggattttacaagactgtcagagtggggaacccctcccattaaagatccgggcaggactggggacaggttggaagtgtgatgggtgggggggtgggaggcatgggccgggggcagttctctcctcacttgtaaacttgtgtagtttcacagaaaaaaaacaaaatgcagttttaaataaagaaatttcttttt

SEQ ID NO: 168697 - DNA, 3211 bp, Homo sapiens
  Payload ID: 13220
  Gene Symbol: PBX2
  Gene Name: pre-B-cell leukemia homeobox 2
  Uniprot ID: P40425
  ENST ID: ENST00000433552
  CDS Start-End: 272-1564
ctctctcacacacacccccgcttgggcctcctctctctctccggctccattttctccgccgccgggggccggggtctcctgtggggggcccagccggtatcccaggtctcccttcagtgccggggtgaacccccgggggagccgggagccgggggcagacgggcgggggttggggcggagggagcagcggccccagcgagtttggggggagaagtaaccaggcggggggaggggcggagcagggagggggcctcagggcccccccccagctatggacgaacggctactggggccgccccctccaggcgggggccgggggggcctgggattggtgagtggggagcctgggggccctggcgagcctcccggtggcggagaccccggtgggggtagcgggggggtcccgggaggccgagggaagcaagacatcggggacattctgcagcagataatgaccatcaccgaccagagcctggacgaggcccaggccaagaaacacgccctaaactgccaccgaatgaagcctgctctctttagcgtcctgtgtgaaatcaaggagaaaactggcctcagcattcggagctcccaggaggaggagccggtggacccacagctgatgcgcttggacaacatgcttctggcagagggtgtggctgggcccgagaaagggggcggctcagcagcagcagctgcagccgctgcagcctctggtggtggtgtgtcccctgacaactccatcgaacactcggactatcgcagcaaacttgcccagatccgtcacatataccactcggagctggagaagtatgagcaggcatgtaatgagttcacgacccatgtcatgaacctgctgagggagcagagccgcaccaggcccgtggcccccaaagagatggaacgcatggtgagcatcatccatcgaaagttcagcgccatccagatgcagctgaagcagagcacctgcgaggctgtgatgatcctgcgctcccgtttcctggatgccagacgaaagcgccgtaacttcagcaaacaggccactgaggtcctaaatgagtatttctactcccacctgagtaacccatatcctagtgaggaggccaaggaggagcttgccaagaagtgtggcatcaccgtgtctcaggtctccaactggtttggcaacaagaggattcgctataagaaaaacatcggaaagttccaagaggaggcaaacatctatgctgtcaagaccgccgtgtcagtcacccaggggggccacagccgcaccagctccccgacacccccttcctctgcaggctctggcggctctttcaatctctcaggatctggagacatgtttctggggatgcctgggctcaacggagattcctattctgcttcccaggtggaatcactccgacactcgatggggccagggggctatggggataacctcgggggaggccagatgtacagcccacgggaaatgagggcaaatggcagctggcaagaggctgtgaccccctcttcagtgacatccccaacggagggaccagggagtgttcactctgatacctccaactgatcttgcccctcagggtcacaggggtgggggctctcacaaggcgacttgaagaggacgcaggcttccagaggacaaaccccaatacaggagaagcacaagacagagaagggccaatggggtcatcccctccctaacgagactctctgtgctgggggtgctaattacatggcaggaagaatggggcctctaaggggagtgtggggtctgtctctcccttttttccatctttttcctctctcgctttctttcttacacagaaacatacacataccgagaaacctatttctcagacccctttttctcctctgtctttctctctccctctcccacacctcacacacacatactcccacttgcaactattctgtttctctcctgggctcccccactttcccttccccaccccacttgtatgctctggaatctgtggagacgccagccctgcccaatcagagatgccaaaaatggggacatgacttctggacagaggacatgggccacgcccccatgcatccccacccccgcccctccggacggcttacttacctcatacgcagctcatcttaaaccaatagaatcgctcggtggacgagagtgtctgactcagatatctacctcggagggagtttctgctactttagggaattattgactgggctttggggttgaactttttttttttttaaagaaagaaaaagaaaccctgggatccatctgttttttttgttgttgttgttgtttttgttgttggtggtggtggtggtggtggtggttcttaatttttaatttagtttggggaagtagcttgtttttttttttataaatatgttgatttcttgtcttttttttttatttcttactttcccatattaggggtgatagccaaaggggttctggtaagagaaagggggacaaacagaactggtaaagaggcccccctggctccaggcctgtccatcaggaagtaaattttacagggcaccaagctttgccccctaaaatcccttaggtgttctttgttcatgcaggcaggtttctgccgcatttgatgtggaggcagtgaagggcttgccctgctggcctctcatcccccttcttcccacaacccttgggcagggctggactcagtaattttgaggaaattgaagatgccatcttcccctgtgagtgacatgtctttaattttttaaaaaactactatttgaaaattggagggggaagaatgggaagggagttattgccaaatatgttaaatatgggttggggtgcttgtatatgtatcttcctcaatttccccataaatgaggtatctttttgtcacaccaaaatcaaggggtagggagagggaggaggttgcaaaaagccagatgtgggggaaaagtaacatcaacactgtcccatcctcagccctgaactagctaccatctgatcccctcagacattctcaggattttacaagactgtcagagtggggaacccctcccattaaagatccgggcaggactggggacaggttggaagtgtgatgggtgggggggtgggaggcatgggccgggggcagttctctcctcacttgtaaacttgtgtagtttcacagaaaaaaaacaaaatgcagttttaaataaagaaatttcttttttccctggg

SEQ ID NO: 168698 - DNA, 3210 bp, Homo sapiens
  Payload ID: 13220
  Gene Symbol: PBX2
  Gene Name: pre-B-cell leukemia homeobox 2
  Uniprot ID: P40425
  ENST ID: ENST00000453961
  CDS Start-End: 272-1564
ctctctcacacacacccccgcttgggcctcctctctctctccggctccattttctccgccgccgggggccggggtctcctgtggggggcccagccggtatcccaggtctcccttcagtgccggggtgaacccccgggggagccgggagccgggggcagacgggcgggggttggggcggagggagcagcggccccagcgagtttggggggagaagtaaccaggcggggggaggggcggagcagggagggggcctcagggcccccccccagctatggacgaacggctactggggccgccccctccaggcgggggccgggggggcctgggattggtgagtggggagcctgggggccctggcgagcctcccggtggcggagaccccggtgggggtagcgggggggtcccgggaggccgagggaagcaagacatcggggacattctgcagcagataatgaccatcaccgaccagagcctggacgaggcccaggccaagaaacacgccctaaactgccaccgaatgaagcctgctctctttagcgtcctgtgtgaaatcaaggagaaaactggcctcagcattcggagctcccaggaggaggagccggtggacccacagctgatgcgcttggacaacatgcttctggcagagggtgtggctgggcccgagaaagggggcggctcagcagcagcagctgcagccgctgcagcctctggtggtggtgtgtcccctgacaactccatcgaacactcggactatcgcagcaaacttgcccagatccgtcacatataccactcggagctggagaagtatgagcaggcatgtaatgagttcacgacccatgtcatgaacctgctgagggagcagagccgcaccaggcccgtggcccccaaagagatggaacgcatggtgagcatcatccatcgaaagttcagcgccatccagatgcagctgaagcagagcacctgcgaggctgtgatgatcctgcgctcccgtttcctggatgccagacgaaagcgccgtaacttcagcaaacaggccactgaggtcctaaatgagtatttctactcccacctgagtaacccatatcctagtgaggaggccaaggaggagcttgccaagaagtgtggcatcaccgtgtctcaggtctccaactggtttggcaacaagaggattcgctataagaaaaacatcggaaagttccaagaggaggcaaacatctatgctgtcaagaccgccgtgtcagtcacccaggggggccacagccgcaccagctccccgacacccccttcctctgcaggctctggcggctctttcaatctctcaggatctggagacatgtttctggggatgcctgggctcaacggagattcctattctgcttcccaggtggaatcactccgacactcgatggggccagggggctatggggataacctcgggggaggccagatgtacagcccacgggaaatgagggcaaatggcagctggcaagaggctgtgaccccctcttcagtgacatccccaacggagggaccagggagtgttcactctgatacctccaactgatcttgcccctcagggtcacaggggtgggggctctcacaaggcgacttgaagaggacgcaggcttccagaggacaaaccccaatacaggagaagcacaagacagagaagggccaatggggtcatcccctccctaacgagactctctgtgctgggggtgctaattacatggcaggaagaatggggcctctaaggggagtgtggggtctgtctctcccttttttccatctttttcctctctcgctttctttcttacacagaaacatacacataccgagaaacctatttctcagacccctttttctcctctgtctttctctctccctctcccacacctcacacacacatactcccacttgcaactattctgtttctctcctgggctcccccactttcccttccccaccccacttgtatgctctggaatctgtggagacgccagccctgcccaatcagagatgccaaaaatggggacatgacttctggacagaggacatgggccacgcccccatgcatccccacccccgcccctccggacggcttacttacctcatacgcagctcatcttaaaccaatagaatcgctcggtggacgagagtgtctgactcagatatctacctcggagggagtttctgctactttagggaattattgactgggctttggggttgaacttttttttttttaaagaaagaaaaagaaaccctgggatccatctgttttttttgttgttgttgttgtttttgttgttgttgttggtggtggtggtggtggttcttaatttttaatttagtttggggaagtagcttgtttttttttttataaatatgttgatttcttgtcttttttttttatttcttactttcccatattaggggtgatagccaaaggggttctggtaagagaaagggggacaaacagaactggtaaagaggcccccctggctccaggcctgtccatcaggaagtaaattttacagggcaccaagctttgccccctaaaatcccttaggtgttctttgttcatgcaggcaggtttctgccgcatttgatgtggaggcagtgaagggcttgccctgctggcctctcatcccccttcttcccacaacccttgggcagggctggactcagtaattttgaggaaattgaagatgccatcttcccctgtgagtgacatgtctttaattttttaaaaaactactatttgaaaattggagggggaagaatgggaagggagttattgccaaatatgttaaatatgggttggggtgcttgtatatgtatcttcctcaatttccccataaatgaggtatctttttgtcacaccaaaatcaaggggtagggagagggaggaggttgcaaaaagccagatgtgggggaaaagtaacatcaacactgtcccatcctcagccctgaactagctaccatctgatcccctcagacattctcaggattttacaagactgtcagagtggggaacccctcccattaaagatccgggcaggactggggacaggttggaagtgtgatgggtgggggggtgggaggcatgggccgggggcagttctctcctcacttgtaaacttgtgtagtttcacagaaaaaaaacaaaatgcagttttaaataaagaaatttcttttttccctggg

SEQ ID NO: 168699 - DNA, 3210 bp, Homo sapiens
  Payload ID: 13220
  Gene Symbol: PBX2
  Gene Name: pre-B-cell leukemia homeobox 2
  Uniprot ID: P40425
  ENST ID: ENST00000453487
  CDS Start-End: 272-1564
ctctctcacacacacccccgcttgggcctcctctctctctccggctccattttctccgccgccgggggccggggtctcctgtggggggcccagccggtatcccaggtctcccttcagtgccggggtgaacccccgggggagccgggagccgggggcagacgggcgggggttggggcggagggagcagcggccccagcgagtttggggggagaagtaaccaggcggggggaggggcggagcagggagggggcctcagggcccccccccagctatggacgaacggctactggggccgccccctccaggcgggggccgggggggcctgggattggtgagtggggagcctgggggccctggcgagcctcccggtggcggagaccccggtgggggtagcgggggggtcccgggaggccgagggaagcaagacatcggggacattctgcagcagataatgaccatcaccgaccagagcctggacgaggcccaggccaagaaacacgccctaaactgccaccgaatgaagcctgctctctttagcgtcctgtgtgaaatcaaggagaaaactggcctcagcattcggagctcccaggaggaggagccggtggacccacagctgatgcgcttggacaacatgcttctggcagagggtgtggctgggcccgagaaagggggcggctcagcagcagcagctgcagccgctgcagcctctggtggtggtgtgtcccctgacaactccatcgaacactcggactatcgcagcaaacttgcccagatccgtcacatataccactcggagctggagaagtatgagcaggcatgtaatgagttcacgacccatgtcatgaacctgctgagggagcagagccgcaccaggcccgtggcccccaaagagatggaacgcatggtgagcatcatccatcgaaagttcagcgccatccagatgcagctgaagcagagcacctgcgaggctgtgatgatcctgcgctcccgtttcctggatgccagacgaaagcgccgtaacttcagcaaacaggccactgaggtcctaaatgagtatttctactcccacctgagtaacccatatcctagtgaggaggccaaggaggagcttgccaagaagtgtggcatcaccgtgtctcaggtctccaactggtttggcaacaagaggattcgctataagaaaaacatcggaaagttccaagaggaggcaaacatctatgctgtcaagaccgccgtgtcagtcacccaggggggccacagccgcaccagctccccgacacccccttcctctgcaggctctggcggctctttcaatctctcaggatctggagacatgtttctggggatgcctgggctcaacggagattcctattctgcttcccaggtggaatcactccgacactcgatggggccagggggctatggggataacctcgggggaggccagatgtacagcccacgggaaatgagggcaaatggcagctggcaagaggctgtgaccccctcttcagtgacatccccaacggagggaccagggagtgttcactctgatacctccaactgatcttgcccctcagggtcacaggggtgggggctctcacaaggcgacttgaagaggacgcaggcttccagaggacaaaccccaatacaggagaagcacaagacagagaagggccaatggggtcatcccctccctaacgagactctctgtgctgggggtgctaattacatggcaggaagaatggggcctctaaggggagtgtggggtctgtctctcccttttttccatctttttcctctctcgctttctttcttacacagaaacatacacataccgagaaacctatttctcagacccctttttctcctctgtctttctctctccctctcccacacctcacacacacatactcccacttgcaactattctgtttctctcctgggctcccccactttcccttccccaccccacttgtatgctctggaatctgtggagacgccagccctgcccaatcagagatgccaaaaatggggacatgacttctggacagaggacatgggccacgcccccatgcatccccacccccgcccctccggacggcttacttacctcatacgcagctcatcttaaaccaatagaatcgctcggtggacgagagtgtctgactcagatatctacctcggagggagtttctgctactttagggaattattgactgggctttggggttgaacttttttttttttaaagaaagaaaaagaaaccctgggatccatctgttttttttgttgttgttgttgtttttgttgttggtggtggtggtggtggtggtggttcttaatttttaatttagtttggggaagtagcttgtttttttttttataaatatgttgatttcttgtcttttttttttatttcttactttcccatattaggggtgatagccaaaggggttctggtaagagaaagggggacaaacagaactggtaaagaggcccccctggctccaggcctgtccatcaggaagtaaattttacagggcaccaagctttgccccctaaaatcccttaggtgttctttgttcatgcaggcaggtttctgccgcatttgatgtggaggcagtgaagggcttgccctgctggcctctcatcccccttcttcccacaacccttgggcagggctggactcagtaattttgaggaaattgaagatgccatcttcccctgtgagtgacatgtctttaattttttaaaaaactactatttgaaaattggagggggaagaatgggaagggagttattgccaaatatgttaaatatgggttggggtgcttgtatatgtatcttcctcaatttccccataaatgaggtatctttttgtcacaccaaaatcaaggggtagggagagggaggaggttgcaaaaagccagatgtgggggaaaagtaacatcaacactgtcccatcctcagccctgaactagctaccatctgatcccctcagacattctcaggattttacaagactgtcagagtggggaacccctcccattaaagatccgggcaggactggggacaggttggaagtgtgatgggtgggggggtgggaggcatgggccgggggcagttctctcctcacttgtaaacttgtgtagtttcacagaaaaaaatcaaaatgcagttttaaataaagaaatttcttttttccctggg

SEQ ID NO: 168700 - DNA, 3202 bp, Homo sapiens
  Payload ID: 13220
  Gene Symbol: PBX2
  Gene Name: pre-B-cell leukemia homeobox 2
  Uniprot ID: P40425
  ENST ID: ENST00000420432
  CDS Start-End: 272-1564
ctctctcacacacacccccgcttgggcctcctctctctctccggctccattttctccgccgccgggggccggggtctcctgtggggggcccagccggtatcccaggtctcccttcagtgccggggtgaacccccgggggagccgggagccgggggcagacgggcgggggttggggcggagggagcagcggccccagcgagtttggggggagaagtaaccaggcggggggaggggcggagcagggagggggcctcagggcccccccccagctatggacgaacggctactggggccgccccctccaggcgggggccgggggggcctgggattggtgagtggggagcctgggggccctggcgagcctcccggtggcggagaccccggtgggggtagcgggggggtcccgggaggccgagggaagcaagacatcggggacattctgcagcagataatgaccatcaccgaccagagcctggacgaggcccaggccaagaaacacgccctaaactgccaccgaatgaagcctgctctctttagcgtcctgtgtgaaatcaaggagaaaactggcctcagcattcggagctcccaggaggaggagccggtggacccacagctgatgcgcttggacaacatgcttctggcagagggtgtggctgggcccgagaaagggggcggctcagcagcagcagctgcagccgctgcagcctctggtggtggtgtgtcccctgacaactccatcgaacactcggactatcgcagcaaacttgcccagatccgtcacatataccactcggagctggagaagtatgagcaggcatgtaatgagttcacgacccatgtcatgaacctgctgagggagcagagccgcaccaggcccgtggcccccaaagagatggaacgcatggtgagcatcatccatcgaaagttcagcgccatccagatgcagctgaagcagagcacctgcgaggctgtgatgatcctgcgctcccgtttcctggatgccagacgaaagcgccgtaacttcagcaaacaggccactgaggtcctaaatgagtatttctactcccacctgagtaacccatatcctagtgaggaggccaaggaggagcttgccaagaagtgtggcatcaccgtgtctcaggtctccaactggtttggcaacaagaggattcgctataagaaaaacatcggaaagttccaagaggaggcaaacatctatgctgtcaagaccgccgtgtcagtcacccaggggggccacagccgcaccagctccccgacacccccttcctctgcaggctctggcggctctttcaatctctcaggatctggagacatgtttctggggatgcctgggctcaacggagattcctattctgcttcccaggtggaatcactccgacactcgatggggccagggggctatggggataacctcgggggaggccagatgtacagcccacgggaaatgagggcaaatggcagctggcaagaggctgtgaccccctcttcagtgacatccccaacggagggaccagggagtgttcactctgatacctccaactgatcttgcccctcagggtcacaggggtgggggctctcacaaggcgacttgaagaggacgcaggcttccagaggacaaaccccaatacaggagaagcacaagacagagaagggccaatggggtcatcccctccctaacgagactctctgtgctgggggtgctaattacatggcaggaagaatggggcctctaaggggagtgtggggtctgtctctcccttttttccatctttttcctctctcgctttctttcttacacagaaacatacacataccgagaaacctatttctcagacccctttttctcctctgtctttctctctccctctcccacacctcacacacacatactcccacttgcaactattctgtttctctcctgggctcccccactttcccttccccaccccacttgtatgctctggaatctgtggagacgccagccctgcccaatcagagatgccaaaaatggggacatgacttctggacagaggacatgggccacgcccccatgcatccccacccccgcccctccggacggcttacttacctcatacgcagctcatcttaaaccaatagaatcgctcggtggacgagagtgtctgactcagatatctacctcggagggagtttctgctactttagggaattattgactgggctttggggttgaacttttttttttttaaagaaagaaaaagaaaccctgggatccatctgttttttttgttgttgttgttgtttttgttgttggtggtggtggtggtggtggtggttcttaatttttaatttagtttggggaagtagcttgtttttttttttataaatatgttgatttcttgtcttttttttttatttcttactttcccatattaggggtgatagccaaaggggttctggtaagagaaagggggacaaacagaactggtaaagaggcccccctggctccaggcctgtccatcaggaagtaaattttacagggcaccaagctttgccccctaaaatcccttaggtgttctttgttcatgcaggcaggtttctgccgcatttgatgtggaggcagtgaagggcttgccctgctggcctctcatcccccttcttcccacaacccttgggcagggctggactcagtaattttgaggaaattgaagatgccatcttcccctgtgagtgacatgtctttaattttttaaaaaactactatttgaaaattggagggggaagaatgggaagggagttattgccaaatatgttaaatatgggttggggtgcttgtatatgtatcttcctcaatttccccataaatgaggtatctttttgtcacaccaaaatcaaggggtagggagagggaggaggttgcaaaaagccagatgtgggggaaaagtaacatcaacactgtcccatcctcagccctgaactagctaccatctgatcccctcagacattctcaggattttacaagactgtcagagtggggaacccctcccattaaagatccgggcaggactggggacaggttggaagtgtgatgggtgggggggtgggaggcatgggccgggggcagttctctcctcacttgtaaacttgtgtagtttcacagaaaaaaaacaaaatgcagttttaaataaagaaatttcttttt

SEQ ID NO: 168701 - DNA, 2755 bp, Homo sapiens
  Payload ID: 13221
  Gene Symbol: PBX3
  Gene Name: pre-B-cell leukemia homeobox 3
  Uniprot ID: P40426
  ENST ID: ENST00000342287
  CDS Start-End: 110-1165
cctccccctccccctccccctctttcttctcctccctcgtcgccgccgccgccgccgccgcctcagccttcgcctcagccgccgcccgctcccgcccgcgcgcggcgggatggacgatcaatccaggatgctgcagactctggccggggtgaacctggctggccactcggtgcaggggggcatggccctgccgcctcccccgcacggccacgaaggggcggacggcgacggcaggaagcaggacatcggcgacatcctccaccagatcatgaccatcaccgaccagagcttggacgaggcgcaagcaaagaaacatgccctgaactgtcacagaatgaaaccagcgctcttcagcgtcctgtgtgagatcaaagagaaaacaggtctcagcatcagaggagcccaggaggaggaccctcccgatccccagctaatgagactggacaatatgcttttggcagaaggggtttcaggtcctgagaaaggtgggggatcggcggcagcagctgcagccgcggcagcctctggaggttcttcagataactctattgaacactcagattacagagccaaattgacccagatcagacaaatctatcacacagaactggagaaatatgaacaggcatgtaatgaatttactacacatgtgatgaaccttctccgagaacagagtagaacacgtcccatttctccaaaagagattgaaagaatggtgggcatcatccatcgaaaatttagttccattcagatgcagctcaaacaaagcacttgtgaagcagttatgattttaagatcaaggttccttgatgccagacggaaaaggcgtaacttcagtaaacaggccacagaaatcttgaatgaatatttttactcacacctcagcaacccctaccccagtgaagaagccaaagaggagctggccaagaaatgcagcatcacagtgtcacaggtatccaattggtttggcaacaaacgaatcaggtacaagaagaacattggcaagtttcaggaagaagccaacctctatgctgcaaagacggccgtgacagctgcacacgcagtagcagcagctgtgcagaacaaccagaccaattcgcccaccacaccaaattccggtggataccctccgtcatgttatcaatcagacgggaggctacagtgatggccttggaggaaattcactgtacagtccacataatttaaatgctaatggaggctggcaggacgcaacaactccatcttctgtgacttctcctacagaaggcccaggaagtgtgcactcggatacctctaactaatctctggccacacttttccctgagctacatgccttgataagtgcattcagagcaataggaggaaaaggaaagcgtttttgtagcccaccatctacagctttactgtaaaaccttgtcttattcgagaacttggtaaatctgttttttaaggaatcataatcatttgtatttatacttaaaaacacacaatgttaaaaaaaataaagcactttatccaattaggccaagatttaacattgttgacagtcctgtagctattttatcataatttattatcaatattttacattaatggtttcacagttgccaattacttggccttaagggtaaaaagtacaatatacactaaacctcaaccgttaaagcagatgcaaaaattcacctcacctaaattgaacttcttgcatatttccattactgacttggattgtctttctttcatatcactaatggagttggaataaagagctgtttgcctatccctgttaatgatggttgtgtttaagaatcttcctcgtcacgtttgtgttcagatctcttatgttataattagatcagagactggtagcatcgtttctctctctgaaagcaccagtgcccagagtctgctcggtaataaaattatggatccagattgttctgagagacgaagatacttgctgctgatagaggtgaaaacgagattgatccgtctggggttttacggtgtgcactgggtgctgcacagacttgtcaaggtttgctacgtcctctgggcatctgcaaaaggccctgctctctggagtgttgtatatagtgtagcaaaagagtatttatacatcccaccaatcaaaacacagctttattacctcatgcgaactcatacaaaccaatagaatttcaacatgttctgtagcttagagtgctcacttactacctctgaacaatactcacgctgtagtttgtctctttcttatctttttgcatcttgtaattaactctttgtttcccttcataaaatgtaatgtacattgtaatcttttaaaagaaaaatcagggttgcacttgcaacttttaaaaaaccgagtgtggaaacattgggtcttaattcaacacaggatcggtaaaactgttgtaaatactgagaaacattttgaatgttcttcatcttattactaatccatgcaaaaaaaaaaaaaaaagcagcgactaattgtgatgcattcagatttcagtattcagtactgtatatttcaccctgtgtaatggggccccctctcctttctctctttttgtattgtatgcgattctgaaactgattgagtcatgaaaataatttgtggcggtgattctaatgtattaaaaacgtttcgtgttcctttctaactggattacaccctggattgaaaaagtcttcctcgtggtagttatatgtagtttcaaacatgaataaactttttgctttcatgattaaa

SEQ ID NO: 168702 - DNA, 1130 bp, Homo sapiens
  Payload ID: 13221
  Gene Symbol: PBX3
  Gene Name: pre-B-cell leukemia homeobox 3
  ENST ID: ENST00000373482
  CDS Start-End: 1-282
atggacgatcaatccaggatgctgcagactctggccggggtgaacctggctggccactcggtgcaggggggcatggccctgccgcctcccccgcacggccacgaaggggcggacggcgacggcaggaagcaggacatcggcgacatcctccaccagatcatgaccatcaccgaccagagcttggacgaggcgcaagcaaagaaacatgccctgaactgtcacagaatgaaaccagcgctcttcagcgtcctgtgtgagatcaaagagaaaacaggcatgtaatgaatttactacacatgtgatgaaccttctccgagaacagagtagaacacgtcccatttctccaaaagagattgaaagaatggtgggcatcatccatcgaaaatttagttccattcagatgcagctcaaacaaagcacttgtgaagcagttatgattttaagatcaaggttccttgatgccagacggaaaaggcgtaacttcagtaaacaggccacagaaatcttgaatgaatatttttactcacacctcagcaacccctaccccagtgaagaagccaaagaggagctggccaagaaatgcagcatcacagtgtcacaggtatccaattggtttggcaacaaacgaatcaggtacaagaagaacattggcaagtttcaggaagaagccaacctctatgctgcaaagacggccgtgacagctgcacacgcagtagcagcagctgtgcagaacaaccagaccaattcgcccaccacaccaaattccggttcttctggttcttttaacctcccaaattctggggacatgttcatgaacatgcagagtctgaatggggattcttaccaagggtcccaagtcggagccaatgtgcaatcacaggtggataccctccgtcatgttatcaatcagacgggaggctacagtgatggccttggaggaaattcactgtacagtccacataatttaaatgctaatggaggctggcaggacgcaacaactccatcttctgtgacttctcctacagaaggcccaggaagtgtgcactcggatacctctaactaatctctggccacacttttccctgagctacatgccttgataagtgcattcagagcaataggaggaaaag

SEQ ID NO: 168703 - DNA, 2902 bp, Homo sapiens
  Payload ID: 13221
  Gene Symbol: PBX3
  Gene Name: pre-B-cell leukemia homeobox 3
  ENST ID: ENST00000373487
  CDS Start-End: 81-1448
tcctccctcgtcgccgccgccgccgccgccgcctcagccttcgcctcagccgccgcccgctcccgcccgcgcgcggcgggatggacgatcaatccaggatgctgcagactctggccggggtgaacctggctggccactcggtgcaggggggcatggccctgccgcctcccccgcacggccacgaaggggcggacggcgacggcaggaagcaggacatcggcgacatcctccaccagatcatgaccatcaccgaccagagcttggacgaggcgcaagcaaagaaacatgccctgaactgtcacagaatgaaaccagcgctcttcagcgtcctgtgtgagatcaaagagaaaacaggtctcagcatcagaggagcccaggaggaggaccctcccgatccccagctaatgagactggacaatatgcttttggcagaaggggtttcaggtcctgagaaaggtgggggatcggcggcagcagctgcagccgcggcagcctctggaggttcttcagataactctattgaacactcagattacagagccaaattgacccagatcagacaaatctatcacacagaactggagaaatatgaacaggcatgtaatgaatttactacacatgtgatgaaccttctccgagaacagagtagaacacgtcccatttctccaaaagagattgaaagaatggtgggcatcatccatcgaaaatttagttccattcagatgcagctcaaacaaagcacttgtgaagcagttatgattttaagatcaaggttccttgatgccagacggaaaaggcgtaacttcagtaaacaggccacagaaatcttgaatgaatatttttactcacacctcagcaacccctaccccagtgaagaagccaaagaggagctggccaagaaatgcagcatcacagtgtcacagagtcttgtaaaggatccaaaagaaagagggagcaaaggttctgacatccagccaactagcgtggtatccaattggtttggcaacaaacgaatcaggtacaagaagaacattggcaagtttcaggaagaagccaacctctatgctgcaaagacggccgtgacagctgcacacgcagtagcagcagctgtgcagaacaaccagaccaattcgcccaccacaccaaattccggttcttctggttcttttaacctcccaaattctggggacatgttcatgaacatgcagagtctgaatggggattcttaccaagggtcccaagtcggagccaatgtgcaatcacaggtggataccctccgtcatgttatcaatcagacgggaggctacagtgatggccttggaggaaattcactgtacagtccacataatttaaatgctaatggaggctggcaggacgcaacaactccatcttctgtgacttctcctacagaaggcccaggaagtgtgcactcggatacctctaactaatctctggccacacttttccctgagctacatgccttgataagtgcattcagagcaataggaggaaaaggaaagcgtttttgtagcccaccatctacagctttactgtaaaaccttgtcttattcgagaacttggtaaatctgttttttaaggaatcataatcatttgtatttatacttaaaaacacacaatgttaaaaaaaataaagcactttatccaattaggccaagatttaacattgttgacagtcctgtagctattttatcataatttattatcaatattttacattaatggtttcacagttgccaattacttggccttaagggtaaaaagtacaatatacactaaacctcaaccgttaaagcagatgcaaaaattcacctcacctaaattgaacttcttgcatatttccattactgacttggattgtctttctttcatatcactaatggagttggaataaagagctgtttgcctatccctgttaatgatggttgtgtttaagaatcttcctcgtcacgtttgtgttcagatctcttatgttataattagatcagagactggtagcatcgtttctctctctgaaagcaccagtgcccagagtctgctcggtaataaaattatggatccagattgttctgagagacgaagatacttgctgctgatagaggtgaaaacgagattgatccgtctggggttttacggtgtgcactgggtgctgcacagacttgtcaaggtttgctacgtcctctgggcatctgcaaaaggccctgctctctggagtgttgtatatagtgtagcaaaagagtatttatacatcccaccaatcaaaacacagctttattacctcatgcgaactcatacaaaccaatagaatttcaacatgttctgtagcttagagtgctcacttactacctctgaacaatactcacgctgtagtttgtctctttcttatctttttgcatcttgtaattaactctttgtttcccttcataaaatgtaatgtacattgtaatcttttaaaagaaaaatcagggttgcacttgcaacttttaaaaaaccgagtgtggaaacattgggtcttaattcaacacaggatcggtaaaactgttgtaaatactgagaaacattttgaatgttcttcatcttattactaatccatgcaaaaaaaaaaaaaaaagcagcgactaattgtgatgcattcagatttcagtattcagtactgtatatttcaccctgtgtaatggggccccctctcctttctctctttttgtattgtatgcgattctgaaactgattgagtcatgaaaataatttgtggcggtgattctaatgtattaaaaacgtttcgtgttcctttctaactggattacaccctggattgaaaaagtcttcctcgtggtagttatatgtagtttcaaacatgaataaactttttgctttcatgattaaa

SEQ ID NO: 168704 - DNA, 2775 bp, Homo sapiens
  Payload ID: 13221
  Gene Symbol: PBX3
  Gene Name: pre-B-cell leukemia homeobox 3
  Uniprot ID: P40426
  ENST ID: ENST00000373489
  CDS Start-End: 17-1321
gcccgcgcgcggcgggatggacgatcaatccaggatgctgcagactctggccggggtgaacctggctggccactcggtgcaggggggcatggccctgccgcctcccccgcacggccacgaaggggcggacggcgacggcaggaagcaggacatcggcgacatcctccaccagatcatgaccatcaccgaccagagcttggacgaggcgcaagcaaagaaacatgccctgaactgtcacagaatgaaaccagcgctcttcagcgtcctgtgtgagatcaaagagaaaacaggtctcagcatcagaggagcccaggaggaggaccctcccgatccccagctaatgagactggacaatatgcttttggcagaaggggtttcaggtcctgagaaaggtgggggatcggcggcagcagctgcagccgcggcagcctctggaggttcttcagataactctattgaacactcagattacagagccaaattgacccagatcagacaaatctatcacacagaactggagaaatatgaacaggcatgtaatgaatttactacacatgtgatgaaccttctccgagaacagagtagaacacgtcccatttctccaaaagagattgaaagaatggtgggcatcatccatcgaaaatttagttccattcagatgcagctcaaacaaagcacttgtgaagcagttatgattttaagatcaaggttccttgatgccagacggaaaaggcgtaacttcagtaaacaggccacagaaatcttgaatgaatatttttactcacacctcagcaacccctaccccagtgaagaagccaaagaggagctggccaagaaatgcagcatcacagtgtcacaggtatccaattggtttggcaacaaacgaatcaggtacaagaagaacattggcaagtttcaggaagaagccaacctctatgctgcaaagacggccgtgacagctgcacacgcagtagcagcagctgtgcagaacaaccagaccaattcgcccaccacaccaaattccggttcttctggttcttttaacctcccaaattctggggacatgttcatgaacatgcagagtctgaatggggattcttaccaagggtcccaagtcggagccaatgtgcaatcacaggtggataccctccgtcatgttatcaatcagacgggaggctacagtgatggccttggaggaaattcactgtacagtccacataatttaaatgctaatggaggctggcaggacgcaacaactccatcttctgtgacttctcctacagaaggcccaggaagtgtgcactcggatacctctaactaatctctggccacacttttccctgagctacatgccttgataagtgcattcagagcaataggaggaaaaggaaagcgtttttgtagcccaccatctacagctttactgtaaaaccttgtcttattcgagaacttggtaaatctgttttttaaggaatcataatcatttgtatttatacttaaaaacacacaatgttaaaaaaaataaagcactttatccaattaggccaagatttaacattgttgacagtcctgtagctattttatcataatttattatcaatattttacattaatggtttcacagttgccaattacttggccttaagggtaaaaagtacaatatacactaaacctcaaccgttaaagcagatgcaaaaattcacctcacctaaattgaacttcttgcatatttccattactgacttggattgtctttctttcatatcactaatggagttggaataaagagctgtttgcctatccctgttaatgatggttgtgtttaagaatcttcctcgtcacgtttgtgttcagatctcttatgttataattagatcagagactggtagcatcgtttctctctctgaaagcaccagtgcccagagtctgctcggtaataaaattatggatccagattgttctgagagacgaagatacttgctgctgatagaggtgaaaacgagattgatccgtctggggttttacggtgtgcactgggtgctgcacagacttgtcaaggtttgctacgtcctctgggcatctgcaaaaggccctgctctctggagtgttgtatatagtgtagcaaaagagtatttatacatcccaccaatcaaaacacagctttattacctcatgcgaactcatacaaaccaatagaatttcaacatgttctgtagcttagagtgctcacttactacctctgaacaatactcacgctgtagtttgtctctttcttatctttttgcatcttgtaattaactctttgtttcccttcataaaatgtaatgtacattgtaatcttttaaaagaaaaatcagggttgcacttgcaacttttaaaaaaccgagtgtggaaacattgggtcttaattcaacacaggatcggtaaaactgttgtaaatactgagaaacattttgaatgttcttcatcttattactaatccatgcaaaaaaaaaaaaaaaagcagcgactaattgtgatgcattcagatttcagtattcagtactgtatatttcaccctgtgtaatggggccccctctcctttctctctttttgtattgtatgcgattctgaaactgattgagtcatgaaaataatttgtggcggtgattctaatgtattaaaaacgtttcgtgttcctttctaactggattacaccctggattgaaaaagtcttcctcgtggtagttatatgtagtttcaaacatgaataaactttttgctttcatgattaaa

SEQ ID NO: 168705 - DNA, 950 bp, Homo sapiens
  Payload ID: 13221
  Gene Symbol: PBX3
  Gene Name: pre-B-cell leukemia homeobox 3
  ENST ID: ENST00000373492
  CDS Start-End: 1-282
atggacgatcaatccaggatgctgcagactctggccggggtgaacctggctggccactcggtgcaggggggcatggccctgccgcctcccccgcacggccacgaaggggcggacggcgacggcaggaagcaggacatcggcgacatcctccaccagatcatgaccatcaccgaccagagcttggacgaggcgcaagcaaagaaacatgccctgaactgtcacagaatgaaaccagcgctcttcagcgtcctgtgtgagatcaaagagaaaacaggcatgtaatgaatttactacacatgtgatgaaccttctccgagaacagagtagaacacgtcccatttctccaaaagagattgaaagaatggtgggcatcatccatcgaaaatttagttccattcagatgcagctcaaacaaagcacttgtgaagcagttatgattttaagatcaaggttccttgatgccagacggaaaaggcgtaacttcagtaaacaggccacagaaatcttgaatgaatatttttactcacacctcagcaacccctaccccagtgaagaagccaaagaggagctggccaagaaatgcagcatcacagtgtcacaggtatccaattggtttggcaacaaacgaatcaggtacaagaagaacattggcaagtttcaggaagaagccaacctctatgctgcaaagacggccgtgacagctgcacacgcagtagcagcagctgtgcagaacaaccagaccaattcgcccaccacaccaaattccggtggataccctccgtcatgttatcaatcagacgggaggctacagtgatggccttggaggaaattcactgtacagtccacataatttaaatgctaatggaggctggcaggacgcaacaactccatcttctgtgacttctcctacagaaggcccaggaagtgtgcactcggatacctctaactaa

SEQ ID NO: 168706 - DNA, 2789 bp, Homo sapiens
  Payload ID: 13221
  Gene Symbol: PBX3
  Gene Name: pre-B-cell leukemia homeobox 3
  Uniprot ID: P40426
  ENST ID: ENST00000447726
  CDS Start-End: 256-1335
ctctgcacaggagcggacgcgggagcccctccgcacccgtcccctcccccgggtcgccttcgcctgcccccggggcgaggctccccgcgcgggttcgcgtcgcgtctgcagtggccgaggctgctgcctgccgggcagatgggtccgccttgttccggctgcagctttcgccgccggggcttgctggctgtcgggaactagtcaactggagtttttgttgacttcccacggaaacatgccctgaactgtcacagaatgaaaccagcgctcttcagcgtcctgtgtgagatcaaagagaaaacaggtctcagcatcagaggagcccaggaggaggaccctcccgatccccagctaatgagactggacaatatgcttttggcagaaggggtttcaggtcctgagaaaggtgggggatcggcggcagcagctgcagccgcggcagcctctggaggttcttcagataactctattgaacactcagattacagagccaaattgacccagatcagacaaatctatcacacagaactggagaaatatgaacaggcatgtaatgaatttactacacatgtgatgaaccttctccgagaacagagtagaacacgtcccatttctccaaaagagattgaaagaatggtgggcatcatccatcgaaaatttagttccattcagatgcagctcaaacaaagcacttgtgaagcagttatgattttaagatcaaggttccttgatgccagacggaaaaggcgtaacttcagtaaacaggccacagaaatcttgaatgaatatttttactcacacctcagcaacccctaccccagtgaagaagccaaagaggagctggccaagaaatgcagcatcacagtgtcacaggtatccaattggtttggcaacaaacgaatcaggtacaagaagaacattggcaagtttcaggaagaagccaacctctatgctgcaaagacggccgtgacagctgcacacgcagtagcagcagctgtgcagaacaaccagaccaattcgcccaccacaccaaattccggttcttctggttcttttaacctcccaaattctggggacatgttcatgaacatgcagagtctgaatggggattcttaccaagggtcccaagtcggagccaatgtgcaatcacaggtggataccctccgtcatgttatcaatcagacgggaggctacagtgatggccttggaggaaattcactgtacagtccacataatttaaatgctaatggaggctggcaggacgcaacaactccatcttctgtgacttctcctacagaaggcccaggaagtgtgcactcggatacctctaactaatctctggccacacttttccctgagctacatgccttgataagtgcattcagagcaataggaggaaaaggaaagcgtttttgtagcccaccatctacagctttactgtaaaaccttgtcttattcgagaacttggtaaatctgttttttaaggaatcataatcatttgtatttatacttaaaaacacacaatgttaaaaaaaataaagcactttatccaattaggccaagatttaacattgttgacagtcctgtagctattttatcataatttattatcaatattttacattaatggtttcacagttgccaattacttggccttaagggtaaaaagtacaatatacactaaacctcaaccgttaaagcagatgcaaaaattcacctcacctaaattgaacttcttgcatatttccattactgacttggattgtctttctttcatatcactaatggagttggaataaagagctgtttgcctatccctgttaatgatggttgtgtttaagaatcttcctcgtcacgtttgtgttcagatctcttatgttataattagatcagagactggtagcatcgtttctctctctgaaagcaccagtgcccagagtctgctcggtaataaaattatggatccagattgttctgagagacgaagatacttgctgctgatagaggtgaaaacgagattgatccgtctggggttttacggtgtgcactgggtgctgcacagacttgtcaaggtttgctacgtcctctgggcatctgcaaaaggccctgctctctggagtgttgtatatagtgtagcaaaagagtatttatacatcccaccaatcaaaacacagctttattacctcatgcgaactcatacaaaccaatagaatttcaacatgttctgtagcttagagtgctcacttactacctctgaacaatactcacgctgtagtttgtctctttcttatctttttgcatcttgtaattaactctttgtttcccttcataaaatgtaatgtacattgtaatcttttaaaagaaaaatcagggttgcacttgcaacttttaaaaaaccgagtgtggaaacattgggtcttaattcaacacaggatcggtaaaactgttgtaaatactgagaaacattttgaatgttcttcatcttattactaatccatgcaaaaaaaaaaaaaaaagcagcgactaattgtgatgcattcagatttcagtattcagtactgtatatttcaccctgtgtaatggggccccctctcctttctctctttttgtattgtatgcgattctgaaactgattgagtcatgaaaataatttgtggcggtgattctaatgtattaaaaacgtttcgtgttcctttctaactggattacaccctggattgaaaaagtcttcctcgtggtagttatatgtagtttcaaacatgaataaactttttgctttcatgattaaa

SEQ ID NO: 168707 - DNA, 528 bp, Homo sapiens
  Payload ID: 13221
  Gene Symbol: PBX3
  Gene Name: pre-B-cell leukemia homeobox 3
  ENST ID: ENST00000428092
  CDS Start-End: 1-528
ttgtttcctggagaataagtcaggagcaattacatgtctcagcatcagaggagcccaggaggaggaccctcccgatccccagctaatgagactggacaatatgcttttggcagaaggggtttcaggtcctgagaaaggtgggggatcggcggcagcagctgcagccgcggcagcctctggaggttcttcagataactctattgaacactcagattacagagccaaattgacccagatcagacaaatctatcacacagaactggagaaatatgaacaggcatgtaatgaatttactacacatgtgatgaaccttctccgagaacagagtagaacacgtcccatttctccaaaagagattgaaagaatggtgggcatcatccatcgaaaatttagttccattcagatgcagctcaaacaaagcacttgtgaagcagttatgattttaagatcaaggttccttgatgccagacggaaaaggcgtaacttcagtaaacaggccacagaaatcttgaatgaatatttttactc

SEQ ID NO: 168708 - DNA, 875 bp, Homo sapiens
  Payload ID: 13221
  Gene Symbol: PBX3
  Gene Name: pre-B-cell leukemia homeobox 3
  ENST ID: ENST00000491787
  CDS Start-End: 394-875
cgcagtcggccggcctcctctgcacaggagcggacgcgggagcccctccgcacccgtcccctcccccgggtcgccttcgcctgcccccggggcgaggctccccgcgcgggttcgcgtcgcgtctgcagtggccgaggctgctgcctgccgggcagatgggtccgccttgttccggctgcagctttcgccgccggggcttgctggctgtcgggaactagtcaactggagtttttgttgacttcccacggttcaaaagggccttccagaatggggggctggaattaaatcttgggtctaacttaaaggaaggcgccatattattccataggtgatgctaatacctttgtgtttcgttatttgttttttaggaaacatgccctgaactgtcacagaatgaaaccagcgctcttcagcgtcctgtgtgagatcaaagagaaaacaggtctcagcatcagaggagcccaggaggaggaccctcccgatccccagctaatgagactggacaatatgcttttggcagaaggggtttcaggtcctgagaaaggtgggggatcggcggcagcagctgcagccgcggcagcctctggaggttcttcagataactctattgaacactcagattacagagccaaattgacccagatcagacaaatctatcacacagaactggagaaatatgaacaggcatgtaatgaatttactacacatgtgatgaaccttctccgagaacagagtagaacacgtcccatttctccaaaagagattgaaagaatggtgggcatcatccatcgaaaatttagttccattcagatgcagctcaaacaaagcacttgtgaagcagttatgattttaagatcaaggttccttgatgccag

SEQ ID NO: 168709 - DNA, 1724 bp, Homo sapiens
  Payload ID: 13222
  Gene Symbol: PBX4
  Gene Name: pre-B-cell leukemia homeobox 4
  Uniprot ID: Q9BYU1
  ENST ID: ENST00000251203
  CDS Start-End: 288-1412
agaagtgccgttgcctcggcaaccccaaacccagtccaagcccggagagggggaagttcggggcgagtcccgggggcggtgcgtggcgccggttggctgacggagatgaaggggcgtgtctgtaggcggtgcaatacacgggttggctggcgatagcggcggtgggcgtggcttaggcgcgagcgagagcgggcgcggcgctcaggcagcggcggttggctgcggcgccagtggtagtgctccaggctcgacggcaccctcacagcgcccgcccggccctgccgctcatggccgccccgccgcgccccgcgccatcgccccccgccccgcggcgcctcgacacgagcgacgtcctgcagcagatcatggccatcaccgaccagagcctggacgaggcacaggccagaaagcatgctctgaattgccatcggatgaagcctgctctgttcagcgtgctctgtgagatcaaggaaaagacagtggtaagcatccgtggcattcaagacgaagatccccctgacgcccagctcctgaggctggataacatgctgctggctgagggcgtgtgcaggcccgagaagagaggaagaggaggagcggtggccagggccggcacagcaacaccaggtggctgtccaaatgacaatagcattgagcactctgactacagggccaagctgtcccagatccgacagatttaccactctgagctagagaaatatgaacaggcctgtcgtgagttcaccacgcacgtcaccaacctcctccaggagcagagcaggatgaggcctgtctcccctaaggagattgagcgcatggtcggcgccattcacggcaagttcagcgccatccagatgcagttgaagcagagcacctgtgaggcagtgatgaccctgcgttcgcggctgctcgatgccaggcgcaagcggcggaatttcagcaagcaggcgacggaagtgctgaatgagtatttttactcccatctgaacaacccttaccccagcgaagaagccaaagaagagctggccaggaagggcggcctcaccatctcccaggtctctaactggtttggcaacaaaagaatccggtataaaaagaacatggggaagtttcaagaagaggctaccatttacacgggtaaaacggctgtggataccacggaagttggggtcccagggaaccacgccagctgcctgtcaacacctagctccggctcctctggacccttcccgctgcccagcgctggggacgccttcctcaccctgcggactctggcctctctccagcctcctcctgggggaggctgcctgcagtcccaggcccagggtagctggcagggggccaccccccaacctgcaactgcctcacctgctggagaccctggcagcatcaactccagtacatctaattaagtttgggggataagcaggaaagagcgctgcgtgagctgccatgtatcgccagccgttgctttgttactgaacgtgccgccgacgacctcagaaaacccagatgggtggtggtgcccatgagcccctgctcctcagccaggcccgtggcgccggctcatgtgtctgctgcgactcgagatggcctgaaacgccactcattctcccacttcagttcgtttttttgacagtaattttatggtaacgctatgaattgaattgtctgttctaggactgggcacagattttcccattaaaatttttgacttattttaa

SEQ ID NO: 168710 - DNA, 1034 bp, Homo sapiens
  Payload ID: 13222
  Gene Symbol: PBX4
  Gene Name: pre-B-cell leukemia homeobox 4
  ENST ID: ENST00000558222
  CDS Start-End: 53-403
agtgctccaggctcgacggcaccctcacagcgcccgcccggccctgccgctcatggccgccccgccgcgccccgcgccatcgccccccgccccgcggcgcctcgacacgagcgacgtcctgcagcagatcatggccatcaccgaccagagcctggacgaggcacaggccagaaagcatgctctgaattgccatcggatgaagcctgctctgttcagcgtgctctgtgagatcaaggaaaagacagtggtaagcatccgtggcattcaagacgaagatccccctgacgcccagctcctgaggctggataacatgctgctggctgagggcgtgtgcaggcccgagaagagaggaagaggaggagcggtggccagggccggcacagcaacaccaggcctgtcgtgagttcaccacgcacgtcaccaacctcctccaggagcagagcaggatgaggcctgtctcccctaaggagattgagcgcatggtcggcgccattcacggcaagttcagcgccatccagatgcagttgaagcagagcacctgtgaggcagtgatgaccctgcgttcgcggctgctcgatgccaggcgcaagcggcggaatttcagcaagcaggcgacggaagtgctgaatgagtatttttactcccatctgaacaacccttaccccagcgaagaagccaaagaagagctggccaggaagggcggcctcaccatctcccaggtctctaactggtttggcaacaaaagaatccggtataaaaagaacatggggaagtttcaagaagaggctaccatttacacgggtaaaacggctgtggataccacggaagttggggtcccagggaaccacgccagctgcctgtcaacacctagctccggtgagtgaggctggcccagggacagtcatctgtacccatgtggacggccactgagctgcatctggggaggccacagtgggaccacatctcccttcccccagtggtcaactctgtgtaactctttcttctgtttcaactgtgagagttctgttcctctt

SEQ ID NO: 168711 - DNA, 1416 bp, Homo sapiens
  Payload ID: 13222
  Gene Symbol: PBX4
  Gene Name: pre-B-cell leukemia homeobox 4
  ENST ID: ENST00000557978
  CDS Start-End: 65-415
ggcgccagtggtagtgctccaggctcgacggcaccctcacagcgcccgcccggccctgccgctcatggccgccccgccgcgccccgcgccatcgccccccgccccgcggcgcctcgacacgagcgacgtcctgcagcagatcatggccatcaccgaccagagcctggacgaggcacaggccagaaagcatgctctgaattgccatcggatgaagcctgctctgttcagcgtgctctgtgagatcaaggaaaagacagtggtaagcatccgtggcattcaagacgaagatccccctgacgcccagctcctgaggctggataacatgctgctggctgagggcgtgtgcaggcccgagaagagaggaagaggaggagcggtggccagggccggcacagcaacaccaggcctgtcgtgagttcaccacgcacgtcaccaacctcctccaggagcagagcaggatgaggcctgtctcccctaaggagattgagcgcatggtcggcgccattcacggcaagttcagcgccatccagatgcagttgaagcagagcacctgtgaggcagtgatgaccctgcgttcgcggctgctcgatgccaggtcagggcctgcgcaagcggcggaatttcagcaagcaggcgacggaagtgctgaatgagtatttttactcccatctgaacaacccttaccccagcgaagaagccaaagaagagctggccaggaagggcggcctcaccatctcccaggtctctaactggtttggcaacaaaagaatccggtataaaaagaacatggggaagtttcaagaagaggctaccatttacacgggtaaaacggctgtggataccacggaagttggggtcccagggaaccacgccagctgcctgtcaacacctagctccggctcctctggacccttcccgctgcccagcgctggggacgccttcctcaccctgcggactctggcctctctccagcctcctcctgggggaggctgcctgcagtcccaggcccagggtagctggcagggggccaccccccaacctgcaactgcctcacctgctggagaccctggcagcatcaactccagtacatctaattaagtttgggggataagcaggaaagagcgctgcgtgagctgccatgtatcgccagccgttgctttgttactgaacgtgccgccgacgacctcagaaaacccagatgggtggtggtgcccatgagcccctgctcctcagccaggcccgtggcgccggctcatgtgtctgctgcgactcgagatggcctgaaacgccactcattctcccacttcagttcgtttttttgacagtaattttatggtaacgctatgaattgaattgtctgttctaggactgggcacagattttcccattaaaatttttgacttattttaattccga

SEQ ID NO: 168712 - DNA, 1175 bp, Homo sapiens
  Payload ID: 13223
  Gene Symbol: PBXIP1
  Gene Name: pre-B-cell leukemia homeobox interacting protein 1
  ENST ID: ENST00000368460
  CDS Start-End: 80-1027
ctgcaacaagttaagctgaagaccgaagcaagagctggttcaggtggcagccacagcagcctcagggacctcagcaactatggcctcctgcccagactctgataatagctgggtgcttgctggctccgagagcctgccagtggagacactgggcccggcatccaggatggacccagaatctgagagagccctgcaggcccctcacagcccctccaagacagatgggaaagaattagctgggaccatggatggagaagggacgctcttccagactgaaagccctcagtctggcagcattctaacagaggagactgaggtcaagggcaccctggaaggtgatgtttgtggtgtggagcctcctggcccaggagacacagtagtccagggagacctgcaggagaccaccgtggtgacaggcctgggaccagacacacaggacctggaaggccagagccctccacagagcctgccttcaacccccaaagcagcttggatcagggaggagggccgctgctccagcagtgacgatgacaccgacgtggacatggagggtctgcggagacggcggggccgggaggccggcccacctcagcccatggtgcccctggctgtggagaaccaggctgggggtggcctctcagagtctgagactgggcccatggaggaagtggagcggcaggtcctcccagaccccgaggtgctggaagctgtgggggacaggcaggatgggctaagggaacagctgcaggccccagtgcctcctgacagtgtccccagcctgcaaaacatgggtcttctgctggacaagctggccaaggagaaccaggacatccggctgctgcaggcccagctgcaggtgggcacaggcaggaggggctgggctagggtaacccacctaggccaggcgtctgtcctagcatcctcccccaaaaggaatgtttcctatttacccacacatcctgaccctcccctctcccactatagtcagggcgtcttcccagttcttggttcacatcccttgtgctaaggtttgggccagggctggcatacctgttccacatggtacatgaaacatacatggtatcacctgtgattgattggtgtggtctgcctggagcactgtgtggaaaaggatttaaagaacatgccaggtgccatgatcagttaacactgtt

SEQ ID NO: 168713 - DNA, 3212 bp, Homo sapiens
  Payload ID: 13223
  Gene Symbol: PBXIP1
  Gene Name: pre-B-cell leukemia homeobox interacting protein 1
  Uniprot ID: Q96AQ6
  ENST ID: ENST00000368463
  CDS Start-End: 73-2268
aagttaagctgaagaccgaagcaagagctggttcaggtggcagccacagcagcctcagggacctcagcaactatggcctcctgcccagactctgataatagctgggtgcttgctggctccgagagcctgccagtggagacactgggcccggcatccaggatggacccagaatctgagagagccctgcaggcccctcacagcccctccaagacagatgggaaagaattagctgggaccatggatggagaagggacgctcttccagactgaaagccctcagtctggcagcattctaacagaggagactgaggtcaagggcaccctggaaggtgatgtttgtggtgtggagcctcctggcccaggagacacagtagtccagggagacctgcaggagaccaccgtggtgacaggcctgggaccagacacacaggacctggaaggccagagccctccacagagcctgccttcaacccccaaagcagcttggatcagggaggagggccgctgctccagcagtgacgatgacaccgacgtggacatggagggtctgcggagacggcggggccgggaggccggcccacctcagcccatggtgcccctggctgtggagaaccaggctgggggtgagggtgcaggcggggagctgggcatctccctcaacatgtgcctccttggggccctggttctgcttggcctgggggtcctcctcttctcaggtggcctctcagagtctgagactgggcccatggaggaagtggagcggcaggtcctcccagaccccgaggtgctggaagctgtgggggacaggcaggatgggctaagggaacagctgcaggccccagtgcctcctgacagtgtccccagcctgcaaaacatgggtcttctgctggacaagctggccaaggagaaccaggacatccggctgctgcaggcccagctgcaggcccaaaaggaagagcttcagagcctgatgcaccagcccaaagggctagaggaggagaatgcccagctccggggggctctgcagcagggcgaagccttccagcgggctctggagtcagagctgcagcagctgcgggcccggctccaggggctggaggccgactgtgtccggggcccagatggggtgtgcctcagtgggggtagaggcccacagggtgacaaggccatcagggagcaaggccccagggagcaggagccagaactcagcttcctgaagcagaaggaacagctggaggctgaggcacaggcattaaggcaagagttagagaggcagcgacggctgctggggtctgtacagcaggatctggagaggagcttgcaggatgccagccgcggggacccagctcatgctggcttggctgagctgggccacagattggcccagaaactgcagggcctggagaactggggccaggaccctggggtctctgccaatgcctcaaaggcctggcaccagaagtcccacttccagaattctagggagtggagtggaaaggaaaagtggtgggatgggcagagagaccggaaggctgagcactggaaacataagaaggaagaatctggccgggaaaggaagaagaactggggaggtcaggaggacagggagccagcaggaaggtggaaggagggcaggccaagggtggaggagtcggggagcaagaaggagggcaagcgacagggcccgaaggaacccccaaggaaaagtggtagcttccactcctctggagaaaagcagaagcaacctcggtggagggaagggactaaggacagccatgaccccctgccatcctgggcagagctgttgaggcccaagtaccgggcaccccagggctgctcaggtgtggacgagtgtgcccggcaggagggcctgactttctttggcacagagctagccccagtgcggcaacaggagctggcctctctgctaagaacatacttggcacggctgccctgggctgggcagctgaccaaggagctacccctctcacctgctttctttggtgaggatggcatcttccgtcatgaccgcctccgcttccgggattttgtggatgccctggaggacagcttggaggaggtggctgtgcaacagacaggtgatgatgatgaagtagatgactttgaggacttcatcttcagccacttctttggagacaaagcactgaagaagaggtcagggaagaaggacaagcactcacagagcccaagagctgcggggcccagggaggggcacagccatagccaccaccaccaccaccggggctgacaccctgccccacagggaatggccttggcctggcccagcccaagatcccagcgttatctaactcctggagggtggactctgtcctggcttgtttggtgtcctcagatatctttcacacagtagagcaaaatcaccagccctgcactgatgtcactttatgtagaaaaaggccttagctggacctgcgttgccgtctatgcaaatgcatgcaaatactccaggccctgggatgtgggcttgtgttttgtcactgtgaagggggagatgggagaggagcctgttttggggtggggtctggggaaggcaatctgattctgaagctaaagagctttcatcctcttgagtgtatgtccccatagtgggccccttgacccacatgctgaccggtgccttgggatttgactagagttgctggctcgaggcccagcacgaggacttaccctggggttttgttaggtttggaagcagctgtccctagggggtgaagtcccccccctttttttttttacccctgcttctcccacggcttcacctccctatgtgaactgtagactcagatcccaataaagtgctgttgcagctatgatgctaggtggtttctaagcacaggggacaccccacaccccctgcctgaatggatgggtccatcccaggcactggtacttgcccccttgttctgtatccccctttgcccttgccttgcccttccaacaaaccctaggcccttgagaagctgatacttctccttttgctcacagctgccttggccccacccctgggagatgtagcaaattgagtgtgggttttggagtctgagcctcaggctcaaatccaggccaagtgatcttgggcaagttaatctctgggaactttgggtttcttatcctcaaaaaaggcgatggaagggctggggaagtgattaaataaaagcaacgcaagaaaaa

SEQ ID NO: 168714 - DNA, 3144 bp, Homo sapiens
  Payload ID: 13223
  Gene Symbol: PBXIP1
  Gene Name: pre-B-cell leukemia homeobox interacting protein 1
  Uniprot ID: Q96AQ6
  ENST ID: ENST00000368465
  CDS Start-End: 88-2196
aaagggaagcctgcaacaagttaagctgaagaccgaagcaagagctggttcagcctgccagtggagacactgggcccggcatccaggatggacccagaatctgagagagccctgcaggcccctcacagcccctccaagacagatgggaaagaattagctgggaccatggatggagaagggacgctcttccagactgaaagccctcagtctggcagcattctaacagaggagactgaggtcaagggcaccctggaaggtgatgtttgtggtgtggagcctcctggcccaggagacacagtagtccagggagacctgcaggagaccaccgtggtgacaggcctgggaccagacacacaggacctggaaggccagagccctccacagagcctgccttcaacccccaaagcagcttggatcagggaggagggccgctgctccagcagtgacgatgacaccgacgtggacatggagggtctgcggagacggcggggccgggaggccggcccacctcagcccatggtgcccctggctgtggagaaccaggctgggggtgagggtgcaggcggggagctgggcatctccctcaacatgtgcctccttggggccctggttctgcttggcctgggggtcctcctcttctcaggtggcctctcagagtctgagactgggcccatggaggaagtggagcggcaggtcctcccagaccccgaggtgctggaagctgtgggggacaggcaggatgggctaagggaacagctgcaggccccagtgcctcctgacagtgtccccagcctgcaaaacatgggtcttctgctggacaagctggccaaggagaaccaggacatccggctgctgcaggcccagctgcaggcccaaaaggaagagcttcagagcctgatgcaccagcccaaagggctagaggaggagaatgcccagctccggggggctctgcagcagggcgaagccttccagcgggctctggagtcagagctgcagcagctgcgggcccggctccaggggctggaggccgactgtgtccggggcccagatggggtgtgcctcagtgggggtagaggcccacagggtgacaaggccatcagggagcaaggccccagggagcaggagccagaactcagcttcctgaagcagaaggaacagctggaggctgaggcacaggcattaaggcaagagttagagaggcagcgacggctgctggggtctgtacagcaggatctggagaggagcttgcaggatgccagccgcggggacccagctcatgctggcttggctgagctgggccacagattggcccagaaactgcagggcctggagaactggggccaggaccctggggtctctgccaatgcctcaaaggcctggcaccagaagtcccacttccagaattctagggagtggagtggaaaggaaaagtggtgggatgggcagagagaccggaaggctgagcactggaaacataagaaggaagaatctggccgggaaaggaagaagaactggggaggtcaggaggacagggagccagcaggaaggtggaaggagggcaggccaagggtggaggagtcggggagcaagaaggagggcaagcgacagggcccgaaggaacccccaaggaaaagtggtagcttccactcctctggagaaaagcagaagcaacctcggtggagggaagggactaaggacagccatgaccccctgccatcctgggcagagctgttgaggcccaagtaccgggcaccccagggctgctcaggtgtggacgagtgtgcccggcaggagggcctgactttctttggcacagagctagccccagtgcggcaacaggagctggcctctctgctaagaacatacttggcacggctgccctgggctgggcagctgaccaaggagctacccctctcacctgctttctttggtgaggatggcatcttccgtcatgaccgcctccgcttccgggattttgtggatgccctggaggacagcttggaggaggtggctgtgcaacagacaggtgatgatgatgaagtagatgactttgaggacttcatcttcagccacttctttggagacaaagcactgaagaagaggtcagggaagaaggacaagcactcacagagcccaagagctgcggggcccagggaggggcacagccatagccaccaccaccaccaccggggctgacaccctgccccacagggaatggccttggcctggcccagcccaagatcccagcgttatctaactcctggagggtggactctgtcctggcttgtttggtgtcctcagatatctttcacacagtagagcaaaatcaccagccctgcactgatgtcactttatgtagaaaaaggccttagctggacctgcgttgccgtctatgcaaatgcatgcaaatactccaggccctgggatgtgggcttgtgttttgtcactgtgaagggggagatgggagaggagcctgttttggggtggggtctggggaaggcaatctgattctgaagctaaagagctttcatcctcttgagtgtatgtccccatagtgggccccttgacccacatgctgaccggtgccttgggatttgactagagttgctggctcgaggcccagcacgaggacttaccctggggttttgttaggtttggaagcagctgtccctagggggtgaagtcccccccctttttttttttacccctgcttctcccacggcttcacctccctatgtgaactgtagactcagatcccaataaagtgctgttgcagctatgatgctaggtggtttctaagcacaggggacaccccacaccccctgcctgaatggatgggtccatcccaggcactggtacttgcccccttgttctgtatccccctttgcccttgccttgcccttccaacaaaccctaggcccttgagaagctgatacttctccttttgctcacagctgccttggccccacccctgggagatgtagcaaattgagtgtgggttttggagtctgagcctcaggctcaaatccaggccaagtgatcttgggcaagttaatctctgggaactttgggtttcttatcctcaaaaaaggcgatggaagggctggggaagtgattaaataaaagcaacgcaagaaaaatgcc

SEQ ID NO: 168715 - DNA, 853 bp, Homo sapiens
  Payload ID: 13223
  Gene Symbol: PBXIP1
  Gene Name: pre-B-cell leukemia homeobox interacting protein 1
  ENST ID: ENST00000490230
  CDS Start-End: 92-535
acaaagggaagcctgcaacaagttaagctgaagaccgaagcaagagctggttcaggtggcagccacagcagcctcagggacctcagcaactatggcctcctgcccagactctgataatagctgggtgcttgctggctccgagagcctgccagtggagacactgggcccggcatccaggatggacccagaatctgagagagccctgcaggcccctcacagcccctccaagacagatgggaaagaattagctgggaccatggatggagaagggacgctcttccagactgaaagccctcagtctggcagcattctaacagaggagactgaggtcaagggcaccctggaaggtgatgtttgtggtgtggagcctcctggcccaggagacacagtagtccagggagacctgcaggagaccaccgtggtgacaggcctgggaccagacacacaggacctggaaggccagagccctccacagagcctgccttcaacccccaaagcagtcacctcactgccctgtccctgtcctttcccctagcttggatcagggaggagggccgctgctccagcagtgacgatgacaccgacgtggacatggagggtctgcggagacggcggggccgggaggccggcccacctcagcccatggtgcccctggctgtggagaaccaggctgggggtgagggtgcaggcggggagctgggcatctccctcaacatgtgcctccttggggccctggttctgcttggcctgggggtcctcctcttctcaggtggcctctcagagtctgagactgggcccatggaggaagtggagcggcaggtcctcccagaccccgaggtgctggaagctgtgg

SEQ ID NO: 168716 - DNA, 2202 bp, Homo sapiens
  Payload ID: 13224
  Gene Symbol: PRAME
  Gene Name: preferentially expressed antigen in melanoma
  Uniprot ID: P78395
  ENST ID: ENST00000398741
  CDS Start-End: 308-1837
aatgtagggaaagcagggcggagtcctctgcaggctcgggggaggggaggggcgtgaatgcgtggatttctgtggagagtggaaacacggggagtcgaggggagcatgcgcgggcctcagaaagttctgggaaaccgactcccgggagcagggaggaacgcgcgctccagagacaacttcgcggtgtggtgaactctctgaggaaaaaccattttgattattactctcagacgtgcgtggcaacaagtgactgagacctagaaatccaagcgttggaggtcctgaggccagcctaagtcgcttcaaaatggaacgaaggcgtttgtggggttccattcagagccgatacatcagcatgagtgtgtggacaagcccacggagacttgtggagctggcagggcagagcctgctgaaggatgaggccctggccattgccgccctggagttgctgcccagggagctcttcccgccactcttcatggcagcctttgacgggagacacagccagaccctgaaggcaatggtgcaggcctggcccttcacctgcctccctctgggagtgctgatgaagggacaacatcttcacctggagaccttcaaagctgtgcttgatggacttgatgtgctccttgcccaggaggttcgccccaggaggtggaaacttcaagtgctggatttacggaagaactctcatcaggacttctggactgtatggtctggaaacagggccagtctgtactcatttccagagccagaagcagctcagcccatgacaaagaagcgaaaagtagatggtttgagcacagaggcagagcagcccttcattccagtagaggtgctcgtagacctgttcctcaaggaaggtgcctgtgatgaattgttctcctacctcattgagaaagtgaagcgaaagaaaaatgtactacgcctgtgctgtaagaagctgaagatttttgcaatgcccatgcaggatatcaagatgatcctgaaaatggtgcagctggactctattgaagatttggaagtgacttgtacctggaagctacccaccttggcgaaattttctccttacctgggccagatgattaatctgcgtagactcctcctctcccacatccatgcatcttcctacatttccccggagaaggaagagcagtatatcgcccagttcacctctcagttcctcagtctgcagtgcctgcaggctctctatgtggactctttatttttccttagaggccgcctggatcagttgctcaggcacgtgatgaaccccttggaaaccctctcaataactaactgccggctttcggaaggggatgtgatgcatctgtcccagagtcccagcgtcagtcagctaagtgtcctgagtctaagtggggtcatgctgaccgatgtaagtcccgagcccctccaagctctgctggagagagcctctgccaccctccaggacctggtctttgatgagtgtgggatcacggatgatcagctccttgccctcctgccttccctgagccactgctcccagcttacgaccttaagcttctacgggaattccatctccatatctgccctgcagagtctcctgcagcacctcatcgggctgagcaatctgacccacgtgctgtatcctgtccccctggagagttatgaggacatccatggtaccctccacctggagaggcttgcctatctgcatgccaggctcagggagttgctgtgtgagttggggcggcccagcatggtctggcttagtgccaacccctgtcctcactgtggggacagaaccttctatgacccggagcccatcctgtgcccctgtttcatgcctaattagctgggtgcacatatcaaatgcttcattctgcatacttggacactaaagccaggatgtgcatgcatcttgaagcaacaaagcagccacagtttcagacaaatgttcagtgtgagtgaggaaaacatgttcagtgaggaaaaaacattcagacaaatgttcagtgaggaaaaaaaggggaagttgggggtaggcagatgttgacttgaggagttaatgtgatctttggggagatacatcttatagagttagaaatagaatctgaatttctaaagggagattctggcttgggaagtacatgtaggagttaatccctgtgtagactgttgtaaagaaactgttgaaaataaagagaagcaatgtgaagc

SEQ ID NO: 168717 - DNA, 2196 bp, Homo sapiens
  Payload ID: 13224
  Gene Symbol: PRAME
  Gene Name: preferentially expressed antigen in melanoma
  Uniprot ID: P78395
  ENST ID: ENST00000398743
  CDS Start-End: 301-1830
gttttgcatacagtccctgttgactctagtgccccctgctggccccagacgcgagttccggcgaggcttcagggtacagctcccccgcagccagaagccgggcctgcagcgcctcagcaccgctccgggacaccccacccgcttcccaggcgtgacctgtcaacagcaacttcgcggtgtggtgaactctctgaggaaaaaccattttgattattactctcagacgtgcgtggcaacaagtgactgagacctagaaatccaagcgttggaggtcctgaggccagcctaagtcgcttcaaaatggaacgaaggcgtttgtggggttccattcagagccgatacatcagcatgagtgtgtggacaagcccacggagacttgtggagctggcagggcagagcctgctgaaggatgaggccctggccattgccgccctggagttgctgcccagggagctcttcccgccactcttcatggcagcctttgacgggagacacagccagaccctgaaggcaatggtgcaggcctggcccttcacctgcctccctctgggagtgctgatgaagggacaacatcttcacctggagaccttcaaagctgtgcttgatggacttgatgtgctccttgcccaggaggttcgccccaggaggtggaaacttcaagtgctggatttacggaagaactctcatcaggacttctggactgtatggtctggaaacagggccagtctgtactcatttccagagccagaagcagctcagcccatgacaaagaagcgaaaagtagatggtttgagcacagaggcagagcagcccttcattccagtagaggtgctcgtagacctgttcctcaaggaaggtgcctgtgatgaattgttctcctacctcattgagaaagtgaagcgaaagaaaaatgtactacgcctgtgctgtaagaagctgaagatttttgcaatgcccatgcaggatatcaagatgatcctgaaaatggtgcagctggactctattgaagatttggaagtgacttgtacctggaagctacccaccttggcgaaattttctccttacctgggccagatgattaatctgcgtagactcctcctctcccacatccatgcatcttcctacatttccccggagaaggaagagcagtatatcgcccagttcacctctcagttcctcagtctgcagtgcctgcaggctctctatgtggactctttatttttccttagaggccgcctggatcagttgctcaggcacgtgatgaaccccttggaaaccctctcaataactaactgccggctttcggaaggggatgtgatgcatctgtcccagagtcccagcgtcagtcagctaagtgtcctgagtctaagtggggtcatgctgaccgatgtaagtcccgagcccctccaagctctgctggagagagcctctgccaccctccaggacctggtctttgatgagtgtgggatcacggatgatcagctccttgccctcctgccttccctgagccactgctcccagcttacgaccttaagcttctacgggaattccatctccatatctgccctgcagagtctcctgcagcacctcatcgggctgagcaatctgacccacgtgctgtatcctgtccccctggagagttatgaggacatccatggtaccctccacctggagaggcttgcctatctgcatgccaggctcagggagttgctgtgtgagttggggcggcccagcatggtctggcttagtgccaacccctgtcctcactgtggggacagaaccttctatgacccggagcccatcctgtgcccctgtttcatgcctaattagctgggtgcacatatcaaatgcttcattctgcatacttggacactaaagccaggatgtgcatgcatcttgaagcaacaaagcagccacagtttcagacaaatgttcagtgtgagtgaggaaaacatgttcagtgaggaaaaaacattcagacaaatgttcagtgaggaaaaaaaggggaagttgggggtaggcagatgttgacttgaggagttaatgtgatctttggggagatacatcttatagagttagaaatagaatctgaatttctaaagggagattctggcttgggaagtacatgtaggagttaatccctgtgtagactgttgtaaagaaactgttgaaaataaagagaagcaatgtgaagca

SEQ ID NO: 168718 - DNA, 740 bp, Homo sapiens
  Payload ID: 13224
  Gene Symbol: PRAME
  Gene Name: preferentially expressed antigen in melanoma
  ENST ID: ENST00000406503
  CDS Start-End: 384-731
gtacagctcccccgcagccagaagccgggcctgcagcgcctcagcaccgctccgggacaccccacccgcttcccaggcgtgacctgtcaacagcaacttcgcggtgtggtgaactctctgaggaaaaaccccaggaaacactggtgctcaggtttggagccagagatttgcactgaaagggcgggattgagtcgccagttgtcagtttcctcagcagtatttgcggaggttttcacaggaggccgttgcttcgtaaatattatacatgtattcttctttttggagcattttgattattactctcagacgtgcgtggcaacaagtgactgagacctagaaatccaagcgttggaggtcctgaggccagcctaagtcgcttcaaaatggaacgaaggcgtttgtggggttccattcagagccgatacatcagcatgagtgtgtggacaagcccacggagacttgtggagctggcagggcagagcctgctgaaggatgaggccctggccattgccgccctggagttgctgcccagggagctcttcccgccactcttcatggcagcctttgacgggagacacagccagaccctgaaggcaatggtgcaggcctggcccttcacctgcctccctctgggagtgctgatgaagggacaacatcttcacctggagaccttcaaagctgtgcttgatggacttgatgtgctccttgcccaggaggttcgccccaggtaagggtgacct

SEQ ID NO: 168719 - DNA, 2179 bp, Homo sapiens
  Payload ID: 13224
  Gene Symbol: PRAME
  Gene Name: preferentially expressed antigen in melanoma
  Uniprot ID: P78395
  ENST ID: ENST00000405655
  CDS Start-End: 287-1816
aatgtagggaaagcagggcggagtcctctgcaggctcgggggaggggaggggcgtgaatgcgtggatttctgtggagagtggaaacacggggagtcgaggggagcatgcgcgggcctcagaaagttctgggaaaccgactcccgggagcagggaggaacgcgcgctccagagacaacttcgcggtgtggtgaactctctgaggaaaaacacgtgcgtggcaacaagtgactgagacctagaaatccaagcgttggaggtcctgaggccagcctaagtcgcttcaaaatggaacgaaggcgtttgtggggttccattcagagccgatacatcagcatgagtgtgtggacaagcccacggagacttgtggagctggcagggcagagcctgctgaaggatgaggccctggccattgccgccctggagttgctgcccagggagctcttcccgccactcttcatggcagcctttgacgggagacacagccagaccctgaaggcaatggtgcaggcctggcccttcacctgcctccctctgggagtgctgatgaagggacaacatcttcacctggagaccttcaaagctgtgcttgatggacttgatgtgctccttgcccaggaggttcgccccaggaggtggaaacttcaagtgctggatttacggaagaactctcatcaggacttctggactgtatggtctggaaacagggccagtctgtactcatttccagagccagaagcagctcagcccatgacaaagaagcgaaaagtagatggtttgagcacagaggcagagcagcccttcattccagtagaggtgctcgtagacctgttcctcaaggaaggtgcctgtgatgaattgttctcctacctcattgagaaagtgaagcgaaagaaaaatgtactacgcctgtgctgtaagaagctgaagatttttgcaatgcccatgcaggatatcaagatgatcctgaaaatggtgcagctggactctattgaagatttggaagtgacttgtacctggaagctacccaccttggcgaaattttctccttacctgggccagatgattaatctgcgtagactcctcctctcccacatccatgcatcttcctacatttccccggagaaggaagagcagtatatcgcccagttcacctctcagttcctcagtctgcagtgcctgcaggctctctatgtggactctttatttttccttagaggccgcctggatcagttgctcaggcacgtgatgaaccccttggaaaccctctcaataactaactgccggctttcggaaggggatgtgatgcatctgtcccagagtcccagcgtcagtcagctaagtgtcctgagtctaagtggggtcatgctgaccgatgtaagtcccgagcccctccaagctctgctggagagagcctctgccaccctccaggacctggtctttgatgagtgtgggatcacggatgatcagctccttgccctcctgccttccctgagccactgctcccagcttacgaccttaagcttctacgggaattccatctccatatctgccctgcagagtctcctgcagcacctcatcgggctgagcaatctgacccacgtgctgtatcctgtccccctggagagttatgaggacatccatggtaccctccacctggagaggcttgcctatctgcatgccaggctcagggagttgctgtgtgagttggggcggcccagcatggtctggcttagtgccaacccctgtcctcactgtggggacagaaccttctatgacccggagcccatcctgtgcccctgtttcatgcctaattagctgggtgcacatatcaaatgcttcattctgcatacttggacactaaagccaggatgtgcatgcatcttgaagcaacaaagcagccacagtttcagacaaatgttcagtgtgagtgaggaaaacatgttcagtgaggaaaaaacattcagacaaatgttcagtgaggaaaaaaaggggaagttgggggtaggcagatgttgacttgaggagttaatgtgatctttggggagatacatcttatagagttagaaatagaatctgaatttctaaagggagattctggcttgggaagtacatgtaggagttaatccctgtgtagactgttgtaaagaaactgttgaaaataaagagaagcaatgtgaa

SEQ ID NO: 168720 - DNA, 567 bp, Homo sapiens
  Payload ID: 13224
  Gene Symbol: PRAME
  Gene Name: preferentially expressed antigen in melanoma
  ENST ID: ENST00000403441
  CDS Start-End: 309-567
ctcgactctctgggcgacctcactggatctcgtgagattttgccctggaaggactgagaaacggggattggtcagaccaggctgcccagccccccggtccccaccgccgccccccccgccccacgcagcggctagggcgcttagctgagccattgtctcgttctttccttccagcaacttcgcggtgtggtgaactctctgaggaaaaaccattttgattattactctcagacgtgcgtggcaacaagtgactgagacctagaaatccaagcgttggaggtcctgaggccagcctaagtcgcttcaaaatggaacgaaggcgtttgtggggttccattcagagccgatacatcagcatgagtgtgtggacaagcccacggagacttgtggagctggcagggcagagcctgctgaaggatgaggccctggccattgccgccctggagttgctgcccagggagctcttcccgccactcttcatggcagcctttgacgggagacacagccagaccctgaaggcaatggtgcaggcctggcccttcacctgcctccctctgggagtgctga

SEQ ID NO: 168721 - DNA, 2057 bp, Homo sapiens
  Payload ID: 13224
  Gene Symbol: PRAME
  Gene Name: preferentially expressed antigen in melanoma
  Uniprot ID: P78395
  ENST ID: ENST00000402697
  CDS Start-End: 228-1757
gagttccggcgaggcttcagggtacagctcccccgcagccagaagccgggcctgcagcgcctcagcaccgctccgggacaccccacccgcttcccaggcgtgacctgtcaacagcaacttcgcggtgtggtgaactctctgaggaaaaacacgtgcgtggcaacaagtgactgagacctagaaatccaagcgttggaggtcctgaggccagcctaagtcgcttcaaaatggaacgaaggcgtttgtggggttccattcagagccgatacatcagcatgagtgtgtggacaagcccacggagacttgtggagctggcagggcagagcctgctgaaggatgaggccctggccattgccgccctggagttgctgcccagggagctcttcccgccactcttcatggcagcctttgacgggagacacagccagaccctgaaggcaatggtgcaggcctggcccttcacctgcctccctctgggagtgctgatgaagggacaacatcttcacctggagaccttcaaagctgtgcttgatggacttgatgtgctccttgcccaggaggttcgccccaggaggtggaaacttcaagtgctggatttacggaagaactctcatcaggacttctggactgtatggtctggaaacagggccagtctgtactcatttccagagccagaagcagctcagcccatgacaaagaagcgaaaagtagatggtttgagcacagaggcagagcagcccttcattccagtagaggtgctcgtagacctgttcctcaaggaaggtgcctgtgatgaattgttctcctacctcattgagaaagtgaagcgaaagaaaaatgtactacgcctgtgctgtaagaagctgaagatttttgcaatgcccatgcaggatatcaagatgatcctgaaaatggtgcagctggactctattgaagatttggaagtgacttgtacctggaagctacccaccttggcgaaattttctccttacctgggccagatgattaatctgcgtagactcctcctctcccacatccatgcatcttcctacatttccccggagaaggaagagcagtatatcgcccagttcacctctcagttcctcagtctgcagtgcctgcaggctctctatgtggactctttatttttccttagaggccgcctggatcagttgctcaggcacgtgatgaaccccttggaaaccctctcaataactaactgccggctttcggaaggggatgtgatgcatctgtcccagagtcccagcgtcagtcagctaagtgtcctgagtctaagtggggtcatgctgaccgatgtaagtcccgagcccctccaagctctgctggagagagcctctgccaccctccaggacctggtctttgatgagtgtgggatcacggatgatcagctccttgccctcctgccttccctgagccactgctcccagcttacgaccttaagcttctacgggaattccatctccatatctgccctgcagagtctcctgcagcacctcatcgggctgagcaatctgacccacgtgctgtatcctgtccccctggagagttatgaggacatccatggtaccctccacctggagaggcttgcctatctgcatgccaggctcagggagttgctgtgtgagttggggcggcccagcatggtctggcttagtgccaacccctgtcctcactgtggggacagaaccttctatgacccggagcccatcctgtgcccctgtttcatgcctaattagctgggtgcacatatcaaatgcttcattctgcatacttggacactaaagccaggatgtgcatgcatcttgaagcaacaaagcagccacagtttcagacaaatgttcagtgtgagtgaggaaaacatgttcagtgaggaaaaaacattcagacaaatgttcagtgaggaaaaaaaggggaagttgggggtaggcagatgttgacttgaggagttaatgtgatctttggggagatacatcttatagagttagaaatagaatctgaatttctaaagggagattctggcttgggaagtacatgta

SEQ ID NO: 168722 - DNA, 581 bp, Homo sapiens
  Payload ID: 13224
  Gene Symbol: PRAME
  Gene Name: preferentially expressed antigen in melanoma
  ENST ID: ENST00000442481
  CDS Start-End: 147-341
ctttccttccagcaacttcgcggtgtggtgaactctctgaggaaaaaccattttgattattactctcagacgtgcgtggcaacaagtgactgagacctagaaatccaagcgttggaggtcctgaggccagcctaagtcgcttcaaaatggaacgaaggcgtttgtggcgtggagttgaaaggggaggtatgcccagaaaggcctgtaatagcttcagaggggccagaggagggacccagaggccatggagtcaatgttgtggtcttcccagaggtctgggcagatggcttctgcaccacagctgggtctgggttccattcagagccgatacatcagcatgagtgtgtggacaagcccacggagacttgtggagctggcagggcagagcctgctgaaggatgaggccctggccattgccgccctggagttgctgcccagggagctcttcccgccactcttcatggcagcctttgacgggagacacagccagaccctgaaggcaatggtgcaggcctggcccttcacctgcctccctctgggagtgctgatgaagggacaacatcttcacctggagaccttca

SEQ ID NO: 168723 - DNA, 566 bp, Homo sapiens
  Payload ID: 13224
  Gene Symbol: PRAME
  Gene Name: preferentially expressed antigen in melanoma
  ENST ID: ENST00000438888
  CDS Start-End: 1-566
agacgcaaaagcccacacttccagtggtgtcagagagtatgagctccaggaggctttgatctcactgccccatgggcttgggccattagggggttccattcagagccgatacatcagcatgagtgtgtggacaagcccacggagacttgtggagctggcagggcagagcctgctgaaggatgaggccctggccattgccgccctggagttgctgcccagggagctcttcccgccactcttcatggcagcctttgacgggagacacagccagaccctgaaggcaatggtgcaggcctggcccttcacctgcctccctctgggagtgctgatgaagggacaacatcttcacctggagaccttcaaagctgtgcttgatggacttgatgtgctccttgcccaggaggttcgccccaggaggtggaaacttcaagtgctggatttacggaagaactctcatcaggacttctggactgtatggtctggaaacagggccagtctgtactcatttccagagccagaagcagctcagcccatgacaaagaagcgaaaagtagatggtttgagca

SEQ ID NO: 168724 - DNA, 891 bp, Homo sapiens
  Payload ID: 13224
  Gene Symbol: PRAME
  Gene Name: preferentially expressed antigen in melanoma
  ENST ID: ENST00000439106
  CDS Start-End: 287-891
cgaggcttcagggtacagctcccccgcagccagaagccgggcctgcagcgcctcagcaccgctccgggacaccccacccgcttcccaggcgtgacctgtcaacagcaacttcgcggtgtggtgaactctctgaggaaaaacgaggccgttgcttcgtaaatattatacatgtattcttctttttggagcattttgattattactctcagacgtgcgtggcaacaagtgactgagacctagaaatccaagcgttggaggtcctgaggccagcctaagtcgcttcaaaatggaacgaaggcgtttgtggggttccattcagagccgatacatcagcatgagtgtgtggacaagcccacggagacttgtggagctggcagggcagagcctgctgaaggatgaggccctggccattgccgccctggagttgctgcccagggagctcttcccgccactcttcatggcagcctttgacgggagacacagccagaccctgaaggcaatggtgcaggcctggcccttcacctgcctccctctgggagtgctgatgaagggacaacatcttcacctggagaccttcaaagctgtgcttgatggacttgatgtgctccttgcccaggaggttcgccccaggaggtggaaacttcaagtgctggatttacggaagaactctcatcaggacttctggactgtatggtctggaaacagggccagtctgtactcatttccagagccagaagcagctcagcccatgacaaagaagcgaaaagtagatggtttgagcacagaggcagagcagcccttcattccagtagaggtgctcgtagacctgttcctcaaggaaggtgcctgtgatgaattgttctcctacctcattgagaaagtgaagcgaaa

SEQ ID NO: 168725 - DNA, 705 bp, Homo sapiens
  Payload ID: 13224
  Gene Symbol: PRAME
  Gene Name: preferentially expressed antigen in melanoma
  ENST ID: ENST00000420709
  CDS Start-End: 248-705
cgtggatttctgtggagagtggaaacacggggagtcgaggggagcatgcgcgggcctcagaaagttctgggaaaccgactcccgggagcagggaggaacgcgcgctccagagacaacttcgcggtgtggtgaactctctgaggaaaaaccattttgattattactctcagacgtgcgtggcaacaagtgactgagacctagaaatccaagcgttggaggtcctgaggccagcctaagtcgcttcaaaatggaacgaaggcgtttgtggggttccattcagagccgatacatcagcatgagtgtgtggacaagcccacggagacttgtggagctggcagggcagagcctgctgaaggatgaggccctggccattgccgccctggagttgctgcccagggagctcttcccgccactcttcatggcagcctttgacgggagacacagccagaccctgaaggcaatggtgcaggcctggcccttcacctgcctccctctgggagtgctgatgaagggacaacatcttcacctggagaccttcaaagctgtgcttgatggacttgatgtgctccttgcccaggaggttcgccccaggaggtggaaacttcaagtgctggatttacggaagaactctcatcaggacttctggactgtatggtctggaaacagggccagtctgtactcatttccagagccagaagcagctca

SEQ ID NO: 168726 - DNA, 2202 bp, Homo sapiens; identical to SEQ ID NO: 168716
  Payload ID: 13224
  Gene Symbol: PRAME
  Gene Name: preferentially expressed antigen in melanoma
  Uniprot ID: P78395
  ENST ID: ENST00000539862
  CDS Start-End: 308-1837

SEQ ID NO: 168727 - DNA, 2758 bp, Homo sapiens
  Payload ID: 13224
  Gene Symbol: PRAME
  Gene Name: preferentially expressed antigen in melanoma
  Uniprot ID: P78395
  ENST ID: ENST00000543184
  CDS Start-End: 864-2393
cgagttccggcgaggcttcagggtacagctcccccgcagccagaagccgggcctgcagcgcctcagcaccgctccgggacaccccacccgcttcccaggcgtgacctgtcaacagcaacttcgcggtgtggtgaactctctgaggaaaaacgtaagttcgagccctgattcctccgcttccccgcagggtgaccttgggcttgtgcccccagcaccacccctgtcccgggtccctgttttctctctggaaatgggttgaagaccaaagaaaataatgtgcgccacttgggtcaccccgggccgcctgccccggaaaattggccccagttgaggagttgtggctgtaaggatgccttgaaccgaggcggcggtgctcgtggttggagctctccagggtgggtgcgcatttgtaatgcggtggatgctctgggactcggcccctctgaaggtgctgggggttggggacggcccaggcagtggcgtaggcgtcctaggaaggcgggagcagaggcagaaatgtcgctgcaagaccgtagtcagggtccttgaccacaggggtcacttgtgaccaaccacatggtctgttgttcctcctgccccctggttcagcccaggaaacactggtgctcaggtttggagccagagatttgcactgaaagggcgggattgagtcgccagttgtcagtttcctcagcagtatttgcggaggttttcacaggaggccgttgcttcgtaaatattatacatgtattcttctttttggagcattttgattattactctcagacgtgcgtggcaacaagtgactgagacctagaaatccaagcgttggaggtcctgaggccagcctaagtcgcttcaaaatggaacgaaggcgtttgtggggttccattcagagccgatacatcagcatgagtgtgtggacaagcccacggagacttgtggagctggcagggcagagcctgctgaaggatgaggccctggccattgccgccctggagttgctgcccagggagctcttcccgccactcttcatggcagcctttgacgggagacacagccagaccctgaaggcaatggtgcaggcctggcccttcacctgcctccctctgggagtgctgatgaagggacaacatcttcacctggagaccttcaaagctgtgcttgatggacttgatgtgctccttgcccaggaggttcgccccaggaggtggaaacttcaagtgctggatttacggaagaactctcatcaggacttctggactgtatggtctggaaacagggccagtctgtactcatttccagagccagaagcagctcagcccatgacaaagaagcgaaaagtagatggtttgagcacagaggcagagcagcccttcattccagtagaggtgctcgtagacctgttcctcaaggaaggtgcctgtgatgaattgttctcctacctcattgagaaagtgaagcgaaagaaaaatgtactacgcctgtgctgtaagaagctgaagatttttgcaatgcccatgcaggatatcaagatgatcctgaaaatggtgcagctggactctattgaagatttggaagtgacttgtacctggaagctacccaccttggcgaaattttctccttacctgggccagatgattaatctgcgtagactcctcctctcccacatccatgcatcttcctacatttccccggagaaggaagagcagtatatcgcccagttcacctctcagttcctcagtctgcagtgcctgcaggctctctatgtggactctttatttttccttagaggccgcctggatcagttgctcaggcacgtgatgaaccccttggaaaccctctcaataactaactgccggctttcggaaggggatgtgatgcatctgtcccagagtcccagcgtcagtcagctaagtgtcctgagtctaagtggggtcatgctgaccgatgtaagtcccgagcccctccaagctctgctggagagagcctctgccaccctccaggacctggtctttgatgagtgtgggatcacggatgatcagctccttgccctcctgccttccctgagccactgctcccagcttacgaccttaagcttctacgggaattccatctccatatctgccctgcagagtctcctgcagcacctcatcgggctgagcaatctgacccacgtgctgtatcctgtccccctggagagttatgaggacatccatggtaccctccacctggagaggcttgcctatctgcatgccaggctcagggagttgctgtgtgagttggggcggcccagcatggtctggcttagtgccaacccctgtcctcactgtggggacagaaccttctatgacccggagcccatcctgtgcccctgtttcatgcctaattagctgggtgcacatatcaaatgcttcattctgcatacttggacactaaagccaggatgtgcatgcatcttgaagcaacaaagcagccacagtttcagacaaatgttcagtgtgagtgaggaaaacatgttcagtgaggaaaaaacattcagacaaatgttcagtgaggaaaaaaaggggaagttgggggtaggcagatgttgacttgaggagttaatgtgatctttggggagatacatcttatagagttagaaatagaatctgaatttctaaagggagattctggcttgggaagtacatgtaggagttaatccctgtgtagactgttgtaaagaaactgttgaaaataaagagaagcaatgtgaagc

SEQ ID NO: 168728 - DNA, 2196 bp, Homo sapiens; identical to SEQ ID NO: 168717
  Payload ID: 13224
  Gene Symbol: PRAME
  Gene Name: preferentially expressed antigen in melanoma
  Uniprot ID: P78395
  ENST ID: ENST00000617728
  CDS Start-End: 301-1830

SEQ ID NO: 168729 - DNA, 891 bp, Homo sapiens; identical to SEQ ID NO: 168724
  Payload ID: 13224
  Gene Symbol: PRAME
  Gene Name: preferentially expressed antigen in melanoma
  ENST ID: ENST00000630573
  CDS Start-End: 287-891

SEQ ID NO: 168730 - DNA, 567 bp, Homo sapiens; identical to SEQ ID NO: 168720
  Payload ID: 13224
  Gene Symbol: PRAME
  Gene Name: preferentially expressed antigen in melanoma
  ENST ID: ENST00000630407
  CDS Start-End: 309-567

SEQ ID NO: 168731 - DNA, 2057 bp, Homo sapiens; identical to SEQ ID NO: 168721
  Payload ID: 13224
  Gene Symbol: PRAME
  Gene Name: preferentially expressed antigen in melanoma
  Uniprot ID: P78395
  ENST ID: ENST00000628830
  CDS Start-End: 228-1757

SEQ ID NO: 168732 - DNA, 2179 bp, Homo sapiens; identical to SEQ ID NO: 168719
  Payload ID: 13224
  Gene Symbol: PRAME
  Gene Name: preferentially expressed antigen in melanoma
  Uniprot ID: P78395
  ENST ID: ENST00000626503
  CDS Start-End: 287-1816

SEQ ID NO: 168733 - DNA, 705 bp, Homo sapiens; identical to SEQ ID NO: 168725
  Payload ID: 13224
  Gene Symbol: PRAME
  Gene Name: preferentially expressed antigen in melanoma
  ENST ID: ENST00000627660
  CDS Start-End: 248-705

SEQ ID NO: 168734 - DNA, 566 bp, Homo sapiens; identical to SEQ ID NO: 168723
  Payload ID: 13224
  Gene Symbol: PRAME
  Gene Name: preferentially expressed antigen in melanoma
  ENST ID: ENST00000631267
  CDS Start-End: 119-566

SEQ ID NO: 168735 - DNA, 727 bp, Homo sapiens
  Payload ID: 13224
  Gene Symbol: PRAME
  Gene Name: preferentially expressed antigen in melanoma
  ENST ID: ENST00000626772
  CDS Start-End: 384-727
gtacagctcccccgcagccagaagccgggcctgcagcgcctcagcaccgctccgggacaccccacccgcttcccaggcgtgacctgtcaacagcaacttcgcggtgtggtgaactctctgaggaaaaaccccaggaaacactggtgctcaggtttggagccagagatttgcactgaaagggcgggattgagtcgccagttgtcagtttcctcagcagtatttgcggaggttttcacaggaggccgttgcttcgtaaatattatacatgtattcttctttttggagcattttgattattactctcagacgtgcgtggcaacaagtgactgagacctagaaatccaagcgttggaggtcctgaggccagcctaagtcgcttcaaaatggaacgaaggcgtttgtggggttccattcagagccgatacatcagcatgagtgtgtggacaagcccacggagacttgtggagctggcagggcagagcctgctgaaggatgaggccctggccattgccgccctggagttgctgcccagggagctcttcccgccactcttcatggcagcctttgacgggagacacagccagaccctgaaggcaatggtgcaggcctggcccttcacctgcctccctctgggagtgctgatgaagggacaacatcttcacctggagaccttcaaagctgtgcttgatggacttgatgtgctccttgcccaggaggttcgccccag

SEQ ID NO: 168736 - DNA, 1352 bp, Homo sapiens
  Payload ID: 13225
  Gene Symbol: PFDN1
  Gene Name: prefoldin subunit 1
  Uniprot ID: O60925
  ENST ID: ENST00000261813
  CDS Start-End: 49-417
cctatttcagtccaactcccactgcgcaggcgcttacagtgcaccaagatggccgcccccgtggatctagagctgaagaaggccttcacagagcttcaagccaaagttattgacactcaacagaaggtgaagctcgcagacatacagattgaacagctaaacagaacgaaaaagcatgcacatcttacagatacagagatcatgactttggtagatgagactaacatgtatgaaggtgtaggaagaatgtttattcttcagtccaaggaagcaattcacagtcagctgttagagaagcagaaaatagcagaagaaaaaattaaagaactagaacagaaaaagtcctacctggagcgaagcgttaaggaagctgaggacaacatccgggagatgctgatggcacgaagggcccagtagggagcctctctgggaagctcttcctcctgcccctcccattcctggtgggggcagaggagtgtctgcagggaaacagcttctcctctgccccgatggatgctttatttggatggcctggcaacatcacattttctgcatcaccctgagccccatttgcttcccagccctggagtttttacccggctttgcctgccacctctgcccaggacactcttccctctcgggatgtgtgatgaactcccaggagagggaagatgggagccagggcaagataggaagctctgcctgagctttccactaggcacgccagccagaccaataaaaagcgtctgtcccactctgctaagcctggttttcttgagcagagggatggaacagagggtgagagaggcagtggccgtctccacctcagctcctgctccctctgcatcagagcccttcctttcttgggggatgggccttgccctcttctcttttcccttcctgtacctttgactaacgctcagcttccgggcctgcatgcagtagacagaagaggaagaaagaacagatgttcacagctgaatctcagtgaacagaatagcagtccctggatggcagtctgcctaaagattcctttccctgccttctcccatacattccaaaaggaagttcaacagtaagcagcacctccaagactgtctccttttggccaatatcataagatggacgccataatcctgaggcctcctagaggctgagggggcaacggtgtgatccagctggctcatcccagcccaggtgggccaattattcaattttcaagaattttgttgcaagccagttgtcaaacacagccattataattatgtaaatttgcaaattatgttaaaaacaaggacaataaatattcaaaatgcatccctaattactacatttgaccacgatctgtgctc

SEQ ID NO: 168737 - DNA, 1091 bp, Homo sapiens
  Payload ID: 13225
  Gene Symbol: PFDN1
  Gene Name: prefoldin subunit 1
  ENST ID: ENST00000510217
  CDS Start-End: 41-148
agtccaactcccactgcgcaggcgcttacagtgcaccaagatggccgcccccgtggatctagagctgaagaaggtttattcttcagtccaaggaagcaattcacagtcagctgttagagaagcagaaaatagcagaagaaaaaattaaagaactagaacagaaaaagtcctacctggagcgaagcgttaaggaagctgaggacaacatccgggagatgctgatggcacgaagggcccagtagggagcctctctgggaagctcttcctcctgcccctcccattcctggtgggggcagaggagtgtctgcagggaaacagcttctcctctgccccgatggatgctttatttggatggcctggcaacatcacattttctgcatcaccctgagccccatttgcttcccagccctggagtttttacccggctttgcctgccacctctgcccaggacactcttccctctcgggatgtgtgatgaactcccaggagagggaagatgggagccagggcaagataggaagctctgcctgagctttccactaggcacgccagccagaccaataaaaagcgtctgtcccactctgctaagcctggttttcttgagcagagggatggaacagagggtgagagaggcagtggccgtctccacctcagctcctgctccctctgcatcagagcccttcctttcttgggggatgggccttgccctcttctcttttcccttcctgtacctttgactaacgctcagcttccgggcctgcatgcagtagacagaagaggaagaaagaacagatgttcacagctgaatctcagtgaacagaatagcagtccctggatggcagtctgcctaaagattcctttccctgccttctcccatacattccaaaaggaagttcaacagtaagcagcacctccaagactgtctccttttggccaatatcataagatggacgccataatcctgaggcctcctagaggctgagggggcaacggtgtgatccagctggctcatcccagcccaggtgggccaattattcaattttcaagaattttgttgcaagccagttgtcaaacacagccattataattat

SEQ ID NO: 168738 - DNA, 395 bp, Homo sapiens
  Payload ID: 13225
  Gene Symbol: PFDN1
  Gene Name: prefoldin subunit 1
  ENST ID: ENST00000524074
  CDS Start-End: 11-364
gtgcaccaagatggccgcccccgtggatctagagctgaagaaggccttcacagagcttcaagccaaagttattgacactcaacagaaggtgaagctcgcagacatacagattgaacagctaaacagaacgaaaaagcatgcacatcttacagatacagagatcatgactttggtagatgagactaacatgtatgaaggtgtaggaagaatgtttattcttcagtccaaggaagcaattcacagtcagctgttagagaagcagaaaatagcagaagaaaaaattaaagaactagaagtaacagagcccttcctttcttgggggatgggccttgccctcttctcttttcccttcctgtacctttgactaacgctcagcttccgggcctgcatgcagt

SEQ ID NO: 168739 - DNA, 677 bp, Homo sapiens
  Payload ID: 13226
  Gene Symbol: PFDN2
  Gene Name: prefoldin subunit 2
  Uniprot ID: Q9UHV9
  ENST ID: ENST00000368010
  CDS Start-End: 86-550
agcgagtgggcggtaactcgcaggccggacgtgacgcaaggcgggggctgagctgcgccggccggaaacccagcaggcggcgaagatggcggagaacagcggtcgcgccggcaagagcagcgggagcggcgcggggaagggggcggtgtccgcagagcaggtgattgctggcttcaaccgccttcggcaggaacagcgaggcctggcatccaaagcagctgagttggagatggagttgaatgagcacagcctagtgatcgatacactgaaggaggtagatgaaactcgtaagtgctaccgcatggttggaggagtgctggtggagcgaactgtcaaagaggtgctgcccgctttggagaacaacaaggagcagatacagaagatcattgagacactgacacagcagcttcaggcaaagggaaaagaactaaatgaattccgggaaaagcacaacattcgtctcatgggagaagatgagaagccagcagccaaggaaaactcagaaggggctggggctaaggccagctcagctggagtgttggtctcctagggaccaaggcctttgcatttttttctaccctgactcccacttctaatttctctttattgttattattattattttctctgctattgtaatatttttttgttaattaaatgttttggtcagaatctta

SEQ ID NO: 168740 - DNA, 1462 bp, Homo sapiens
  Payload ID: 13227
  Gene Symbol: PFDN4
  Gene Name: prefoldin subunit 4
  Uniprot ID: Q9NQP4
  ENST ID: ENST00000371419
  CDS Start-End: 255-659
acacccccgtgtttatgtcggtccacgggggttgcctgtccctttaattggcatgtaccaagtccttccaggtcacatttcctccctacgtcccagccgtttggactcactggccaaaagtccaagaggacggaatgtggagacagtgttgtatttttgcggggagttctaggccgaccgggagcgagagaacgctcgggggcgaagcgcgccattgcggccctccccgccgcctgcggtagtccagtcccaagatggcggccaccatgaagaaggcggctgcagaagatgtcaatgttactttcgaagatcaacaaaagataaacaaatttgcacggaatacaagtagaatcacagagctgaaggaagaaatagaagtaaaaaagaaacaactccaaaacctagaagatgcttgtgatgacatcatgcttgcagatgatgattgcttaatgataccttatcaaattggtgatgtcttcattagccattctcaagaagaaacgcaagaaatgttagaagaagcaaagaaaaatttgcaagaagaaattgacgccttagaatccagagtggaatcaattcagcgagtgttagcagatttgaaagttcagttgtatgcaaaattcgggagcaacataaaccttgaagctgatgaaagttaaacattttataatactttttttatttgtttaataaacttgaatattgtttaaaatgataattttccttcttcaaatgacatggaaagcaaaactttcttttttaaaaattttcatttatttaatggaaacttgcccattttcacatgtctgcttatttattttatatttttaaaagaagacagtattcacctatgtattttgcataacgattatatcaagtctaggggcttcatgtcatgttattaaaatcagttaagcaatcttttatgtttctatattatttagaatatttgttgttgcaattttcacataagaaaatttaacagttgtgtcatgttgtttctgtctgattttaattgctgtctaatgacggggaaagcacgatgaaaagatgtacaatcctgcatccttgcttatttcacaactaaagctttgtcatagacttcaaaatatatatgtatatattttatttaaatatatgttacatattatatttaaacatacatatttaacattttttacatatctatcaatatcagagatttgggtaaaagaatgggtaatgtttaaacatgtggaggcatgtggagctttatacaaacagggcagaaccacagaagaacgttttagaaaccaagagatgtgcagaaagaaatgtttagtgttttttcgttttaaattttagattttattttagtgctttgtaattaattggggtttatattgataaagatgtggaagttaaacagctatgtatgtaaaagtaaggcttatttcttaaataaaggatgcatttcttccca

SEQ ID NO: 168741 - DNA, 579 bp, Homo sapiens
  Payload ID: 13227
  Gene Symbol: PFDN4
  Gene Name: prefoldin subunit 4
  ENST ID: ENST00000441080
  CDS Start-End: 7-417
cccaagatggcggccaccatgaagaaggcggctgcagaagatgtcaatgttactttcgaagatcaacaaaagataaacaaatttgcacggaatacaagtagaatcacagagctgaaggaagaaatagaagtaaaaaagaaacaactccaaaacctagaagatgcttgtgatgacatcatgcttgcagatgatgattgcttaatgataccttatcaaattggtgatgtcttcattagccattctcaagaagaaacgcaagaaatgttagaagaagcaaagaaaaatttgcaagaagaaattgacgccttagaatccagagtggaatcaattcagcgagtgttagcagatttgaaagttcagttgtatgcaaaattcgggagcaacataaaccttgaagctgatgaaaggaacacatgaatacacacagtagatgagaaggagccaggaaagaagatgatggaaaagtcaacggacaagagtcacccatggtaagatgtgcttacttcctcttcgccttctgccatgattgtaagtttcctgaggcctccaggtcatgcttcctgttaagcctgcagaact

SEQ ID NO: 168742 - DNA, 564 bp, Homo sapiens
  Payload ID: 13228
  Gene Symbol: PFDN5
  Gene Name: prefoldin subunit 5
  Uniprot ID: Q99471
  ENST ID: ENST00000243040
  CDS Start-End: 27-227
ctcttcgttaagtcggccttcccaacatggcgcagtctattaacatcacggagctgaatctgccgcagctagaaatgctcaagaaccagctggaccaggaagtggagttcttgtccacgtccattgctcagctcaaagtggtacagaccaagtatgtggaagccaaggactgtctgaacgtgctgaacaagagcaacgaggatgtatgtccctgggaagctgcatgatgtggaacacgtgctcatcgatgtgggaactgggtactatgtagagaagacagctgaggatgccaaggacttcttcaagaggaagatagattttctaaccaagcagatggagaaaatccaaccagctcttcaggagaagcacgccatgaaacaggccgtcatggaaatgatgagtcagaagattcagcagctcacagccctgggggcagctcaggctactgctaaggcctgagagtttttgcagaaatggggcagagggacaccctttgggcgtggcttcctggtgatgggaagggtcttgtgttttaatgccaataaatgtgccagctgggcagaa

SEQ ID NO: 168743 - DNA, 478 bp, Homo sapiens
  Payload ID: 13228
  Gene Symbol: PFDN5
  Gene Name: prefoldin subunit 5
  Uniprot ID: Q99471
  ENST ID: ENST00000351500
  CDS Start-End: 44-373
gctcgccgagagacttcctcttcgttaagtcggccttcccaacatggcgcagtctattaacatcacggagctgaatctgccgcagctagaaatgctcaagaaccagctggaccagatgtatgtccctgggaagctgcatgatgtggaacacgtgctcatcgatgtgggaactgggtactatgtagagaagacagctgaggatgccaaggacttcttcaagaggaagatagattttctaaccaagcagatggagaaaatccaaccagctcttcaggagaagcacgccatgaaacaggccgtcatggaaatgatgagtcagaagattcagcagctcacagccctgggggcagctcaggctactgctaaggcctgagagtttttgcagaaatggggcagagggacaccctttgggcgtggcttcctggtgatgggaagggtcttgtgttttaatgccaataaatgtgccagctgggcagaa

SEQ ID NO: 168744 - DNA, 586 bp, Homo sapiens
  Payload ID: 13228
  Gene Symbol: PFDN5
  Gene Name: prefoldin subunit 5
  Uniprot ID: Q99471
  ENST ID: ENST00000334478
  CDS Start-End: 17-481
agtcggccttcccaacatggcgcagtctattaacatcacggagctgaatctgccgcagctagaaatgctcaagaaccagctggaccaggaagtggagttcttgtccacgtccattgctcagctcaaagtggtacagaccaagtatgtggaagccaaggactgtctgaacgtgctgaacaagagcaacgaggggaaagaattactcgtcccactgacgagttctatgtatgtccctgggaagctgcatgatgtggaacacgtgctcatcgatgtgggaactgggtactatgtagagaagacagctgaggatgccaaggacttcttcaagaggaagatagattttctaaccaagcagatggagaaaatccaaccagctcttcaggagaagcacgccatgaaacaggccgtcatggaaatgatgagtcagaagattcagcagctcacagccctgggggcagctcaggctactgctaaggcctgagagtttttgcagaaatggggcagagggacaccctttgggcgtggcttcctggtgatgggaagggtcttgtgttttaatgccaataaatgtgccagctgggcagaa

SEQ ID NO: 168745 - DNA, 847 bp, Homo sapiens
  Payload ID: 13228
  Gene Symbol: PFDN5
  Gene Name: prefoldin subunit 5
  Uniprot ID: Q99471
  ENST ID: ENST00000551018
  CDS Start-End: 278-742
atatcgtggttgtgtcgtgagaactttaagattttgcagttccttgtaggcaggagtcctgtttgctgctactttacaatactaggcttaagacattttatgaaatgaactcacacaacagtctctgagaggctcaagcccctccttcccttccgggacggaggatcatagagctgtctggcgcagcgaggcctcccggcgccaccgagacgcgcagaggacggctagagcgttgctcgccgagagacttcctcttcgttaagtcggccttcccaacatggcgcagtctattaacatcacggagctgaatctgccgcagctagaaatgctcaagaaccagctggaccaggaagtggagttcttgtccacgtccattgctcagctcaaagtggtacagaccaagtatgtggaagccaaggactgtctgaacgtgctgaacaagagcaacgaggggaaagaattactcgtcccactgacgagttctatgtatgtccctgggaagctgcatgatgtggaacacgtgctcatcgatgtgggaactgggtactatgtagagaagacagctgaggatgccaaggacttcttcaagaggaagatagattttctaaccaagcagatggagaaaatccaaccagctcttcaggagaagcacgccatgaaacaggccgtcatggaaatgatgagtcagaagattcagcagctcacagccctgggggcagctcaggctactgctaaggcctgagagtttttgcagaaatggggcagagggacaccctttgggcgtggcttcctggtgatgggaagggtcttgtgttttaatgccaataaatgtgccagctgggcagaa

SEQ ID NO: 168746 - DNA, 559 bp, Homo sapiens
  Payload ID: 13228
  Gene Symbol: PFDN5
  Gene Name: prefoldin subunit 5
  ENST ID: ENST00000547130
  CDS Start-End: 27-116
ctcttcgttaagtcggccttcccaacatggcgcagtctattaacatcacggagctgaatctgccgcagctagaaatgctcaagaaccagctggaccaggctggagcgcaatggtgagatcttggcttactgcaacctccgcctcccgagttcaagagattcttctgcctcagtctcccgagtagctgggactttagatgtatgtccctgggaagctgcatgatgtggaacacgtgctcatcgatgtgggaactgggtactatgtagagaagacagctgaggatgccaaggacttcttcaagaggaagatagattttctaaccaagcagatggagaaaatccaaccagctcttcaggagaagcacgccatgaaacaggccgtcatggaaatgatgagtcagaagattcagcagctcacagccctgggggcagctcaggctactgctaaggcctgagagtttttgcagaaatggggcagagggacaccctttgggcgtggcttcctggtgatgggaagggtcttgtgttttaatgccaataaatgtgccagctgggcagaa

SEQ ID NO: 168747 - DNA, 595 bp, Homo sapiens
  Payload ID: 13228
  Gene Symbol: PFDN5
  Gene Name: prefoldin subunit 5
  ENST ID: ENST00000550880
  CDS Start-End: 44-157
gctcgccgagagacttcctcttcgttaagtcggccttcccaacatggcgcagtctattaacatcacggagctgaatctgccgcagctagaaatgctcaagaaccagctggaccagacggaatttcgctctgtcgcccaggctggagcgcaatggtgagatcttggcttactgcaacctccgcctcccgagttcaagagattcttctgcctcagtctcccgagtagctgggactttagatgtatgtccctgggaagctgcatgatgtggaacacgtgctcatcgatgtgggaactgggtactatgtagagaagacagctgaggatgccaaggacttcttcaagaggaagatagattttctaaccaagcagatggagaaaatccaaccagctcttcaggagaagcacgccatgaaacaggccgtcatggaaatgatgagtcagaagattcagcagctcacagccctgggggcagctcaggctactgctaaggcctgagagtttttgcagaaatggggcagagggacaccctttgggcgtggcttcctggtgatgggaagggtcttgtgttttaatgccaataaatgtgccagctggg

SEQ ID NO: 168748 - DNA, 571 bp, Homo sapiens
  Payload ID: 13228
  Gene Symbol: PFDN5
  Gene Name: prefoldin subunit 5
  ENST ID: ENST00000552742
  CDS Start-End: 13-102
ggccttcccaacatggcgcagtctattaacatcacggagctgaatctgccgcagctagaaatgctcaagaaccagctggaccaggctggagcgcaatggtgagatcttggcttactgcaacctccgcctcccgagttcaagagattcttctgcctcagtctcccgagtagctgggactttagatgtatgtccctgggaagctgcatgatgtggaacacgtgctcatcgatgtgggaactgggtactatgtagagaagccccttattcacctctgatcttgtagacagctgaggatgccaaggacttcttcaagaggaagatagattttctaaccaagcagatggagaaaatccaaccagctcttcaggagaagcacgccatgaaacaggccgtcatggaaatgatgagtcagaagattcagcagctcacagccctgggggcagctcaggctactgctaaggcctgagagtttttgcagaaatggggcagagggacaccctttgggcgtggcttcctggtgatgggaagggtcttgtgttttaatgccaataaatgtgccagctgggcagaa

SEQ ID NO: 168749 - DNA, 392 bp, Homo sapiens
  Payload ID: 13228
  Gene Symbol: PFDN5
  Gene Name: prefoldin subunit 5
  ENST ID: ENST00000550846
  CDS Start-End: 33-287
gacttcctcttcgttaagtcggccttcccaacatggcgcagtctattaacatcacggagctgaatctgccgcagctagaaatgctcaagaaccagctggaccagacagctgaggatgccaaggacttcttcaagaggaagatagattttctaaccaagcagatggagaaaatccaaccagctcttcaggagaagcacgccatgaaacaggccgtcatggaaatgatgagtcagaagattcagcagctcacagccctgggggcagctcaggctactgctaaggcctgagagtttttgcagaaatggggcagagggacaccctttgggcgtggcttcctggtgatgggaagggtcttgtgttttaatgccaataaatgtgccagctgggcagaa

SEQ ID NO: 168750 - DNA, 559 bp, Homo sapiens
  Payload ID: 13228
  Gene Symbol: PFDN5
  Gene Name: prefoldin subunit 5
  ENST ID: ENST00000549759
  CDS Start-End: 1-457
taacatcacggagctgaatctgccgcagctagaaatgctcaagaaccagctggaccaggaagtggagttcttgtccacgtccattgctcagctcaaagtggtacagaccaagtatgtggaagccaaggactgtctgaacgtgctgaacaagagcaacgaggacggaatttcgctctgtcgcccaggctggagcgcaatgatgtatgtccctgggaagctgcatgatgtggaacacgtgctcatcgatgtgggaactgggtactatgtagagaagacagctgaggatgccaaggacttcttcaagaggaagatagattttctaaccaagcagatggagaaaatccaaccagctcttcaggagaagcacgccatgaaacaggccgtcatggaaatgatgagtcagaagattcagcagctcacagccctgggggcagctcaggctactgctaaggcctgagagtttttgcagaaatggggcagagggacaccctttgggcgtggcttcctggtgatgggaagggtcttgtgttttaatgccaataaatgtgccagctgggca

SEQ ID NO: 168751 - DNA, 231 bp, Homo sapiens
  Payload ID: 13228
  Gene Symbol: PFDN5
  Gene Name: prefoldin subunit 5
  ENST ID: ENST00000628881
  CDS Start-End: 118-231
gaggatcatagagctgtctggcgcagcgaggcctcccggcgccaccgagacgcgcagaggacggctagagcgttgctcgccgagagacttcctcttcgttaagtcggccttcccaacatggcgcagtctattaacatcacggagctgaatctgccgcagctagaaatgctcaagaaccagctggaccagacggaatttcgctctgtcgcccaggctggagcgcaatggtga

SEQ ID NO: 168752 - DNA, 740 bp, Homo sapiens
  Payload ID: 13229
  Gene Symbol: PFDN6
  Gene Name: prefoldin subunit 6
  Uniprot ID: O15212
  ENST ID: ENST00000374606
  CDS Start-End: 263-652
gggtttattactactgaaggaagaacgtgagtaggttaggatttcggttgagaggcttggggtcttgcgtttcgcccaccatctcctggggacagggtggagtcgatatccgggacgggggggaggttgcggtgcccctcagggctacctctcaagagtgctatcatttccgcaggccagatcagaaaagggagctcaggtaccttccagagagtgagacccagcgcccttgtctcgcacccagtaggctttcatccccgccatggcggagctgatccagaagaagctacagggagaagtggagaaatatcaacagctacagaaggacttaagtaaatccatgtcggggaggcagaaacttgaagcacaactaacagaaaataatatcgtgaaagaggaactggccctgctggatgggtccaacgtggtctttaaacttctgggtccggtgctagtcaaacaggagctgggggaggctcgggccacagtagggaagaggctggactatatcacagctgaaattaagcgatacgaatcccagcttcgggatcttgagcggcagtcagagcaacagagggagacccttgctcagctgcagcaggagttccagcgggcccaggcagcaaaggcaggggctcctggcaaggcctgaccccatggtggggggaggggaggggaggggagggaatgaggcagctctaggatctatactgtagctaataaaatgtaaaaacacctgg

SEQ ID NO: 168753 - DNA, 598 bp, Homo sapiens
  Payload ID: 13229
  Gene Symbol: PFDN6
  Gene Name: prefoldin subunit 6
  Uniprot ID: O15212
  ENST ID: ENST00000374607
  CDS Start-End: 120-509
gtttattactactgaaggaagaacgtgagtaggccagatcagaaaagggagctcaggtaccttccagagagtgagacccagcgcccttgtctcgcacccagtaggctttcatccccgccatggcggagctgatccagaagaagctacagggagaagtggagaaatatcaacagctacagaaggacttaagtaaatccatgtcggggaggcagaaacttgaagcacaactaacagaaaataatatcgtgaaagaggaactggccctgctggatgggtccaacgtggtctttaaacttctgggtccggtgctagtcaaacaggagctgggggaggctcgggccacagtagggaagaggctggactatatcacagctgaaattaagcgatacgaatcccagcttcgggatcttgagcggcagtcagagcaacagagggagacccttgctcagctgcagcaggagttccagcgggcccaggcagcaaaggcaggggctcctggcaaggcctgaccccatggtggggggaggggaggggaggggagggaatgaggcagctctaggatctatactgtagctaataaaatgtaaaaacacctggc

SEQ ID NO: 168754 - DNA, 521 bp, Homo sapiens
  Payload ID: 13229
  Gene Symbol: PFDN6
  Gene Name: prefoldin subunit 6
  Uniprot ID: O15212
  ENST ID: ENST00000374610
  CDS Start-End: 115-504
gtttattactactgaaggaagaacgtgagtagatcagaaaagggagctcaggtaccttccagagagtgagacccagcgcccttgtctcgcacccagtaggctttcatccccgccatggcggagctgatccagaagaagctacagggagaagtggagaaatatcaacagctacagaaggacttaagtaaatccatgtcggggaggcagaaacttgaagcacaactaacagaaaataatatcgtgaaagaggaactggccctgctggatgggtccaacgtggtctttaaacttctgggtccggtgctagtcaaacaggagctgggggaggctcgggccacagtagggaagaggctggactatatcacagctgaaattaagcgatacgaatcccagcttcgggatcttgagcggcagtcagagcaacagagggagacccttgctcagctgcagcaggagttccagcgggcccaggcagcaaaggcaggggctcctggcaaggcctgaccccatggtggggggag

SEQ ID NO: 168755 - DNA, 521 bp, Homo sapiens; identical to SEQ ID NO: 168754
  Payload ID: 13229
  Gene Symbol: PFDN6
  Gene Name: prefoldin subunit 6
  Uniprot ID: O15212
  ENST ID: ENST00000383207
  CDS Start-End: 115-504

SEQ ID NO: 168756 - DNA, 884 bp, Homo sapiens
  Payload ID: 13229
  Gene Symbol: PFDN6
  Gene Name: prefoldin subunit 6
  Uniprot ID: O15212
  ENST ID: ENST00000395131
  CDS Start-End: 407-796
atcttgagtgagggcacgctctccttagaggggcggaacagtttttggcaccttatcgcgagcggcagcttatgcaagagtgatttaaaaaagaaaggcaggtccggagccaggggctaagtagcggtgcggtttctttttctggattagtttccccatcttgcctaaaaatgtcctagtctagtctttttagcagaactccactccctaaacatgtcagaactacacttcccatcaagggtcagaaagaaacttccggcacagtcttttcccagcattccttgtttacttccgggtttattactactgaaggaagaacgccagatcagaaaagggagctcaggtaccttccagagagtgagacccagcgcccttgtctcgcacccagtaggctttcatccccgccatggcggagctgatccagaagaagctacagggagaagtggagaaatatcaacagctacagaaggacttaagtaaatccatgtcggggaggcagaaacttgaagcacaactaacagaaaataatatcgtgaaagaggaactggccctgctggatgggtccaacgtggtctttaaacttctgggtccggtgctagtcaaacaggagctgggggaggctcgggccacagtagggaagaggctggactatatcacagctgaaattaagcgatacgaatcccagcttcgggatcttgagcggcagtcagagcaacagagggagacccttgctcagctgcagcaggagttccagcgggcccaggcagcaaaggcaggggctcctggcaaggcctgaccccatggtggggggaggggaggggaggggagggaatgaggcagctctaggatctatactgtagctaataaaatgtaaaaacacctgg

SEQ ID NO: 168757 - DNA, 740 bp, Homo sapiens; identical to SEQ ID NO: 168752
  Payload ID: 13229
  Gene Symbol: PFDN6
  Gene Name: prefoldin subunit 6
  Uniprot ID: O15212
  ENST ID: ENST00000399383
  CDS Start-End: 263-652

SEQ ID NO: 168758 - DNA, 884 bp, Homo sapiens
  Payload ID: 13229
  Gene Symbol: PFDN6
  Gene Name: prefoldin subunit 6
  Uniprot ID: O15212
  ENST ID: ENST00000399385
  CDS Start-End: 407-796
atcttgagtgagggcacgctctccttagaggggcggaacagtttttggcaccttatcgcgagcggcagcttatgcaagagtgacttaaaaaagaaaggcaggtccggggccaggggctaagtagcggtgcggtttctttttctggattagtttccccatcttgcctaaaaatgtcctagtctagtctttttagcagaactccactccctaaacatgtcagaactacacttcccatcaagggtcagaaagaaacttccggcacagtcttttcccagcattccttgtttacttccgggtttattactactgaaggaagaacgccagatcagaaaagggagctcaggtaccttccagagagtgagacccagcgcccttgtctcgcacccagtaggctttcatccccgccatggcggagctgatccagaagaagctacagggagaagtggagaaatatcaacagctacagaaggacttaagtaaatccatgtcggggaggcagaaacttgaagcacaactaacagaaaataatatcgtgaaagaggaactggccctgctggatgggtccaacgtggtctttaaacttctgggtccggtgctagtcaaacaggagctgggggaggctcgggccacagtagggaagaggctggactatatcacagctgaaattaagcgatacgaatcccagcttcgggatcttgagcggcagtcagagcaacagagggagacccttgctcagctgcagcaggagttccagcgggcccaggcagcaaaggcaggggctcctggcaaggcctgaccccatggtggggggaggggaggggaggggagggaatgaggcagctctaggatctatactgtagctaataaaatgtaaaaacacctgg

SEQ ID NO: 168759 - DNA, 740 bp, Homo sapiens; identical to SEQ ID NO: 168752
  Payload ID: 13229
  Gene Symbol: PFDN6
  Gene Name: prefoldin subunit 6
  Uniprot ID: O15212
  ENST ID: ENST00000425878
  CDS Start-End: 263-652

SEQ ID NO: 168760 - DNA, 884 bp, Homo sapiens; identical to SEQ ID NO: 168758
  Payload ID: 13229
  Gene Symbol: PFDN6
  Gene Name: prefoldin subunit 6
  Uniprot ID: O15212
  ENST ID: ENST00000445559
  CDS Start-End: 407-796

SEQ ID NO: 168761 - DNA, 740 bp, Homo sapiens; identical to SEQ ID NO: 168752
  Payload ID: 13229
  Gene Symbol: PFDN6
  Gene Name: prefoldin subunit 6
  Uniprot ID: O15212
  ENST ID: ENST00000432391
  CDS Start-End: 263-652

SEQ ID NO: 168762 - DNA, 884 bp, Homo sapiens; identical to SEQ ID NO: 168758
  Payload ID: 13229
  Gene Symbol: PFDN6
  Gene Name: prefoldin subunit 6
  Uniprot ID: O15212
  ENST ID: ENST00000412289
  CDS Start-End: 407-796

SEQ ID NO: 168763 - DNA, 884 bp, Homo sapiens
  Payload ID: 13229
  Gene Symbol: PFDN6
  Gene Name: prefoldin subunit 6
  Uniprot ID: O15212
  ENST ID: ENST00000431830
  CDS Start-End: 407-796
atcttgagtgagggcacgctctccttagaggggcggaacagtttttggcaccttatcgcgagcggcagcttatgcaagagtgacttaaaaaagaaaggcaggtccggagccaggggctaagtagcggtgcggtttctttttctggattagtttccccatcttgcctaaaaatgtcctagtctagtctttttagcagaactccactccctaaacatgtcagaactacacttcccatcaagggtcagaaagaaacttccggcacagtcttttcccagcattccttgtttacttccgggtttattactactgaaggaagaacgccagatcagaaaagggagctcaggtaccttccagagagtgagacccagcgcccttgtctcgcacccagtaggctttcatccccgccatggcggagctgatccagaagaagctacagggagaagtggagaaatatcaacagctacagaaggacttaagtaaatccatgtcggggaggcagaaacttgaagcacaactaacagaaaataatatcgtgaaagaggaactggccctgctggatgggtccaacgtggtctttaaacttctgggtccggtgctagtcaaacaggagctgggggaggctcgggccacagtagggaagaggctggactatatcacagctgaaattaagcgatacgaatcccagcttcgggatcttgagcggcagtcagagcaacagagggagacccttgctcagctgcagcaggagttccagcgggcccaggcagcaaaggcaggggctcctggcaaggcctgaccccatggtggggggaggggaggggaggggagggaatgaggcagctctaggatctatactgtagctaataaaatgtaaaaacacctgg

SEQ ID NO: 168764 - DNA, 521 bp, Homo sapiens; identical to SEQ ID NO: 168754
  Payload ID: 13229
  Gene Symbol: PFDN6
  Gene Name: prefoldin subunit 6
  Uniprot ID: O15212
  ENST ID: ENST00000448594
  CDS Start-End: 115-504

SEQ ID NO: 168765 - DNA, 521 bp, Homo sapiens; identical to SEQ ID NO: 168754
  Payload ID: 13229
  Gene Symbol: PFDN6
  Gene Name: prefoldin subunit 6
  Uniprot ID: O15212
  ENST ID: ENST00000442285
  CDS Start-End: 115-504

SEQ ID NO: 168766 - DNA, 740 bp, Homo sapiens; identical to SEQ ID NO: 168752
  Payload ID: 13229
  Gene Symbol: PFDN6
  Gene Name: prefoldin subunit 6
  Uniprot ID: O15212
  ENST ID: ENST00000452658
  CDS Start-End: 263-652

SEQ ID NO: 168767 - DNA, 521 bp, Homo sapiens; identical to SEQ ID NO: 168754
  Payload ID: 13229
  Gene Symbol: PFDN6
  Gene Name: prefoldin subunit 6
  Uniprot ID: O15212
  ENST ID: ENST00000451970
  CDS Start-End: 115-504

SEQ ID NO: 168768 - DNA, 1915 bp, Homo sapiens
  Payload ID: 13229
  Gene Symbol: PFDN6
  Gene Name: prefoldin subunit 6
  ENST ID: ENST00000474406
  CDS Start-End: 83-394
atcagaaaagggagctcaggtaccttccagagagtgagacccagcgcccttgtctcgcacccagtaggctttcatccccgccatggcggagctgatccagaagaagctacagggagaagtggagaaatatcaacagctacagaaggacttaagtaaatccatgtcggggaggcagaaacttgaagcacaactaacagaaaataatatcgtgaaagaggaactggccctgctggatgggtccaacgtggtctttaaacttctgggtccggtgctagtcaaacaggagctgggggaggctcgggccacagtagggaagaggctggactatatcacagctgaaatatttctgaggacaatcccagacccaggagatgttccagactcatttttctgatattcagagagggcaagagtcttggcctatgtcacacagcagagtccaggactccagaactccaacctagcactctggccagaaagtcagccagaggaaggaaaactgggaatgaagagtcagaggtgagaagctaaagtcatgatctcaccaagggatcaagaggtcgatattggcggcttgtgacggtaaacacggcaccatcctcctcctcatcccagacggacacaggggcctggaggagcaaggaaggggaagtcagacagttccacaccaccccccattgccctcagccttcaccccaggccctgctcctccctctgtacccctcacctgtggtggcagggcatagtaccagcgagtgcgaggaagggttgggggagctggtgaccccaggtctcccccactggggcccagacagccccaccccagccgcctcagggccccggtggagtcgaaggggctgcagtggaggcgtggatggagtacaggaattctgatcctggagacccccaaagccccttctccccagagctgaacccacacacgacagagaagcagggtacaaagggcaggagagggaagcgagaggcagcaagccagaggcagcgactaggggtagctgaaacctcagtccaggcactgccgcatgccccgcccctcccggccaaggactataccagcccagagaattagtctttttcaggacccctttcaccctggtccctcgggtagcgcctccactatctcagccctaagggacccccgaaggtagcagctccaatcccagtacaggaaggaaaaggggaagtgggatgatagggggttgggggcggtagactcagagagtcacgtggccccagcccctcccccgaccgatcccgaaaaaccagccctgccagtcaacctgccctcacctaggatctggacctaggagtttagggcctcggggccccaaatccaaattctggcccctcctgaggcccgaaatcctgctcctggccaccaccattaatccctaatgaaaacagatgaccactctctacccaccctaggatctttcctccaggtcccagaaccgtggcttcccggcctctacccaggaccggggcggggcgggggggcggggggaagggggagagagggaaggaggggtcacgaaatctgagggttccctccccaatcccagagtcagaggagctggttactgtggaaacaaacccctccccgccaaacaaaaacaaggagggagacagggaccaagacacgactgctcagagaggtaggcacactcaggcaggcagaggtggagggccaaagacccgcagggacaggacagccagccagaagttccaggcaggaacagggcaggttcctgcgggcaggtcctgagtcacactgacagagaaccacggagacgccaggactccccgcagcagagaaacgggccgacacccagggaggcgcgagaataactgaggcaaggaggaggagatgtagggacccagagacaagagaaaa

SEQ ID NO: 168769 - DNA, 1917 bp, Homo sapiens
  Payload ID: 13229
  Gene Symbol: PFDN6
  Gene Name: prefoldin subunit 6
  ENST ID: ENST00000482292
  CDS Start-End: 85-396
agatcagaaaagggagctcaggtaccttccagagagtgagacccagcgcccttgtctcgcacccagtaggctttcatccccgccatggcggagctgatccagaagaagctacagggagaagtggagaaatatcaacagctacagaaggacttaagtaaatccatgtcggggaggcagaaacttgaagcacaactaacagaaaataatatcgtgaaagaggaactggccctgctggatgggtccaacgtggtctttaaacttctgggtccggtgctagtcaaacaggagctgggggaggctcgggccacagtagggaagaggctggactatatcacagctgaaatatttctgaggacaatcccagacccaggagatgttccagactcatttttctgatattcagagagggcaagagtcttggcctatgtcacacagcagagtccaggactccagaactccaacctagcactctggccagaaagtcagccagaggaaggaaaactgggaatgaagagtcagaggtgagaagctaaagtcatgatctcaccaagggatcaagaggtcgatattggcggcttgtgacggtaaacacggcaccatcctcctcctcatcccagacggacacaggggcctggaggagcaaggaaggggaagtcagacagttccacaccaccccccattgccctcagccttcaccccaggccctgctcctccctctgtacccctcacctgtggtggcagggcatagtaccagcgagtgcgaggaagggttgggggagctggtgaccccaggtctcccccactggggcccagacagccccaccccagccgcctcagggccccggtggagtcgaaggggctgcagtggaggcgtggatggagtacaggaattctgatcctggagacccccaaagccccttctccccagagctgaacccacacacgacagagaagcagggtacaaagggcaggagagggaagcgagaggcagcaagccagaggcagcgactaggggtagctgaaacctcagtccaggcactgccgcatgccccgcccctcccggccaaggactataccagcccagagaattagtctttttcaggacccctttcaccctggtccctcgggtagcgcctccactatctcagccctaagggacccccgaaggtagcagctccaatcccagtacaggaaggaaaaggggaagtgggatgatagggggttgggggcggtagactcagagagtcacgtggccccagcccctcccccgaccgatcccgaaaaaccagccctgccagtcaacctgccctcacctaggatctggacctaggagtttagggcctcggggccccaaatccaaattctggcccctcctgaggcccgaaatcctgctcctggccaccaccattaatccctaatgaaaacagatgaccactctctacccaccctaggatctttcctccaggtcccagaaccgtggcttcccggcctctacccaggaccggggcggggcgggggggcggggggaagggggagagagggaaggaggggtcacgaaatctgagggttccctccccaatcccagagtcagaggagctggttactgtggaaacaaacccctccccgccaaacaaaaacaaggagggagacagggaccaagacacgactgctcagagaggtaggcacactcaggcaggcagaggtggagggccaaagacccgcagggacaggacagccagccagaagttccaggcaggaacagggcaggttcctgcgggcaggtcctgagtcacactgacagagaaccacggagacgccaggactccccgcagcagagaaacgggccgacacccagggaggcgcgagaataactgaggcaaggaggaggagatgtagggacccagagacaagagaaaa

SEQ ID NO: 168770 - DNA, 1915 bp, Homo sapiens; identical to SEQ ID NO: 168768
  Payload ID: 13229
  Gene Symbol: PFDN6
  Gene Name: prefoldin subunit 6
  ENST ID: ENST00000468094
  CDS Start-End: 83-394

SEQ ID NO: 168771 - DNA, 1915 bp, Homo sapiens; identical to SEQ ID NO: 168768
  Payload ID: 13229
  Gene Symbol: PFDN6
  Gene Name: prefoldin subunit 6
  ENST ID: ENST00000463584
  CDS Start-End: 83-394

SEQ ID NO: 168772 - DNA, 1915 bp, Homo sapiens; identical to SEQ ID NO: 168768
  Payload ID: 13229
  Gene Symbol: PFDN6
  Gene Name: prefoldin subunit 6
  ENST ID: ENST00000491095
  CDS Start-End: 83-394

SEQ ID NO: 168773 - DNA, 598 bp, Homo sapiens; identical to SEQ ID NO: 168753
  Payload ID: 13229
  Gene Symbol: PFDN6
  Gene Name: prefoldin subunit 6
  Uniprot ID: O15212
  ENST ID: ENST00000548040
  CDS Start-End: 120-509

SEQ ID NO: 168774 - DNA, 598 bp, Homo sapiens; identical to SEQ ID NO: 168753
  Payload ID: 13229
  Gene Symbol: PFDN6
  Gene Name: prefoldin subunit 6
  Uniprot ID: O15212
  ENST ID: ENST00000552711
  CDS Start-End: 120-509

SEQ ID NO: 168775 - DNA, 598 bp, Homo sapiens; identical to SEQ ID NO: 168753
  Payload ID: 13229
  Gene Symbol: PFDN6
  Gene Name: prefoldin subunit 6
  Uniprot ID: O15212
  ENST ID: ENST00000547952
  CDS Start-End: 120-509

SEQ ID NO: 168776 - DNA, 598 bp, Homo sapiens; identical to SEQ ID NO: 168753
  Payload ID: 13229
  Gene Symbol: PFDN6
  Gene Name: prefoldin subunit 6
  Uniprot ID: O15212
  ENST ID: ENST00000547641
  CDS Start-End: 120-509

SEQ ID NO: 168777 - DNA, 2276 bp, Homo sapiens
  Payload ID: 13230
  Gene Symbol: PSG1
  Gene Name: pregnancy specific beta-1-glycoprotein 1
  Uniprot ID: P11464
  ENST ID: ENST00000244296
  CDS Start-End: 139-1419
gagcttgagaattgctcctgccctgggaagaggctcagcacagaaagaggaaggacagcacagctgacagccgtgctcagagagtttctggatcctaggcttatctccacagaggagaacacacaagcagcagagaccatgggaaccctctcagcccctccctgcacacagcgcatcaaatggaaggggctcctgctcacagcatcacttttaaacttctggaacctgcccaccactgcccaagtcacgattgaagccgagccaaccaaagtttccgaggggaaggatgttcttctacttgtccacaatttgccccagaatcttaccggctacatctggtacaaagggcaaatgagggacctctaccattacattacatcatatgtagtagacggtgaaataattatatatgggcctgcatatagtggacgagaaacagcatattccaatgcatccctgctgatccagaatgtcacccgggaggacgcaggatcctacaccttacacatcataaagggagatgatgggactagaggagtaactggacgtttcaccttcaccttacacctggagactcctaagccctccatctccagcagcaacttaaatcccagggagaccatggaggctgtgagcttaacctgtgaccctgagactccagacgcaagctacctgtggtggatgaatggtcagagcctccctatgactcacagcttgaagctgtccgaaaccaacaggaccctctttctattgggtgtcacaaagtatactgcaggaccctatgaatgtgaaatacggaacccagtgagtgccagccgcagtgacccagtcaccctgaatctcctcccgaagctgcccaagccctacatcaccatcaacaacttaaaccccagggagaataaggatgtcttaaacttcacctgtgaacctaagagtgagaactacacctacatttggtggctaaatggtcagagcctcccggtcagtcccagggtaaagcgacccattgaaaacaggatcctcattctacccagtgtcacgagaaatgaaacaggaccctatcaatgtgaaatacgggaccgatatggtggcatccgcagtgacccagtcaccctgaatgtcctctatggtccagacctccccagaatttacccttcattcacctattaccgttcaggagaagtcctctacttgtcctgttctgcggactctaacccaccggcacagtattcttggacaattaatgaaaagtttcagctaccaggacaaaagctctttatccgccatattactacaaagcatagcgggctctatgtttgctctgttcgtaactcagccactggcaaggaaagctccaaatccatgacagtcgaagtctctggtaagtggatcccagcatcgttggcaatagggttttaggtggagtctatctggcattcagagaagagtcaggaaaacaattgtattcccagcctgtgtcccatgggcacaagcaaatcccaaattctcctcctgaaccctccaaatttgtctaagaacttcgaaaactttaacaaacaggctgatatcttcataatattcccagcctagaccaagcaggaagaacattgatttcattgaaataattgataataatgaagataatgtttttatgatttttatttgaaaatttgctgattctttaaatggtttgttttctacattgatggaatttttctcttttaatctatctacagcttatagcagttcaataaactatacttctgggaaccgtaattgaaacatttacttttgctttctacctgactgccccagaattgggcaactattcatgagaattgatatgtttatggtaatacacatatttgcacaagtacagtaacaatctgctttctttgtaacatgacacatttgaaatcattggttatattaccaatgctttgattcggatgttatattaaaaacatagatagaatgaaccaatatgaactgcaggcaaagtctgaagtcagccttggtttggcttcctattctcaagaggtttgtgaagatttaatctcagattccttataaaaacttagagaaaagaaaattttagaagacagcctacatggtccattgctactcttgctgcacttatgtaaacaatcagaccacatttgaagaaactccacctattttgcaaacaaacttattctactgaaattatcattggtaaaagtagagatgcccatagagggaaaaattatgtggaaaataaaaactgtagtatacct

SEQ ID NO: 168778 - DNA, 1882 bp, Homo sapiens
  Payload ID: 13230
  Gene Symbol: PSG1
  Gene Name: pregnancy specific beta-1-glycoprotein 1
  Uniprot ID: P11464
  ENST ID: ENST00000312439
  CDS Start-End: 87-1373
ggacagcacagctgacagccgtgctcagagagtttctggatcctaggcttatctccacagaggagaacacacaagcagcagagaccatgggaaccctctcagcccctccctgcacacagcgcatcaaatggaaggggctcctgctcacagcatcacttttaaacttctggaacctgcccaccactgcccaagtcacgattgaagccgagccaaccaaagtttccgaggggaaggatgttcttctacttgtccacaatttgccccagaatcttaccggctacatctggtacaaagggcaaatgagggacctctaccattacattacatcatatgtagtagacggtgaaataattatatatgggcctgcatatagtggacgagaaacagcatattccaatgcatccctgctgatccagaatgtcacccgggaggacgcaggatcctacaccttacacatcataaagggagatgatgggactagaggagtaactggacgtttcaccttcaccttacacctggagactcctaagccctccatctccagcagcaacttaaatcccagggagaccatggaggctgtgagcttaacctgtgaccctgagactccagacgcaagctacctgtggtggatgaatggtcagagcctccctatgactcacagcttgaagctgtccgaaaccaacaggaccctctttctattgggtgtcacaaagtatactgcaggaccctatgaatgtgaaatacggaacccagtgagtgccagccgcagtgacccagtcaccctgaatctcctcccgaagctgcccaagccctacatcaccatcaacaacttaaaccccagggagaataaggatgtcttaaacttcacctgtgaacctaagagtgagaactacacctacatttggtggctaaatggtcagagcctcccggtcagtcccagggtaaagcgacccattgaaaacaggatcctcattctacccagtgtcacgagaaatgaaacaggaccctatcaatgtgaaatacgggaccgatatggtggcatccgcagtgacccagtcaccctgaatgtcctctatggtccagacctccccagaatttacccttcattcacctattaccgttcaggagaagtcctctacttgtcctgttctgcggactctaacccaccggcacagtattcttggacaattaatgaaaagtttcagctaccaggacaaaagctctttatccgccatattactacaaagcatagcgggctctatgtttgctctgttcgtaactcagccactggcaaggaaagctccaaatccatgacagtcgaagtctctgcttatagcagttcaataaactatacttctgggaaccgtaattgaaacatttacttttgctttctacctgactgccccagaattgggcaactattcatgagaattgatatgtttatggtaatacacatatttgcacaagtacagtaacaatctgctttctttgtaacatgacacatttgaaatcattggttatattaccaatgctttgattcggatgttatattaaaaacatagatagaatgaaccaatatgaactgcaggcaaagtctgaagtcagccttggtttggcttcctattctcaagaggtttgtgaagatttaatctcagattccttataaaaacttagagaaaagaaaattttagaagacagcctacatggtccattgctactcttgctgcacttatgtaaacaatcagaccacatttgaagaaactccacctattttgcaaacaaacttattctactgaaattatcattggtaaaagtagagatgcccatagagggaaaaattatgtggaaaataaaaactgtagtatacctgttatgagactgc

SEQ ID NO: 168779 - DNA, 1722 bp, Homo sapiens
  Payload ID: 13230
  Gene Symbol: PSG1
  Gene Name: pregnancy specific beta-1-glycoprotein 1
  ENST ID: ENST00000403380
  CDS Start-End: 91-1071
ggaaggacagcacagctgacagccgtgctcagagagtttctggatcctaggcttatctccacagaggagaacacacaagcagcagagaccatgggaaccctctcagcccctccctgcacacagcgcatcaaatggaaggggctcctgctcacagcatcacttttaaacttctggaacctgcccaccactgcccaagtcacgattgaagccgagccaaccaaagtttccgaggggaaggatgttcttctacttgtccacaatttgccccagaatcttaccggctacatctggtacaaagggcaaatgagggacctctaccattacattacatcatatgtagtagacggtgaaataattatatatgggcctgcatatagtggacgagaaacagcatattccaatgcatccctgctgatccagaatgtcacccgggaggacgcaggatcctacaccttacacatcataaagggagatgatgggactagaggagtaactggacgtttcaccttcaccttacacccgaagctgcccaagccctacatcaccatcaacaacttaaaccccagggagaataaggatgtcttaaacttcacctgtgaacctaagagtgagaactacacctacatttggtggctaaatggtcagagcctcccggtcagtcccagggtaaagcgacccattgaaaacaggatcctcattctacccagtgtcacgagaaatgaaacaggaccctatcaatgtgaaatacgggaccgatatggtggcatccgcagtgacccagtcaccctgaatgtcctctatggtccagacctccccagaatttacccttcattcacctattaccgttcaggagaagtcctctacttgtcctgttctgcggactctaacccaccggcacagtattcttggacaattaatgaaaagtttcagctaccaggacaaaagctctttatccgccatattactacaaagcatagcgggctctatgtttgctctgttcgtaactcagccactggcaaggaaagctccaaatccatgacagtcgaagtctctgactggacagttccctgaattctactagtacctccaattccattttctcccatggaatcactaagagcaagacccactctgttccagaagccctataagctggaggtggacaactcaatgtaaatttcatgggaaaacccttgtacgtgaagcatgagccactcagaactcaccaaaatattcgacaccataacaacagatgctcaaactgtaaaccaggacaacaagtggatgacttcacactgtggacagtttttcccaagatgtcagaacaagactccccatcatgatgaggctctcccccctcttaactgtccttgctcatgcctgcctctttcacttggcaggataatgcagtcattagaatttcacatgtagtagcttctgagagtaacaacagagtgtcagatatgtcatctcaacctcaaacttttacataacatctcagggggaaatgtggctctctccaccttgcatacagggctcccaatagaaatgaacacagagatattgcctgtgtgtttgcagagaagatggtttgtatgaagacgtaggaaagctgaaattataatagagtcccctttaaatccacattgtgtggatggctcttgccgtttcctaagagatacattgtaaaacgtgacagtaagacattctagcagaataaaa

SEQ ID NO: 168780 - DNA, 2047 bp, Homo sapiens
  Payload ID: 13230
  Gene Symbol: PSG1
  Gene Name: pregnancy specific beta-1-glycoprotein 1
  Uniprot ID: P11464
  ENST ID: ENST00000436291
  CDS Start-End: 118-1377
cctgggaagaggctcagcacagaaagaggaaggacagcacagctgacagccgtgctcagagagtttctggatcctaggcttatctccacagaggagaacacacaagcagcagagaccatgggaaccctctcagcccctccctgcacacagcgcatcaaatggaaggggctcctgctcacagcatcacttttaaacttctggaacctgcccaccactgcccaagtcacgattgaagccgagccaaccaaagtttccgaggggaaggatgttcttctacttgtccacaatttgccccagaatcttaccggctacatctggtacaaagggcaaatgagggacctctaccattacattacatcatatgtagtagacggtgaaataattatatatgggcctgcatatagtggacgagaaacagcatattccaatgcatccctgctgatccagaatgtcacccgggaggacgcaggatcctacaccttacacatcataaagggagatgatgggactagaggagtaactggacgtttcaccttcaccttacacctggagactcctaagccctccatctccagcagcaacttaaatcccagggagaccatggaggctgtgagcttaacctgtgaccctgagactccagacgcaagctacctgtggtggatgaatggtcagagcctccctatgactcacagcttgaagctgtccgaaaccaacaggaccctctttctattgggtgtcacaaagtatactgcaggaccctatgaatgtgaaatacggaacccagtgagtgccagccgcagtgacccagtcaccctgaatctcctcccgaagctgcccaagccctacatcaccatcaacaacttaaaccccagggagaataaggatgtcttaaacttcacctgtgaacctaagagtgagaactacacctacatttggtggctaaatggtcagagcctcccggtcagtcccagggtaaagcgacccattgaaaacaggatcctcattctacccagtgtcacgagaaatgaaacaggaccctatcaatgtgaaatacgggaccgatatggtggcatccgcagtgacccagtcaccctgaatgtcctctatggtccagacctccccagaatttacccttcattcacctattaccgttcaggagaagtcctctacttgtcctgttctgcggactctaacccaccggcacagtattcttggacaattaatgaaaagtttcagctaccaggacaaaagctctttatccgccatattactacaaagcatagcgggctctatgtttgctctgttcgtaactcagccactggcaaggaaagctccaaatccatgacagtcgaagtctctgactggacagttccctgaattctactagtacctccaattccattttctcccatggaatcactaagagcaagacccactctgttccagaagccctataagctggaggtggacaactcaatgtaaatttcatgggaaaacccttgtacgtgaagcatgagccactcagaactcaccaaaatattcgacaccataacaacagatgctcaaactgtaaaccaggacaacaagtggatgacttcacactgtggacagtttttcccaagatgtcagaacaagactccccatcatgatgaggctctcccccctcttaactgtccttgctcatgcctgcctctttcacttggcaggataatgcagtcattagaatttcacatgtagtagcttctgagagtaacaacagagtgtcagatatgtcatctcaacctcaaacttttacataacatctcagggggaaatgtggctctctccaccttgcatacagggctcccaatagaaatgaacacagagatattgcctgtgtgtttgcagagaagatggtttgtatgaagacgtaggaaagctgaaattataatagagtcccctttaaatccacattgtgtggatggctcttgccgtttcctaagagatacattgtaaaacgtgacagtaagacattctagcagaataaaacatgtaccacctttgctaa

SEQ ID NO: 168781 - DNA, 757 bp, Homo sapiens
  Payload ID: 13230
  Gene Symbol: PSG1
  Gene Name: pregnancy specific beta-1-glycoprotein 1
  ENST ID: ENST00000595930
  CDS Start-End: 296-757
gtgtgtgtgtgtgtgtgtttgtatgtgtgtgtgtgtctgtgttgtcaaggctgaggactgaagagaccttctcaggacccagggccccatgttttcacaccaatacataggtctcaatattgactgatgttctctccacctcctagcatcacttttaaacttctggaacctgcccaccactgcccaagtcacgattgaagccgagccaaccaaagtttccgaggggaaggatgttcttctacttgtccacaatttgccccagaatcttaccggctacatctggtacaaagggcaaatgagggacctctaccattacattacatcatatgtagtagacggtgaaataattatatatgggcctgcatatagtggacgagaaacagcatattccaatgcatccctgctgatccagaatgtcacccgggaggacgcaggatcctacaccttacacatcataaagggagatgatgggactagaggagtaactggacgtttcaccttcaccttacacctggagactcctaagccctccatctccagcagcaacttaaatcccagggagaccatggaggctgtgagcttaacctgtgaccctgagactccagacgcaagctacctgtggtggatgaatggtcagagcctccctatgactcacagcttgaagctgtccgaaaccaacaggaccctctttctattgggtgtcacaaagtatactgcaggaccctatgaatgtgaaatacggaacccagtgagtgcc

SEQ ID NO: 168782 - DNA, 725 bp, Homo sapiens
  Payload ID: 13230
  Gene Symbol: PSG1
  Gene Name: pregnancy specific beta-1-glycoprotein 1
  ENST ID: ENST00000597058
  CDS Start-End: 1-725
atcatatgtagtagacggtgaaataattatatatgggcctgcatatagtggacgagaaacagcatattccaatgcatccctgctgatccagaatgtcacccgggaggacgcaggatcctacaccttacacatcataaagggagatgatgggactagaggagtaactggacgtttcaccttcaccttacacctggagactcctaagccctccatctccagcagcaacttaaatcccagggagaccatggaggctgtgagcttaacctgtgaccctgagactccagacgcaagctacctgtggtggatgaatggtcagagcctccctatgactcacagcttgaagctgtccgaaaccaacaggaccctctttctattgggtgtcacaaagtatactgcaggaccctatgaatgtgaaatacggaacccagtgagtgccagccgcagtgacccagtcaccctgaatctcctccatggtccagacctccccagaatttacccttcattcacctattaccgttcaggagaagtcctctacttgtcctgttctgcggactctaacccaccggcacagtattcttggacaattaatgaaaagtttcagctaccaggacaaaagctctttatccgccatattactacaaagcatagcgggctctatgtttgctctgttcgtaactcagccactggcaaggaaagctccaaatccatgacagtcgaagtctctg

SEQ ID NO: 168783 - DNA, 1692 bp, Homo sapiens
  Payload ID: 13230
  Gene Symbol: PSG1
  Gene Name: pregnancy specific beta-1-glycoprotein 1
  ENST ID: ENST00000595124
  CDS Start-End: 130-1104
aattgctcctgccctgggaagaggctcagcacagaaagaggaaggacagcacagctgacagccgtgctcagagagtttctggatcctaggcttatctccacagaggagaacacacaagcagcagagaccatgggaaccctctcagcccctccctgcacacagcgcatcaaatggaaggggctcctgctcacagcatcacttttaaacttctggaacctgcccaccactgcccaagtcacgattgaagccgagccaaccaaagtttccgaggggaaggatgttcttctacttgtccacaatttgccccagaatcttaccggctacatctggtacaaagggcaaatgagggacctctaccattacattacatcatatgtagtagacggtgaaataattatatatgggcctgcatatagtggacgagaaacagcatattccaatgcatccctgctgatccagaatgtcacccgggaggacgcaggatcctacaccttacacatcataaagggagatgatgggactagaggagtaactggacgtttcaccttcaccttacacccgaagctgcccaagccctacatcaccatcaacaacttaaaccccagggagaataaggatgtcttaaacttcacctgtgaacctaagagtgagaactacacctacatttggtggctaaatggtcagagcctcccggtcagtcccagggtaaagcgacccattgaaaacaggatcctcattctacccagtgtcacgagaaatgaaacaggaccctatcaatgtgaaatacgggaccgatatggtggcatccgcagtgacccagtcaccctgaatgtcctctatggtccagacctccccagaatttacccttcattcacctattaccgttcaggagaagtcctctacttgtcctgttctgcggactctaacccaccggcacagtattcttggacaattaatgaaaagtttcagctaccaggacaaaagctctttatccgccatattactacaaagcatagcgggctctatgtttgctctgttcgtaactcagccactggcaaggaaagctccaaatccatgacagtcgaagtctctgaagccctataagctggaggtggacaactcaatgtaaatttcatgggaaaacccttgtacgtgaagcatgagccactcagaactcaccaaaatattcgacaccataacaacagatgctcaaactgtaaaccaggacaacaagtggatgacttcacactgtggacagtttttcccaagatgtcagaacaagactccccatcatgatgaggctctcccccctcttaactgtccttgctcatgcctgcctctttcacttggcaggataatgcagtcattagaatttcacatgtagtagcttctgagagtaacaacagagtgtcagatatgtcatctcaacctcaaacttttacataacatctcagggggaaatgtggctctctccaccttgcatacagggctcccaatagaaatgaacacagagatattgcctgtgtgtttgcagagaagatggtttgtatgaagacgtaggaaagctgaaattataatagagtcccctttaaatccacattgtgtggatggctcttgccgtttcctaagagatacattgtaaaacgtgacagtaagacattctagcagaataaaacatgtaccacctttgct

SEQ ID NO: 168784 - DNA, 1903 bp, Homo sapiens
  Payload ID: 13230
  Gene Symbol: PSG1
  Gene Name: pregnancy specific beta-1-glycoprotein 1
  Uniprot ID: P11464
  ENST ID: ENST00000595356
  CDS Start-End: 67-1320
gtgctcagagagtttctggatcctaggcttatctccacagaggagaacacacaagcagcagagaccatgggaaccctctcagcccctccctgcacacagcgcatcaaatggaaggggctcctgctcacagcatcacttttaaacttctggaacctgcccaccactgcccaagtcacgattgaagccgagccaaccaaagtttccgaggggaaggatgttcttctacttgtccacaatttgccccagaatcttaccggctacatctggtacaaagggcaaatgagggacctctaccattacattacatcatatgtagtagacggtgaaataattatatatgggcctgcatatagtggacgagaaacagcatattccaatgcatccctgctgatccagaatgtcacccgggaggacgcaggatcctacaccttacacatcataaagggagatgatgggactagaggagtaactggacgtttcaccttcaccttacacctggagactcctaagccctccatctccagcagcaacttaaatcccagggagaccatggaggctgtgagcttaacctgtgaccctgagactccagacgcaagctacctgtggtggatgaatggtcagagcctccctatgactcacagcttgaagctgtccgaaaccaacaggaccctctttctattgggtgtcacaaagtatactgcaggaccctatgaatgtgaaatacggaacccagtgagtgccagccgcagtgacccagtcaccctgaatctcctcccgaagctgcccaagccctacatcaccatcaacaacttaaaccccagggagaataaggatgtcttaaacttcacctgtgaacctaagagtgagaactacacctacatttggtggctaaatggtcagagcctcccggtcagtcccagggtaaagcgacccattgaaaacaggatcctcattctacccagtgtcacgagaaatgaaacaggaccctatcaatgtgaaatacgggaccgatatggtggcatccgcagtgacccagtcaccctgaatgtcctctatggtccagacctccccagaatttacccttcattcacctattaccgttcaggagaagtcctctacttgtcctgttctgcggactctaacccaccggcacagtattcttggacaattaatgaaaagtttcagctaccaggacaaaagctctttatccgccatattactacaaagcatagcgggctctatgtttgctctgttcgtaactcagccactggcaaggaaagctccaaatccatgacagtcgaagtctctgaagccctataagctggaggtggacaactcaatgtaaatttcatgggaaaacccttgtacgtgaagcatgagccactcagaactcaccaaaatattcgacaccataacaacagatgctcaaactgtaaaccaggacaacaagtggatgacttcacactgtggacagtttttcccaagatgtcagaacaagactccccatcatgatgaggctctcccccctcttaactgtccttgctcatgcctgcctctttcacttggcaggataatgcagtcattagaatttcacatgtagtagcttctgagagtaacaacagagtgtcagatatgtcatctcaacctcaaacttttacataacatctcagggggaaatgtggctctctccaccttgcatacagggctcccaatagaaatgaacacagagatattgcctgtgtgtttgcagagaagatggtttgtatgaagacgtaggaaagctgaaattataatagagtcccctttaaatccacattgtgtggatggctcttgccgtttcctaagagatacattgtaaaacgtgacagtaagacattctagcagaataaaacatgtaccacct

SEQ ID NO: 168785 - DNA, 990 bp, Homo sapiens
  Payload ID: 13231
  Gene Symbol: PSG11
  Gene Name: pregnancy specific beta-1-glycoprotein 11
  Uniprot ID: Q9UQ72
  ENST ID: ENST00000306322
  CDS Start-End: 98-739
agaaggaggaaggacagcacagctgacagccgtgctctggaagcttctggatcctaggctcatctccacagaggagaacatgcacgcagcagagatcatggggcccctctcagcccctccctgcacagagcacatcaaatggaaggggctcctgctcacagtggagactcccaagccctccatctccagcagcaacttaaaccccagggaggccatggagactgtgatcttaacctgtaatcctgagactccggacgcaagctacctgtggtggatgaatggtcagagcctccctatgactcataggatgcagctgtctgaaaccaacaggaccctctttctatttggtgtcacaaagtatactgcaggaccctatgaatgtgaaatatggaactcagggagtgccagccgcagtgacccagtcaccctgaatctcctccatggtccagacctccccagaattttcccttcagtcacctcttactattcaggagagaacctcgacttgtcctgcttcgcaaactctaacccaccagcacagtattcttggacaattaatgggaagtttcagctatcaggacaaaagctctttatccctcagattactccaaagcataatgggctctatgcttgctctgctcgtaactcagccactggcgaggaaagctccacatccttgacaatcagagtcattgctcctccaggattaggaacttttgctttcaataatccaacgtagcagccgtgatgtcatttttgtatttcaggaagactggcagaaagttgctttgattcttcctcaaagtatttaaaatcagctacagtccaaaattgctttttcttcaaggagatttatggaaaagactatgaaaaggactcttgaatacaagttcctgataacttcaagatcataccactggactaagaactttcaaaattttgatgaacaggctgataccttcatgaaattcaagacaaagaagaaaagaa

SEQ ID NO: 168786 - DNA, 1575 bp, Homo sapiens
  Payload ID: 13231
  Gene Symbol: PSG11
  Gene Name: pregnancy specific beta-1-glycoprotein 11
  Uniprot ID: Q9UQ72
  ENST ID: ENST00000320078
  CDS Start-End: 141-1148
tgagcttgagaagtgctccttccaccgggaagagtctcagcgcagaaggaggaaggacagcacagctgacagccgtgctctggaagcttctggatcctaggctcatctccacagaggagaacatgcacgcagcagagatcatggggcccctctcagcccctccctgcacagagcacatcaaatggaaggggctcctgctcacagcattacttttaaacttctggaacttgcctaccactgcccaagtcatgattgaagcccagccacccaaagtgtccgaggggaaggatgttcttctacttgtccacaatttgccccagaatcttactggctacatctggtacaaagggcaaatcagggacctctaccattacattacatcatatgtagtagacggtcaaataattatatatggaccggcatacagtggacgagaaacagtatattccaatgcatccctgctgatccagaatgtcacccgggaggacgcaggatcctacaccttacacatcataaagcgaggtgatgggactagaggagtaactggatatttcaccttcaccttatacctggagactcccaagccctccatctccagcagcaacttaaaccccagggaggccatggagactgtgatcttaacctgtaatcctgagactccggacgcaagctacctgtggtggatgaatggtcagagcctccctatgactcataggatgcagctgtctgaaaccaacaggaccctctttctatttggtgtcacaaagtatactgcaggaccctatgaatgtgaaatatggaactcagggagtgccagccgcagtgacccagtcaccctgaatctcctccatggtccagacctccccagaattttcccttcagtcacctcttactattcaggagagaacctcgacttgtcctgcttcgcaaactctaacccaccagcacagtattcttggacaattaatgggaagtttcagctatcaggacaaaagctctttatccctcagattactccaaagcataatgggctctatgcttgctctgctcgtaactcagccactggcgaggaaagctccacatccttgacaatcagagtcattgctcctccaggattaggaacttttgctttcaataatccaacgtagcagccgtgatgtcatttttgtatttcaggaagactggcaggagatttatggaaaagactatgaaaaggactcttgaatacaagttcctgataacttcaagatcataccactggactaagaactttcaaaattttgatgaacaggctgataccttcatgaaattcaagacaaagaagaaaagaactccatttcattggactaaataacaaaaggataatgttttcataattttttattggaaaatgtgctgattttttgaatgttttatcctccagatttatgaatttttttcttcagcaattggtaaagtatacttttgtaaacaaaaattgaaacatttgcttttgctctctgagtgccccagaattgggaatctattcatgaatattcatatgtttatggtaataaagttatttgcacaagttta

SEQ ID NO: 168787 - DNA, 1163 bp, Homo sapiens
  Payload ID: 13231
  Gene Symbol: PSG11
  Gene Name: pregnancy specific beta-1-glycoprotein 11
  Uniprot ID: Q9UQ72
  ENST ID: ENST00000403486
  CDS Start-End: 95-736
aggaggaaggacagcacagctgacagccgtgctctggaagcttctggatcctaggctcatctccacagaggagaacatgcacgcagcagagatcatggggcccctctcagcccctccctgcacagagcacatcaaatggaaggggctcctgctcacagtggagactcccaagccctccatctccagcagcaacttaaaccccagggaggccatggagactgtgatcttaacctgtaatcctgagactccggacgcaagctacctgtggtggatgaatggtcagagcctccctatgactcataggatgcagctgtctgaaaccaacaggaccctctttctatttggtgtcacaaagtatactgcaggaccctatgaatgtgaaatatggaactcagggagtgccagccgcagtgacccagtcaccctgaatctcctccatggtccagacctccccagaattttcccttcagtcacctcttactattcaggagagaacctcgacttgtcctgcttcgcaaactctaacccaccagcacagtattcttggacaattaatgggaagtttcagctatcaggacaaaagctctttatccctcagattactccaaagcataatgggctctatgcttgctctgctcgtaactcagccactggcgaggaaagctccacatccttgacaatcagagtcattgctcctccaggattaggaacttttgctttcaataatccaacgtagcagccgtgatgtcatttttgtatttcaggaagactggcaggagatttatggaaaagactatgaaaaggactcttgaatacaagttcctgataacttcaagatcataccactggactaagaactttcaaaattttgatgaacaggctgataccttcatgaaattcaagacaaagaagaaaagaactccatttcattggactaaataacaaaaggataatgttttcataattttttattggaaaatgtgctgattttttgaatgttttatcctccagatttatgaatttttttcttcagcaattggtaaagtatacttttgtaaacaaaaattgaaacatttgcttttgctctctgagtgccccagaattgggaatctattcatgaatattcatatgtttatggtaataaagttatttgcacaagttta

SEQ ID NO: 168788 - DNA, 1036 bp, Homo sapiens
  Payload ID: 13231
  Gene Symbol: PSG11
  Gene Name: pregnancy specific beta-1-glycoprotein 11
  ENST ID: ENST00000598133
  CDS Start-End: 77-1036
gctgacagccgtgctctggaagcttctggatcctaggctcatctccacagaggagaacatgcacgcagcagagatcatggggcccctctcagcccctccctgcacagagcacatcaaatggaaggggctcctgctcacagcattacttttaaacttctggaacttgcctaccactgcccaagtcatgattgaagcccagccacccaaagtgtccgaggggaaggatgttcttctacttgtccacaatttgccccagaatcttactggctacatctggtacaaagggcaaatcagggacctctaccattacattacatcatatgtagtagacggtcaaataattatatatggaccggcatacagtggacgagaaacagtatattccaatgcatccctgctgatccagaatgtcacccgggaggacgcaggatcctacaccttacacatcataaagcgaggtgatgggactagaggagtaactggatatttcaccttcaccttatacccaaagctgcccatgccctacatcaccatcaacaacttaaaccccagggagaataaggatgtcttaaccttcacctgtgaacctaagagtgagaactatgcctacatttggtggctaaattgtcagagcctcccggtcagtcccagggtaaagcgacccattgaaaacaggatcctcattctacccagtgtcacgagaaatgaaacaggaccctatcaatgtgaaatacgggaccgatatggtggcatccgcagtgactcagtcaccctgaatgtcctctatggtccagacctccccagaattttcccttcagtcacctcttactattcaggagagaacctcgacttgtcctgcttcgcaaactctaacccaccagcacagtattcttggacaattaatgggaagtttcagctatcaggacaaaagctctttatccctcagattactccaaagcataatgggctctatgcttgctctgctcgtaactcagccactggcgaggaaagctccacatccttgacaatcagagtc

SEQ ID NO: 168789 - DNA, 1942 bp, Homo sapiens
  Payload ID: 13231
  Gene Symbol: PSG11
  Gene Name: pregnancy specific beta-1-glycoprotein 11
  ENST ID: ENST00000593983
  CDS Start-End: 92-472
ccatgcggacccctggggaagaggattccaaacagaaaaatgccaagcattacttttaaacttctggaacttgcctaccactgcccaagtcatgattgaagcccagccacccaaagtgtccgaggggaaggatgttcttctacttgtccacaatttgccccagaatcttactggctacatctggtacaaagggcaaatcagggacctctaccattacattacatcatatgtagtagacggtcaaataattatatatggaccggcatacagtggacgagaaacagtatattccaatgcatccctgctgatccagaatgtcacccgggaggacgcaggatcctacaccttacacatcataaagcgaggtgatgggactagaggagtaactggatatttcaccttcaccttataccgtcattccttggactctgctctatctttagaggtcactggctcaagtcagtcactatgagacacctgggaaaactgccccaccttgtggctgcactgcctgatgactgaactgacctccaggcttgactctggtctcccctgtgttatttctgctgaagtacccagtcccaggccaggctttccagtacccaaagggtttaaggacaatgggaagttccatcatccatctctaggatgtccttggcaagggaagctgcagagaaaacataccttggggggaaaagtaagactgaaactaagaagattccagcactgcatgctccaagtcaggaccaaaagtggagactcccaagccctccatctccagcagcaacttaaaccccagggaggccatggagactgtgatcttaacctgtaatcctgagactccggacgcaagctacctgtggtggatgaatggtcagagcctccctatgactcataggatgcagctgtctgaaaccaacaggaccctctttctatttggtgtcacaaagtatactgcaggaccctatgaatgtgaaatatggaactcagggagtgccagccgcagtgacccagtcaccctgaatctcctcccaaagctgcccatgccctacatcaccatcaacaacttaaaccccagggagaataaggatgtcttaaccttcacctgtgaacctaagagtgagaactatgcctacatttggtggctaaattgtcagagcctcccggtcagtcccagggtaaagcgacccattgaaaacaggatcctcattctacccagtgtcacgagaaatgaaacaggaccctatcaatgtgaaatacgggaccgatatggtggcatccgcagtgactcagtcaccctgaatgtcctctattactccaaagcataatgggctctatgcttgctctgctcgtaactcagccactggcgaggaaagctccacatccttgacaatcagagtcattgctcctccaggattaggaacttttgctttcaataatccaacgtagcagccgtgatgtcatttttgtatttcaggaagactggcagaaagttgctttgattcttcctcaaagtatttaaaatcagctacagtccaaaattgctttttcttcaaggagatttatggaaaagactatgaaaaggactcttgaatacaagttcctgataacttcaagatcataccactggactaagaactttcaaaattttgatgaacaggctgataccttcatgaaattcaagacaaagaagaaaagaactccatttcattggactaaataacaaaaggataatgttttcataattttttattggaaaatgtgctgattttttgaatgttttatcctccagatttatgaatttttttcttcagcaattggtaaagtatacttttgtaaacaaaaattgaaacatttgcttttgctctctgagtgccccagaattgggaatctattcatgaatattcatatgtttatggtaataaagttatttgcacaagtt

SEQ ID NO: 168790 - DNA, 795 bp, Homo sapiens
  Payload ID: 13232
  Gene Symbol: PSG2
  Gene Name: pregnancy specific beta-1-glycoprotein 2
  ENST ID: ENST00000329509
  CDS Start-End: 1-353
tacggaactcagggagtgccagccgcagtgacccagtcaccctgaatctcctccatggtccagacctccccagaattcacccttcatacaccaattaccgttcaggagataacctctacttgtcttgcttcgcgaactctaacccaccggcacagtattcttggacaattaatgggaagtttcagcaatcaggacaaaatctgtttatcccccaaattactacaaagcatagcgggctctatgtttgctctgttcgtaactcagccactggcgaggaaagctccacatcgttgacagtcaaagtctctgcttctacaagaataggacttcttcctctccttaatccaacatagcagctgtgatgtcatttctgtatttcaggaagactggcagagtgaaatcccttcaaccatctgcactgcagacttaaccacacccttcatcacaagcaacatgtgacctcgtggagaacaaagactttaggattaacatgtgaacctgagactcagaacacaacctatgtgtggttgagatcttttcctgatgatcagttcatgtgttcaaaaaacatacagaaatgaagaaggcaaggtccctaccccaggagacataaagcctaagacaggaaatgagacctgaaaataatcatgataccaaaatagaaaaaattgaatgccacaagaaatcagagaaatctgatgggaaatagagctacacattggaatcactggaaaacatttctaaaagtggatgctcaagccccacccattagttccagttcaaaggtctggagag

SEQ ID NO: 168791 - DNA, 1538 bp, Homo sapiens
  Payload ID: 13232
  Gene Symbol: PSG2
  Gene Name: pregnancy specific beta-1-glycoprotein 2
  Uniprot ID: P11465
  ENST ID: ENST00000406487
  CDS Start-End: 100-1107
gcagaaggaggaaggacagcacagctgacagccgtgctcaggaagtttctggatcctaggctcatctccacagaggagaacacacaggcagcagagaccatggggcccctctcagcccctccctgcacagagcacatcaaatggaaggggctcctggtcacagcatcacttttaaacttctggaacctgcccaccactgcccaagtcacgattgaagcccagccaccaaaagtttccgaggggaaggatgttcttctacttgtccacaatttgccccagaatcttactggctacatctggtacaaagggcaaatcagggacctctaccattacattacatcatatgtagtagacggtcaaataattatatatgggcctgcatatagtggacgagaaacagcatattccaatgcatccctgctgatccagaatgtcacccgggaggacgcaggatcctacaccttacacatcataaagcgaggtgatgggactagaggagtaactggatatttcaccttcaccttatacctggagactcccaagccctccatctccagcagcaacttaaaccccagggaggccatggaaactgtgatcttaacctgtgatcctgagactccggacacaagctaccagtggtggatgaatggtcagagcctccctatgactcataggtttcagctgtccgaaaccaacaggaccctctttctatttggtgtcacaaagtatactgcaggaccctatgaatgtgaaatacggaactcagggagtgccagccgcagtgacccagtcaccctgaatctcctccatggtccagacctccccagaattcacccttcatacaccaattaccgttcaggagataacctctacttgtcttgcttcgcgaactctaacccaccggcacagtattcttggacaattaatgggaagtttcagcaatcaggacaaaatctgtttatcccccaaattactacaaagcatagcgggctctatgtttgctctgttcgtaactcagccactggcgaggaaagctccacatcgttgacagtcaaagtctctgcttctacaagaataggacttcttcctctccttaatccaacatagcagctgtgatgtcatttctgtatttcaggaagactggcaggagatttatggaaaggtctcttacaaggactcttgaatacaagctcctgataacttcaagatcataccactggactaagaactttcaaaattttaatgaacaggctgataccttcatgaaattcaagacaaagaagaaaaatactcaatgttattggactaaataatcaaaaggataatgatttcataattttctatttgaaaatgtgctgattcttggaatgtttcattctccagatttatgaacattttttcttgagcaattggtaaagtatacttttgtaaacaaaaattgaaacatttccttttgctctctatctgagtgccccagaattgggaatctattcatgagtattcatatgtttatggtaataaagctatttgcacaagtt

SEQ ID NO: 168792 - DNA, 1961 bp, Homo sapiens
  Payload ID: 13233
  Gene Symbol: PSG3
  Gene Name: pregnancy specific beta-1-glycoprotein 3
  Uniprot ID: Q16557
  ENST ID: ENST00000327495
  CDS Start-End: 186-1472
tgagagaggaggggacagagaggtgtcctgggcctgaccccgcccatgaacctgagaagtgctcctgccccgggaagaggctcagcgcagaaggaggaaggacagcacagctgagagccatgctcaggaagtttctggatcctaggctcagctccacagaggagaacacgcaggcagcagagaccatggggcccctctcagcccctccctgcacacagcgcatcacctggaaggggctcctgctcacagcattacttttaaacttctggaacttgcctaccactgcccaagtcacgattgaagccgagccaaccaaagtttccaaggggaaggacgttcttctacttgtccacaatttgccccagaatcttgctggctacatctggtacaaagggcaaatgaaggacctctaccattacattacatcatacgtagtagatggtcaaataattatatatgggcctgcatacagtggacgagaaacagtatattccaatgcatccctgctgatccagaatgtcacccgggaggacgcaggatcctacaccttacacatcgtaaagcgaggtgatgggactagaggagaaactggacatttcaccttcaccttatacctggagactcccaagccctccatctccagcagcaacttataccccagggaggacatggaggctgtgagcttaacctgtgatcctgagactccggacgcaagctacctgtggtggatgaatggtcagagcctccctatgactcacagcttgcagttgtccaaaaacaaaaggaccctctttctatttggtgtcacaaagtacactgcaggaccctatgaatgtgaaatacggaacccagtgagtgccagccgcagtgacccagtcaccctgaatctcctcccgaagctgcccaagccctacatcaccatcaacaacttaaaccccagggagaataaggatgtcttagccttcacctgtgaacctaagagtgagaactacacctacatttggtggctaaatggtcagagcctcccggtcagtcccagggtaaagcgacccattgaaaacaggatcctcattctacccagtgtcacgagaaatgaaacaggaccctatcaatgtgaaatacaggaccgatatggtggcatccgcagttacccagtcaccctgaatgtcctctatggtccagacctccccagaatttacccttcattcacctattaccattcaggagaaaacctctacttgtcctgcttcgcggactctaacccaccagcagaatattcttggacaattaatgggaagtttcagctatcaggacaaaagctctttatcccccagattactacaaagcatagcgggctctatgcttgctctgttcgtaactcagccactggcatggaaagctccaaatccatgacagtcaaagtctctgctccttcaggaacaggacatcttcctggccttaatccattatagcagccgtgatgtcatttctgtatttcaggaagactggcagacagttgctttcattcttcctcaaagtatttaccatcagctacagtccaaaattgctttttgttcaaggagatttatgaaaagactctgacaaggactcttgaatacaagttcctgataacttcaagatcataccactggactaagaactttcaaaattttaatgaacaggctgatacttcatgaaattcaagacaaagaaaaaaacccaattttattggactaaatagtcaaaacaatgttttcataattttctatttgaaaatgtgctgattctttgaatgttttattctccagatttatgcactttttttcttcagcaattggtaaagtatacttttgtaaacaaaaattgaaacatttgcttttgctccctaagtgccccagaattgggaaactattcaggagtattcatatgtttatggtaataaagttatctgcacaagttca

SEQ ID NO: 168793 - DNA, 1724 bp, Homo sapiens
  Payload ID: 13233
  Gene Symbol: PSG3
  Gene Name: pregnancy specific beta-1-glycoprotein 3
  ENST ID: ENST00000595140
  CDS Start-End: 94-1521
ggaggaaggacagcacagctgagagccatgctcaggaagtttctggatcctaggctcagctccacagaggagaacacgcaggcagcagagaccatggggcccctctcagcccctccctgcacacagcgcatcacctggaaggggctcctgctcacagcattacttttaaacttctggaacttgcctaccactgcccaagtcacgattgaagccgagccaaccaaagtttccaaggggaaggacgttcttctacttgtccacaatttgccccagaatcttgctggctacatctggtacaaagggcaaatgaaggacctctaccattacattacatcatacgtagtagatggtcaaataattatatatgggcctgcatacagtggacgagaaacagtatattccaatgcatccctgctgatccagaatgtcacccgggaggacgcaggatcctacaccttacacatcgtaaagcgaggtgatgggactagaggagaaactggacatttcaccttcaccttatacctggagactcccaagccctccatctccagcagcaacttataccccagggaggacatggaggctgtgagcttaacctgtgatcctgagactccggacgcaagctacctgtggtggatgaatggtcagagcctccctatgactcacagcttgcagttgtccaaaaacaaaaggaccctctttctatttggtgtcacaaagtacactgcaggaccctatgaatgtgaaatacggaacccagtgagtgccagccgcagtgacccagtcaccctgaatctcctcccgaagctgcccaagccctacatcaccatcaacaacttaaaccccagggagaataaggatgtcttagccttcacctgtgaacctaagagtgagaactacacctacatttggtggctaaatggtcagagcctcccggtcagtcccagggtaaagcgacccattgaaaacaggatcctcattctacccagtgtcacgagaaatgaaacaggaccctatcaatgtgaaatacaggaccgatatggtggcatccgcagttacccagtcaccctgaatgtcctctatggtccagacctccccagaatttacccttcattcacctattaccattcaggagaaaacctctacttgtcctgcttcgcggactctaacccaccagcagaatattcttggacaattaatgggaagtttcagctatcaggacaaaagctctttatcccccagattactacaaagcatagcgggctctatgcttgctctgttcgtaactcagccactggcatggaaagctccaaatccatgacagtcaaagtctctgacagttgctttcattcttcctcaaagtatttaccatcagctacagtccaaaattgctttttgttcaaggagatttatgaaaagactctgacaaggactcttgaatacaagttcctgataacttcaagatcataccactggactaagaactttcaaaattttaatgaacaggctgatacttcatgaaattcaagacaaagaaaaaaacccaattttattggactaaatagtcaaaacaatgttttcataattttctatttgaaaatgtgctgattctttgaatgttttattctccagatttatgcactttttttcttcagcaattggtaaagtatacttttgtaaacaaaaattgaaacatttgcttttgctccctaagtgccccagaa

SEQ ID NO: 168794 - DNA, 1947 bp, Homo sapiens
  Payload ID: 13233
  Gene Symbol: PSG3
  Gene Name: pregnancy specific beta-1-glycoprotein 3
  ENST ID: ENST00000594378
  CDS Start-End: 202-477
gggggccgtgcggacccctggggaagaggattccaaacagaaaaatgccaagcattacttttaaacttctggaacttgcctaccactgcccaagtcacgattgaagccgagccaaccaaagtttccaaggggaaggacgttcttctacttgtccacaatttgccccagaatcttgctggctacatctggtacaaagggcaaatgaaggacctctaccattacattacatcatacgtagtagatggtcaaataattatatatgggcctgcatacagtggacgagaaacagtatattccaatgcatccctgctgatccagaatgtcacccgggaggacgcaggatcctacaccttacacatcgtaaagcgaggtgatgggactagaggagaaactggacatttcaccttcaccttataccgtcattccttggactctgctctatctttagaggtcactggctcaagtcagccactatgagacacctgggaaaactgccccaccttgtggctccactgcctgatgactgaactgaactccggacttgactctgttctcccctgtgttatttctgctgaagtacccagtcccaggtcaggctttccagtatccaaagggtttaaagacaattggaagttccatcacccatctctaggatgtccttggcaagggaagctgcagagaaaacatacctcgggcggcaaagtaagactgaaactaagaagattccagcactgcatgctccaagtgaggaccacaagtggagactcccaagccctccatctccagcagcaacttataccccagggaggacatggaggctgtgagcttaacctgtgatcctgagactccggacgcaagctacctgtggtggatgaatggtcagagcctccctatgactcacagcttgcagttgtccaaaaacaaaaggaccctctttctatttggtgtcacaaagtacactgcaggaccctatgaatgtgaaatacggaacccagtgagtgccagccgcagtgacccagtcaccctgaatctcctcccgaagctgcccaagccctacatcaccatcaacaacttaaaccccagggagaataaggatgtcttagccttcacctgtgaacctaagagtgagaactacacctacatttggtggctaaatggtcagagcctcccggtcagtcccagggtaaagcgacccattgaaaacaggatcctcattctacccagtgtcacgagaaatgaaacaggaccctatcaatgtgaaatacaggaccgatatggtggcatccgcagttacccagtcaccctgaatgtcctctattactacaaagcatagcgggctctatgcttgctctgttcgtaactcagccactggcatggaaagctccaaatccatgacagtcaaagtctctgctccttcaggaacaggacatcttcctggccttaatccattatagcagccgtgatgtcatttctgtatttcaggaagactggcagacagttgctttcattcttcctcaaagtatttaccatcagctacagtccaaaattgctttttgttcaaggagatttatgaaaagactctgacaaggactcttgaatacaagttcctgataacttcaagatcataccactggactaagaactttcaaaattttaatgaacaggctgatacttcatgaaattcaagacaaagaaaaaaacccaattttattggactaaatagtcaaaacaatgttttcataattttctatttgaaaatgtgctgattctttgaatgttttattctccagatttatgcactttttttcttcagcaattggtaaagtatacttttgtaaacaaaaattgaaacatttgcttttgctccctaagtgccccagaattgggaaactattcaggagtattcatatgtttatggtaataaagttatctgcacaagttcagtaa

SEQ ID NO: 168795 - DNA, 1287 bp, Homo sapiens
  Payload ID: 13233
  Gene Symbol: PSG3
  Gene Name: pregnancy specific beta-1-glycoprotein 3
  Uniprot ID: Q16557
  ENST ID: ENST00000614582
  CDS Start-End: 1-1287
atggggcccctctcagcccctccctgcacacagcgcatcacctggaaggggctcctgctcacagcattacttttaaacttctggaacttgcctaccactgcccaagtcacgattgaagccgagccaaccaaagtttccaaggggaaggacgttcttctacttgtccacaatttgccccagaatcttgctggctacatctggtacaaagggcaaatgaaggacctctaccattacattacatcatacgtagtagatggtcaaataattatatatgggcctgcatacagtggacgagaaacagtatattccaatgcatccctgctgatccagaatgtcacccgggaggacgcaggatcctacaccttacacatcgtaaagcgaggtgatgggactagaggagaaactggacatttcaccttcaccttatacctggagactcccaagccctccatctccagcagcaacttataccccagggaggacatggaggctgtgagcttaacctgtgatcctgagactccggacgcaagctacctgtggtggatgaatggtcagagcctccctatgactcacagcttgcagttgtccaaaaacaaaaggaccctctttctatttggtgtcacaaagtacactgcaggaccctatgaatgtgaaatacggaacccagtgagtgccagccgcagtgacccagtcaccctgaatctcctcccgaagctgcccaagccctacatcaccatcaacaacttaaaccccagggagaataaggatgtcttagccttcacctgtgaacctaagagtgagaactacacctacatttggtggctaaatggtcagagcctcccggtcagtcccagggtaaagcgacccattgaaaacaggatcctcattctacccagtgtcacgagaaatgaaacaggaccctatcaatgtgaaatacaggaccgatatggtggcatccgcagttacccagtcaccctgaatgtcctctatggtccagacctccccagaatttacccttcattcacctattaccattcaggagaaaacctctacttgtcctgcttcgcggactctaacccaccagcagaatattcttggacaattaatgggaagtttcagctatcaggacaaaagctctttatcccccagattactacaaagcatagcgggctctatgcttgctctgttcgtaactcagccactggcatggaaagctccaaatccatgacagtcaaagtctctgctccttcaggaacaggacatcttcctggccttaatccattatag

SEQ ID NO: 168796 - DNA, 1629 bp, Homo sapiens
  Payload ID: 13234
  Gene Symbol: PSG4
  Gene Name: pregnancy specific beta-1-glycoprotein 4
  Uniprot ID: Q00888
  ENST ID: ENST00000244295
  CDS Start-End: 28-1008
gaggagaacacacaagcagcagagaccatggggcccctctcagcccctccctgcacacagcgcatcacctggaagggggtcctgctcacagcatcacttttaaacttctggaatccgcccacaactgcccaagtcacgattgaagcccagccacccaaagtttctgaggggaaggatgttcttctacttgtccacaatttgccccagaatcttgctggctacatttggtacaaagggcaaatgacatacctctaccattacattacatcatatgtagtagacggtcaaagaattatatatgggcctgcatacagtggaagagaaagagtatattccaatgcatccctgctgatccagaatgtcacgcaggaggatgcaggatcctacaccttacacatcataaagcgacgcgatgggactggaggagtaactggacatttcaccttcaccttacacctggagactcccaagccctccatctccagcagcaacttaaatcccagggaggccatggaggctgtgatcttaacctgtgatcctgcgactccagccgcaagctaccagtggtggatgaatggtcagagcctccctatgactcacaggttgcagctgtccaaaaccaacaggaccctctttatatttggtgtcacaaagtatattgcaggaccctatgaatgtgaaatacggaacccagtgagtgccagccgcagtgacccagtcaccctgaatctcctccatggtccagacctccccagcatttacccttcattcacctattaccgttcaggagaaaacctctacttgtcctgcttcgccgagtctaacccacgggcacaatattcttggacaattaatgggaagtttcagctatcaggacaaaagctctctatcccccaaataactacaaagcatagtgggctctatgcttgctctgttcgtaactcagccactggcaaggaaagctccaaatccatcacagtcaaagtctctgactggatattaccctgaattctactagttcctccaattccattttctcccatggaatcacgaagagcaagacccactctgttccagaagccctataagctggaggtggacaactcgatgtaaatttcatgggaaaacccttgtacctgacatgtgagccactcagaactcaccaaaatgttcgacaccataacaacagctactcaaactgtaaaccaggataacaagttgatgacttcacactgtggacagtttttccaaagatgtcagaacaagactccccatcatgataaggctcccacccctcttaaccgtccttgctcatgcctgcctctttcacttggcaggataatgcagtcattagaatttcacatgtagtagcttctgagggtaacaacagagtgtcagatatgtcatctcaacctcaaacttttacgtaacatctcaggggaaatgtggctctctccatcttgcatacagggctcccaatagaaatgaacacagagatattgcctgtgtgtttgcagagaagatggtttctataaagagtaggaaagctgaaattatagtagagtctcctttaaatgcacattgtgtggatggctctcaccatttcctaagagatacagtgtaaaacgt

SEQ ID NO: 168797 - DNA, 2168 bp, Homo sapiens
  Payload ID: 13234
  Gene Symbol: PSG4
  Gene Name: pregnancy specific beta-1-glycoprotein 4
  Uniprot ID: Q00888
  ENST ID: ENST00000405312
  CDS Start-End: 239-1498
agggacctgaaacacagacaaaaggaaaaacaggagggacaaggaggcagaactgagagaggaggggacagagaggtgtcctgggcctgaccccgcccacgagcttgagaaatgctcctgccccgggaggaggctcagcacagaaggaggaaggacagcacagctgacagccgtactcaggaagcttctggatcctaggcttatctccacagaggagaacacacaagcagcagagaccatggggcccctctcagcccctccctgcacacagcgcatcacctggaagggggtcctgctcacagcatcacttttaaacttctggaatccgcccacaactgcccaagtcacgattgaagcccagccacccaaagtttctgaggggaaggatgttcttctacttgtccacaatttgccccagaatcttgctggctacatttggtacaaagggcaaatgacatacctctaccattacattacatcatatgtagtagacggtcaaagaattatatatgggcctgcatacagtggaagagaaagagtatattccaatgcatccctgctgatccagaatgtcacgcaggaggatgcaggatcctacaccttacacatcataaagcgacgcgatgggactggaggagtaactggacatttcaccttcaccttacacctggagactcccaagccctccatctccagcagcaacttaaatcccagggaggccatggaggctgtgatcttaacctgtgatcctgcgactccagccgcaagctaccagtggtggatgaatggtcagagcctccctatgactcacaggttgcagctgtccaaaaccaacaggaccctctttatatttggtgtcacaaagtatattgcaggaccctatgaatgtgaaatacggaacccagtgagtgccagccgcagtgacccagtcaccctgaatctcctcccaaagctgtccaagccctacatcacaatcaacaacttaaaccccagagagaataaggatgtcttaaccttcacctgtgaacctaagagtaagaactacacctacatttggtggctaaatggtcagagcctccctgtcagtcccagggtaaagcgacccattgaaaacaggatcctcattctacccaatgtcacgagaaatgaaacaggaccttatcaatgtgaaatacgggaccgatatggtggcatccgcagtgacccagtcaccctgaatgtcctctatggtccagacctccccagcatttacccttcattcacctattaccgttcaggagaaaacctctacttgtcctgcttcgccgagtctaacccacgggcacaatattcttggacaattaatgggaagtttcagctatcaggacaaaagctctctatcccccaaataactacaaagcatagtgggctctatgcttgctctgttcgtaactcagccactggcaaggaaagctccaaatccatcacagtcaaagtctctgactggatattaccctgaattctactagttcctccaattccattttctcccatggaatcacgaagagcaagacccactctgttccagaagccctataagctggaggtggacaactcgatgtaaatttcatgggaaaacccttgtacctgacatgtgagccactcagaactcaccaaaatgttcgacaccataacaacagctactcaaactgtaaaccaggataacaagttgatgacttcacactgtggacagtttttccaaagatgtcagaacaagactccccatcatgataaggctcccacccctcttaaccgtccttgctcatgcctgcctctttcacttggcaggataatgcagtcattagaatttcacatgtagtagcttctgagggtaacaacagagtgtcagatatgtcatctcaacctcaaacttttacgtaacatctcaggggaaatgtggctctctccatcttgcatacagggctcccaatagaaatgaacacagagatattgcctgtgtgtttgcagagaagatggtttctataaagagtaggaaagctgaaattatagtagagtctcctttaaatgcacattgtgtggatggctctcaccatttcctaagagatacagtgtaaaacgtgacagtaatactgattctagcagaataaaacatgtaccacatttgctaa

SEQ ID NO: 168798 - DNA, 1887 bp, Homo sapiens
  Payload ID: 13234
  Gene Symbol: PSG4
  Gene Name: pregnancy specific beta-1-glycoprotein 4
  Uniprot ID: Q00888
  ENST ID: ENST00000433626
  CDS Start-End: 239-1219
agggacctgaaacacagacaaaaggaaaaacaggagggacaaggaggcagaactgagagaggaggggacagagaggtgtcctgggcctgaccccgcccacgagcttgagaaatgctcctgccccgggaggaggctcagcacagaaggaggaaggacagcacagctgacagccgtactcaggaagcttctggatcctaggcttatctccacagaggagaacacacaagcagcagagaccatggggcccctctcagcccctccctgcacacagcgcatcacctggaagggggtcctgctcacagcatcacttttaaacttctggaatccgcccacaactgcccaagtcacgattgaagcccagccacccaaagtttctgaggggaaggatgttcttctacttgtccacaatttgccccagaatcttgctggctacatttggtacaaagggcaaatgacatacctctaccattacattacatcatatgtagtagacggtcaaagaattatatatgggcctgcatacagtggaagagaaagagtatattccaatgcatccctgctgatccagaatgtcacgcaggaggatgcaggatcctacaccttacacatcataaagcgacgcgatgggactggaggagtaactggacatttcaccttcaccttacacccaaagctgtccaagccctacatcacaatcaacaacttaaaccccagagagaataaggatgtcttaaccttcacctgtgaacctaagagtaagaactacacctacatttggtggctaaatggtcagagcctccctgtcagtcccagggtaaagcgacccattgaaaacaggatcctcattctacccaatgtcacgagaaatgaaacaggaccttatcaatgtgaaatacgggaccgatatggtggcatccgcagtgacccagtcaccctgaatgtcctctatggtccagacctccccagcatttacccttcattcacctattaccgttcaggagaaaacctctacttgtcctgcttcgccgagtctaacccacgggcacaatattcttggacaattaatgggaagtttcagctatcaggacaaaagctctctatcccccaaataactacaaagcatagtgggctctatgcttgctctgttcgtaactcagccactggcaaggaaagctccaaatccatcacagtcaaagtctctgactggatattaccctgaattctactagttcctccaattccattttctcccatggaatcacgaagagcaagacccactctgttccagaagccctataagctggaggtggacaactcgatgtaaatttcatgggaaaacccttgtacctgacatgtgagccactcagaactcaccaaaatgttcgacaccataacaacagctactcaaactgtaaaccaggataacaagttgatgacttcacactgtggacagtttttccaaagatgtcagaacaagactccccatcatgataaggctcccacccctcttaaccgtccttgctcatgcctgcctctttcacttggcaggataatgcagtcattagaatttcacatgtagtagcttctgagggtaacaacagagtgtcagatatgtcatctcaacctcaaacttttacgtaacatctcaggggaaatgtggctctctccatcttgcatacagggctcccaatagaaatgaacacagagatattgcctgtgtgtttgcagagaagatggtttctataaagagtaggaaagctgaaattatagtagagtctcctttaaatgcacattgtgtggatggctctcaccatttcctaagagatacagtgtaaaacgtgacagtaatactgattctagcagaataaaacatgtaccacatttgct

SEQ ID NO: 168799 - DNA, 996 bp, Homo sapiens
  Payload ID: 13234
  Gene Symbol: PSG4
  Gene Name: pregnancy specific beta-1-glycoprotein 4
  ENST ID: ENST00000451895
  CDS Start-End: 240-996
agcacagaaggaggaaggacagcacagctgacagccgtactcaggaagcttctggatcctaggcttatctccacagaggagaacacacaagcagcagagaccatggggcccctctcagcccctccctgcacacagcgcatcacctggaagggggtcctgctcacaggggccaccatattttgaaaaatgataacaataactatatcagatgacacttcaaatgaaaatataagcaggacatgaaacactgtcctcagcaagaaacctcaacaattggggggaaaaagaaacatccagagggtggagaccctgagaactctcacatctacaggagtctgccgcctgttccagcatcacttttaaacttctggaatccgcccacaactgcccaagtcacgattgaagcccagccacccaaagtttctgaggggaaggatgttcttctacttgtccacaatttgccccagaatcttgctggctacatttggtacaaagggcaaatgacatacctctaccattacattacatcatatgtagtagacggtcaaagaattatatatgggcctgcatacagtggaagagaaagagtatattccaatgcatccctgctgatccagaatgtcacgcaggaggatgcaggatcctacaccttacacatcataaagcgacgcgatgggactggaggagtaactggacatttcaccttcaccttacacctggagactcccaagccctccatctccagcagcaacttaaatcccagggaggccatggaggctgtgatcttaacctgtgatcctgcgactccagccgcaagctaccagtggtggatgaatggtcagagcctccctatgactcacaggttgcagctgtccaaaaccaacaggaccctctttatatttggtgtcacaaagtatattgcaggaccctatgaatgtgaaatacggaacccagtgagtgccagccgcagtgacccagtcaccctgaatctcctcc

SEQ ID NO: 168800 - DNA, 731 bp, Homo sapiens
  Payload ID: 13234
  Gene Symbol: PSG4
  Gene Name: pregnancy specific beta-1-glycoprotein 4
  ENST ID: ENST00000599746
  CDS Start-End: 1-731
catcacttttaaacttctggaatccgcccacaactgcccaagtcacgattgaagcccagccacccaaagtttctgaggggaaggatgttcttctacttgtccacaatttgccccagaatcttgctggctacatttggtacaaagggcaaatgacatacctctaccattacattacatcatatgtagtagacggtcaaagaattatatatgggcctgcatacagtggaagagaaagagtatattccaatgcatccctgctgatccagaatgtcacgcaggaggatgcaggatcctacaccttacacatcataaagcgacgcgatgggactggaggagtaactggacatttcaccttcaccttacacccaaagctgtccaagccctacatcacaatcaacaacttaaaccccagagagaataaggatgtcttaaccttcacctgtgaacctaagagtaagaactacacctacatttggtggctaaatggtcagagcctccctgtcagtcccagggtaaagcgacccattgaaaacaggatcctcattctacccaatgtcacgagaaatgaaacaggaccttatcaatgtgaaatacgggaccgatatggtggcatccgcagtgacccagtcaccctgaatgtcctctatggtccagacctccccagcatttacccttcattcacctattaccgttcaggagaaaacctctacttgtcctgcttcgccgagtct

SEQ ID NO: 168801 - DNA, 526 bp, Homo sapiens
  Payload ID: 13234
  Gene Symbol: PSG4
  Gene Name: pregnancy specific beta-1-glycoprotein 4
  ENST ID: ENST00000600572
  CDS Start-End: 292-526
agaaagggaagacccagggtctctgaaggaggtatcaggaaagaagtctaaggatgccctgatgtgagcaggacctgagggcagtgtggagggggccgtgcggacccctggggaagaggaatccaaaaagaaaaatgccaagcatcacttttaaacttctggaatccgcccacaactgcccaagtcacgattgaagcccagccacccaaagtttctgaggggaaggatgttcttctacttgtccacaatttgccccagaatcttgctggctacatttggtacaaagggcaaatgacatacctctaccattacattacatcatatgtagtagacggtcaaagaattatatatgggcctgcatacagtggaagagaaagagtatattccaatgcatccctgctgatccagaatgtcacgcaggaggatgcaggatcctacaccttacacatcataaagcgacgcgatgggactggaggagtaactggacatttcaccttcaccttacacctggagactcccaagccct

SEQ ID NO: 168802 - DNA, 763 bp, Homo sapiens
  Payload ID: 13234
  Gene Symbol: PSG4
  Gene Name: pregnancy specific beta-1-glycoprotein 4
  ENST ID: ENST00000601041
  CDS Start-End: 98-256
agaaggaggaaggacagcacagctgacagccgtactcaggaagcttctggatcctaggcttatctccacagaggagaacacacaagcagcagagaccatggggcccctctcagcccctccctgcacacagcgcatcacctggaagggggtcctgctcacaggttgcagctgtccaaaaccaacaggaccctctttatatttggtgtcacaaagtatattgcaggaccctatgaatgtgaaatacggaacccagtgagtgccagccgcagtgacccagtcaccctgaatctcctcccaaagctgtccaagccctacatcacaatcaacaacttaaaccccagagagaataaggatgtcttaaccttcacctgtgaacctaagagtaagaactacacctacatttggtggctaaatggtcagagcctccctgtcagtcccagggtaaagcgacccattgaaaacaggatcctcattctacccaatgtcacgagaaatgaaacaggaccttatcaatgtgaaatacgggaccgatatggtggcatccgcagtgacccagtcaccctgaatgtcctctatggtccagacctccccagcatttacccttcattcacctattaccgttcaggagaaaacctctacttgtcctgcttcgccgagtctaacccacgggcacaatattcttggacaattaatgggaagtttcagctatcaggacaaaagctctctatcccccaaataactacaaagcatagtgggctctatg

SEQ ID NO: 168803 - DNA, 976 bp, Homo sapiens
  Payload ID: 13234
  Gene Symbol: PSG4
  Gene Name: pregnancy specific beta-1-glycoprotein 4
  ENST ID: ENST00000596907
  CDS Start-End: 100-976
acagaaggaggaaggacagcacagctgacagccgtactcaggaagcttctggatcctaggcttatctccacagaggagaacacacaagcagcagagaccatggggcccctctcagcccctccctgcacacagcgcatcacctggaagggggtcctgctcacagtggagactcccaagccctccatctccagcagcaacttaaatcccagggaggccatggaggctgtgatcttaacctgtgatcctgcgactccagccgcaagctaccagtggtggatgaatggtcagagcctccctatgactcacaggttgcagctgtccaaaaccaacaggaccctctttatatttggtgtcacaaagtatattgcaggaccctatgaatgtgaaatacggaacccagtgagtgccagccgcagtgacccagtcaccctgaatctcctcccaaagctgtccaagccctacatcacaatcaacaacttaaaccccagagagaataaggatgtcttaaccttcacctgtgaacctaagagtaagaactacacctacatttggtggctaaatggtcagagcctccctgtcagtcccagggtaaagcgacccattgaaaacaggatcctcattctacccaatgtcacgagaaatgaaacaggaccttatcaatgtgaaatacgggaccgatatggtggcatccgcagtgacccagtcaccctgaatgtcctctatggtccagacctccccagcatttacccttcattcacctattaccgttcaggagaaaacctctacttgtcctgcttcgccgagtctaacccacgggcacaatattcttggacaattaatgggaagtttcagctatcaggacaaaagctctctatcccccaaataactacaaagcatagtgggctctatgcttgctctgttcgtaactcagccactggcaaggaaagctccaaatccatcacagtcaaagtctctg

SEQ ID NO: 168804 - DNA, 1034 bp, Homo sapiens
  Payload ID: 13234
  Gene Symbol: PSG4
  Gene Name: pregnancy specific beta-1-glycoprotein 4
  ENST ID: ENST00000595949
  CDS Start-End: 77-199
gctgacagccgtactcaggaagcttctggatcctaggcttatctccacagaggagaacacacaagcagcagagaccatggggcccctctcagcccctccctgcacacagcgcatcacctggaagggggtcctgctcacaggtcattccttggactctgctctatctttagaggtcactggctcaagtcagtcaccatgagacacctgggaaaactgcgccaccttgtggctccactgcctgatgactgaactgacctccaggcttgactctggtctcccctgtgttatttatgctgaagtacccagtcccaggtcaggctttccagtacccaaagggtttaaggacaatgggaagttccatcatccatctctaggatgtccttggaaagggaagctgcagagaaaacatacctcggggggcaaagtaagactgaaactaagaagattccagcactgcatgctccaagtgaggaccacaagtggagactcccaagccctccatctccagcagcaacttaaatcccagggaggccatggaggctgtgatcttaacctgtgatcctgcgactccagccgcaagctaccagtggtggatgaatggtcagagcctccctatgactcacaggttgcagctgtccaaaaccaacaggaccctctttatatttggtgtcacaaagtatattgcaggaccctatgaatgtgaaatacggaacccagtgagtgccagccgcagtgacccagtcaccctgaatctcctcccaaagctgtccaagccctacatcacaatcaacaacttaaaccccagagagaataaggatgtcttaaccttcacctgtgaacctaagagtaagaactacacctacatttggtggctaaatggtcagagcctccctgtcagtcccagggtaaagcgacccattgaaaacaggatcctcattctacccaatgtcacgagaaatgaaacaggaccttatcaatgtgaaatacgggaccgatatggtggcatccgcagtgacccagtcaccctgaatgtc

SEQ ID NO: 168805 - DNA, 828 bp, Homo sapiens
  Payload ID: 13234
  Gene Symbol: PSG4
  Gene Name: pregnancy specific beta-1-glycoprotein 4
  ENST ID: ENST00000597374
  CDS Start-End: 1-775
gtatattgcaggaccctatgaatgtgaaatacggaacccagtgagtgccagccgcagtgacccagtcaccctgaatctcctcccaaagctgtccaagccctacatcacaatcaacaacttaaaccccagagagaataaggatgtcttaaccttcacctgtgaacctaagagtaagaactacacctacatttggtggctaaatggtcagagcctccctgtcagtcccagggtaaagcgacccattgaaaacaggatcctcattctacccaatgtcacgagaaatgaaacaggaccttatcaatgtgaaatacgggaccgatatggtggcatccgcagtgacccagtcaccctgaatgtcctctatggtccagacctccccagcatttacccttcattcacctattaccgttcaggagaaaacctctacttgtcctgcttcgccgagtctaacccacgggcacaatattcttggacaattaatgggaagtttcagctatcaggacaaaagctctctatcccccaaataactacaaagcatagtgggctctatgcttgctctgttcgtaactcagccactggcaaggaaagctccaaatccatcacagtcaaagtctctggacacatttcaaatcattggttatattaccaaggctttgactgggatgttatattcaagaatatagatagaatgaaccaatatgaactgcaggcaaagtctgaagtcagccttggtttggcttcctattctcaagggttttgtaaaagtttaatctgagagtccttataaaaacttagagcaaataaaattctaaaagagcgcctacatgg

SEQ ID NO: 168806 - DNA, 648 bp, Homo sapiens
  Payload ID: 13234
  Gene Symbol: PSG4
  Gene Name: pregnancy specific beta-1-glycoprotein 4
  ENST ID: ENST00000599371
  CDS Start-End: 1-289
ggagactcccaagccctccatctccagcagcaacttaaatcccagggaggccatggaggctgtgatcttaacctgtgatcctgcgactccagccgcaagctaccagtggtggatgaatggtcagagcctccctatgactcacaggttgcagctgtccaaaaccaacaggaccctctttatatttggtgtcacaaagtatattgcaggaccctatgaatgtgaaatacggaacccagtgagtgccagccgcagtgacccagtcaccctgaatctcctccgctcttattaatgactgccacaacagaaacactgagaaaaagaggcaaccatgaaaacgtggaaagttctgacgacagaaaatagcaatcagcctttctcacatcccaaagctttaaaaaatatatgagtgcagcatggccagtatggaattgaccaaaaactaatcatcaagctagaaacgtggtgagagaaaaaaaaagggcaagaatatctttggcttatcacctcccacttttgcctactaatctgatgctgaaaagaaatgctcactgaagcattttagattttgaatctttcagatttgggatgctaaaccagtaagcatatgacaaatatttcagaataaaaaaatgtcagaaatccaaaaca

SEQ ID NO: 168807 - DNA, 555 bp, Homo sapiens
  Payload ID: 13234
  Gene Symbol: PSG4
  Gene Name: pregnancy specific beta-1-glycoprotein 4
  ENST ID: ENST00000599391
  CDS Start-End: 16-555
caagcagcagagaccatggggcccctctcagcccctccctgcacacagcgcatcacctggaagggggtcctgctcacagtggagactcccaagccctccatctccagcagcaacttaaatcccagggaggccatggaggctgtgatcttaacctgtgatcctgcgactccagccgcaagctaccagtggtggatgaatggtcagagcctccctatgactcacaggttgcagctgtccaaaaccaacaggaccctctttatatttggtgtcacaaagtatattgcaggaccctatgaatgtgaaatacggaacccagtgagtgccagccgcagtgacccagtcaccctgaatctcctccatggtccagacctccccagcatttacccttcattcacctattaccgttcaggagaaaacctctacttgtcctgcttcgccgagtctaacccacgggcacaatattcttggacaattaatgggaagtttcagctatcaggacaaaagctctctatcccccaaataactacaaagcatagtgggctctatgcttgctct

SEQ ID NO: 168808 - DNA, 1626 bp, Homo sapiens
  Payload ID: 13235
  Gene Symbol: PSG5
  Gene Name: pregnancy specific beta-1-glycoprotein 5
  Uniprot ID: Q15238
  ENST ID: ENST00000342951
  CDS Start-End: 118-1125
ccctggagagaggctcagcacagaaggaggaaggacagcacagcctacagccgtgctcaggaagtttctggatcctaggctcagctccacagaggagaacacgcaggcgcagagaccatggggcccctctcagcccctccctgcacacagcacatcacctggaaggggctcctgctcacagcatcacttttaaacttctggaacctgcctatcactgctcaagtcacgattgaagccctgccacccaaagtttccgaggggaaggatgttcttctacttgtccacaatttgcctcagaatcttgctggctacatctggtacaaaggacaactgatggacctctaccattacattacatcatatgtagtagacggtcaaataaatatatatgggcctgcatacactggacgagaaacagtatattccaatgcatccctgctgatccagaatgtcacccgggaagacgcaggatcctacaccttacacatcataaagcgaggtgataggactagaggagtaactggatatttcaccttcaacttatacctgaagctgcccaagccctacatcaccatcaacaactcaaaacccagggagaataaggatgtcttagccttcacctgtgaacctaagagtgagaactacacctacatttggtggctaaatggtcagagcctcccggtcagtcccagggtaaagcgacccattgaaaacaggatcctcattctacccagtgtcacgagaaatgaaacaggaccctatgaatgtgaaatacgggaccgagatggtggcatgcgcagtgacccagtcaccctgaatgtcctctatggtccagacctccccagcatttacccttcattcacctattaccgttcaggagaaaacctctacttgtcctgcttcgcggaatctaacccaccggcagagtatttttggacaattaatgggaagtttcagcaatcaggacaaaagctctctatcccccaaattactacaaagcatagagggctctatacttgctctgttcgtaactcagctactggcaaggaaagctccaaatccatgacagtcgaagtctctgctccttcaggaataggacgtcttcctctccttaatccaatatagcagccgtgaagtcatttctgtatttcaggaagactggcagacagttgctttgattcttcctcaaactacttacaatcacctacagtccaaaattgctttttcttcaaggagatttatggaaaagactctgacaaggactcttgaatacaagttcctgataacttcaagatcataccactggactaagaactttcaaaattttaatgaacaggctgataccttcatgaaattctagacaaagaagaaaaaaactccatgttattggactaaataatcaaaagcataatgttttcataattttctatttgaaaatgtgctgattctttgaatgttttattctccagatttatgaactttttttcttgagcaattggtaaagtatacttttgtaaacaaaaattgaaacatttgcttttgctctctatctgagtgccccagaattgggaaactattcatgagtattcatatgtttatggtaataaagttatctgcacaagttca

SEQ ID NO: 168809 - DNA, 1766 bp, Homo sapiens
  Payload ID: 13235
  Gene Symbol: PSG5
  Gene Name: pregnancy specific beta-1-glycoprotein 5
  Uniprot ID: Q15238
  ENST ID: ENST00000366175
  CDS Start-End: 132-1139
gagaagtgctcctgccctggagagaggctcagcacagaaggaggaaggacagcacagcctacagccgtgctcaggaagtttctggatcctaggctcagctccacagaggagaacacgcaggcgcagagaccatggggcccctctcagcccctccctgcacacagcacatcacctggaaggggctcctgctcacagcatcacttttaaacttctggaacctgcctatcactgctcaagtcacgattgaagccctgccacccaaagtttccgaggggaaggatgttcttctacttgtccacaatttgcctcagaatcttgctggctacatctggtacaaaggacaactgatggacctctaccattacattacatcatatgtagtagacggtcaaataaatatatatgggcctgcatacactggacgagaaacagtatattccaatgcatccctgctgatccagaatgtcacccgggaagacgcaggatcctacaccttacacatcataaagcgaggtgataggactagaggagtaactggatatttcaccttcaacttatacctgaagctgcccaagccctacatcaccatcaacaactcaaaacccagggagaataaggatgtcttagccttcacctgtgaacctaagagtgagaactacacctacatttggtggctaaatggtcagagcctcccggtcagtcccagggtaaagcgacccattgaaaacaggatcctcattctacccagtgtcacgagaaatgaaacaggaccctatgaatgtgaaatacgggaccgagatggtggcatgcgcagtgacccagtcaccctgaatgtcctctatggtccagacctccccagcatttacccttcattcacctattaccgttcaggagaaaacctctacttgtcctgcttcgcggaatctaacccaccggcagagtatttttggacaattaatgggaagtttcagcaatcaggacaaaagctctctatcccccaaattactacaaagcatagagggctctatacttgctctgttcgtaactcagctactggcaaggaaagctccaaatccatgacagtcgaagtctctgctccttcaggaataggacgtcttcctctccttaatccaatatagcagccgtgaagtcatttctgtatttcaggaagactggcagatggagtttcgctcttgttgcccatgctggagtgcaatggcacaatcttggctcaccgcaacctccgcctcctgtgttcaagtgattctcctgcttcagcctcccgagtactgggattacaggcatgcaccaacacgcccagctaattttgtattttcagtagagacagggtgtcttcatgttggtcaggctggtctcaaactcccgacctcaggtgatccgtacgcctcagcctctcaaagtactgggattacaggcctgagccaccgcacctggcccacacatttttacataccaagagatcctttaatccacccaaaggctgacgttagctgcatctgtaacacaactttttcctcaaatatatggagttttttttaggcttccacttctatacttccctattctcactccctgttttaatttaacatagacatgcaatgctagataatagaattgctctctaccagctgaacatttgggagcctgtgcagtttctggcccttcttgttgcacatagataaatacatccggtgttatagagactcagttgtaaaaatcaataaatgtgctgcctggttaaaatg

SEQ ID NO: 168810 - DNA, 2145 bp, Homo sapiens
  Payload ID: 13235
  Gene Symbol: PSG5
  Gene Name: pregnancy specific beta-1-glycoprotein 5
  ENST ID: ENST00000404580
  CDS Start-End: 90-1091
ggaaggacagcacagcctacagccgtgctcaggaagtttctggatcctaggctcagctccacagaggagaacacgcaggcgcagagaccatggggcccctctcagcccctccctgcacacagcacatcacctggaaggggctcctgctcacagcatcacttttaaacttctggaacctgcctatcactgctcaagtcacgattgaagccctgccacccaaagtttccgaggggaaggatgttcttctacttgtccacaatttgcctcagaatcttgctggctacatctggtacaaaggacaactgatggacctctaccattacattacatcatatgtagtagacggtcaaataaatatatatgggcctgcatacactggacgagaaacagtatattccaatgcatccctgctgatccagaatgtcacccgggaagacgcaggatcctacaccttacacatcataaagcgaggtgataggactagaggagtaactggatatttcaccttcaacttatacctgaagctgcccaagccctacatcaccatcaacaactcaaaacccagggagaataaggatgtcttagccttcacctgtgaacctaagagtgagaactacacctacatttggtggctaaatggtcagagcctcccggtcagtcccagggtaaagcgacccattgaaaacaggatcctcattctacccagtgtcacgagaaatgaaacaggaccctatgaatgtgaaatacgggaccgagatggtggcatgcgcagtgacccagtcaccctgaatgtcctctatggtccagacctccccagcatttacccttcattcacctattaccgttcaggagaaaacctctacttgtcctgcttcgcggaatctaacccaccggcagagtatttttggacaattaatgggaagtttcagcaatcaggacaaaagctctctatcccccaaattactacaaagcatagagggctctatacttgctctgttcgtaactcagctactggcaaggaaagctccaaatccatgacagtcgaagtctctggtaagtggatcccagcatccttggcaatagggttttaggtggagtctacctggctttcagagaagagttaggaaaacatttttattcccagcctgtgtcccatgggcacaagcaaatcccaaattctcctcctgaacccttccaatttgtctctacaaactctcttctccttgtttttctgttttctcatggctgaccttgtgtctggcctaagaaagttagggagggggctttatcagccctgagccctatgtggtagaggaggcttcacagagggatgagaaggagagtcctcaagatcaagttgcttctcgatgtcaccaacacatccccttctgccatgtctttgtttccttgtacctattccatgagctacaaggaacatctgaggctctgaaacaagctcacacttttcccccaaatgagacgaggaagccccttgggtgagggaggagcagctcagactctgcttcctgctctgctccatgcttctctggtgactgggcctgcctcactcaacctggggtgggaccagcatgtgtggagaaagagtcctggtggcctgtcctgaatttggctaaatcgagctgccagttgaagccaagcctcccccgggccaggctgcagggaaataagaagagagggagcctcagggaagactcctgcgttgcgtcctggctctgaagtcaccggttgtatgaggttgtgggcacagcatgtgggacacagcacggaggatagtgactgatgcagagctggagaaatagagagattcacccctggggctctgcatggcaggaaaggggcagtgccaaaaagtgtgtaattatagagagggtaagactaccagacactttatatatatctaatataagacttaccattaactatttctatgtgtgcaatttagtgttgtgtaaccatcacactatccatttccagaactttttcctcttaccatattaaacctctgtacccaataaacagtaactcactccttctccccataacccttagcacacaccattctacattctgtctctatgtaactggctattctaactatcttttataaatggaattatatgataa

SEQ ID NO: 168811 - DNA, 1526 bp, Homo sapiens
  Payload ID: 13235
  Gene Symbol: PSG5
  Gene Name: pregnancy specific beta-1-glycoprotein 5
  Uniprot ID: Q15238
  ENST ID: ENST00000407356
  CDS Start-End: 86-1093
ggacagcacagcctacagccgtgctcaggaagtttctggatcctaggctcagctccacagaggagaacacgcaggcgcagagaccatggggcccctctcagcccctccctgcacacagcacatcacctggaaggggctcctgctcacagcatcacttttaaacttctggaacctgcctatcactgctcaagtcacgattgaagccctgccacccaaagtttccgaggggaaggatgttcttctacttgtccacaatttgcctcagaatcttgctggctacatctggtacaaaggacaactgatggacctctaccattacattacatcatatgtagtagacggtcaaataaatatatatgggcctgcatacactggacgagaaacagtatattccaatgcatccctgctgatccagaatgtcacccgggaagacgcaggatcctacaccttacacatcataaagcgaggtgataggactagaggagtaactggatatttcaccttcaacttatacctgaagctgcccaagccctacatcaccatcaacaactcaaaacccagggagaataaggatgtcttagccttcacctgtgaacctaagagtgagaactacacctacatttggtggctaaatggtcagagcctcccggtcagtcccagggtaaagcgacccattgaaaacaggatcctcattctacccagtgtcacgagaaatgaaacaggaccctatgaatgtgaaatacgggaccgagatggtggcatgcgcagtgacccagtcaccctgaatgtcctctatggtccagacctccccagcatttacccttcattcacctattaccgttcaggagaaaacctctacttgtcctgcttcgcggaatctaacccaccggcagagtatttttggacaattaatgggaagtttcagcaatcaggacaaaagctctctatcccccaaattactacaaagcatagagggctctatacttgctctgttcgtaactcagctactggcaaggaaagctccaaatccatgacagtcgaagtctctgctccttcaggaataggacgtcttcctctccttaatccaatatagcagccgtgaagtcatttctgtatttcaggaagactggcaggagatttatggaaaagactctgacaaggactcttgaatacaagttcctgataacttcaagatcataccactggactaagaactttcaaaattttaatgaacaggctgataccttcatgaaattctagacaaagaagaaaaaaactccatgttattggactaaataatcaaaagcataatgttttcataattttctatttgaaaatgtgctgattctttgaatgttttattctccagatttatgaactttttttcttgagcaattggtaaagtatacttttgtaaacaaaaattgaaacatttgcttttgctctctatctgagtgccccagaattgggaaactattcatgagtattcatatgtttatggtaataaagttatctgcacaagttca

SEQ ID NO: 168812 - DNA, 1064 bp, Homo sapiens
  Payload ID: 13235
  Gene Symbol: PSG5
  Gene Name: pregnancy specific beta-1-glycoprotein 5
  ENST ID: ENST00000407568
  CDS Start-End: 90-563
ggaaggacagcacagcctacagccgtgctcaggaagtttctggatcctaggctcagctccacagaggagaacacgcaggcgcagagaccatggggcccctctcagcccctccctgcacacagcacatcacctggaaggggctcctgctcacagcatcacttttaaacttctggaacctgcctatcactgctcaagtcacgattgaagccctgccacccaaagtttccgaggggaaggatgttcttctacttgtccacaatttgcctcagaatcttgctggctacatctggtacaaaggacaactgatggacctctaccattacattacatcatatgtagtagacggtcaaataaatatatatgggcctgcatacactggacgagaaacagtatattccaatgcatccctgctgatccagaatgtcacccgggaagacgcaggatcctacaccttacacatcataaagcgaggtgataggactagaggagtaactggatatttcaccttcaacttataccctccttcaggaataggacgtcttcctctccttaatccaatatagcagccgtgaagtcatttctgtatttcaggaagactggcagacagttgctttgattcttcctcaaactacttacaatcacctacagtccaaaattgctttttcttcaaggagatttatggaaaagactctgacaaggactcttgaatacaagttcctgataacttcaagatcataccactggactaagaactttcaaaattttaatgaacaggctgataccttcatgaaattctagacaaagaagaaaaaaactccatgttattggactaaataatcaaaagcataatgttttcataattttctatttgaaaatgtgctgattctttgaatgttttattctccagatttatgaactttttttcttgagcaattggtaaagtatacttttgtaaacaaaaattgaaacatttgcttttgctctctatctgagtgccccagaattgggaaactattcatgagtattcatatgtttatggtaataaagttatctgcacaagttca

SEQ ID NO: 168813 - DNA, 1884 bp, Homo sapiens
  Payload ID: 13235
  Gene Symbol: PSG5
  Gene Name: pregnancy specific beta-1-glycoprotein 5
  ENST ID: ENST00000599812
  CDS Start-End: 97-1383
agaaggaggaaggacagcacagcctacagccgtgctcaggaagtttctggatcctaggctcagctccacagaggagaacacgcaggcgcagagaccatggggcccctctcagcccctccctgcacacagcacatcacctggaaggggctcctgctcacagcatcacttttaaacttctggaacctgcctatcactgctcaagtcacgattgaagccctgccacccaaagtttccgaggggaaggatgttcttctacttgtccacaatttgcctcagaatcttgctggctacatctggtacaaaggacaactgatggacctctaccattacattacatcatatgtagtagacggtcaaataaatatatatgggcctgcatacactggacgagaaacagtatattccaatgcatccctgctgatccagaatgtcacccgggaagacgcaggatcctacaccttacacatcataaagcgaggtgataggactagaggagtaactggatatttcaccttcaacttatacctggaaactcccaagccctccatctccagtagcaacttaaaccccagggaggccatggaggctgtgatcttaacctgtgatcctgcggcttcagacacaagctacctgtggtggatgaatggtcagagcctccctatgactcacaggttgcagctgtccaaaaccaacaggaccctctttatatttggtgtcacaaagtatattgcaggaccctatgaatgtgaaatacggaacccagtgagtgccagccacagtgacccagtcaccctgaatctcctcctgaagctgcccaagccctacatcaccatcaacaactcaaaacccagggagaataaggatgtcttagccttcacctgtgaacctaagagtgagaactacacctacatttggtggctaaatggtcagagcctcccggtcagtcccagggtaaagcgacccattgaaaacaggatcctcattctacccagtgtcacgagaaatgaaacaggaccctatgaatgtgaaatacgggaccgagatggtggcatgcgcagtgacccagtcaccctgaatgtcctctatggtccagacctccccagcatttacccttcattcacctattaccgttcaggagaaaacctctacttgtcctgcttcgcggaatctaacccaccggcagagtatttttggacaattaatgggaagtttcagcaatcaggacaaaagctctctatcccccaaattactacaaagcatagagggctctatacttgctctgttcgtaactcagctactggcaaggaaagctccaaatccatgacagtcgaagtctctgctccttcaggaataggacgtcttcctctccttaatccaatatagcagccgtgaagtcatttctgtatttcaggaagactggcagacagttgctttgattcttcctcaaactacttacaatcacctacagtccaaaattgctttttcttcaaggagatttatggaaaagactctgacaaggactcttgaatacaagttcctgataacttcaagatcataccactggactaagaactttcaaaattttaatgaacaggctgataccttcatgaaattctagacaaagaagaaaaaaactccatgttattggactaaataatcaaaagcataatgttttcataattttctatttgaaaatgtgctgattctttgaatgttttattctccagatttatgaactttttttcttgagcaattggtaaagtatacttttgtaaacaaaaattgaaacatttgcttttgctctctatctgagtgccccagaattgggaaactattcatgagtattcatatgtttatggtaataaagttatctgcacaagttca

SEQ ID NO: 168814 - DNA, 1674 bp, Homo sapiens
  Payload ID: 13236
  Gene Symbol: PSG6
  Gene Name: pregnancy specific beta-1-glycoprotein 6
  Uniprot ID: Q00889
  ENST ID: ENST00000187910
  CDS Start-End: 67-1341
ctgctcaggaagtctctggatcctaggctcatctccacaggggagaacacacagacagcagagaccatgggacccctctcagcccctccctgcactcagcacatcacctggaaggggctcctgctcacagcatcacttttaaacttctggaacctgcccaccactgcccaagtaataattgaagccaagccacccaaagtttccgaggggaaggatgttcttctacttgtccacaatttgccccagaatcttactggctacatctggtacaaagggcaaatgacggacctctaccattacattacatcatatgtagtacacggtcaaattatatatgggcctgcctacagtggacgagaaacagtatattccaatgcatccctgctgatccagaatgtcacacaggaggatgcaggatcctacaccttacacatcataaagcgaggcgatgggactggaggagtaactggatatttcactgtcaccttatactcggagactcccaagccctccatctccagcagcaacttaaaccccagggaggtcatggaggctgtgcgcttaatctgtgatcctgagactccggatgcaagctacctgtggttgctgaatggtcagaacctccctatgactcacaggttgcagctgtccaaaaccaacaggaccctctatctatttggtgtcacaaagtatattgcaggaccctatgaatgtgaaatacggaacccagtgagtgccagccgcagtgacccagtcaccctgaatctcctcccgaagctgcccatgccttacatcaccatcaacaacttaaaccccagggagaagaaggatgtgttagccttcacctgtgaacctaagagtcggaactacacctacatttggtggctaaatggtcagagcctcccggtcagtccgagggtaaagcgacccattgaaaacaggatactcattctacccagtgtcacgagaaatgaaacaggaccctatcaatgtgaaatacgggaccgatatggtggcatccgcagtaacccagtcaccctgaatgtcctctatggtccagacctccccagaatttacccttcattcacctattaccgttcaggagaaaacctcgacttgtcctgctttgcggactctaacccaccggcagagtattcttggacaattaatgggaagtttcagctatcaggacaaaagctctttatcccccaaattactacaaatcatagcgggctctatgcttgctctgttcgtaactcagccactggcaaggaaatctccaaatccatgatagtcaaagtctctggtccctgccatggaaaccagacagagtctcattaatggctgccacaatagagacactgagaaaaagaacaggttgataccttcatgaaattcaagacaaagaagaaaaaaactcaatgttattggactaaataatcaaaaggataatgttttcataattttttattggaaaatgtgctgattcttggaatgttttattctccagatttatgaactttttttcttcagcaattggtaaagtatacttttgtaaacaaaaattgaaacatttgcttttgctctctatctgagtgccccagaattgggaaactattcatgagtattcataggtttatggtaataaagttatttgcacaagttcagtaagaa

SEQ ID NO: 168815 - DNA, 1391 bp, Homo sapiens
  Payload ID: 13236
  Gene Symbol: PSG6
  Gene Name: pregnancy specific beta-1-glycoprotein 6
  Uniprot ID: Q00889
  ENST ID: ENST00000292125
  CDS Start-End: 46-1353
cctaggctcatctccacaggggagaacacacagacagcagagaccatgggacccctctcagcccctccctgcactcagcacatcacctggaaggggctcctgctcacagcatcacttttaaacttctggaacctgcccaccactgcccaagtaataattgaagccaagccacccaaagtttccgaggggaaggatgttcttctacttgtccacaatttgccccagaatcttactggctacatctggtacaaagggcaaatgacggacctctaccattacattacatcatatgtagtacacggtcaaattatatatgggcctgcctacagtggacgagaaacagtatattccaatgcatccctgctgatccagaatgtcacacaggaggatgcaggatcctacaccttacacatcataaagcgaggcgatgggactggaggagtaactggatatttcactgtcaccttatactcggagactcccaagccctccatctccagcagcaacttaaaccccagggaggtcatggaggctgtgcgcttaatctgtgatcctgagactccggatgcaagctacctgtggttgctgaatggtcagaacctccctatgactcacaggttgcagctgtccaaaaccaacaggaccctctatctatttggtgtcacaaagtatattgcaggaccctatgaatgtgaaatacggaacccagtgagtgccagccgcagtgacccagtcaccctgaatctcctcccgaagctgcccatgccttacatcaccatcaacaacttaaaccccagggagaagaaggatgtgttagccttcacctgtgaacctaagagtcggaactacacctacatttggtggctaaatggtcagagcctcccggtcagtccgagggtaaagcgacccattgaaaacaggatactcattctacccagtgtcacgagaaatgaaacaggaccctatcaatgtgaaatacgggaccgatatggtggcatccgcagtaacccagtcaccctgaatgtcctctatggtccagacctccccagaatttacccttcattcacctattaccgttcaggagaaaacctcgacttgtcctgctttgcggactctaacccaccggcagagtattcttggacaattaatgggaagtttcagctatcaggacaaaagctctttatcccccaaattactacaaatcatagcgggctctatgcttgctctgttcgtaactcagccactggcaaggaaatctccaaatccatgatagtcaaagtctctgagacagcatctccccaggttacctatgctggtccaaacacctggtttcaagaaatccttctgctgtgacctcccaaagtgctaggattaaaacatgacccaccatg

SEQ ID NO: 168816 - DNA, 1412 bp, Homo sapiens
  Payload ID: 13236
  Gene Symbol: PSG6
  Gene Name: pregnancy specific beta-1-glycoprotein 6
  ENST ID: ENST00000402603
  CDS Start-End: 91-1086
ggaaggacagcacacctgacagccctgctcaggaagtctctggatcctaggctcatctccacaggggagaacacacagacagcagagaccatgggacccctctcagcccctccctgcactcagcacatcacctggaaggggctcctgctcacagcatcacttttaaacttctggaacctgcccaccactgcccaagtaataattgaagccaagccacccaaagtttccgaggggaaggatgttcttctacttgtccacaatttgccccagaatcttactggctacatctggtacaaagggcaaatgacggacctctaccattacattacatcatatgtagtacacggtcaaattatatatgggcctgcctacagtggacgagaaacagtatattccaatgcatccctgctgatccagaatgtcacacaggaggatgcaggatcctacaccttacacatcataaagcgaggcgatgggactggaggagtaactggatatttcactgtcaccttatactcggagactcccaagccctccatctccagcagcaacttaaaccccagggaggtcatggaggctgtgcgcttaatctgtgatcctgagactccggatgcaagctacctgtggttgctgaatggtcagaacctccctatgactcacaggttgcagctgtccaaaaccaacaggaccctctatctatttggtgtcacaaagtatattgcaggaccctatgaatgtgaaatacggaacccagtgagtgccagccgcagtgacccagtcaccctgaatctcctccatggtccagacctccccagaatttacccttcattcacctattaccgttcaggagaaaacctcgacttgtcctgctttgcggactctaacccaccggcagagtattcttggacaattaatgggaagtttcagctatcaggacaaaagctctttatcccccaaattactacaaatcatagcgggctctatgcttgctctgttcgtaactcagccactggcaaggaaatctccaaatccatgatagtcaaagtctctggtccctgccatggaaaccagacagagtctcattaatggctgccacaatagagacactgagaaaaagaacaggttgataccttcatgaaattcaagacaaagaagaaaaaaactcaatgttattggactaaataatcaaaaggataatgttttcataattttttattggaaaatgtgctgattcttggaatgttttattctccagatttatgaactttttttcttcagcaattggtaaagtatacttttgtaaacaaaaattgaaacatttgcttttgctctctatctgagtgccccagaattgggaaactattcatgagtattcataggtttatggtaataaagttatttgcacaagttca

SEQ ID NO: 168817 - DNA, 2321 bp, Homo sapiens
  Payload ID: 13236
  Gene Symbol: PSG6
  Gene Name: pregnancy specific beta-1-glycoprotein 6
  ENST ID: ENST00000601833
  CDS Start-End: 1285-1506
ggaacccacagcccagcagtgtccaccctcaccagggtcacttcggcctaagtcctcagcgccctccatgctccccacacggactctgtcagctcctccctgacctgggggccaccaacctaacaccacgccctctgcaggtagctcctgccccacacacctgctccttccctgggcccagctaaaggcatctcccagggcagcgctggtgcacgcgatgccacactgggcgctttcccctcgtgacctccctccatcctcatcaactctttctgtcaccgctccctaaatgcccgcccctgctccatctgtcctgttccctggggcatcccaggccaagcttagcgctgacacagaatagcggctgcctgagggcccacagcctcaccgggaatcagccaggcaccctgtgacctgcctgcacgctgcaccccacggggctcagagcgcgtgtgatggtcacacacaggcaccatccgaggtgtggccacctatccccagctgtcccttgggaagacagacctctcctgtgtgcttgcggggagaagggggatgttattgctctttgctcccagaacacaactcaccccccacccgcccgctcaggtgtgagcaacgtccctccagacaggatctctggccactgcctgttcctcctctacacacagcagcttggccaggtcaaaaaccctcaggacagacccctgggtatgtcaacacatgaaaggctctgcccaacattgccacggagttggtcgggatgaatctctccagctctgaaactctgctccgacccaggctccccctcctgcgtctcaacgagccatgtcccaccgggttcctgtttaactcctcacttccttctgcaccaccacggagaagctgtggtgaccacaggacaatcagctgggcagagaagagaggacatcaaagatggtcaggaagaacatgagaaaccatgagctccagctcagccaccggaccccacggagtcatacagtgaccgagaactttccctttgactatgggactcacagccaccactgagcaacaggcacaggcctctcctcccaagaggcatgagagattcaccctgcacacctccaggaaggacagtttcctctgggacacccagcatcacttttaaacttctggaacctgcccaccactgcccaagtaataattgaagccaagccacccaaagtttccgaggggaaggatgttcttctacttgtccacaatttgccccagaatcttactggctacatctggtacaaagggcaaatgacggacctctaccattacattacatcatatgtagtacacggtcaaattatatatgggcctgcctacagtggacgagaaacagtatattccaatgcatccctgctgatccagaatgtcacacaggaggatgcaggatcctacaccttacacatcataaagcgaggcgatgggactggaggagtaactggatatttcactgtcaccttatactgtgagtgattccgcatgatccctgggtgttggggggcaggggtcatttctacttcacacacacagaattgtcaggcctggactctgcctgtgtcactctctgcattatgtcccatgctggggtttgggcatttagtgcaggacacacacagaggagacacatttcaacagatcagaattcctttcccgcatccagaccctgcagacactcgctgcagaggaaggacagtctgatggggggactcagcaggaggagatcagtctcagccaagcacctcatgccctcttcataaatttgaccctgagaaagaccctggaaaactgagtagggcttggcctgaggggcccactgagataccctcagagaacctcagctctggaagcctcaatcccagacccctgtccctaaatccttgctccaggtaaagctgaggagcctgtgccaggactgggttgtggcttctttggcagggcttactgggaccaaggatttaccagctgtctgaggactgtgtctcctggagctgttcaccagccagggctcagtcctcagagcctcatctgggcaaggacagagctttcttcacctgacactcagagtggagaggacagaaagacaagctttgtaggccatcagccaactgccttaggaggcctaggacactccatagaaagtctaatatccccagaagcagaaacagaagagagaagatgcaccaggtagccgtttgtccacagggatctgacgcaaaggtgctttctcatggaagcaaattaataataaatgctgtttgtgtgaacacctccactgtgccaagcattaa

SEQ ID NO: 168818 - DNA, 568 bp, Homo sapiens
  Payload ID: 13236
  Gene Symbol: PSG6
  Gene Name: pregnancy specific beta-1-glycoprotein 6
  ENST ID: ENST00000594375
  CDS Start-End: 96-568
aaggaggaaggacagcacacctgacagccctgctcaggaagtctctggatcctaggctcatctccacaggggagaacacacagacagcagagaccatgggacccctctcagcccctccctgcactcagcacatcacctggaaggggctcctgctcacagcggagactcccaagccctccatctccagcagcaacttaaaccccagggaggtcatggaggctgtgcgcttaatctgtgatcctgagactccggatgcaagctacctgtggttgctgaatggtcagaacctccctatgactcacaggttgcagctgtccaaaaccaacaggaccctctatctatttggtgtcacaaagtatattgcaggaccctatgaatgtgaaatacggaacccagtgagtgccagccgcagtgacccagtcaccctgaatctcctcccgaagctgcccatgccttacatcaccatcaacaacttaaaccccagggagaagaaggatgtgttagccttcacctgtgaacctaagagtcggaactacacctacatttggtggctaaatggtcagagcct

SEQ ID NO: 168819 - DNA, 1168 bp, Homo sapiens
  Payload ID: 13236
  Gene Symbol: PSG6
  Gene Name: pregnancy specific beta-1-glycoprotein 6
  ENST ID: ENST00000599753
  CDS Start-End: 1-245
tggaggctgtgcgcttaatctgtgatcctgagactccggatgcaagctacctgtggttgctgaatggtcagaacctccctatgactcacaggttgcagctgtccaaaaccaacaggaccctctatctatttggtgtcacaaagtatattgcaggaccctatgaatgtgaaatacggaacccagtgagtgccagccgcagtgacccagtcaccctgaatctcctccgtgggagatgccaactctgaatgaaggatgcctgtggaggaatcaaaggtgccacacaggacaatcttctgttatccacacagcgaagctgcccatgccttacatcaccatcaacaacttaaaccccagggagaagaaggatgtgttagccttcacctgtgaacctaagagtcggaactacacctacatttggtggctaaatggtcagagcctcccggtcagtccgagggtaaagcgacccattgaaaacaggatactcattctacccagtgtcacgagaaatgaaacaggaccctatcaatgtgaaatacgggaccgatatggtggcatccgcagtaacccagtcaccctgaatgtcctctatggtccagacctccccagaatttacccttcattcacctattaccgttcaggagaaaacctcgacttgtcctgctttgcggactctaacccaccggcagagtattcttggacaattaatgggaagtttcagctatcaggacaaaagctctttatcccccaaattactacaaatcatagcgggctctatgcttgctctgttcgtaactcagccactggcaaggaaatctccaaatccatgatagtcaaagtctctggtccctgccatggaaaccagacagagtctcattaatggctgccacaatagagacactgagaaaaagaacaggttgataccttcatgaaattcaagacaaagaagaaaaaaactcaatgttattggactaaataatcaaaaggataatgttttcataattttttattggaaaatgtgctgattcttggaatgttttattctccagatttatgaactttttttcttcagcaattggtaaagtatacttttgtaaacaaaaattgaaacatttgcttttgctctctatctgagtgccccagaattgggaaactattcatgagtattcat

SEQ ID NO: 168820 - DNA, 2025 bp, Homo sapiens
  Payload ID: 13237
  Gene Symbol: PSG7
  Gene Name: pregnancy specific beta-1-glycoprotein 7 (gene/pseudogene)
  ENST ID: ENST00000406070
  CDS Start-End: 98-1357
agaaggaggaaggacagcacagctgacagccgtgctcaggaagattctggatcctaggctcatctccacagaggagaacacgcagggagcagagaccatggggcccctctcagcccctccctgcacacagcatataacctggaaagggctcctgctcacagcatcacttttaaacttctggaacccgcccaccacagcccaagtcacgattgaagcccagccaccaaaagtttccgaggggaaggatgttcttctacttgtccacaatttgccccagaatcttactggctacatctggtacaaaggacaaatcagggacctctaccattatgttacatcatatatagtagacggtcaaataattaaatatgggcctgcatacagtggacgagaaacagtatattccaatgcatccctgctgatccagaatgtcacccaggaagacacaggatcctacactttacacatcataaagcgaggtgatgggactggaggagtaactggacgtttcaccttcaccttatacctggagactcccaaaccctccatctccagcagcaatttcaaccccagggaggccacggaggctgtgattttaacctgtgatcctgagactccagatgcaagctacctgtggtggatgaatggtcagagcctccctatgactcacagcttgcagctgtctgaaaccaacaggaccctctacctatttggtgtcacaaactatactgcaggaccctatgaatgtgaaatacggaacccagtgagtgccagccgcagtgacccagtcaccctgaatctcctcccgaagctgcccaagccctacatcaccatcaataacttaaaccccagggagaataaggatgtctcaaccttcacctgtgaacctaagagtgagaactacacctacatttggtggctaaatggtcagagcctcccggtcagtcccagggtaaagcgacgcattgaaaacaggatcctcattctacccagtgtcacgagaaatgaaacaggaccctatcaatgtgaaatacgggaccgatatggtggcatccgcagtgacccagtcaccctgaatgtcctctatggtccagacctccccagaatttacccttcattcacctattaccattcaggacaaaacctctacttgtcctgctttgcggactctaacccaccggcacagtattcttggacaattaatgggaagtttcagctatcaggacaaaagctttctatcccccagattactacaaagcatagcgggctctatgcttgctctgttcgtaactcagccactggcaaggaaagctccaaatccgtgacagtcagagtctctgactggacattaccctgaattctactagttcctccaattccatcttctcccatggaacctcaaagagcaagacccactctgttccagaagccctataagtcagagttggacaactcaatgtaaatttcatgggaaaatccttgtacctgatgtctgagccactcagaactcaccaaaatgttcaacaccataacaacagctgctcaaactgtaaacaaggaaaacaagttgatgacttcacactgtggacagcttttcccaagatgtcagaataagactccccatcatgatgaggctctcacccctcttagctgtccttgcttgtgcctgcctctttcacttggcaggataatgcagtcattagaatttcacatgtagtataggagcttctgagggtaacaacagagtgtcagatatgtcatctcaacctcagacttttacataacatctcaggaggaaatgtggctctctccatcttgcatacagggctcccaatagaaatgaacacagagatattgcctgtgtgtttgcagagaagatggtttctataaagagtaggaaagctgaaattatagtagactcccctttaaatgcacattgtgtggatggctctcaccatttcctaagagatacattgtaaaacgtgacagtaagactgattctagcagaataaaacatgtactaca

SEQ ID NO: 168821 - DNA, 2227 bp, Homo sapiens
  Payload ID: 13237
  Gene Symbol: PSG7
  Gene Name: pregnancy specific beta-1-glycoprotein 7 (gene/pseudogene)
  ENST ID: ENST00000446844
  CDS Start-End: 91-1371
ggaaggacagcacagctgacagccgtgctcaggaagattctggatcctaggctcatctccacagaggagaacacgcagggagcagagaccatggggcccctctcagcccctccctgcacacagcatataacctggaaagggctcctgctcacagcatcacttttaaacttctggaacccgcccaccacagcccaagtcacgattgaagcccagccaccaaaagtttccgaggggaaggatgttcttctacttgtccacaatttgccccagaatcttactggctacatctggtacaaaggacaaatcagggacctctaccattatgttacatcatatatagtagacggtcaaataattaaatatgggcctgcatacagtggacgagaaacagtatattccaatgcatccctgctgatccagaatgtcacccaggaagacacaggatcctacactttacacatcataaagcgaggtgatgggactggaggagtaactggacgtttcaccttcaccttatacctggagactcccaaaccctccatctccagcagcaatttcaaccccagggaggccacggaggctgtgattttaacctgtgatcctgagactccagatgcaagctacctgtggtggatgaatggtcagagcctccctatgactcacagcttgcagctgtctgaaaccaacaggaccctctacctatttggtgtcacaaactatactgcaggaccctatgaatgtgaaatacggaacccagtgagtgccagccgcagtgacccagtcaccctgaatctcctcccgaagctgcccaagccctacatcaccatcaataacttaaaccccagggagaataaggatgtctcaaccttcacctgtgaacctaagagtgagaactacacctacatttggtggctaaatggtcagagcctcccggtcagtcccagggtaaagcgacgcattgaaaacaggatcctcattctacccagtgtcacgagaaatgaaacaggaccctatcaatgtgaaatacgggaccgatatggtggcatccgcagtgacccagtcaccctgaatgtcctctatggtccagacctccccagaatttacccttcattcacctattaccattcaggacaaaacctctacttgtcctgctttgcggactctaacccaccggcacagtattcttggacaattaatgggaagtttcagctatcaggacaaaagctttctatcccccagattactacaaagcatagcgggctctatgcttgctctgttcgtaactcagccactggcaaggaaagctccaaatccgtgacagtcagagtctctggtaagtggatcccagcatccttggcaatagggttttaggtgcagtctatctgactttcagagaaaagtcaggaaaacatttgtattcccagcctgtgtcccatgggcacaagcaaatcccaaattttcctcctgaaccctccaaatttgtctaagaacttcgaaaactttaacaaacaggctgatatcttcataacattcccagcctagaccaagcaggaaaaacattgatttcattgaaataattgataataatgaggataatgtttttatgatttttatttgaaaatatgctgattctttatgtggatagttttctagatttatggaaatttgtcttttaatctatctctagcttatagtggttcaataaactatacttctgggaatgataattgaaatatttacttttgctctctacctgaatgccccagaattgggcaactattcatgagtattgatatgtttatggtaatacagatatttgcacaaacagagtaacaacctgctctctttgtaacaggacacatttcaaatcattggttatattaccaaggctttgactgggatgttatatttaagaatatagctagaatgaaccagtatgaactgcaggcaaactctgaagtcagccttggtttggcttcctattctcaagagttttgtaaaggtttaatctgagattccttataaaaacttacagcaaagaaaattttaaaagagagcctacatagtccattgctactcttgctgcacttatgtaaacaatcagaccaagtttgaagaaactcaacctattttgcaaacaaacttattctactgaaattatcattggtaaaactagagatgcccatagagagaaaaattatgtggaaaataaaaccgtagtacacct

SEQ ID NO: 168822 - DNA, 2036 bp, Homo sapiens
  Payload ID: 13237
  Gene Symbol: PSG7
  Gene Name: pregnancy specific beta-1-glycoprotein 7 (gene/pseudogene)
  ENST ID: ENST00000618424
  CDS Start-End: 103-1362
agtgcagaaggaggaaggacagcacagctgacagccgtgctcaggaagtttctggatcctaggctcatctccacagaggagaacacacaggcagcagagaccatggggcccctctcagcccctccctgcacagagcacatcaaatggaaggggctcctggtcacagcatcacttttaaacttctggaacctgcccaccactgcccaagtcacgattgaagcccagccaccaaaagtttccgaggggaaggatgttcttctacttgtccacaatttgccccagaatcttactggctacatctggtacaaagggcaaatcagggacctctaccattacattacatcatatgtagtagacggtcaaataattatatatgggcctgcatatagtggacgagaaacagcatattccaatgcatccctgctgatccagaatgtcacccgggaggacgcaggatcctacaccttacacatcataaagcgaggtgatgggactagaggagtaactggatatttcaccttcaccttatacctggagactcccaagccctccatctccagcagcaacttaaaccccagggaggccatggaaactgtgatcttaacctgtgatcctgagactccggacacaagctaccagtggtggatgaatggtcagagcctccctatgactcataggtttcagctgtccgaaaccaacaggaccctctttctatttggtgtcacaaagtatactgcaggaccctatgaatgtgaaatacggaactcagggagtgccagccgcagtgacccagtcaccctgaatctcctcccgaagctgcccaagccctacatcaccatcaataacttaaaccccagggagaataaggatgtctcaaccttcacctgtgaacctaagagtgagaactacacctacatttggtggctaaatggtcagagcctcccggtcagtcccagggtaaagcgacgcattgaaaacaggatcctcattctacccagtgtcacgagaaatgaaacaggaccctatcaatgtgaaatacgggaccgatatggtggcatccgcagtgacccagtcaccctgaatgtcctctatggtccagacctccccagaatttacccttcattcacctattaccattcaggacaaaacctctacttgtcctgctttgcggactctaacccaccggcacagtattcttggacaattaatgggaagtttcagctatcaggacaaaagctttctatcccccagattactacaaagcatagcgggctctatgcttgctctgttcgtaactcagccactggcaaggaaagctccaaatccgtgacagtcagagtctctgactggacattaccctgaattctactagttcctccaattccatcttctcccatggaacctcaaagagcaagacccactctgttccagaagccctataagtcagagttggacaactcaatgtaaatttcatgggaaaatccttgtacctgatgtctgagccactcagaactcaccaaaatgttcaacaccataacaacagctgctcaaactgtaaacaaggaaaacaagttgatgacttcacactgtggacagcttttcccaagatgtcagaataagactccccatcatgatgaggctctcacccctcttagctgtccttgcttgtgcctgcctctttcacttggcaggataatgcagtcattagaatttcacatgtagtataggagcttctgagggtaacaacagagtgtcagatatgtcatctcaacctcagacttttacataacatctcaggaggaaatgtggctctctccatcttgcatacagggctcccaatagaaatgaacacagagatattgcctgtgtgtttgcagagaagatggtttctataaagagtaggaaagctgaaattatagtagactcccctttaaatgcacattgtgtggatggctctcaccatttcctaagagatacattgtaaaacgtgacagtaagactgattctagcagaataaaacatgtactacatttgct

SEQ ID NO: 168823 - DNA, 1441 bp, Homo sapiens
  Payload ID: 13237
  Gene Symbol: PSG7
  Gene Name: pregnancy specific beta-1-glycoprotein 7 (gene/pseudogene)
  ENST ID: ENST00000617049
  CDS Start-End: 99-1379
cagaaggaggaaggacagcacagctgacagccgtgctcaggaagattctggatcctaggctcatctccacagaggagaacacgcagggagcagagaccatggggcccctctcagcccctccctgcacacagcatataacctggaaagggctcctgctcacagcatcacttttaaacttctggaacccgcccaccacagcccaagtcacgattgaagcccagccaccaaaagtttccgaggggaaggatgttcttctacttgtccacaatttgccccagaatcttactggctacatctggtacaaaggacaaatcagggacctctaccattatgttacatcatatatagtagacggtcaaataattaaatatgggcctgcatacagtggacgagaaacagtatattccaatgcatccctgctgatccagaatgtcacccaggaagacacaggatcctacactttacacatcataaagcgaggtgatgggactggaggagtaactggacgtttcaccttcaccttatacctggagactcccaaaccctccatctccagcagcaatttcaaccccagggaggccacggaggctgtgattttaacctgtgatcctgagactccagatgcaagctacctgtggtggatgaatggtcagagcctccctatgactcacagcttgcagctgtctgaaaccaacaggaccctctacctatttggtgtcacaaactatactgcaggaccctatgaatgtgaaatacggaacccagtgagtgccagccgcagtgacccagtcaccctgaatctcctcccgaagctgcccaagccctacatcaccatcaataacttaaaccccagggagaataaggatgtctcaaccttcacctgtgaacctaagagtgagaactacacctacatttggtggctaaatggtcagagcctcccggtcagtcccagggtaaagcgacgcattgaaaacaggatcctcattctacccagtgtcacgagaaatgaaacaggaccctatcaatgtgaaatacgggaccgatatggtggcatccgcagtgacccagtcaccctgaatgtcctctatggtccagacctccccagaatttacccttcattcacctattaccgttcaggagaaaacctcgacttgtcctgctttgcggactctaacccaccggcagagtattcttggacaattaatgggaagtttcagctatcaggacaaaagctctttatcccccaaattactacaaatcatagcgggctctatgcttgctctgttcgtaactcagccactggcaaggaaatctccaaatccatgatagtcaaagtctctggtaagtggatcccagcatccttggcaatagggttttaggtggagtctatctggctttcagagaagagtcaggaaaacatttgtattcccagactgtgtcc

SEQ ID NO: 168824 - DNA, 1392 bp, Homo sapiens
  Payload ID: 13237
  Gene Symbol: PSG7
  Gene Name: pregnancy specific beta-1-glycoprotein 7 (gene/pseudogene)
  ENST ID: ENST00000623675
  CDS Start-End: 23-916
gaacacgcagggagcagagaccatggggcccctctcagcccctccctgcacacagcatataacctggaaagggctcctgctcacagtggagactcccaaaccctccatctccagcagcaatttcaaccccagggaggccacggaggctgtgattttaacctgtgatcctgagactccagatgcaagctacctgtggtggatgaatggtcagagcctccctatgactcacagcttgcagctgtctgaaaccaacaggaccctctacctatttggtgtcacaaactatactgcaggaccctatgaatgtgaaatacggaacccagtgagtgccagccgcagtgacccagtcaccctgaatctcctcccgaagctgcccaagccctacatcaccatcaataacttaaaccccagggagaataaggatgtctcaaccttcacctgtgaacctaagagtgagaactacacctacatttggtggctaaatggtcagagcctcccggtcagtcccagggtaaagcgacgcattgaaaacaggatcctcattctacccagtgtcacgagaaatgaaacaggaccctatcaatgtgaaatacgggaccgatatggtggcatccgcagtgacccagtcaccctgaatgtcctctatggtccagacctccccagaatttacccttcattcacctattaccattcaggacaaaacctctacttgtcctgctttgcggactctaacccaccggcacagtattcttggacaattaatgggaagtttcagctatcaggacaaaagctttctatcccccagattactacaaagcatagcgggctctatgcttgctctgttcgtaactcagccactggcaaggaaagctccaaatccgtgacagtcagagtctctgactggacattaccctgaattctactagttcctccaattccatcttctcccatggaacctcaaagagcaagacccactctgttccagaagccctataagtcagagttggacaactcaatgtaaatttcatgggaaaatccttgtacctgatgtctgagccactcagaactcaccaaaatgttcaacaccataacaacagctgctcaaactgtaaacaaggaaaacaagttgatgacttcacactgtggacagcttttcccaagatgtcagaataagactccccatcatgatgaggctctcacccctcttagctgtccttgcttgtgcctgcctctttcacttggcaggataatgcagtcattagaatttcacatgtagtataggagcttctgagggtaacaacagagtgtcagatatgtcatctcaacctcagacttttacataacatctcaggaggaaatgtggctctctccatcttgcatacagggctccca

SEQ ID NO: 168825 - DNA, 1441 bp, Homo sapiens
  Payload ID: 13238
  Gene Symbol: PSG8
  Gene Name: pregnancy specific beta-1-glycoprotein 8
  Uniprot ID: Q9UQ74
  ENST ID: ENST00000306511
  CDS Start-End: 99-1379
cagaaggaggcaggacagcactgctgagagctgtgctcaggaagcttctggatcctaggctcatctccacagaggagaacacacagacagcagagaccatggggctcctctcagcccctccctgcacacagcgcatcacctggaaggggctcctgctcacagcatcacttttaaacttctggaacccacccacgactgcccaagtcacgattgaagcccagccaaccaaagtttctgaggggaaggatgttcttctacttgtccacaatttgccccagaatcttactggctacatctggtacaaagggcaaatcagggacctctaccattacattacatcatatgtagtagacggtcaaataattatatatgggcctgcatacagtggacgagaaacaatatattccaatgcatccctgctgatccagaatgtcacccaggaagacgcaggatcctacaccttacacatcataatgggaggtgatgagaatagaggagtaactggacatttcaccttcaccttatatctggagactcccaagccctccatctccagcagcaaattaaaccccagggaggccatggaggctgtgagcttaacctgtgatcctgagactccggacgcaagctacctgtggtggatgaatggtcagagcctccctatgtctcacaggttgcagttgtctgaaaccaacaggaccctctttctattgggtgtcacaaagtacactgcaggaccctatgaatgtgaaatacggaacccagtgagtgccagccgcagtgacccattcaccctgaatctcctcccgaagctgcccaagccctacatcaccatcaacaacttaaaacccagggagaataaggatgtcttaaacttcacctgtgaacctaagagtgagaactacacctacatttggtggctaaatggtcagagcctcccggtcagtcccagggtaaagcgacccattgaaaacaggatcctcattctacccagtgtcacgagaaatgaaacaggaccctatcaatgtgaaataagggaccaatatggtggcatccgcagttacccagtcaccctgaatgtcctctatggtccagacctccccagaatttacccttcattcacctattaccgttcaggagaagtcctctacttgtcctgttctgcggactctaacccaccggcacagtattcttggacaattaatgggaagtttcagctatcaggacaaaagctctttatcccccaaattactacaaagcatagcgggctctatgcttgctctgttcgtaactcagccactggcaaggaaagctccaaatccatgacagtaaaagtctctggtaagcggatcccagtatccttggcaatagggatttaggtggagtctatctggccttcagggaagagtcaggaaaacatttttattcccagcctgcgtcc

SEQ ID NO: 168826 - DNA, 1610 bp, Homo sapiens
  Payload ID: 13238
  Gene Symbol: PSG8
  Gene Name: pregnancy specific beta-1-glycoprotein 8
  Uniprot ID: Q9UQ74
  ENST ID: ENST00000406636
  CDS Start-End: 82-975
gcactgctgagagctgtgctcaggaagcttctggatcctaggctcatctccacagaggagaacacacagacagcagagaccatggggctcctctcagcccctccctgcacacagcgcatcacctggaaggggctcctgctcacagtggagactcccaagccctccatctccagcagcaaattaaaccccagggaggccatggaggctgtgagcttaacctgtgatcctgagactccggacgcaagctacctgtggtggatgaatggtcagagcctccctatgtctcacaggttgcagttgtctgaaaccaacaggaccctctttctattgggtgtcacaaagtacactgcaggaccctatgaatgtgaaatacggaacccagtgagtgccagccgcagtgacccattcaccctgaatctcctcccgaagctgcccaagccctacatcaccatcaacaacttaaaacccagggagaataaggatgtcttaaacttcacctgtgaacctaagagtgagaactacacctacatttggtggctaaatggtcagagcctcccggtcagtcccagggtaaagcgacccattgaaaacaggatcctcattctacccagtgtcacgagaaatgaaacaggaccctatcaatgtgaaataagggaccaatatggtggcatccgcagttacccagtcaccctgaatgtcctctatggtccagacctccccagaatttacccttcattcacctattaccgttcaggagaagtcctctacttgtcctgttctgcggactctaacccaccggcacagtattcttggacaattaatgggaagtttcagctatcaggacaaaagctctttatcccccaaattactacaaagcatagcgggctctatgcttgctctgttcgtaactcagccactggcaaggaaagctccaaatccatgacagtaaaagtctctgactggacattaccctgaattctactagttcctccaattccattttcttccatggaatcgctaagaaaaagacccactctgttccagaagccctataagctggaggtggacaactcaatgtaaatttcatgggaaaacccttgtacctgaagggtgagccactcagaactcactaaaatgttcgacaccataacaacagatgctcaaactgtaaaccaggacaacaagtggatgacttcacactgtggacagtttttcccaagatgtcagaacaagactccccatcatgatgaggctctcacccctcttaactgtccttgctcatgcctgcctctttcacttggcaggataatgcagtcattagaatttcacatgtagtagcttctgagggtaacaatagagtgtcagatatgtcatctcaacccaaacttttacataacatctcagggggaaatgtggctctctccaccttgcatacaggactcccaatagaaatgaacacagagatattgcccgtgtgtttgcagataagatggtttctatgaagaggtaggaaagctgaaattataatagagtcccctttaaatgcacattctgtggatggctctcgccatttcctaagagatacattgtaaaatgtgacagtaatactg

SEQ ID NO: 168827 - DNA, 2031 bp, Homo sapiens
  Payload ID: 13238
  Gene Symbol: PSG8
  Gene Name: pregnancy specific beta-1-glycoprotein 8
  Uniprot ID: Q9UQ74
  ENST ID: ENST00000404209
  CDS Start-End: 98-1357
agaaggaggcaggacagcactgctgagagctgtgctcaggaagcttctggatcctaggctcatctccacagaggagaacacacagacagcagagaccatggggctcctctcagcccctccctgcacacagcgcatcacctggaaggggctcctgctcacagcatcacttttaaacttctggaacccacccacgactgcccaagtcacgattgaagcccagccaaccaaagtttctgaggggaaggatgttcttctacttgtccacaatttgccccagaatcttactggctacatctggtacaaagggcaaatcagggacctctaccattacattacatcatatgtagtagacggtcaaataattatatatgggcctgcatacagtggacgagaaacaatatattccaatgcatccctgctgatccagaatgtcacccaggaagacgcaggatcctacaccttacacatcataatgggaggtgatgagaatagaggagtaactggacatttcaccttcaccttatatctggagactcccaagccctccatctccagcagcaaattaaaccccagggaggccatggaggctgtgagcttaacctgtgatcctgagactccggacgcaagctacctgtggtggatgaatggtcagagcctccctatgtctcacaggttgcagttgtctgaaaccaacaggaccctctttctattgggtgtcacaaagtacactgcaggaccctatgaatgtgaaatacggaacccagtgagtgccagccgcagtgacccattcaccctgaatctcctcccgaagctgcccaagccctacatcaccatcaacaacttaaaacccagggagaataaggatgtcttaaacttcacctgtgaacctaagagtgagaactacacctacatttggtggctaaatggtcagagcctcccggtcagtcccagggtaaagcgacccattgaaaacaggatcctcattctacccagtgtcacgagaaatgaaacaggaccctatcaatgtgaaataagggaccaatatggtggcatccgcagttacccagtcaccctgaatgtcctctatggtccagacctccccagaatttacccttcattcacctattaccgttcaggagaagtcctctacttgtcctgttctgcggactctaacccaccggcacagtattcttggacaattaatgggaagtttcagctatcaggacaaaagctctttatcccccaaattactacaaagcatagcgggctctatgcttgctctgttcgtaactcagccactggcaaggaaagctccaaatccatgacagtaaaagtctctgactggacattaccctgaattctactagttcctccaattccattttcttccatggaatcgctaagaaaaagacccactctgttccagaagccctataagctggaggtggacaactcaatgtaaatttcatgggaaaacccttgtacctgaagggtgagccactcagaactcactaaaatgttcgacaccataacaacagatgctcaaactgtaaaccaggacaacaagtggatgacttcacactgtggacagtttttcccaagatgtcagaacaagactccccatcatgatgaggctctcacccctcttaactgtccttgctcatgcctgcctctttcacttggcaggataatgcagtcattagaatttcacatgtagtagcttctgagggtaacaatagagtgtcagatatgtcatctcaacccaaacttttacataacatctcagggggaaatgtggctctctccaccttgcatacaggactcccaatagaaatgaacacagagatattgcccgtgtgtttgcagataagatggtttctatgaagaggtaggaaagctgaaattataatagagtcccctttaaatgcacattctgtggatggctctcgccatttcctaagagatacattgtaaaatgtgacagtaatactgattctagcagaataaaacatgtaccacatttgctaatac

SEQ ID NO: 168828 - DNA, 1686 bp, Homo sapiens
  Payload ID: 13238
  Gene Symbol: PSG8
  Gene Name: pregnancy specific beta-1-glycoprotein 8
  ENST ID: ENST00000401467
  CDS Start-End: 73-1053
acagccgtgctcaggaagtttctggaacctaggctcatctccacagaggagaacacacaagcagcagagaccatggggcccctctcagcccctccctgcacacagcacatcaaatggaagggggtcctgctcacagcatcacttttaaacttctggaacccacccacgactgcccaagtcacgattgaagcccagccaaccaaagtttctgaggggaaggatgttcttctacttgtccacaatttgccccagaatcttactggctacatctggtacaaagggcaaatcagggacctctaccattacattacatcatatgtagtagacggtcaaataattatatatgggcctgcatacagtggacgagaaacaatatattccaatgcatccctgctgatccagaatgtcacccaggaagacgcaggatcctacaccttacacatcataatgggaggtgatgagaatagaggagtaactggacatttcaccttcaccttatatccgaagctgcccaagccctacatcaccatcaacaacttaaaacccagggagaataaggatgtcttaaacttcacctgtgaacctaagagtgagaactacacctacatttggtggctaaatggtcagagcctcccggtcagtcccagggtaaagcgacccattgaaaacaggatcctcattctacccagtgtcacgagaaatgaaacaggaccctatcaatgtgaaataagggaccaatatggtggcatccgcagttacccagtcaccctgaatgtcctctatggtccagacctccccagaatttacccttcattcacctattaccgttcaggagaagtcctctacttgtcctgttctgcggactctaacccaccggcacagtattcttggacaattaatgggaagtttcagctatcaggacaaaagctctttatcccccaaattactacaaagcatagcgggctctatgcttgctctgttcgtaactcagccactggcaaggaaagctccaaatccatgacagtaaaagtctctgactggacattaccctgaattctactagttcctccaattccattttcttccatggaatcgctaagaaaaagacccactctgttccagaagccctataagctggaggtggacaactcaatgtaaatttcatgggaaaacccttgtacctgaagggtgagccactcagaactcactaaaatgttcgacaccataacaacagatgctcaaactgtaaaccaggacaacaagtggatgacttcacactgtggacagtttttcccaagatgtcagaacaagactccccatcatgatgaggctctcacccctcttaactgtccttgctcatgcctgcctctttcacttggcaggataatgcagtcattagaatttcacatgtagtagcttctgagggtaacaatagagtgtcagatatgtcatctcaacccaaacttttacataacatctcagggggaaatgtggctctctccaccttgcatacaggactcccaatagaaatgaacacagagatattgcccgtgtgtttgcagataagatggtttctatgaagaggtaggaaagctgaaattataatagagtcccctttaaatgcacattctgtggatggctctcgccatttcctaagagatacattgtaaaatgtgacagtaatac

SEQ ID NO: 168829 - DNA, 1046 bp, Homo sapiens
  Payload ID: 13238
  Gene Symbol: PSG8
  Gene Name: pregnancy specific beta-1-glycoprotein 8
  ENST ID: ENST00000478387
  CDS Start-End: 89-211
caggacagcactgctgagagctgtgctcaggaagcttctggatcctaggctcatctccacagaggagaacacacagacagcagagaccatggggctcctctcagcccctccctgcacacagcgcatcacctggaaggggctcctgctcacaggtcattccttggactctgctctatctttagaggtcactggctcaagtcagccactatgagacacctgggaaaactgcgccaccttgtggctccactgcctgatgactgaactgacctccggacttgactctgttctcccctgtgttatttctgctgaagtacccagtcccaggccaggctttccagtacccaaagggtttaaagacaattggaagttccatcacccatctctaggatgtccttggcaagggaagctgcagagaaaacataccttgggcggcaaagtaagactgaaactaagaagattccagcactgcatgctccaagtgaggaccacaagtggagactcccaagccctccatctccagcagcaaattaaaccccagggaggccatggaggctgtgagcttaacctgtgatcctgagactccggacgcaagctacctgtggtggatgaatggtcagagcctccctatgtctcacaggttgcagttgtctgaaaccaacaggaccctctttctattgggtgtcacaaagtacactgcaggaccctatgaatgtgaaatacggaacccagtgagtgccagccgcagtgacccattcaccctgaatctcctcccgaagctgcccaagccctacatcaccatcaacaacttaaaacccagggagaataaggatgtcttaaacttcacctgtgaacctaagagtgagaactacacctacatttggtggctaaatggtcagagcctcccggtcagtcccagggtaaagcgacccattgaaaacaggatcctcattctacccagtgtcacgagaaatgaaacaggaccctatcaatgtgaaataagggaccaatatggtggcatccgcagttacccagtcaccctgaatgtc

SEQ ID NO: 168830 - DNA, 2073 bp, Homo sapiens
  Payload ID: 13239
  Gene Symbol: PSG9
  Gene Name: pregnancy specific beta-1-glycoprotein 9
  Uniprot ID: Q00887
  ENST ID: ENST00000244293
  CDS Start-End: 68-1276
cgtgctcagacagcttctggatcccaggctcatctccacagaggagaacacacaggcagcagagaccatggggcccctcccagccccttcctgcacacagcgcatcacctggaaggggctcctgctcacagcatcacttttaaacttctggaacccgcccaccactgccgaagtcacgattgaagcccagccacccaaagtttctgaggggaaggatgttcttctacttgtccacaatttgccccagaatcttcctggctacttctggtacaaaggggaaatgacggacctctaccattacattatatcgtatatagttgatggtaaaataattatatatgggcctgcatacagtggaagagaaacagtatattccaacgcatccctgctgatccagaatgtcacccggaaggatgcaggaacctacaccttacacatcataaagcgaggtgatgagactagagaagaaattcgacatttcaccttcaccttatacttggagactcccaagccctacatctccagcagcaacttaaaccccagggaggccatggaggctgtgcgcttaatctgtgatcctgagactctggacgcaagctacctatggtggatgaatggtcagagcctccctgtgactcacaggttgcagctgtccaaaaccaacaggaccctctatctatttggtgtcacaaagtatattgcaggaccctatgaatgtgaaatacggaacccagtgagtgccagtcgcagtgacccagtcaccctgaatctcctccatggtccagacctccccagaatttacccttcattcacctattaccgttcaggagaaaacctcgacttgtcctgcttcacggaatctaacccaccggcagagtatttttggacaattaatgggaagtttcagcaatcaggacaaaagctctttatcccccaaattactagaaatcatagcgggctctatgcttgctctgttcataactcagccactggcaaggaaatctccaaatccatgacagtcaaagtctctggtaagtggatcccagcatccttggcagtagggttttatgtggagtctatctggctttcagagaagagtcaggaaaacatttttattcccagcctgtgtcccatgggcacaagcaaatcccaaattctcctcctgaaccctcccaatttgtctctacagactctcttctccttgtttttctgttttcttatggctgaccttgtgtctggcctgaaaaaggtagggagggggctttatcagccctgagccctatgtggtagaagaggcttcagagagggacaagaaggagagtcctcaagatcaagttgcttctcgctgtcaccgacacatccccttctgccacgtcttttttttcttgtacctattccatgagctacaagggacagctgaggctttgaaacaagctcacacttttcccccagatgagaggaggaagccccttgggtgagggaggagcagctcagactctgcttcctgctctgctccgggctcctctggtgactggccctgcctcactcaacctggggtgggactagcgtgtgtgtagaaagggccctggtggcctgtcctgaatttggctaaattgagctgccagttgaagccaagcctcccccgggccaggctgcagggaaataagaagagagggagcctcagggcagactcctgagctgcgtcctggctctgaagtcaccagctgtatgaggctttgggcacagcacgtgggacacagcacggaggacagtgactgatgcagagctggaggaatagggagattcaccgttggggttattcatggcaggaaaggggcagtgccaaaaagtgtgtaattatagagagggtaagactaccagacactttatatatatctaatataagacttaccattaactatttctatgtgtgcaatttagtgttgtgtaaccatcacactatccatttccagaactttttcctcttaccatattaaacctctgtacccaataaacagtaactctcactccttcttcccctaacccttagcacccatcattctactttgtctc

SEQ ID NO: 168831 - DNA, 1705 bp, Homo sapiens
  Payload ID: 13239
  Gene Symbol: PSG9
  Gene Name: pregnancy specific beta-1-glycoprotein 9
  Uniprot ID: Q00887
  ENST ID: ENST00000270077
  CDS Start-End: 98-1378
agaaggaggaaggacagcacagctgacagccgtgctcagacagcttctggatcccaggctcatctccacagaggagaacacacaggcagcagagaccatggggcccctcccagccccttcctgcacacagcgcatcacctggaaggggctcctgctcacagcatcacttttaaacttctggaacccgcccaccactgccgaagtcacgattgaagcccagccacccaaagtttctgaggggaaggatgttcttctacttgtccacaatttgccccagaatcttcctggctacttctggtacaaaggggaaatgacggacctctaccattacattatatcgtatatagttgatggtaaaataattatatatgggcctgcatacagtggaagagaaacagtatattccaacgcatccctgctgatccagaatgtcacccggaaggatgcaggaacctacaccttacacatcataaagcgaggtgatgagactagagaagaaattcgacatttcaccttcaccttatacttggagactcccaagccctacatctccagcagcaacttaaaccccagggaggccatggaggctgtgcgcttaatctgtgatcctgagactctggacgcaagctacctatggtggatgaatggtcagagcctccctgtgactcacaggttgcagctgtccaaaaccaacaggaccctctatctatttggtgtcacaaagtatattgcaggaccctatgaatgtgaaatacggaacccagtgagtgccagtcgcagtgacccagtcaccctgaatctcctcccgaagctgcccatcccctacatcaccatcaacaacttaaaccccagggagaataaggatgtcttagccttcacctgtgaacctaagagtgagaactacacctacatttggtggctaaacggtcagagcctccccgtcagtcccggggtaaagcgacccattgaaaacaggatactcattctacccagtgtcacgagaaatgaaacaggaccctatcaatgtgaaatacgggaccgatatggtggcctccgcagtaacccagtcatcctaaatgtcctctatggtccagacctccccagaatttacccttcattcacctattaccgttcaggagaaaacctcgacttgtcctgcttcacggaatctaacccaccggcagagtatttttggacaattaatgggaagtttcagcaatcaggacaaaagctctttatcccccaaattactagaaatcatagcgggctctatgcttgctctgttcataactcagccactggcaaggaaatctccaaatccatgacagtcaaagtctctggtccctgccatggagacctgacagagtctcagtcatgactgcaacaactgagacactgagaaaaagaacaggctgataccttcatgaaattcaagacaaagaagaaaaaaactcaatgttattggactaaataatcaaaaggataatgttttcataattttttattggaaaatgtgctgattctttgaatgttttattctccagatttatgaactttttttcttcagcaattggtaaagtatacttttgtaaacaaaaattgaaatatttgcttttgctgtctatctgaatgccccagaattgtgaaactattcatgagtattcataggtttatggtaataaagttatttgcacatgttccgtaa

SEQ ID NO: 168832 - DNA, 1055 bp, Homo sapiens
  Payload ID: 13239
  Gene Symbol: PSG9
  Gene Name: pregnancy specific beta-1-glycoprotein 9
  ENST ID: ENST00000291752
  CDS Start-End: 7-729
gagaccatggggcccctcccagccccttcctgcacacagcgcatcacctggaaggggctcctgctcacagcatcacttttaaacttctggaacccgcccaccactgccgaagtcacgattgaagcccagccacccaaagtttctgaggggaaggatgttcttctacttgtccacaatttgccccagaatcttcctggctacttctggtacaaaggggaaatgacggacctctaccattacattatatcgtatatagttgatggtaaaataattatatatgggcctgcatacagtggaagagaaacagtatattccaacgcatccctgctgatccagaatgtcacccggaaggatgcaggaacctacaccttacacatcataaagcgaggtgatgagactagagaagaaattcgacatttcaccttcaccttatactatggtccagacctccccagaatttacccttcattcacctattaccgttcaggagaaaacctcgacttgtcctgcttcacggaatctaacccaccggcagagtatttttggacaattaatgggaagtttcagcaatcaggacaaaagctctttatcccccaaattactagaaatcatagcgggctctatgcttgctctgttcataactcagccactggcaaggaaatctccaaatccatgacagtcaaagtctctggtccctgccatggagacctgacagagtctcagtcatgactgcaacaactgagacactgagaaaaagaacaggctgataccttcatgaaattcaagacaaagaagaaaaaaactcaatgttattggactaaataatcaaaaggataatgttttcataattttttattggaaaatgtgctgattctttgaatgttttattctccagatttatgaactttttttcttcagcaattggtaaagtatacttttgtaaacaaaaattgaaatatttgcttttgctgtctatctgaatgccccagaattgtgaaactattcatgagtattcataggtttatggtaataaagttatttgcacatgttccgta

SEQ ID NO: 168833 - DNA, 1421 bp, Homo sapiens
  Payload ID: 13239
  Gene Symbol: PSG9
  Gene Name: pregnancy specific beta-1-glycoprotein 9
  ENST ID: ENST00000443718
  CDS Start-End: 98-1099
agaaggaggaaggacagcacagctgacagccgtgctcagacagcttctggatcccaggctcatctccacagaggagaacacacaggcagcagagaccatggggcccctcccagccccttcctgcacacagcgcatcacctggaaggggctcctgctcacagcatcacttttaaacttctggaacccgcccaccactgccgaagtcacgattgaagcccagccacccaaagtttctgaggggaaggatgttcttctacttgtccacaatttgccccagaatcttcctggctacttctggtacaaaggggaaatgacggacctctaccattacattatatcgtatatagttgatggtaaaataattatatatgggcctgcatacagtggaagagaaacagtatattccaacgcatccctgctgatccagaatgtcacccggaaggatgcaggaacctacaccttacacatcataaagcgaggtgatgagactagagaagaaattcgacatttcaccttcaccttatactcgaagctgcccatcccctacatcaccatcaacaacttaaaccccagggagaataaggatgtcttagccttcacctgtgaacctaagagtgagaactacacctacatttggtggctaaacggtcagagcctccccgtcagtcccggggtaaagcgacccattgaaaacaggatactcattctacccagtgtcacgagaaatgaaacaggaccctatcaatgtgaaatacgggaccgatatggtggcctccgcagtaacccagtcatcctaaatgtcctctatggtccagacctccccagaatttacccttcattcacctattaccgttcaggagaaaacctcgacttgtcctgcttcacggaatctaacccaccggcagagtatttttggacaattaatgggaagtttcagcaatcaggacaaaagctctttatcccccaaattactagaaatcatagcgggctctatgcttgctctgttcataactcagccactggcaaggaaatctccaaatccatgacagtcaaagtctctggtccctgccatggagacctgacagagtctcagtcatgactgcaacaactgagacactgagaaaaagaacaggctgataccttcatgaaattcaagacaaagaagaaaaaaactcaatgttattggactaaataatcaaaaggataatgttttcataattttttattggaaaatgtgctgattctttgaatgttttattctccagatttatgaactttttttcttcagcaattggtaaagtatacttttgtaaacaaaaattgaaatatttgcttttgctgtctatctgaatgccccagaattgtgaaactattcatgagtattcataggtttatggtaataaagttatttgcacatgttc

SEQ ID NO: 168834 - DNA, 1748 bp, Homo sapiens
  Payload ID: 13239
  Gene Symbol: PSG9
  Gene Name: pregnancy specific beta-1-glycoprotein 9
  ENST ID: ENST00000418820
  CDS Start-End: 100-1080
acagaaggaggaaggacagcacagctgacagccgtgctcagacagcttctggatcccaggctcatctccacagaggagaacacacaggcagcagagaccatggggcccctcccagccccttcctgcacacagcgcatcacctggaaggggctcctgctcacagcatcacttttaaacttctggaacccgcccaccactgccgaagtcacgattgaagcccagccacccaaagtttctgaggggaaggatgttcttctacttgtccacaatttgccccagaatcttcctggctacttctggtacaaaggggaaatgacggacctctaccattacattatatcgtatatagttgatggtaaaataattatatatgggcctgcatacagtggaagagaaacagtatattccaacgcatccctgctgatccagaatgtcacccggaaggatgcaggaacctacaccttacacatcataaagcgaggtgatgagactagagaagaaattcgacatttcaccttcaccttatactcgaagctgcccatcccctacatcaccatcaacaacttaaaccccagggagaataaggatgtcttagccttcacctgtgaacctaagagtgagaactacacctacatttggtggctaaacggtcagagcctccccgtcagtcccggggtaaagcgacccattgaaaacaggatactcattctacccagtgtcacgagaaatgaaacaggaccctatcaatgtgaaatacgggaccgatatggtggcctccgcagtaacccagtcatcctaaatgtcctctatggtccagacctccccagaatttacccttcattcacctattaccgttcaggagaaaacctcgacttgtcctgcttcacggaatctaacccaccggcagagtatttttggacaattaatgggaagtttcagcaatcaggacaaaagctctttatcccccaaattactagaaatcatagcgggctctatgcttgctctgttcataactcagccactggcaaggaaatctccaaatccatgacagtcaaagtctctgactggatattaccctgaattctactagttcctccaattccattttctcccatggaatcacgaagagcaagacccactctgttccagaagtcctataagcgggaggtggacaactcaatgtaaatttcatgggaaaacccttgtacctgaagcgtgagccactcagaactcaccaaaatgttcgacaccataacaacagctgctcaaactgtaaaccaggacaacaagtggatgacttcacactgtggacagtttttcccaagatgtcagaacaagactccccatcatgatgaggctctcacccctcttaactgtccttgctcatgcctgcctctttcacttggcaggataatgcagtcattagaatttcacatgtagtagcttctgaggataacaacagagtgtcagatatgtcgtctcaacctcaaacttttacgtaaaatctcaggggaaatgtggctctctccaccttgcatacagggctcccaatagaaatgaatacagagatattgcctgtgtgtttgcagagaagatggtttctataaagagtaggaaagctgaaattatagtagagtcccctttaaatgcacattgtgtggatgactcttgccatttcctaagagatacattgtaaaacgtgacagtaagactgattctagcagaataaaacatgtaccacatttgct

SEQ ID NO: 168835 - DNA, 1812 bp, Homo sapiens
  Payload ID: 13239
  Gene Symbol: PSG9
  Gene Name: pregnancy specific beta-1-glycoprotein 9
  ENST ID: ENST00000596730
  CDS Start-End: 91-1020
ggaaggacagcacagctgacagccgtgctcagacagcttctggatcccaggctcatctccacagaggagaacacacaggcagcagagaccatggggcccctcccagccccttcctgcacacagcgcatcacctggaaggggctcctgctcacagcatcacttttaaacttctggaacccgcccaccactgccgaagtcacgattgaagcccagccacccaaagtttctgaggggaaggatgttcttctacttgtccacaatttgccccagaatcttcctggctacttctggtacaaaggggaaatgacggacctctaccattacattatatcgtatatagttgatggtaaaataattatatatgggcctgcatacagtggaagagaaacagtatattccaacgcatccctgctgatccagaatgtcacccggaaggatgcaggaacctacaccttacacatcataaagcgaggtgatgagactagagaagaaattcgacatttcaccttcaccttatactatggtccagacctccccagaatttacccttcattcacctattaccgttcaggagaaaacctcgacttgtcctgcttcacggaatctaacccaccggcagagtatttttggacaattaatgggaagtttcagcaatcaggacaaaagctctttatcccccaaattactagaaatcatagcgggctctatgcttgctctgttcataactcagccactggcaaggaaatctccaaatccatgacagtcaaagtctctggtaagtggatcccagcatccttggcagtagggttttatgtggagtctatctggctttcagagaagagtcaggaaaacatttttattcccagcctgtgtcccatgggcacaagcaaatcccaaattctcctcctgaaccctcccaatttgtctctacagactctcttctccttgtttttctgttttcttatggctgaccttgtgtctggcctgaaaaaggtagggagggggctttatcagccctgagccctatgtggtagaagaggcttcagagagggacaagaaggagagtcctcaagatcaagttgcttctcgctgtcaccgacacatccccttctgccacgtcttttttttcttgtacctattccatgagctacaagggacagctgaggctttgaaacaagctcacacttttcccccagatgagaggaggaagccccttgggtgagggaggagcagctcagactctgcttcctgctctgctccgggctcctctggtgactggccctgcctcactcaacctggggtgggactagcgtgtgtgtagaaagggccctggtggcctgtcctgaatttggctaaattgagctgccagttgaagccaagcctcccccgggccaggctgcagggaaataagaagagagggagcctcagggcagactcctgagctgcgtcctggctctgaagtcaccagctgtatgaggctttgggcacagcacgtgggacacagcacggaggacagtgactgatgcagagctggaggaatagggagattcaccgttggggttattcatggcaggaaaggggcagtgccaaaaagtgtgtaattatagagagggtaagactaccagacactttatatatatctaatataagacttaccattaactatttctatgtgtgcaatttagtgttgtgtaaccatcacactatccatttccagaactttttcctcttaccatattaaacctctgtacccaataaacagtaactctcactccttcttcccctaacccttagcacccatcattctacttt

SEQ ID NO: 168836 - DNA, 1429 bp, Homo sapiens
  Payload ID: 13239
  Gene Symbol: PSG9
  Gene Name: pregnancy specific beta-1-glycoprotein 9
  ENST ID: ENST00000593948
  CDS Start-End: 98-1099
agaaggaggaaggacagcacagctgacagccgtgctcagacagcttctggatcccaggctcatctccacagaggagaacacacaggcagcagagaccatggggcccctcccagccccttcctgcacacagcgcatcacctggaaggggctcctgctcacagcatcacttttaaacttctggaacccgcccaccactgccgaagtcacgattgaagcccagccacccaaagtttctgaggggaaggatgttcttctacttgtccacaatttgccccagaatcttcctggctacttctggtacaaaggggaaatgacggacctctaccattacattatatcgtatatagttgatggtaaaataattatatatgggcctgcatacagtggaagagaaacagtatattccaacgcatccctgctgatccagaatgtcacccggaaggatgcaggaacctacaccttacacatcataaagcgaggtgatgagactagagaagaaattcgacatttcaccttcaccttatacttggagactcccaagccctacatctccagcagcaacttaaaccccagggaggccatggaggctgtgcgcttaatctgtgatcctgagactctggacgcaagctacctatggtggatgaatggtcagagcctccctgtgactcacaggttgcagctgtccaaaaccaacaggaccctctatctatttggtgtcacaaagtatattgcaggaccctatgaatgtgaaatacggaacccagtgagtgccagtcgcagtgacccagtcaccctgaatctcctccatggtccagacctccccagaatttacccttcattcacctattaccgttcaggagaaaacctcgacttgtcctgcttcacggaatctaacccaccggcagagtatttttggacaattaatgggaagtttcagcaatcaggacaaaagctctttatcccccaaattactagaaatcatagcgggctctatgcttgctctgttcataactcagccactggcaaggaaatctccaaatccatgacagtcaaagtctctggtccctgccatggagacctgacagagtctcagtcatgactgcaacaactgagacactgagaaaaagaacaggctgataccttcatgaaattcaagacaaagaagaaaaaaactcaatgttattggactaaataatcaaaaggataatgttttcataattttttattggaaaatgtgctgattctttgaatgttttattctccagatttatgaactttttttcttcagcaattggtaaagtatacttttgtaaacaaaaattgaaatatttgcttttgctgtctatctgaatgccccagaattgtgaaactattcatgagtattcataggtttatggtaataaagttatttgcacatgttccgtaagaa

SEQ ID NO: 168837 - DNA, 2019 bp, Homo sapiens
  Payload ID: 13239
  Gene Symbol: PSG9
  Gene Name: pregnancy specific beta-1-glycoprotein 9
  ENST ID: ENST00000621109
  CDS Start-End: 93-1352
gaggaaggacagcacagctgacagccgtgctcagacagcttctggatcccaggctcatctccacagaggagaacacacaggcagcagagaccatggggcccctcccagccccttcctgcacacagcgcatcacctggaaggggctcctgctcacagcatcacttttaaacttctggaacccgcccaccactgccgaagtcacgattgaagcccagccacccaaagtttctgaggggaaggatgttcttctacttgtccacaatttgccccagaatcttcctggctacttctggtacaaaggggaaatgacggacctctaccattacattatatcgtatatagttgatggtaaaataattatatatgggcctgcatacagtggaagagaaacagtatattccaacgcatccctgctgatccagaatgtcacccggaaggatgcaggaacctacaccttacacatcataaagcgaggtgatgagactagagaagaaattcgacatttcaccttcaccttatacttggagactcccaagccctacatctccagcagcaacttaaaccccagggaggccatggaggctgtgcgcttaatctgtgatcctgagactctggacgcaagctacctatggtggatgaatggtcagagcctccctgtgactcacaggttgcagctgtccaaaaccaacaggaccctctatctatttggtgtcacaaagtatattgcaggaccctatgaatgtgaaatacggaacccagtgagtgccagtcgcagtgacccagtcaccctgaatctcctcccgaagctgcccatcccctacatcaccatcaacaacttaaaccccagggagaataaggatgtcttagccttcacctgtgaacctaagagtgagaactacacctacatttggtggctaaacggtcagagcctccccgtcagtcccggggtaaagcgacccattgaaaacaggatactcattctacccagtgtcacgagaaatgaaacaggaccctatcaatgtgaaatacgggaccgatatggtggcctccgcagtaacccagtcatcctaaatgtcctctatggtccagacctccccagaatttacccttcattcacctattaccgttcaggagaaaacctcgacttgtcctgcttcacggaatctaacccaccggcagagtatttttggacaattaatgggaagtttcagcaatcaggacaaaagctctttatcccccaaattactagaaatcatagcgggctctatgcttgctctgttcataactcagccactggcaaggaaatctccaaatccatgacagtcaaagtctctgactggatattaccctgaattctactagttcctccaattccattttctcccatggaatcacgaagagcaagacccactctgttccagaagtcctataagcgggaggtggacaactcaatgtaaatttcatgggaaaacccttgtacctgaagcgtgagccactcagaactcaccaaaatgttcgacaccataacaacagctgctcaaactgtaaaccaggacaacaagtggatgacttcacactgtggacagtttttcccaagatgtcagaacaagactccccatcatgatgaggctctcacccctcttaactgtccttgctcatgcctgcctctttcacttggcaggataatgcagtcattagaatttcacatgtagtagcttctgaggataacaacagagtgtcagatatgtcgtctcaacctcaaacttttacgtaaaatctcaggggaaatgtggctctctccaccttgcatacagggctcccaatagaaatgaatacagagatattgcctgtgtgtttgcagagaagatggtttctataaagagtaggaaagctgaaattatagtagagtcccctttaaatgcacattgtgtggatgactcttgccatttcctaagagatacattgtaaaacgtgacagtaagactgattctagcagaataaaacatgtaccacatttgc

SEQ ID NO: 168838 - DNA, 1508 bp, Homo sapiens
  Payload ID: 13240
  Gene Symbol: PNCK
  Gene Name: pregnancy up-regulated nonubiquitous CaM kinase
  Uniprot ID: Q6P2M8
  ENST ID: ENST00000340888
  CDS Start-End: 69-1100
ggggcgcgggcggggggcttggcgctgcggccactgcgcggcacgacgctgcggcacccgctccagacatgctgctgctgaagaaacacacggaggacatcagcagcgtctacgagatccgcgagaggctcggctcgggtgccttctccgaggtggtgctggcccaggagcggggctccgcacacctcgtggccctcaagtgcatccccaagaaggccctccggggcaaggaggccctggtggagaacgagatcgcagtgctccgtaggatcagtcaccccaacatcgtcgctctggaggatgtccacgagagcccttcccacctctacctggccatggaactggtgacgggtggcgagctgtttgaccgcatcatggagcgcggctcctacacagagaaggatgccagccatctggtgggtcaggtccttggcgccgtctcctacctgcacagcctggggatcgtgcaccgggacctcaagcccgaaaacctcctgtatgccacgccctttgaggactcgaagatcatggtctctgactttggactctccaaaatccaggctgggaacatgctaggcaccgcctgtgggacccctggatatgtggccccagagctcttggagcagaaaccctacgggaaggccgtagatgtgtgggccctgggcgtcatctcctacatcctgctgtgtgggtacccccccttctacgacgagagcgaccctgagctcttcagccagatcctgagggccagctatgagtttgactctcctttctgggatgacatctcagaatcagccaaagacttcatccggcaccttctggagcgagacccccagaagaggttcacctgccaacaggccttgcggcacctttggatctctggggacacagccttcgacagggacatcttaggctctgtcagtgagcagatccggaagaactttgctcggacacactggaagcgagccttcaatgccacctcgttcctgcgccacatccggaagctggggcagatcccagagggcgagggggcctctgagcagggcatggcccgccacagccactcaggcctccgtgctggccagccccccaagtggtgatgcccaggcagatgccgaggccaagtggactgacccccagatttccttcccttggatgctttcggtcccctcccccaacccctccccctggggctggcctctgctggattttgagatttgagggtgtggcgcatggcgctggggttggaatggggcacccccaagtctgtccccaggctctgccctgcctgggggcagtggctcccctcccctgttgcctctcccgcccctgccccccccgccccgccaaaagccgagggggtgctggcaggcgggcctcaggggctgtctttcctgcacggctgttgtgtgcttcgctgagtgtgggtggtcctgcttgtgtcatggtcatggccttccagccccctccagttttccccaaaccaataaagaaagatacagcaatgg

SEQ ID NO: 168839 - DNA, 1525 bp, Homo sapiens
  Payload ID: 13240
  Gene Symbol: PNCK
  Gene Name: pregnancy up-regulated nonubiquitous CaM kinase
  Uniprot ID: Q6P2M8
  ENST ID: ENST00000370142
  CDS Start-End: 55-1155
atgatctcaataaaaggaatgctctggctgctgggtagagaagaaagcgaggacatgctgctgctgaagaaacacacggaggacatcagcagcgtctacgagatccgcgagaggctcggctcgggtgccttctccgaggtggtgctggcccaggagcggggctccgcacacctcgtggccctcaagtgcatccccaagaaggccctccggggcaaggaggccctggtggagaacgagatcgcagtgctccgtaggatcagtcaccccaacatcgtcgctctggaggatgtccacgagagcccttcccacctctacctggccatggaactggtgacgggtggcgagctgtttgaccgcatcatggagcgcggctcctacacagagaaggatgccagccatctggtgggtcaggtccttggcgccgtctcctacctgcacagcctggggatcgtgcaccgggacctcaagcccgaaaacctcctgtatgccacgccctttgaggactcgaagatcatggtctctgactttggactctccaaaatccaggctgggaacatgctaggcaccgcctgtgggacccctggatatgccgagccagtgacactgagcggcatggctgcgtgtgtgcctgtgcgtgcgtctgtctgtctctggcccccagccccagagctcttggagcagaaaccctacgggaaggccgtagatgtgtgggccctgggcgtcatctcctacatcctgctgtgtgggtacccccccttctacgacgagagcgaccctgagctcttcagccagatcctgagggccagctatgagtttgactctcctttctgggatgacatctcagaatcagccaaagacttcatccggcaccttctggagcgagacccccagaagaggttcacctgccaacaggccttgcggcacctttggatctctggggacacagccttcgacagggacatcttaggctctgtcagtgagcagatccggaagaactttgctcggacacactggaagcgagccttcaatgccacctcgttcctgcgccacatccggaagctggggcagatcccagagggcgagggggcctctgagcagggcatggcccgccacagccactcaggcctccgtgctggccagccccccaagtggtgatgcccaggcagatgccgaggccaagtggactgacccccagatttccttcccttggatgctttcggtcccctcccccaacccctccccctggggctggcctctgctggattttgagatttgagggtgtggcgcatggcgctggggttggaatggggcacccccaagtctgtccccaggctctgccctgcctgggggcagtggctcccctcccctgttgcctctcccgcccctgccccccccgccccgccaaaagccgagggggtgctggcaggcgggcctcaggggctgtctttcctgcacggctgttgtgtgcttcgctgagtgtgggtggtcctgcttgtgtcatggtcatggccttccagccccctcc

SEQ ID NO: 168840 - DNA, 1455 bp, Homo sapiens
  Payload ID: 13240
  Gene Symbol: PNCK
  Gene Name: pregnancy up-regulated nonubiquitous CaM kinase
  Uniprot ID: Q6P2M8
  ENST ID: ENST00000370145
  CDS Start-End: 19-1101
agcagctgtaggcctgggatgtggaggcgtgtatgcggtggcctcgctgggaggcgtccgtctggggacatgctgctgctgaagaaacacacggaggacatcagcagcgtctacgagatccgcgagaggctcggctcgggtgccttctccgaggtggtgctggcccaggagcggggctccgcacacctcgtggccctcaagtgcatccccaagaaggccctccggggcaaggaggccctggtggagaacgagatcgcagtgctccgtaggatcagtcaccccaacatcgtcgctctggaggatgtccacgagagcccttcccacctctacctggccatggaactggtgacgggtggcgagctgtttgaccgcatcatggagcgcggctcctacacagagaaggatgccagccatctggtgggtcaggtccttggcgccgtctcctacctgcacagcctggggatcgtgcaccgggacctcaagcccgaaaacctcctgtatgccacgccctttgaggactcgaagatcatggtctctgactttggactctccaaaatccaggctgggaacatgctaggcaccgcctgtgggacccctggatatgtggccccagagctcttggagcagaaaccctacgggaaggccgtagatgtgtgggccctgggcgtcatctcctacatcctgctgtgtgggtacccccccttctacgacgagagcgaccctgagctcttcagccagatcctgagggccagctatgagtttgactctcctttctgggatgacatctcagaatcagccaaagacttcatccggcaccttctggagcgagacccccagaagaggttcacctgccaacaggccttgcggcacctttggatctctggggacacagccttcgacagggacatcttaggctctgtcagtgagcagatccggaagaactttgctcggacacactggaagcgagccttcaatgccacctcgttcctgcgccacatccggaagctggggcagatcccagagggcgagggggcctctgagcagggcatggcccgccacagccactcaggcctccgtgctggccagccccccaagtggtgatgcccaggcagatgccgaggccaagtggactgacccccagatttccttcccttggatgctttcggtcccctcccccaacccctccccctggggctggcctctgctggattttgagatttgagggtgtggcgcatggcgctggggttggaatggggcacccccaagtctgtccccaggctctgccctgcctgggggcagtggctcccctcccctgttgcctctcccgcccctgccccccccgccccgccaaaagccgagggggtgctggcaggcgggcctcaggggctgtctttcctgcacggctgttgtgtgcttcgctgagtgtgggtggtcctgcttgtgtcatggtcatgg

SEQ ID NO: 168841 - DNA, 1612 bp, Homo sapiens
  Payload ID: 13240
  Gene Symbol: PNCK
  Gene Name: pregnancy up-regulated nonubiquitous CaM kinase
  Uniprot ID: Q6P2M8
  ENST ID: ENST00000370150
  CDS Start-End: 180-1211
agcacacctgtcacgcctggcgcgccccctgcccgcacgcgctcggtccacgcagctcgggacgcgggcggcccaggctgccaggtccccctgctccgcggcgccgagggctgggctgcgtctgcggccgcgtgggtggccgcggtcttggcaggtggctgcgcgcgggggtcgcagacatgctgctgctgaagaaacacacggaggacatcagcagcgtctacgagatccgcgagaggctcggctcgggtgccttctccgaggtggtgctggcccaggagcggggctccgcacacctcgtggccctcaagtgcatccccaagaaggccctccggggcaaggaggccctggtggagaacgagatcgcagtgctccgtaggatcagtcaccccaacatcgtcgctctggaggatgtccacgagagcccttcccacctctacctggccatggaactggtgacgggtggcgagctgtttgaccgcatcatggagcgcggctcctacacagagaaggatgccagccatctggtgggtcaggtccttggcgccgtctcctacctgcacagcctggggatcgtgcaccgggacctcaagcccgaaaacctcctgtatgccacgccctttgaggactcgaagatcatggtctctgactttggactctccaaaatccaggctgggaacatgctaggcaccgcctgtgggacccctggatatgtggccccagagctcttggagcagaaaccctacgggaaggccgtagatgtgtgggccctgggcgtcatctcctacatcctgctgtgtgggtacccccccttctacgacgagagcgaccctgagctcttcagccagatcctgagggccagctatgagtttgactctcctttctgggatgacatctcagaatcagccaaagacttcatccggcaccttctggagcgagacccccagaagaggttcacctgccaacaggccttgcggcacctttggatctctggggacacagccttcgacagggacatcttaggctctgtcagtgagcagatccggaagaactttgctcggacacactggaagcgagccttcaatgccacctcgttcctgcgccacatccggaagctggggcagatcccagagggcgagggggcctctgagcagggcatggcccgccacagccactcaggcctccgtgctggccagccccccaagtggtgatgcccagatgccgaggccaagtggactgacccccagatttccttcccttggatgctttcggtcccctcccccaacccctccccctggggctggcctctgctggattttgagatttgagggtgtggcgcatggcgctggggttggaatggggcacccccaagtctgtccccaggctctgccctgcctgggggcagtggctcccctcccctgttgcctctcccgcccctgccccccccgccccgccaaaagccgagggggtgctggcaggcgggcctcaggggctgtctttcctgcacggctgttgtgtgcttcgctgagtgtgggtggtcctgcttgtgtcatggtcatggccttccagccccctccagttttccccaaaccaataaagaaagatacagcaa

SEQ ID NO: 168842 - DNA, 326 bp, Homo sapiens
  Payload ID: 13240
  Gene Symbol: PNCK
  Gene Name: pregnancy up-regulated nonubiquitous CaM kinase
  ENST ID: ENST00000438984
  CDS Start-End: 1-244
gatctctggggacacagccttcgacagggacatcttaggctctgtcagtgagcagatccggaagaactttgctcggacacactggaagcgagccttcaatgccacctcgttcctgcgccacatccggaagctggggcagatcccagagggcgagggggcctctgagcagggcatggcccgccacagccactcaggcgggcctcaggggctgtctttcctgcacggctgttgtgtgcttcgctgagtgtgggtggtcctgcttgtgtcatggtcatggccttccagccccctccagttttccccaaaccaataaagaaagatacagc

SEQ ID NO: 168843 - DNA, 557 bp, Homo sapiens
  Payload ID: 13240
  Gene Symbol: PNCK
  Gene Name: pregnancy up-regulated nonubiquitous CaM kinase
  ENST ID: ENST00000411968
  CDS Start-End: 47-295
cgctgcggccactgcgcggcacgacgctgcggcacccgctccagacatgctgctgctgaagaaacacacggaggacatcagcagcgtctacgagatccgcgagaggctcggctcgagcggggctccgcacacctcgtggccctcaagtgcatccccaagaaggccctccggggcaaggaggccctggtggagaacgagatcgcagtgctccgtaggatcagtcaccccaacatcgtcgctctggaggatgtccacgagagcccttcccacctctacctggccatggaactggtgacgggtggcgagctgtttgaccgcatcatggagcgcggctcctacacagagaaggatgccagccatctggtgggtcaggtccttggcgccgtctcctacctgcacagcctggggatcgtgcaccgggacctcaagcccgaaaacctcctgtatgccacgccctttgaggactcgaagatcatggtctctgactttggactctccaaaatccaggctgggaacatgctaggcaccgcctgtgggacccctggatatgtggcccc

SEQ ID NO: 168844 - DNA, 771 bp, Homo sapiens
  Payload ID: 13240
  Gene Symbol: PNCK
  Gene Name: pregnancy up-regulated nonubiquitous CaM kinase
  ENST ID: ENST00000422811
  CDS Start-End: 99-771
ggctgaggcctgcctggcagggggtggaggaggaagctgcccttgcccccggcggggcggggagagacccccatcacctctcccctgcccctgcagacatgctgctgctgaagaaacacacggaggacatcagcagcgtctacgagatccgcgagaggctcggctcgggtgccttctccgaggtggtgctggcccaggagcggggctccgcacacctcgtggccctcaagtgcatccccaagaaggccctccggggcaaggaggccctggtggagaacgagatcgcagtgctccgtaggatcagtcaccccaacatcgtcgctctggaggatgtccacgagagcccttcccacctctacctggccatggaactggtgacgggtggcgagctgtttgaccgcatcatggagcgcggctcctacacagagaaggatgccagccatctggtgggtcaggtccttggcgccgtctcctacctgcacagcctggggatcgtgcaccgggacctcaagcccgaaaacctcctgtatgccacgccctttgaggactcgaagatcatggtctctgactttggactctccaaaatccaggctgggaacatgctaggcaccgcctgtgggacccctggatatgtggccccagagctcttggagcagaaaccctacgggaaggccgtagatgtgtgggccctgggcgtcatctcctacatcctgctgtgtgggtacccccccttctacgacgagagcgaccctgagctcttcagccagatcc

SEQ ID NO: 168845 - DNA, 448 bp, Homo sapiens
  Payload ID: 13240
  Gene Symbol: PNCK
  Gene Name: pregnancy up-regulated nonubiquitous CaM kinase
  ENST ID: ENST00000423545
  CDS Start-End: 321-448
tctccccgctcctggcaggctgcagccgtctcctcccggtgctccctccttccttgagctctctccaccgctgcccactgggggctacagcttcccggctaccctggaagctggaggccgggaccagctcttcagggtcttctctggcccagcctttgactgaagctggtctggagacaggggcattagagaagtgactcatagatggcctaaagaagcggggccactcaaggacccaggacagagggaagagggccaacccagctggaccacaggcaaaccccattgcctttgagagaaagaagaggacccggtgaaacatgctgctgctgaagaaacacacggaggacatcagcagcgtctacgagatccgcgagaggctcggctcgggtgccttctccgaggtggtgctggcccaggagcggggctccgcacacctcgtggccct

SEQ ID NO: 168846 - DNA, 311 bp, Homo sapiens
  Payload ID: 13240
  Gene Symbol: PNCK
  Gene Name: pregnancy up-regulated nonubiquitous CaM kinase
  ENST ID: ENST00000434652
  CDS Start-End: 53-311
cggatgtgtggaggcagagaggcagcatccaggcgctggtcgccttcgggacatgctgctgctgaagaaacacacggaggacatcagcagcgtctacgagatccgcgagaggctcggctcgggtgccttctccgaggtggtgctggcccaggagcggggctccgcacacctcgtggccctcaagtgcatccccaagaaggccctccggggcaaggaggccctggtggagaacgagatcgcagtgctccgtaggatcagtcaccccaacatcgtcgctctggaggatgtccacgagagcccttcccacctct

SEQ ID NO: 168847 - DNA, 717 bp, Homo sapiens
  Payload ID: 13240
  Gene Symbol: PNCK
  Gene Name: pregnancy up-regulated nonubiquitous CaM kinase
  ENST ID: ENST00000433470
  CDS Start-End: 23-322
cgctgcggcacccgctccagacatgctgctgctgaagaaacacacggaggacatcagcagcgtctacgagatccgcgagaggctcggctcgggtgccttctccgaggtggtgctggcccaggagcggggctccgcacacctcgtggccctcaagtgcatccccaagaaggccctccggggcaaggaggccctggtggagaacgagatcgcagtgctccgtaggcgcttccttgccattgcaggatcagtcaccccaacatcgtcgctctggaggatgtccacgagagcccttcccacctctacctggccatggaactggtgacgggtggcgagctgtttgaccgcatcatggagcgcggctcctacacagagaaggatgccagccatctggtgggtcaggtccttggcgccgtctcctacctgcacagcctggggatcgtgcaccgggacctcaagcccgaaaacctcctgtatgccacgccctttgaggactcgaagatcatggtctctgactttggactctccaaaatccaggctgggaacatgctaggcaccgcctgtgggacccctggatatgtggccccagagctcttggagcagaaaccctacgggaaggccgtagatgtgtgggccctgggcgtcatctcctacatcctgctgtgtgggtacccccccttctacgacgagagcgaccctgagctcttcagccagatcctg

SEQ ID NO: 168848 - DNA, 561 bp, Homo sapiens
  Payload ID: 13240
  Gene Symbol: PNCK
  Gene Name: pregnancy up-regulated nonubiquitous CaM kinase
  ENST ID: ENST00000419804
  CDS Start-End: 141-268
ctttctccccgctcctggcaggctgcagccgtctcctcccggtgctccctccttccttgagctctctccaccgctgcccactgggggctacagcttcccggctaccctggaagctggaggccgggaccagctcttcagacatgctgctgctgaagaaacacacggaggacatcagcagcgtctacgagatccgcgagaggctcggctcgggtgccttctccgaggtggtgctggcccaggagcggggctccgcacacctcgtggccctcaagtgcatccccaagaaggccctccggggcaaggaggccctggtggagaacgagatcgcagtgctccgtaggatcagtcaccccaacatcgtcgctctggaggatgtccacgagagcccttcccacctctacctggccatggaactgtgaggagggcctgggcaggctgtgggagccggggagggactgagcagtgagtggggctgaaggccaggctgagtgcctgggtcagccaaacccctggcacccccagggtgacgggtggcgagctgtttgaccgcatcatggagcg

SEQ ID NO: 168849 - DNA, 498 bp, Homo sapiens
  Payload ID: 13240
  Gene Symbol: PNCK
  Gene Name: pregnancy up-regulated nonubiquitous CaM kinase
  ENST ID: ENST00000458354
  CDS Start-End: 199-326
ggaggcgcccggcccggccaccgagcggcagcggcggacgaggggcggccccgacccccgcgtgcccgggggccacccgttgcccggacttcacccctccgcggcggctccgggggtcgggcgggggccggcggcctgctgggggaggaggccgcggcgggcgggggaactcacctccgccgttcttgtagcacagacatgctgctgctgaagaaacacacggaggacatcagcagcgtctacgagatccgcgagaggctcggctcgggtgccttctccgaggtggtgctggcccaggagcggggctccgcacacctcgtggccctcaagtgcatccccaagaaggccctccggggcaaggaggccctggtggagaacgagatcgcagtgctccgtaggatcagtcaccccaacatcgtcgctctggaggatgtccacgagagcccttcccacctctacctggccatggaactgtgaggagggcctgggcaggctgtg

SEQ ID NO: 168850 - DNA, 1585 bp, Homo sapiens
  Payload ID: 13240
  Gene Symbol: PNCK
  Gene Name: pregnancy up-regulated nonubiquitous CaM kinase
  Uniprot ID: Q6P2M8
  ENST ID: ENST00000447676
  CDS Start-End: 187-1467
gacttggattgacatagagagctgcaggagggtgacatgatctcaataaaaggaatgctctggctgctgggtagagaagaaagcgagggtgagggattaatggtggagccagagggagcccagtgagtgccgggagcccagggtggcagagctgtggtgcagggttgcagggtcctggagctaggcatggaggctgctttcgggcaagtggccgggtcagcctgtcctcggagaggcggtgaaggcagagactggaaggcagagagccttgccgacctgtggccgaagagctctccgggagacagccaccggtggtgcaaaggccctggggccggcccagccgggccgcagctccgggaggcggcgcgagcgagcagtgggctgggcggtggcggccggcacccgagccggatcccggcgattgccttacaagacatgctgctgctgaagaaacacacggaggacatcagcagcgtctacgagatccgcgagaggctcggctcgggtgccttctccgaggtggtgctggcccaggagcggggctccgcacacctcgtggccctcaagtgcatccccaagaaggccctccggggcaaggaggccctggtggagaacgagatcgcagtgctccgtaggatcagtcaccccaacatcgtcgctctggaggatgtccacgagagcccttcccacctctacctggccatggaactggtgacgggtggcgagctgtttgaccgcatcatggagcgcggctcctacacagagaaggatgccagccatctggtgggtcaggtccttggcgccgtctcctacctgcacagcctggggatcgtgcaccgggacctcaagcccgaaaacctcctgtatgccacgccctttgaggactcgaagatcatggtctctgactttggactctccaaaatccaggctgggaacatgctaggcaccgcctgtgggacccctggatatgtggccccagagctcttggagcagaaaccctacgggaaggccgtagatgtgtgggccctgggcgtcatctcctacatcctgctgtgtgggtacccccccttctacgacgagagcgaccctgagctcttcagccagatcctgagggccagctatgagtttgactctcctttctgggatgacatctcagaatcagccaaagacttcatccggcaccttctggagcgagacccccagaagaggttcacctgccaacaggccttgcggcacctttggatctctggggacacagccttcgacagggacatcttaggctctgtcagtgagcagatccggaagaactttgctcggacacactggaagcgagccttcaatgccacctcgttcctgcgccacatccggaagctggggcagatcccagagggcgagggggcctctgagcagggcatggcccgccacagccactcaggcctccgtgctggccagccccccaagtggtgatgcccaggcagatgccgaggccaagtggactgacccccagatttccttcccttggatgctttcggtcccctcccccaacccctccccctggggctggcctctgctggattttgagatt

SEQ ID NO: 168851 - DNA, 725 bp, Homo sapiens
  Payload ID: 13240
  Gene Symbol: PNCK
  Gene Name: pregnancy up-regulated nonubiquitous CaM kinase
  ENST ID: ENST00000425526
  CDS Start-End: 498-625
ccccgctcctggcaggctgcagccgtctcctcccggtgctccctccttccttgagctctctccaccgctgcccactgggggctacagcttcccggctaccctggaagctggaggccgggaccagctcttcaggtgacaggcctctgtgtctccacagtgggcagaggggagcctgcctggctgatgagcaagcctcgactttgtcatcaaggcagagaaggggcccgggtaaatgaccccggcggcccccacccctgcctggcgtgagagtgggtaggggcttcggacttgaggggactggagcgggaacaaggcaaggctgccccctgcctttgactgaagctggtctggagacaggggcattagagaagtgactcatagatggcctaaagaagcggggccactcaaggacccaggacagagggaagagggccaacccagctggaccacaggcaaaccccattgcctttgagagaaagaagaggacccggtgaaacatgctgctgctgaagaaacacacggaggacatcagcagcgtctacgagatccgcgagaggctcggctcgggtgccttctccgaggtggtgctggcccaggagcggggctccgcacacctcgtggccctcaagtgcatccccaagaaggccctccggggcaaggaggccctggtggagaacgagatcgcagtgctccgtaggatcagtcaccccaacatcgtcgctctg

SEQ ID NO: 168852 - DNA, 566 bp, Homo sapiens
  Payload ID: 13240
  Gene Symbol: PNCK
  Gene Name: pregnancy up-regulated nonubiquitous CaM kinase
  ENST ID: ENST00000418241
  CDS Start-End: 283-566
gaggtctggaaaaatgattttttaaaaactcttcctgccccgtggactctcttgaagacgtcgtgtcatgccagggcccacggtcacttgacggaacccttgtgatgctggccacaacctcatgggactggatggcgagcagcgaggggggtccagtaactgttggatgcaggattgaattcggtcacccgcacttatttcctgggctcgtcttggttgggttcgcggagatacactctctgggagcggacgctttggtgaggaagaccaggcgaagaagacatgctgctgctgaagaaacacacggaggacatcagcagcgtctacgagatccgcgagaggctcggctcgggtgccttctccgaggtggtgctggcccaggagcggggctccgcacacctcgtggccctcaagtgcatccccaagaaggccctccggggcaaggaggccctggtggagaacgagatcgcagtgctccgtaggcgcttccttgccattgcaggatcagtcaccccaacatcgtcgctctggaggatgtccacgagagcccttcccacctctacctg

SEQ ID NO: 168853 - DNA, 754 bp, Homo sapiens
  Payload ID: 13240
  Gene Symbol: PNCK
  Gene Name: pregnancy up-regulated nonubiquitous CaM kinase
  ENST ID: ENST00000439087
  CDS Start-End: 77-754
ctggaaagcggccggatgtgtggaggcagagaggcagcatccaggcgctggtcgccttcggggtgcgggggaggacatgctgctgctgaagaaacacacggaggacatcagcagcgtctacgagatccgcgagaggctcggctcgggtgccttctccgaggtggtgctggcccaggagcggggctccgcacacctcgtggccctcaagtgcatccccaagaaggccctccggggcaaggaggccctggtggagaacgagatcgcagtgctccgtaggatcagtcaccccaacatcgtcgctctggaggatgtccacgagagcccttcccacctctacctggccatggaactggtgacgggtggcgagctgtttgaccgcatcatggagcgcggctcctacacagagaaggatgccagccatctggtgggtcaggtccttggcgccgtctcctacctgcacagcctggggatcgtgcaccgggacctcaagcccgaaaacctcctgtatgccacgccctttgaggactcgaagatcatggtctctgactttggactctccaaaatccaggctgggaacatgctaggcaccgcctgtgggacccctggatatgtggccccagagctcttggagcagaaaccctacgggaaggccgtagatgtgtgggccctgggcgtcatctcctacatcctgctgtgtgggtacccccccttctacgacgagagcgaccctgagctcttcagccagatcctgagg

SEQ ID NO: 168854 - DNA, 10959 bp, Homo sapiens
  Payload ID: 13241
  Gene Symbol: PAPPA
  Gene Name: pregnancy-associated plasma protein A, pappalysin 1
  Uniprot ID: Q13219
  ENST ID: ENST00000328252
  CDS Start-End: 370-5253
gggggagggaattcagcggatcagtcttaagaggagcttttttttggagcgagaaatcatataaaataaaatgaaataaaacaaggaggaaggcaaccagctgttaggggaaaaataaggcagataaaggagcggggagagaaattaattgccaaccaggaggagttgggctgtatttttcaaaggtggggagagtggagcacacaccttgaggaggaaagcgagaaagaaaagaaaaaagcaagtggaaaggggggctcgcccaagaagggtgaagaagcgaagaaagtcgaggcgccgaggctcccaaagctggcagctccgggtggcggtgcaggggcgaagggggggcggggggaaccgtcggacatgcggctctggagttgggtgctgcacctggggctgctgagcgccgcgctgggctgcgggctggccgagcgtccccgccgggcccggagagacccgcgggccggccgacccccgcgccccgccgccggcccggccacctgcgccacccgggcggcccgcggccgccgcgcctcgccgccgccgccgccgccgccgggcggtgcctgggaagccgtgcgcgtcccccggcggcggcagcagcgggaggcgaggggcgccaccgaggagccgagcccgccgagccgggcgctctatttcagcgggcgaggcgagcagctgcgcctccgggccgacctcgagctgccccgggacgcgttcacgctgcaagtgtggctgcgagcggaggggggccagaggtctccggcagtgatcacagggctgtatgacaaatgttcttatatctcacgtgaccgaggatgggtcgtgggcattcacaccatcagtgaccaagacaacaaagacccacgctactttttctccttgaagacagaccgagcccggcaagtgaccaccatcaatgcccaccgcagctacctcccaggccagtgggtatacctagctgccacctatgatgggcagttcatgaagctctatgtgaatggtgcccaggtggccacctctggggaacaagtgggtggcatattcagcccactgacccagaagtgcaaagtgctcatgttagggggcagtgccctgaatcacaactaccggggctacatcgagcacttcagtctgtggaaggtggccaggactcagcgggagatactgtctgacatggaaacccatggcgcccacactgctctacctcagctcctcctccaggagaactgggacaatgtgaagcatgcctggtcccccatgaaggatggcagcagccccaaagtggaattcagcaatgcccacggctttctgctggacacgagtctggagcctcctctgtgcggacagacattgtgtgacaacacagaggtcattgccagctacaatcagctctcaagtttccgccagcccaaggtggtgcgctaccgcgtggtcaacctctatgaagatgatcataagaacccgacggtgacgcgcgagcaggtggacttccagcaccatcagctggctgaggccttcaagcaatacaacatctcctgggagctggacgtgctggaggtgagcaactcctcccttcgccgccgcctcatcctggccaactgtgacatcagcaagattggggatgagaactgtgaccccgagtgcaaccacacgctgacgggccacgacggcggggattgccgccacctgcgccaccctgccttcgtgaagaagcagcacaacggggtgtgtgacatggactgcaactatgaacggttcaactttgatggtggagagtgctgtgaccctgaaatcaccaatgtcactcagacttgctttgaccccgactctccacacagagcctacttggatgttaatgagctgaagaacattcttaaattggatggatcaacacatctcaatattttctttgcaaaatcctcagaggaggagttggcaggagtagcaacttggccatgggacaaggaggccctgatgcacttaggtggcattgtcttgaacccatctttctatggcatgcctgggcacacccacaccatgatccatgagattggtcacagcctgggcctctatcacgtcttccgaggcatctcagaaatccagtcctgcagtgacccctgcatggagacagagccctccttcgagactggagacctctgcaatgataccaacccagcccctaaacacaagtcctgtggtgacccagggccaggaaatgacacctgtggctttcatagcttcttcaacactccttacaacaacttcatgagctatgcagatgacgactgtacggactccttcacgcccaatcaagtcgccagaatgcactgttacctggacctggtctaccagggctggcagccctccaggaaaccagcgcctgttgccctcgccccccaagttctgggccacacaacggactctgtgacactggagtggttcccacctatagatggccatttctttgaaagagaattgggatcagcatgtcatctttgcctggaagggagaatcctggtgcagtatgcttccaacgcttcctccccaatgccctgcagcccatcaggacactggagccctcgtgaagcagaaggtcatcctgatgttgaacagccctgtaagtccagtgtccgcacctggagcccaaattcagctgtcaacccacacacggttcctccagcctgccctgagcctcaaggctgctacctcgagctggagttcctctaccccttggtccctgagtctctgaccatttgggtgacctttgtctccactgactgggactctagtggagctgtcaatgacatcaaactgttggctgtcagtgggaagaacatctccctgggtcctcagaatgtcttctgtgatgtcccactgaccatcagactctgggacgtgggcgaggaggtgtatggcatccaaatctacacgctggatgagcacctggagatcgatgctgccatgttgacctccactgcagacaccccactctgtctacagtgtaagcccctgaagtataaggtggtccgggaccctcctctccagatggatgtggcctccatcctacatctcaataggaaattcgtagacatggatctaaatcttggcagtgtgtaccagtattgggtcataactatttcaggaactgaagagagtgagccatcacctgctgtcacatacatccatggaagtgggtactgtggcgatggcattatacaaaaagaccaaggtgaacaatgcgacgacatgaataagatcaatggtgatggctgctcccttttctgccgacaagaagtctccttcaattgtattgatgaacccagccggtgctatttccatgatggtgatggggtatgtgaggagtttgaacaaaaaaccagcattaaggactgtggtgtctacacgccccagggattcctggatcagtgggcatccaatgcttcagtatctcatcaagaccagcaatgcccaggctgggtcatcatcggacagccagcagcatcccaggtgtgtcgaaccaaggtgatagatctcagtgaaggcatttcccagcatgcctggtacccttgcaccatcagctacccatattcccagctggctcagaccactttttggctccgggcgtatttttctcaaccaatggttgccgcagctgtcattgtccacctggtgacggatgggacatattatggggaccaaaagcaggagaccatcagcgtgcagctgcttgataccaaagatcagagccacgatctaggcctccatgtcctgagctgcaggaacaatcccctgattatccctgtggtccatgacctcagccagcccttctaccacagccaggcggtacgtgtgagcttcagttcgcccctggtcgccatctcgggggtggccctccgttccttcgacaactttgaccccgtcaccctgagcagctgccagagaggggagacctacagccctgccgagcagagctgcgtgcacttcgcatgtgagaaaactgactgtccagagctggctgtggagaatgcttctctcaattgctccagcagcgaccgctaccacggtgcccagtgtactgtgagctgccggacaggctacgtgctccagatacggcgggatgatgagctgatcaagagccagacgggacccagcgtcacagtgacctgtacagagggcaagtggaataagcaggtggcctgtgagccagtcgactgcagcatcccagatcaccatcaagtctatgctgcctccttctcctgccctgagggcaccacctttggcagtcaatgttccttccagtgccgtcaccctgcacaattgaaaggcaacaacagcctcctgacctgcatggaggatgggctgtggtccttcccagaggccctgtgtgagctcatgtgcctcgctccaccccctgtgcccaatgcagacctccagaccgcccggtgccgagagaataagcacaaggtgggctccttctgcaaatacaaatgcaagcctggataccatgtgcctggatcctctcggaagtcaaagaaacgggccttcaagactcagtgtacccaggatggcagctggcaggagggagcttgtgttcctgtgacctgtgacccacctccaccaaaattccatgggctctaccagtgtactaatggcttccagttcaacagtgagtgtaggatcaagtgtgaagacagtgatgcctcccagggacttgggagcaatgtcattcattgccggaaagatggcacctggaacggctccttccatgtctgccaggagatgcaaggccagtgctcggttccaaacgagctcaacagcaacctcaaactgcagtgccctgatggctatgccatagggtcggagtgtgccacctcgtgcctggaccacaacagcgagtccatcatcctgccaatgaacgtgaccgtgcgtgacatcccccactggctgaaccccacacgggtagagagagttgtctgcactgctggtctcaagtggtatcctcaccctgctctgattcactgtgtcaaaggctgtgagcccttcatgggagacaattattgtgatgccatcaacaaccgagccttttgcaactatgacggtggggattgctgcacctccacagtgaagaccaaaaaggtcaccccattccctatgtcctgtgatctacaaggtgactgtgcttgtcgggacccccaggcccaagaacacagccggaaagacctccggggatacagccatggctaaggaaggacaagaagttgtcaaagaattcccaacgccaggacccacatccctttggtattgatttcacagtcagctgctcaacggaatggcctctccacaccagggatccttagcacccaaccggtctgcctttaattttacccaggaaggactcacattggggcgaatgaaccaagtttcgccatgctggatgatgaaatggattcccatcccaaagtctgagatggattgcatatacagtgtgcagtcccagagcctcctaaaattctagccatttgtcacacaaccacagcaagaaacgtgttctatatctagagtgtgcccatctgtgtttagtacacatgcatgcatacacacccatacaaacatctgtgtgagggcagttctggagatgagcagagagagaccggaataaactcaatcttttctttcccaagctcctagccaacactatccttgggagaaagaaatttgcagaaactgctaagaccaagtgtggagatgtcaagctagttcacactctgaggctcagaatatgtaggacatgcacaattgtgcagtcctttgggattggaagtgaaacagtctgtgatcccctaccttctagggaactaggacctaggaagaggtaaagattatcaggtatgcaaagcgccccaattcttctgctgccatgggggattttaccccaactccagggttcgaggccaatctgagaatggcttaggattgcaatgtcaaggtattatatcagccccttgcttgaggcttgaggtcataatatccctctaggacttacctgttcccccagatcttgccttgggaccacatttgctgctacttttcctgctgctctatcctatacattgaataatccaagatggtagaactaggttaggaaaaattccacacaaccaaacagtctgccttaaaagtgacccacatttttccatagctcctcactttttagcccttctgcaagagaaaaaccctcatgggtccacatggtgagaagttaagtttcctgtaagtgggcctctcaccctggaaaggagttgagggacatcagatgctggaaccctcactgaaagtccagaatgtctaagccagtgttagattttgtaaacaagtggaacagtgttaaatttctatgatgttggagccatccagagactactggaattgtcgagacttttggattattatccttatccttatcctaatcttcctagcccttcaggctagagtaggctttgatcctgagaaccttgctgttgctctgaggagatataattctgggagaaagaatcttttataagaacagtacagattgttctcaagagggccatcagaaggaagccaaagagttcacagcctcagcaccaacaactcaacatggtcatcatgttttctatatggtttttccagctagcagtactcccttccatacctgtgactgggcagtgcttttctctctcccatgtctagcctccaaaagttaagtgaaaattagtcaactgcacgtggaagcccccaccactttggggatctctttatttcttttcagccagggacctgtccactccctttgaattaatatgggaagaaattaatacaggatgaactggagagaagggttgagtgtggcatactttctgaaacctggagctgggaattgcggagaagggaaggtctagactagttacatcacatagggattactgtaaatcaagtcatctcaagtctagtgaagacagccaacagaaacaaaacctagcatagggatagaaaataccatgcacgtgtgcagccccacctaattcctgcatccaaggcaggtgttgttaatctatcatagcacttaaaaaaaaaaaaaaaaagagaccaaaaataactttaggaaccaccatattatatcactcccaatagcactgacctggtgatcaaaaacacttgagaagacatctattggccatctctggccaattacactaagaaacatatcaaggtgcttttggcacaggtgcccacaaatacggatgcagtgctgagatagtttatgagacttgtaccatttcacaaactctgaaattgggttccatattggcaaggctgccacagttgttaagaataatcctctatgtttcttcctcacaaaaccatatctcatttatatccagaccattacttcactataattacaaggacaaattattagcaagaaataagaatagtattagaagaattgatcctattttgaacccctctccagtatcttcacactcttgtcaactctccaggcctctctcttgccctgagttatcagcctgtgtggtgttaactaccttagaaggtacaagctaagaaatgtaacagtatcaaccctcccagttgcttaattatacccataggtaatacaaaaagctctgaagacccaaagatgacattactaatgatgtgatttcaggagccacagaagaaccttaccagcttccctcaaatcagtccttatcctctttctatcttcactcccatcatcatctattttcacactatccagctaagcaaagattcctggaggctgacttgtatcttcagactcacagagtgaattcagctcttctgaatcaagacccacccagtctctttcattcagacctgttgctaacaaatttatatttgccaaggatattaggcaaaagaggctacttgattggtggccaacctcgtgcccacatggaaggtatctttaatagggtcttttcaaaccttagtggaggagggtcagctcaatttgggcaatgcatttgttcccagtttcattttcttcctgggaattaactcgtcatttcattccttcagtcatcttctgtgtaggtgaccggagcactgagaggcagctctgatgcactattgtgtgtcagcagctcaaaggccctaaaacactgaaggttctgcatctgaagtattagattgttagcagcaaaatatgaaagatgaggtggacagtcctctaagccctatttagggaagcttttccaagccacaatcttaactacctacccaaaggatttgcattacccccagattctgtgccaacaaccttttaaggaaatacagtccttgggaaatgagttttgatggtgaattggggtgttaaggaagggaaagattgtcatagatggtagggctttgaaaatgcagggtatcagctgccactcctggcttcaacacattgagtcactgcctagacggttctcttggtcttattcccatcctggccaatgcttaaatactatttgttgaaaataattctttgagacagatttcagctacctcccttccaggttcgatttaacttggttgtaattgtcaatttgttgttataggtcttacctgtgtgaaagaaagaaaaagaaagaaagaaagaaagagaaaggaaattataaggtcaagttaacagttttgaggttttgtgtttttttctggaactacttcaagtgagaaaataaaaaaaaatggtgacaaagctgtacagatagagataatagaagacaaagagattaaaaggaaataaaaatgcatgattaaaaactaagaataaaaaacctatttttatgtttcctaaaggaaattgtttattctacagcctcagtaggtagacacaaacataaagatttccctagaagacatagagtgggatttgataacactgtctgttattttctgtacattgtggtaggtccaggaaatatgacattttcccccttgatgtgttattgttgttgttgggtggggtgggcattttgtttatttgtttggtggcaatcagtggtagtagggagtgggagggcttatattggtttttccagctattaaggggacatattgtgtcgttgtgcttttcacgttataaaatgtttatatttaccagtacagcactgggctttataaagactgcactcagaaccacactgcacagtccagttttttaaaaagctgctacatgacagacaggtaatcccactgagtgagttttgagaaacaaatcaaacgaagtaaacaagaaacataaaaaccaaatagcaaatgaataaaagcctgttcttgtaacttattcaacttttgccaaattcctaccaatcacttgctttttaaaagaaatgtataatagccaaaagagaaattatgtccctgttgtacagaagttagaatttttgactccaggcagcagtttgctcagtgatcttgaacaagttatccaattgcctctacatttgcatcagtttctctagctgcaaaatggggataatactatatacctacctcacagtgggagggcaggagattttgaggccctgaggttttaggtgggctgtgagggccaacgcttgacacaaagtccatgggttattattcaagaatgcacaggcccatcggccttttagaaagacaagacagggagtgcttgtttgatatttcaaggaataaagccggagctcctgaattgtagtccaccttaaaagagagacctgtattggagaatattttatttttttggcaaatttgatcttaccctttaccagttctataatttggttaaaagctgattatgtcctacaatgtcaaagtcagctaactgtcgtctacttaagacttctggtcatttccaacttatagaggaagggagtctctaaaatctcttcttcagaaggcacctcacttctcagacttaaaattccacatcaagtgttccattaaaagaagataaggcattctgagtgcaaacaaatgggggcttcttaaactacacaccagcagtcagtgaggaaaactttgaacaattattgagttgctttcttgggtctctataatcaataacctgtctgcagatatctatctatataaagatattatatataaatataaatttacatatatatgcacatgtatatatagttgtacatatatgtgtgtatatatatacttaaatgtaatatttacaaaataaaactgtgatctcgtctagagaaaatgtattcatattacaaactgctcttccatatttatgtaccatattatacctttttattattgttataattattatgggtatttctaattaatatgatgttgaaacctgtttggcaccttctggaagctaccaaaaaaatgacactccattgaagtgcttaaaagctgttctcataagaattcttctggcctattgtaaaaaagaaaaaaaaaaagaaaaagaagaaagacacaaagaaaataatctaaacaccaaaaactaaacacaattccaatcctttttctgtacctcacgcgcataaatttgctgctcctatttttttttctgtttatgtgtttttatggatctaagttaaatcttttggcaatatataaaaatgtaaatagtaaactttatttattaagaatgtcatcttttttaatttatatttacacaattgttcatctaatttattttttctatacagttttaaatactcagacatattttgctgttcatgatatttttatcctgttctcatggatttgttttcccatactgttttctctgatctcaattacaggttggatctcacaaataataatgtcagagacagaaatattttgccactgttgattactatactttaaagttctatattatgaaaatatataatagcttgtacgcttcag

SEQ ID NO: 168855 - DNA, 4610 bp, Homo sapiens
  Payload ID: 13242
  Gene Symbol: PZP
  Gene Name: pregnancy-zone protein
  Uniprot ID: P20742
  ENST ID: ENST00000261336
  CDS Start-End: 30-4478
ggacacaaccctgagatttatccctcacaatgcggaaagacagacttcttcatttatgtcttgtgctacttcttatcctgctttctgccagtgactcaaactctacagaaccgcagtatatggtgctggtcccctccctgctccacactgaggcccctaagaagggctgtgtccttctgagccacctgaatgagacagtgactgtaagtgcttccttggagtctggcagggaaaacaggagcctcttcactgacctggtggcggagaaggacttattccactgtgtctccttcactctcccaaggatctcagcctcttcagaggtggcattccttagcatccagataaaggggcctacgcaagatttcaggaagaggaacacagttctggtactgaacacccaaagtctggtctttgtccagacagacaaacccatgtataaaccaggacagacagtaagattccgtgttgtctccgtggatgaaaattttcgccctcgaaatgaactgattccactgatataccttgagaacccaagaagaaatcgaattgcacaatggcagagtctcaagctagaagctggcatcaatcagttgtcctttcccctctcatcagagcccattcagggctcctacagggtggtggtacagacagaatcaggtggaaggatacagcaccccttcaccgtggaggaatttgtgcttcccaagtttgaggtcaaagttcaggtgccaaagataatcagtatcatggatgaaaaagtgaacataacagtctgtggagaatacacttatgggaagcctgtcccaggacttgcaactgtgagcctgtgtagaaaattatctcgtgttcttaattgtgacaagcaggaggtctgtgaggaattcagtcaacagcttaacagcaatggctgcatcacccaacaagtacacaccaaaatgctccagattacaaatacgggctttgaaatgaagcttagagtggaagccaggatcagagaagaggggacagacctggaagtcactgcaaacaggatcagtgaaatcacaaacattgtatccaaactcaaattcgtgaaagtggattcacactttagacaaggaatccccttttttgcacaggtgcttctggtggatggaaaaggtgtgcccatccccaataaactcttcttcatctctgtgaatgacgccaattattactccaatgcaaccaccaatgagcagggtcttgcacagttttcaatcaatactaccagtatctcggttaataaactttttgtccgggttttcactgtgcatcccaacttgtgttttcactattcatgggtagcagaagaccaccagggtgctcagcacactgcaaatcgtgttttctccttaagtggaagttacattcacctggagcctgtggctggtaccctgccctgtggccacacggagactatcacggcacactatacactgaatagacaggccatgggagagttatcggagctcagtttccattacctgatcatggctaagggagtcatcgtcagatctggaacccacactctgcctgtggagtcaggagacatgaaaggcagttttgccttatccttccctgtggagtcagacgttgcccccattgcacgaatgttcatctttgccattttaccagatggagaagttgttggagactctgaaaaatttgagattgaaaactgtctagccaacaaggtggatttgagcttcagcccagcacaaagtcccccagcctcacatgcccacctgcaagtagcagctgctccgcagtccctctgtgcccttcgtgctgtggaccaaagtgtgctgctcatgaagcctgaggctgagctctctgtgtcctcagtatataatctgctaactgtgaaggatctcaccaattttcctgacaatgtggaccagcaggaggaagaacaaggacactgtccccgtcctttcttcattcataatggagccatctatgttcccttatcaagtaatgaagcagatatttatagcttcctcaaggggatgggattgaaggtgttcactaactcaaaaatccgaaaaccaaagtcgtgttcagtcatcccttccgtgtctgcaggagcagtaggtcaaggatactatggagcaggtctaggagtagtagagagaccatatgttcctcaattaggcacatataatgtgatacccttaaataatgaacaaagttcagggccagtccctgaaacggtgcgaagctattttcctgagacttggatctgggagttggtggcagtgaactcatcaggtgtggctgaggtaggagtaacagtccctgacaccatcaccgagtggaaggcaggggccttctgcctgtccgaagatgctggacttggtatctcttccactgcctctctccgagccttccagcccttctttgtggagctcacaatgccttactctgtgattcgtggagaggtcttcacactcaaggccacggtcctaaactaccttcccaaatgcatccgggtcagtgtgcagctgaaagcctctccagccttcctagcttcccaaaatacaaagggagaagaatcctattgtatctgtggaaatgagagacaaaccttgtcttggacagtgactcctaaaactctggggaatgtgaacttctcagtgagtgcagaggcaatgcagtccttagaactctgtggaaatgaggttgttgaggtccctgagattaaaagaaaagacacagtcatcaaaaccctgttggtggaggctgaaggtattgagcaagaaaagactttcagttctatgacctgtgcctcaggtgctaatgtgtctgagcagttgtccttgaagctcccatcaaatgtggtcaaagaatctgccagagcttctttctcagttctgggtgacatattaggttctgctatgcaaaatatacaaaatctcctccagatgccatatggctgtggagaacagaacatggtcctatttgctcctaacatctatgtcttgaactatctgaatgaaacccagcagctgacgcaggagatcaaggccaaggccgttggctatctcatcactggttaccagagacagctgaactacaaacaccaagatggctcctacagcacctttggggaacgatatggcaggaaccagggcaacacttggctcacagcttttgtactgaagactttcgcccaggctcgatcctacatcttcattgatgaagcacacattacccaatctctcacgtggctctcccagatgcagaaggacaatggctgtttcaggagctctgggtcactgctcaacaatgccataaagggaggtgtagaagatgaagcgaccctctccgcctatgttactattgcccttctggaaattcctctcccagtcactaaccctattgttcgcaatgccctgttctgcctggagtcagcctggaatgtagcaaaggaggggacccatgggagccatgtctacaccaaggcattgctggcctatgctttttccctactgggaaagcaaaatcagaatagagaaatactgaactcacttgataaggaagctgtgaaagaagacaacctcgtccattgggagcgccctcagagacccaaggcaccagtggggcatctttaccaaacccaggctccctctgctgaggtggagatgacatcctatgtgctcctcgcttatctcacggcccagccagcccccacctcaggggacctgacctctgcaactaacattgtgaagtggatcatgaagcagcagaacgcccaaggtggtttctcctccacccaggacacagtggtggctctccatgccctgtccaggtatggagcagccactttcaccagaactgagaaaactgcacaggtcaccgttcaggattcacagaccttttctacaaatttccaagtagacaacaacaacctcctattactgcagcagatctcattgccagagctccctggagaatatgtcataacagtaactggggaaagatgtgtgtatcttcagacatccatgaaatacaatattcttccagagaaagaggactccccatttgctttaaaagtgcagactgtgccccaaacttgcgatggacacaaagcccacaccagctttcagatctcactgaccatcagttacacaggaaaccgtcctgcttccaatatggtgattgttgatgtaaagatggtatctggttttattcccctgaaaccaacagtaaaaatgcttgaaagatctagctctgtgagccggacagaagtgagcaacaaccatgtcctcatttatgtggaacaggtgacaaatcagacgctaagtttttccttcatggttctgcaagacatcccagtaggagacttgaagccagcaattgttaaagtctatgattactatgagacagatgagtctgtggttgctgagtatatcgccccctgcagcacagatacagagcatggaaatgtttgaggaccatacaggctgtatattttggtggattctctgtcctatacatttacttagaaggaatggagttatttgtctctataaaatagacactaaaaatatttgctgaataaatatgtacttctggtcaaacta

SEQ ID NO: 168856 - DNA, 4417 bp, Homo sapiens
  Payload ID: 13242
  Gene Symbol: PZP
  Gene Name: pregnancy-zone protein
  ENST ID: ENST00000535230
  CDS Start-End: 25-459
caaccctgagatttatccctcacaatgcggaaagacagacttcttcatttatgtcttgtgctacttcttatcctgctttctgccagtgactcaaactctacagaaccgcagtatatggtgctggtcccctccctgctccacactgaggcccctaagaagggctgtgtccttctgagccacctgaatgagacagtgactgtaagtgcttccttggagtctggcagggaaaacaggagcctcttcactgacctggtggcggagaaggacttattccactgtgtctccttcactctcccaaggatctcagcctcttcagaggtggcattccttagcatccagataaaggggcctacgcaagatttcaggaagaggaacacagttctggtactgaacacccaaagtctggtctttgtccagacagacaaacccatgtataaaccaggacagacaggtaagtagggaaattccactgtttggggcaacactgagaagggccacctgaacagccaaagtctccattatcctagccccgtagcctcctgtcttattacccaaattacctgctttatcatgtctgaatcttatcggagaactacttttccagtaagattccgtgttgtctccgtggatgaaaattttcgccctcgaaatgaactgattccactgatataccttgagaacccaagaagaaatcgaattgcacaatggcagagtctcaagctagaagctggcatcaatcagttgtcctttcccctctcatcagagcccattcagggctcctacagggtggtggtacagacagaatcaggtggaaggatacagcaccccttcaccgtggaggaatttgtgcttcccaagtttgaggtcaaagttcaggtgccaaagataatcagtatcatggatgaaaaagtgaacataacagtctgtggagaatacacttatgggaagcctgtcccaggacttgcaactgtgagcctgtgtagaaaattatctcgtgttcttaattgtgacaagcaggaggtctgtgaggaattcagtcaacagcttaacagcaatggctgcatcacccaacaagtacacaccaaaatgctccagattacaaatacgggctttgaaatgaagcttagagtggaagccaggatcagagaagaggggacagacctggaagtcactgcaaacaggatcagtgaaatcacaaacattgtatccaaactcaaattcgtgaaagtggattcacactttagacaaggaatccccttttttgcacaggtgcttctggtggatggaaaaggtgtgcccatccccaataaactcttcttcatctctgtgaatgacgccaattattactccaatgcaaccaccaatgagcagggtcttgcacagttttcaatcaatactaccagtatctcggttaataaactttttgtccgggttttcactgtgcatcccaacttgtgttttcactattcatgggtagcagaagaccaccagggtgctcagcacactgcaaatcgtgttttctccttaagtggaagttacattcacctggagcctgtggctggtaccctgccctgtggccacacggagactatcacggcacactatacactgaatagacaggccatgggagagttatcggagctcagtttccattacctgatcatggctaagggagtcatcgtcagatctggaacccacactctgcctgtggagtcaggagacatgaaaggcagttttgccttatccttccctgtggagtcagacgttgcccccattgcacgaatgttcatctttgccattttaccagatggagaagttgttggagactctgaaaaatttgagattgaaaactgtctagccaacaaggtggatttgagcttcagcccagcacaaagtcccccagcctcacatgcccacctgcaagtagcagctgctccgcagtccctctgtgcccttcgtgctgtggaccaaagtgtgctgctcatgaagcctgaggctgagctctctgtgtcctcagtatataatctgctaactgtgaaggatctcaccaattttcctgacaatgtggaccagcaggaggaagaacaaggacactgtccccgtcctttcttcattcataatggagccatctatgttcccttatcaagtaatgaagcagatatttatagcttcctcaaggggatgggattgaaggtgttcactaactcaaaaatccgaaaaccaaagtcgtgttcagtcatcccttccgtgtctgcaggagcagtaggtcaaggatactatggagcaggtctaggagtagtagagagaccatatgttcctcaattaggcacatataatgtgatacccttaaataatgaacaaagttcagggccagtccctgaaacggtgcgaagctattttcctgagacttggatctgggagttggtggcagtgaactcatcaggtgtggctgaggtaggagtaacagtccctgacaccatcaccgagtggaaggcaggggccttctgcctgtccgaagatgctggacttggtatctcttccactgcctctctccgagccttccagcccttctttgtggagctcacaatgccttactctgtgattcgtggagaggtcttcacactcaaggccacggtcctaaactaccttcccaaatgcatccgggctgaaggtattgagcaagaaaagactttcagttctatgacctgtgcctcaggtgctaatgtgtctgagcagttgtccttgaagctcccatcaaatgtggtcaaagaatctgccagagcttctttctcagttctgggtgacatattaggttctgctatgcaaaatatacaaaatctcctccagatgccatatggctgtggagaacagaacatggtcctatttgctcctaacatctatgtcttgaactatctgaatgaaacccagcagctgacgcaggagatcaaggccaaggccgttggctatctcatcactggttaccagagacagctgaactacaaacaccaagatggctcctacagcacctttggggaacgatatggcaggaaccagggcaacacttggctcacagcttttgtactgaagactttcgcccaggctcgatcctacatcttcattgatgaagcacacattacccaatctctcacgtggctctcccagatgcagaaggacaatggctgtttcaggagctctgggtcactgctcaacaatgccataaagggaggtgtagaagatgaagcgaccctctccgcctatgttactattgcccttctggaaattcctctcccagtcactaaccctattgttcgcaatgccctgttctgcctggagtcagcctggaatgtagcaaaggaggggacccatgggagccatgtctacaccaaggcattgctggcctatgctttttccctactgggaaagcaaaatcagaatagagaaatactgaactcacttgataaggaagctgtgaaagaagacaacctcgtccattgggagcgccctcagagacccaaggcaccagtggggcatctttaccaaacccaggctccctctgctgaggtggagatgacatcctatgtgctcctcgcttatctcacggcccagccagcccccacctcaggggacctgacctctgcaactaacattgtgaagtggatcatgaagcagcagaacgcccaaggtggtttctcctccacccaggacacagtggtggctctccatgccctgtccaggtatggagcagccactttcaccagaactgagaaaactgcacaggtcaccgttcaggattcacagaccttttctacaaatttccaagtagacaacaacaacctcctattactgcagcagatctcattgccagagctccctggagaatatgtcataacagtaactggggaaagatgtgtgtatcttcagacatccatgaaatacaatattcttccagagaaagaggactccccatttgctttaaaagtgcagactgtgccccaaacttgcgatggacacaaagcccacaccagctttcagatctcactgaccatcagttacacaggaaaccgtcctgcttccaatatggtgattgttgatgtaaagatggtatctggttttattcccctgaaaccaacagtaaaaatgcttgaaagatctagctctgtgagccggacagaagtgagcaacaaccatgtcctcatttatgtggaacaggtgacaaatcagacgctaagtttttccttcatggttctgcaagacatcccagtaggagacttgaagccagcaattgttaaagtctatgattactatgagacagatgagtctgtggttgctgagtatatcgccccctgcagcacagatacagagcatggaaatgtttgaggaccatacaggctgtatattttggtggattctctgtcct

SEQ ID NO: 168857 - DNA, 1261 bp, Homo sapiens
  Payload ID: 13243
  Gene Symbol: PRELID1
  Gene Name: PRELI domain containing 1
  Uniprot ID: Q9Y255
  ENST ID: ENST00000303204
  CDS Start-End: 213-872
actgtgtggctgcgccggaagtggcgcgcggccggacaactcatggcggcggcggcggcggcggcagctgcttgggcgcggtgcggtggtgactgagctacgagcctggcggcgggtgtgcgccgagccccggcccggcccggccctcgcgtgcctcccaggctccgcacccctgatgctgcgcgggtgctgagcccgcttcggccgggacgatggtgaagtatttcctgggccagagcgtgctccggagttcctgggaccaagtgttcgccgccttctggcagcggtacccgaatccctatagcaaacatgtcttgacggaagacatagtacaccgggaggtgacccctgaccagaaactgctgtcccggcgactcctgaccaagaccaacaggatgccacgctgggccgagcgactatttcctgccaatgttgctcactcggtgtacgtcctggaggactctattgtggacccacagaatcagaccatgactaccttcacctggaacatcaaccacgcccggctgatggtggtggaggaacgatgtgtttactgtgtgaactctgacaacagtggctggactgaaatccgccgggaagcctgggtctcctctagcttatttggtgtctccagagctgtccaggaatttggtcttgcccgattcaaaagcaacgtgaccaagactatgaagggttttgaatatatcttggctaagctgcaaggcgaggccccttccaaaacacttgttgagacagccaaggaagccaaggagaaggcaaaggagacggcactggcagctacagagaaggccaaggacctcgccagcaaggcggccaccaagaagcagcagcagcagcaacagtttgtgtagccagtctaccaccaccacagcaccccagacagctaggcttagcctctctgccctcccttcattgtactttatcattaaaaatcaacttccagccctgtctgctgtctacgtggtgggttgtggggatgcagtttggcatctgcagtacaccaagcacatgattcatgtctgagccaggtctgcttattctcccattgggcagctgaggaccgaggcacagaggtgcggtgacttgcccggggctccaggtagcctgcaggttaactggcggtaagtgctagactgtaagcccgacaagggcagggcttttggttttgttctctgatgtgtctcagtatctagcacataatagacactcaataaatacttgttgaattcagttggcccca

SEQ ID NO: 168858 - DNA, 886 bp, Homo sapiens
  Payload ID: 13243
  Gene Symbol: PRELID1
  Gene Name: PRELI domain containing 1
  ENST ID: ENST00000504594
  CDS Start-End: 172-501
catggcggcggcggcggcggcggcagctgcttgggcgcggtgcggtggtgactgagctacgagcctggcggcgggtgtgcgccgagccccggcccggcccggccctcgcgtgcctcccaggctccgcacccctgatgctgcgcgggtgctgagcccgcttcggccgggacgatggtgaagtatttcctgggccagagcgtgctccggagttcctgggaccaagtgttcgccgccttctggcagcggtacccgaatccctatagcaaacatgtcttgacggaagacatagtacaccgggaggtgacccctgaccagaaactgctgtcccggcgactcctgaccaagaccaacaggatgccacgctgggccgagcgactatttcctgccaatgttgctcactcggtgtacgtcctggaggactctattgtggacccacagaatcagaccatgactaccttcacctggaacatcaaccacgcccggctgatgtggctggactgaaatccgccgggaagcctgggtctcctctagcttatttggtgtctccagagctgtccaggaatttggtcttgcccgattcaaaagcaacgtgaccaagactatgaagggttttgaatatatcttggctaagctgcaaggcgaggccccttccaaaacacttgttgagacagccaaggaagccaaggagaaggcaaaggagacggcactggcagctacagagaaggccaaggacctcgccagcaaggcggccaccaagaagcagcagcagcagcaacagtttgtgtagccagtctaccaccaccacagcaccccagacagctaggcttagcctctctgccctcccttcattgtactttatcattaaaaatcaacttccagccctgtc

SEQ ID NO: 168859 - DNA, 712 bp, Homo sapiens
  Payload ID: 13243
  Gene Symbol: PRELID1
  Gene Name: PRELI domain containing 1
  ENST ID: ENST00000510797
  CDS Start-End: 176-289
aactcatggcggcggcggcggcggcggcagctgcttgggcgcggtgcggtggtgactgagctacgagcctggcggcgggtgtgcgccgagccccggcccggcccggccctcgcgtgcctcccaggctccgcacccctgatgctgcgcgggtgctgagcccgcttcggccgggacgatggtgaagtatttcctgggccagagcgtgctccggagttcctgggaccaagtgttcgccgccttctggcagcggtacccgaatccctatagtctcttaggggcaagcttctgagggtcaccttcaccctgacacctgcagcaaacatgtcttgacggaagacatagtacaccgggaggtgacccctgaccagaaactgctgtcccggcgactcctgaccaagaccaacaggatgccacgctgggccgagcgactatttcctgccaatgttgctcactcggtgtacgtcctggaggactctattgtggacccacagaatcagaccatgactaccttcacctggaacatcaaccacgcccggctgatggtggtggaggaacgatgtgtttactgtgtgaactctgacaacagtggctggactgaaatccgccgggaagcctgggtctcctctagcttatttggtgtctccagagctgtccaggaatttggtcttgcccgattcaaaagcaacgtgaccaagactatgaagggttttga

SEQ ID NO: 168860 - DNA, 608 bp, Homo sapiens
  Payload ID: 13243
  Gene Symbol: PRELID1
  Gene Name: PRELI domain containing 1
  ENST ID: ENST00000503853
  CDS Start-End: 1-608
ccggcgactcctgaccaagaccaacaggatgccacgctgggccgagcgactatttcctgccaatgttgctcactcggtgtacgtcctggaggactctattgtggacccacagaatcagaccatgactaccttcacctggaacatcaaccacgcccggctgatggtggtggaggaacgatgtgtttactgtgtgaactctgacaacagtggctggactgaaatccgccgggaagcctgggtctcctctagcttatttggtgtctccagagctgtccaggaatttggtcttgcccgattcaaaagcaacgtgaccaagactatgaagggttttgaatatatcttggctaagctgcaagggaaattaggttggtctttcaggcatcttctaaaggcagccacctgccgttcgcgacaggcgaggccccttccaaaacacttgttgagacagccaaggaagccaaggagaaggcaaaggagacggcactggcagctacagagaaggccaaggacctcgccagcaaggcggccaccaagaagcagcagcagcagcaacagtttgtgtagccagtctaccaccaccacagcaccccagacagctaggcttagcc

SEQ ID NO: 168861 - DNA, 1171 bp, Homo sapiens
  Payload ID: 13243
  Gene Symbol: PRELID1
  Gene Name: PRELI domain containing 1
  Uniprot ID: Q9Y255
  ENST ID: ENST00000503216
  CDS Start-End: 166-792
ggcggcggcggcggcggcagctgcttgggcgcggtgcggtggtgactgagctacgagcctggcggcgggtgtgcgccgagccccggcccggcccggccctcgcgtgcctcccaggctccgcacccctgatgctgcgcgggtgctgagcccgcttcggccgggacgatggtgaagtatttcctgggccagagcgtgctccggagttcctgggaccaagtgttcgccgccttctggcagcggtacccgaatccctatagcaaacatgtcttgacggaagacatagtacaccgggaggtgacccctgaccagaaactgctgtcccggcgactcctgaccaagaccaacaggatgccacgctgggccgagcgactatttcctgccaatgttgctcactcggtgtacgtcctggaggactctattgtggacccacagaatcagaccatgactaccttcacctggaacatcaaccacgcccggctgatggtggtggaggaacgatgtgtttactgtgtgaactctgacaacagtggctggactgaaatccgccgggaagcctgggtctcctctagcttatttggtgtctccagagctgtccaggaatttggtcttgcccgattcaaaagcaacgtgaccaagactatgaagggttttgaatatatcttggctaagctgcaagccaaggaagccaaggagaaggcaaaggagacggcactggcagctacagagaaggccaaggacctcgccagcaaggcggccaccaagaagcagcagcagcagcaacagtttgtgtagccagtctaccaccaccacagcaccccagacagctaggcttagcctctctgccctcccttcattgtactttatcattaaaaatcaacttccagccctgtctgctgtctacgtggtgggttgtggggatgcagtttggcatctgcagtacaccaagcacatgattcatgtctgagccaggtctgcttattctcccattgggcagctgaggaccgaggcacagaggtgcggtgacttgcccggggctccaggtagcctgcaggttaactggcggtaagtgctagactgtaagcccgacaagggcagggcttttggttttgttctctgatgtgtctcagtatctagcacataatagacactcaataaatacttgttgaattca

SEQ ID NO: 168862 - DNA, 2140 bp, Homo sapiens
  Payload ID: 13244
  Gene Symbol: PRELID2
  Gene Name: PRELI domain containing 2
  Uniprot ID: Q8N945
  ENST ID: ENST00000334744
  CDS Start-End: 54-623
agctctgagctcgcggaggcgtggccggtgcgcggggcccgcggcgcgcggggatgggggtctcggtggatgtgcaccaggtgtacaagtaccccttcgagcaggtggtcgccagctttctccgaaagtaccccaaccccatggataaaaatgtcatctcagtaaaaatcatggaggaaaaaagagatgaatcaacaggggtcatctacagaaagaggattgcaatctgtcagaacgtggttccagaaattttaaggaagtccttaagcactctggtgattctttgttggaaaaaggtgagcattttgaaagtacctaatatccaattagaagaggagtcatggctcaatcctcgggaaagaaacatggccatacggagtcactgccttacgtggacacagtatgcatccatgaaggaagagtctgtcttccgggaaagtatggaaaacccaaattggacagagttcattcaaagaggcaggatttcaatcacaggggttggatttctcaactgtgttttagaaacttttgccagcacattcttacgacagggagcccagaagggaattagaatcatggagatgctgctaaaggaacagtgtggtgcccccttagctgaataaagaatcatcagagagctgtatccatgtctacttatttatttatttattttttttttgagaatcacttcttggccacagcacatcacagacacagtttctggaatacaggtttgaggatacagtgttggcagcttcaagaagagaagaccttcttgccaggacataaaatgataccctcctctgggagcctgcttcgaatagtgggactcagggagataagaccttcttgctggatttttatgacacaatctctttataattttacaaataaaggaaaaaagaaccatgtaagatatgtgtgcccttcctcagggtgttctgctggttgtctgatgatggtgtcagggcagctaaggacaggataaaggcctggagagggtgcttgtgcccttatgttatcagcaccgttgttcctaggattcgtgaggggattctggaaccaataagggagttgaactggtacctgattcacgggtggactggaacaaacaggaatgtaccagacctatgttgaagctaagccgtatttataacaatgtttaagattctcagaaatcaggagatttttatcctatccataagtaatatgtaactgccataagtatagcttttagaatgtaatatgtaaactgtgatttggtcctctggaaaaaaaaaaatgaaatgaagagtgggaaggcagtttcttttctgctaattcgttctgtgatggtgagcaagcaaatcattaacctctctgttttttattgggcaaatggggataatcaggcacaggtctttccgccaatgcgttatgatgattaaagaaggtaattttgtgcagggttttaagtcaacagacagacctgggtttgaatccaagtgctggcacctacttgctcagtgatcatgaacacaattttaaatctttctgaatctcatttaaaaaaatttgtgaaacaagatgatagaattaattttgtgagattgttggactgatttgagatcatgcctatgaagtacctagcacactgcctagtacatagtagaagtccaggaaatggaagccattattatgtaaaacattttgcaaaggtactttttaactgtaacgtaaagtggtactactgtttgaaacttagatggcagtagtttgcatttctcgtgatcagaagccaaaatataaatacatactacctaaaaaatcttgaagagaggtaataatttgaaattcatcttcttaagataaaaatcagggcagggtgtggtggcttatgcctgtaatcccagtactttgggaggccgaggcgggtggatcacaaggtcaggagttcgagaccagcctggccaatatggtgaaaccccgtctctactaaaaatacaaaaaaattagctgggcgtggtggcgcatgcctgtaatcctagctacttgggagtctgaggcaggagaattgcttgaactcaggaggtgaaggttgcagtaagctgagattgtgccactgcaccccagcctgggtgacagagcaagactccatcac

SEQ ID NO: 168863 - DNA, 1102 bp, Homo sapiens
  Payload ID: 13244
  Gene Symbol: PRELID2
  Gene Name: PRELI domain containing 2
  Uniprot ID: Q8N945
  ENST ID: ENST00000394450
  CDS Start-End: 376-822
gggcgcctccgggcctctgcggagccctgggcagctctgagctcgcggaggcgtggccggtgcgcggggcccgcggcgcgcggggatgggggtctcggtggatgtgcaccaggtgtacaagtaccccttcgagcaggtggtcgccagctttctccgaaaggtttccacgctttgagaaggactgaatgagatcatgcgcatggcagcttctctaggatagcaccctgcgtgaacacagtagctgctcagttaagtctttgatgggtgtgatcctgattcagcttgatcaattctgcagtcatactggattgtgtttgaaaaggtgtccagaaaaacctggccatctgcctcctgtcttcccagtaccccaaccccatggataaaaatgtcatctcagtaaaaatcatggaggaaaaaagagatgaatcaacaggggtcatctacagaaagaggattgcaatctgtcagaacgtggttccagaaattttaaggaaggtgagcattttgaaagtacctaatatccaattagaagaggagtcatggctcaatcctcgggaaagaaacatggccatacggagtcactgccttacgtggacacagtatgcatccatgaaggaagagtctgtcttccgggaaagtatggaaaacccaaattggacagagttcattcaaagaggcaggatttcaatcacaggggttggatttctcaactgtgttttagaaacttttgccagcacattcttacgacagggagcccagaagggaattagaatcatggagatgctgctaaaggaacagtgtggtgcccccttagctgaataaagaatcatcagagagctgtatccatgtctacttatttatttatttattttttttttgagaatcacttcttggccacagcacatcacagacacagtttctggaatacaggtttgaggatacagtgttggcagcttcaagaagagaagaccttcttgccaggacataaaatgataccctcctctgggagcctgcttcgaatagtgggactcagggagataagaccttcttgctggatttttatgacacaatctctttataattttacaaataaaggaaaaaa

SEQ ID NO: 168864 - DNA, 1894 bp, Homo sapiens
  Payload ID: 13244
  Gene Symbol: PRELID2
  Gene Name: PRELI domain containing 2
  ENST ID: ENST00000511435
  CDS Start-End: 54-548
agctctgagctcgcggaggcgtggccggtgcgcggggcccgcggcgcgcggggatgggggtctcggtggatgtgcaccaggtgtacaagtaccccttcgagcaggtggtcgccagctttctccgaaagtaccccaaccccatggataaaaatgtcatctcagtaaaaatcatggaggaaaaaagagatgaatcaacaggggtcatctacagaaagaggattgcaatctgtcagaacgtggttccagaaattttaaggaaggtgagcattttgaaagtacctaatatccaattagaagaggagtcatggctcaatcctcgggaaagaaacatggccatacggagtcactgccttacgtggacacagtatgcatccatgaaggaagagtctgtcttccgggaaagtatggaaaacccaaattggacagagttcattcaaagaggcaggatttcaatcacaggggttggatttctcaactgtgttttagaaacttttgccagcacattcttacgacagggagcccagaaggtaaccatatttctgctttgaaccaacattaattttaaaaaacaataggagttccaatagggttattgaataagactcatgagcagacataatgagaaaaacatatagttaataaacaaatatatgcaaaaataatcaacctcaaaattattacataaattcaaatcaaagtaaaactaaagtggcatttatggctcattaaattaaaaatatgccaatgaagagtatgtgaaaatttggagcatacttataatctaattaaaagaaataatcagaatgaataataatgtatagtatgatgacaactatttaataaagataatgatagttaatatttattgagcacttactatgtactactgactgctaaaagaatttgtattattaactcattgaatcctcacaaacctttgcaggagctgttattgttgtcctaatattatggatgaggaaaatacagagaccccaattgtccactcttatagttttcaaactctattctcaagggagcttaggcttccatgaaagtgattcagaagccatgttggagttctaaggtcctgtgtgctctattttaagtagagcttttccattttaatctgtcctctatggtattccatataacatttatatcttctattttctttccttaatagcattatttttaaaacttcatgtcaaaacccattgcttatgcatttttatgtgcttattgcagtgctcagtataaagcagttgctcctaagtgttttattattgttattaattacgatgataattatactcatttatttccagattttactcaggactttttgtataagtttacctcattttgttttgtgggatagaattaaccgctggtgtaaagaaccattgttatgaccctcagagacttcctggcaatggacccttgttttcatttttgcatgtctaggttcaaggatgaacctgtactaggaggtgttcatctgggaggctgagggcggtgaatgaatattcagtaccgttctgtacaccatagacatactgttgtgattgatgatgtgttcttgctccagttgaggtggttcctggcacatattcagactggtccagcctctttaaacctggacttgaagggagtagttgaacttccggaagatcttatgtcacctttactcactcagacattattgcaaatttttctgctatattgcaatttatgcgtttgtaaaaactcccatgttctgcagcattgcattctaaaaatagtggaactgatgagaaaagtaatttcattgccatgtttcttactgagttgactttttgtgcatcctttaaactctgtatgatgataatagtaataataaattgaatttttttat

SEQ ID NO: 168865 - DNA, 738 bp, Homo sapiens
  Payload ID: 13244
  Gene Symbol: PRELID2
  Gene Name: PRELI domain containing 2
  Uniprot ID: Q8N945
  ENST ID: ENST00000505416
  CDS Start-End: 35-568
cgtggccggtgcgcggggcccgcggcgcgcggggatgggggtctcggtggatgtgcaccaggtgtacaagtaccccttcgagcaggtggtcgccagctttctccgaaagtaccccaaccccatggataaaaatgtcatctcagtaaaaatcatggaggaaaaaagagatgaatcaacaggggtcatctacagaaagaggattgcaatctgtcagaacgtggttccagaaattttaaggaaggtgagcattttgaaagtacctaatatccaattagaagaggagtcatggctcaatcctcgggaaagaaacatggccatacggagtcactgccttacgtggacacagtatgcatccatgaaggaagagtctgtcttccgggaaagtatggaaaacccaaattggacagagttcattcaaagaggcaggatttcaatcacaggggttggatttctcaactgtgttttagaaacttttgccagcacattcttacgacagggagcccagaagggaattagaatcatggagatgctgctaaaggaacagtgtggtgcccccttagctgaataaagaatcatcaaatcacttcttggccacagcacatcacagacacagtttctggaatacaggtttgaggatacagtgttggcagcttcaagaagagaagaccttcttgccaggacataaaatgataccctcctctgggagcctgcttcgaatagtgggactcagggagataa

SEQ ID NO: 168866 - DNA, 1715 bp, Homo sapiens
  Payload ID: 13245
  Gene Symbol: PRELID3A
  Gene Name: PRELI domain containing 3A
  Uniprot ID: Q96N28
  ENST ID: ENST00000336990
  CDS Start-End: 81-599
cccgcccacgccgcgcccggagccgcgcggcccgaagcacccggcccggatcgcagagcccgcgccctgcgccggcggcaatgaagatctggagctcggagcacgtgtttggccacccgtgggacacggtcatccaggcggccatgcgcaagtacccgaacccgatgaacccgagcgtgctgggcgtggatgtgctacagcgccgcgtggacggccgcggccgcctgcacagcttgcgcctgctcagcaccgagtgggggctgcccagcctcgtgagagcgattttgggaaccagtaggacattgacatacatccgagaacattctgtggtggatccagtggaaaagaaaatggaactttgttctaccaatatcacactcacaaatttggtgtcagttaatgagaggttggtgtacacacctcatccagagaacccagaaatgaccgtgctcacacaagaagccatcatcactgtgaaggggattagccttggtagttatttggaaagtttaatggccaatacgatatcatccaatgcaaagaaggggtgggctgctatcgagtggataattgaacactctgaaagcgctgtgagctaaggaggcctgtgcctgtgcttgtcataaatgatgcttcccagaagaaaggaaagaaggaggtgaggagaggacgagcaaggacgggacggaaaagcacgtctggctgcgagggcacacagggccggggaggaggattaggctggactgatcgcgggtcgcaggtgaccccgggaccagatgtccctcccctcatgagcgtgcaacagggagcagccccagccagccccaccgccgccgtctgcgtggatggagggctcgaggccctcgcccgtgtcccttaggggcggcgcccatcgtcctgcctgccgcagtggcccagccccttctctccctgcaggtgacccgcgccgcccccgcccgcccgcccacgctgtcctccacttaggctcctccacaaacgctggcgggtgtgccgccctccagcctctccgcccccgtcccctcggtcctgcagatcaccaagcagctctcctgggcccgcggctgctccgggcctcacatctgctgctggcctcggtgggctctgactgcggggctcacggggcctggggccatggctttcttctcggcccccaaatgcctttcctggagtggctaagcctctcctgacgaggctcctcatgcggggagagggctggggtccaggggtttcccggccctttctgcaggctgtgccagccccctccagtctgccactgccgtgcccgggggacatcctgcgcccaggctggaggccctgcctcgctgcttgccagcctcacctgctggggctggaggccatggatccctcatagtatccaaggtttgagttcctgtttttcgccttatagttttgtgagtgtttgagggacaacgaccaaaggtcttttccccaccatctttaaatcaaagttgtttaaaacaacattaattttaaaaaatacataaaagcaacccatgcttatggttaaaaaagagtacaggagtctggagtccgttgaagggtaaaggcctcccgcaagctgccagtcggctctttttcgcaaagccttccagaagttttctgtgcttatgaaagcgtatgtgtggcctttctcttcccttcttttattaaacacagataggtttatgctggat

SEQ ID NO: 168867 - DNA, 1716 bp, Homo sapiens
  Payload ID: 13245
  Gene Symbol: PRELID3A
  Gene Name: PRELI domain containing 3A
  Uniprot ID: Q96N28
  ENST ID: ENST00000440960
  CDS Start-End: 81-599
cccgcccacgccgcgcccggagccgcgcggcccgaagcacccggcccggatcgcagagcccgcgccctgcgccggcggcaatgaagatctggagctcggagcacgtgtttggccacccgtgggacacggtcatccaggcggccatgcgcaagtacccgaacccgatgaacccgagcgtgctgggcgtggatgtgctacagcgccgcgtggacggccgcggccgcctgcacagcttgcgcctgctcagcaccgagtgggggctgcccagcctcgtgagagcgattttgggaaccagtaggacattgacatacatccgagaacattctgtggtggatccagtggaaaagaaaatggaactttgttctaccaatatcacactcacaaatttggtgtcagttaatgagaggttggtgtacacacctcatccagagaacccagaaatgaccgtgctcacacaagaagccatcatcactgtgaaggggattagccttggtagttatttggaaagtttaatggccaatacgatatcatccaatgcaaagaaggggtgggctgctatcgagtggataattgaacactctgaaagcgctgtgagctaaggaggcctgtgcctgtgcttgtcataaatggtgatgcttcccagaagaaaggaaagaaggaggtgaggagaggacgagcaaggacgggacggaaaagcacgtctggctgcgagggcacacagggccggggaggaggattaggctggactgatcgcgggtcgcaggtgaccccgggaccagatgtccctcccctcatgagcgtgcaacagggagcagccccagccagccccaccgccgccgtctgcgtggatggagggctcgaggccctcgcccgtgtcccttaggggcggcgcccatcgtcctgcctgccgcagtggcccagccccttctctccctgcaggtgacccgcgccgcccccgcccgcccgcccacgctgtcctccacttaggctcctccacaaacgctggcgggtgtgccgccctccagcctctccgcccccgtcccctcggtcctgcagatcaccaagcagctctcctgggcccgcggctgctccgggcctcacatctgctgctggcctcggtgggctctgactgcggggctcacggggcctggggccatggctttcttctcggcccccaaatgcctttcctggagtggctaagcctctcctgacgaggctcctcatgcggggagagggctggggtccaggggtttcccggccctttctgcaggctgtgccagccccctccagtctgccactgccgtgcccgggggacatcctgcgcccaggctggaggccctgcctcgctgcttgccagcctcacctgctggggctggaggccatggatccctcatagtatccaaggtttgagttcctgtttttcgccttatagttttgtgagtgtttgagggacaacgaccaaaggtcttttccccaccatctttaaatcaaagttgtttaaaacaacattaattttaaaaaatacataaaagcaacccatgcttatggttaaaaaagagtacaggagtctggagtccgttgaagggtaaaggcctcccgcaagctgccagtcggctctttttcgcaaagccttccagaagttttctgtgcttatgaaagcgtatgtgtggcctttctcttcccttcttttattaaacacagataggtttatgctgg

SEQ ID NO: 168868 - DNA, 1694 bp, Homo sapiens
  Payload ID: 13245
  Gene Symbol: PRELID3A
  Gene Name: PRELI domain containing 3A
  ENST ID: ENST00000587735
  CDS Start-End: 324-572
cgcagcctgttttattttgccgggagcatagtgctgctgcacgctccactctgttggaattcatttctttgctcagtggctcacctgctggagcggaagcgccctggacacaggggttttgtctctgtcccttgctgcatcccatgatatcatttcttgaatagtgaactaattagtaaatgcaatggtattcggtggtgatatgaagtagaatttttaacgttccactatgctagttttgctttgttttctagattttgggaaccagtaggacattgacatacatccgagaacattctgtggtggatccagtggaaaagaaaatggaactttgttctaccaatatcacactcacaaatttggtgtcagttaatgagaggttggtgtacacacctcatccagagaacccagaaatgaccgtgctcacacaagaagccatcatcactgtgaaggggattagccttggtagttatttggaaagtttaatggccaatacgatatcatccaatgcaaagaaggggtgggctgctatcgagtggataattgaacactctgaaagcgctgtgagctaaggaggcctgtgcctgtgcttgtcataaatggtgatgcttcccagaagaaaggaaagaaggaggtgaggagaggacgagcaaggacgggacggaaaagcacgtctggctgcgagggcacacagggccggggaggaggattaggctggactgatcgcgggtcgcaggtgaccccgggaccagatgtccctcccctcatgagcgtgcaacagggagcagccccagccagccccaccgccgccgtctgcgtggatggagggctcgaggccctcgcccgtgtcccttaggggcggcgcccatcgtcctgcctgccgcagtggcccagccccttctctccctgcaggtgacccgcgccgcccccgcccgcccgcccacgctgtcctccacttaggctcctccacaaacgctggcgggtgtgccgccctccagcctctccgcccccgtcccctcggtcctgcagatcaccaagcagctctcctgggcccgcggctgctccgggcctcacatctgctgctggcctcggtgggctctgactgcggggctcacggggcctggggccatggctttcttctcggcccccaaatgcctttcctggagtggctaagcctctcctgacgaggctcctcatgcggggagagggctggggtccaggggtttcccggccctttctgcaggctgtgccagccccctccagtctgccactgccgtgcccgggggacatcctgcgcccaggctggaggccctgcctcgctgcttgccagcctcacctgctggggctggaggccatggatccctcatagtatccaaggtttgagttcctgtttttcgccttatagttttgtgagtgtttgagggacaacgaccaaaggtcttttccccaccatctttaaatcaaagttgtttaaaacaacattaattttaaaaaatacataaaagcaacccatgcttatggttaaaaaagagtacaggagtctggagtccgttgaagggtaaaggcctcccgcaagctgccagtcggctctttttcgcaaagccttccagaagttttctgtgcttatgaaagcgtatgtgtggcctttctcttcccttcttttattaaacacagataggtttatgctggataaa

SEQ ID NO: 168869 - DNA, 580 bp, Homo sapiens
  Payload ID: 13245
  Gene Symbol: PRELID3A
  Gene Name: PRELI domain containing 3A
  ENST ID: ENST00000587862
  CDS Start-End: 38-580
acttgagcctgggaggtttgagtctgcagtgaccctgatggcaccactgcattcctgcctgctgggcgacagagtgagaccctgtctcagacaaacaaaaaccaaggggctgccaggtgccgaggcgtgcagccacccgtgggacacggtcatccaggcggccatgcgcaagtacccgaacccgatgaacccgagcgtgctgggcgtggatgtgctacagcgccgcgtggacggccgcggccgcctgcacagcttgcgcctgctcagcaccgagtgggggctgcccagcctcgtgagagcgattttgggaaccagtaggacattgacatacatccgagaacattctgtggtggatccagtggaaaagaaaatggaactttgttctaccaatatcacactcacaaatttggtgtcagttaatgagaggttggtgtacacacctcatccagagaacccagaaatgaccgtgctcacacaagaagccatcatcactgtgaaggggattagccttggtagttatttggaaagtttaatggccaatacgatatcatccaatgcaaagaaggggtgggctgctatc

SEQ ID NO: 168870 - DNA, 2001 bp, Homo sapiens
  Payload ID: 13245
  Gene Symbol: PRELID3A
  Gene Name: PRELI domain containing 3A
  Uniprot ID: Q96N28
  ENST ID: ENST00000592149
  CDS Start-End: 424-879
aaaaaagtcattcaggtttggtggcacacgcctgtagtcccagctactggaggtggggcaagaggaggctgaggcaggatgttcacttgagcctgggaggtttgagtctgcagtgaccctgatggcaccactgcattcctgcctgctgggcgacagagtgagaccctgtctcagacaaacaaaaaccaaggggctgccaggtgccgaggcgtgcaggtgctgagccggcggccggggagggctcgcgggactcctcagatttgtcggaccagcctttcattaaagtgaagagactagcgcgttgcccaggcctggcggcggcttttcctccccttcacccttgcggccccggccccggcgcttgctcaccgccgcctatgctctccccgcagccacccgtgggacacggtcatccaggcggccatgcgcaagtacccgaacccgatgaacccgagcgtgctgggcgtggatgtgctacagcgccgcgtggacggccgcggccgcctgcacagcttgcgcctgctcagcaccgagtgggggctgcccagcctcgtgagagcgattttgggaaccagtaggacattgacatacatccgagaacattctgtggtggatccagtggaaaagaaaatggaactttgttctaccaatatcacactcacaaatttggtgtcagttaatgagaggttggtgtacacacctcatccagagaacccagaaatgaccgtgctcacacaagaagccatcatcactgtgaaggggattagccttggtagttatttggaaagtttaatggccaatacgatatcatccaatgcaaagaaggggtgggctgctatcgagtggataattgaacactctgaaagcgctgtgagctaaggaggcctgtgcctgtgcttgtcataaatggtgatgcttcccagaagaaaggaaagaaggaggtgaggagaggacgagcaaggacgggacggaaaagcacgtctggctgcgagggcacacagggccggggaggaggattaggctggactgatcgcgggtcgcaggtgaccccgggaccagatgtccctcccctcatgagcgtgcaacagggagcagccccagccagccccaccgccgccgtctgcgtggatggagggctcgaggccctcgcccgtgtcccttaggggcggcgcccatcgtcctgcctgccgcagtggcccagccccttctctccctgcaggtgacccgcgccgcccccgcccgcccgcccacgctgtcctccacttaggctcctccacaaacgctggcgggtgtgccgccctccagcctctccgcccccgtcccctcggtcctgcagatcaccaagcagctctcctgggcccgcggctgctccgggcctcacatctgctgctggcctcggtgggctctgactgcggggctcacggggcctggggccatggctttcttctcggcccccaaatgcctttcctggagtggctaagcctctcctgacgaggctcctcatgcggggagagggctggggtccaggggtttcccggccctttctgcaggctgtgccagccccctccagtctgccactgccgtgcccgggggacatcctgcgcccaggctggaggccctgcctcgctgcttgccagcctcacctgctggggctggaggccatggatccctcatagtatccaaggtttgagttcctgtttttcgccttatagttttgtgagtgtttgagggacaacgaccaaaggtcttttccccaccatctttaaatcaaagttgtttaaaacaacattaattttaaaaaatacataaaagcaacccatgcttatggttaaaaaagagtacaggagtctggagtccgttgaagggtaaaggcctcccgcaagctgccagtcggctctttttcgcaaagccttccagaagttttctgtgcttatgaaagcgtatgtgtggcctttctcttcccttcttttattaaacacagataggtttatgctggataaa

SEQ ID NO: 168871 - DNA, 777 bp, Homo sapiens
  Payload ID: 13245
  Gene Symbol: PRELID3A
  Gene Name: PRELI domain containing 3A
  ENST ID: ENST00000590956
  CDS Start-End: 182-430
cccgcccacgccgcgcccggagccgcgcggcccgaagcacccggcccggatcgcagagcccgcgccctgcgccggcggcaatgaagatctggagctcggagcacgtgtttggattttgggaaccagtaggacattgacatacatccgagaacattctgtggtggatccagtggaaaagaaaatggaactttgttctaccaatatcacactcacaaatttggtgtcagttaatgagaggttggtgtacacacctcatccagagaacccagaaatgaccgtgctcacacaagaagccatcatcactgtgaaggggattagccttggtagttatttggaaagtttaatggccaatacgatatcatccaatgcaaagaaggggtgggctgctatcgagtggataattgaacactctgaaagcgctgtgagctaaggaggcctgtgcctgtgcttgtcataaatggtgatgcttcccagaagaaaggaaagaaggaggtgaggagaggacgagcaaggacgggacggaaaagcacgtctggctgcgagggcacacagggccggggaggaggattaggctggactgatcgcgggtcgcaggtgaccccgggaccagatgtccctcccctcatgagcgtgcaacagggagcagccccagccagccccaccgccgccgtctgcgtggatggagggctcgaggccctcgcccgtgtcccttaggggcggcgcccatcgtcctgcctgccgcagtggcccagccccttctctccctgcaggtgaccc

SEQ ID NO: 168872 - DNA, 777 bp, Homo sapiens
  Payload ID: 13245
  Gene Symbol: PRELID3A
  Gene Name: PRELI domain containing 3A
  ENST ID: ENST00000589565
  CDS Start-End: 130-273
gcagagcccgcgccctgcgccggcggcaatgaagatctggagctcggagcacgtgtttggattttgggaaccagtaggacattgacatacatccgagaacattctgtggtggatccagtggaaaagaaaatggaactttgttctaccaatgctggagtgcagtggatctcagcaccctgcaacctccacttcatgggttcaagcgattctcctgtctcaccctcccaagtagctgggactacagatcacactcacaaatttggtgtcagttaatgagaggttggtgtacacacctcatccagagaacccagaaatgaccgtgctcacacaagaagccatcatcactgtgaaggggattagccttggtagttatttggaaagtttaatggccaatacgatatcatccaatgcaaagaaggggtgggctgctatcgagtggataattgaacactctgaaagcgctgtgagctaaggaggcctgtgcctgtgcttgtcataaatgatgcttcccagaagaaaggaaagaaggaggtgaggagaggacgagcaaggacgggacggaaaagcacgtctggctgcgagggcacacagggccggggaggaggattaggctggactgatcgcgggtcgcaggtgaccccgggaccagatgtccctcccctcatgagcgtgcaacagggagcagccccagccagccccaccgccgccgtctgcgtggatggagggctcgaggccctcgcccgtgtcccttaggggcggcgcccatcgtcctgcctg

SEQ ID NO: 168873 - DNA, 488 bp, Homo sapiens
  Payload ID: 13245
  Gene Symbol: PRELID3A
  Gene Name: PRELI domain containing 3A
  ENST ID: ENST00000589952
  CDS Start-End: 88-488
gcactccggcctgggtgacagagcaagactccgtctcaaacaaaaaagtcattcagccacccgtgggacacggtcatccaggcggccatgcgcaagtacccgaacccgatgaacccgagcgtgctgggcgtggatgtgctacagcgccgcgtggacggccgcggccgcctgcacagcttgcgcctgctcagcaccgagtgggggctgcccagcctcgtgagagcgattttgggaaccagtaggacattgacatacatccgagaacattctgtggtggatccagtggaaaagaaaatggaactttgttctaccaatatcacactcacaaatttggtgtcagttaatgagaggttggtgtacacacctcatccagagaacccagaaatgaccgtgctcacacaagaagccatcatcactgtgaaggggattagccttggtagttatttggaaagtttaatggccaatacgatatcatccaatgcaaagaa

SEQ ID NO: 168874 - DNA, 529 bp, Homo sapiens
  Payload ID: 13245
  Gene Symbol: PRELID3A
  Gene Name: PRELI domain containing 3A
  ENST ID: ENST00000588729
  CDS Start-End: 32-529
atcgcagagcccgcgccctgcgccggcggcaatgaagatctggagctcggagcacgtgtttgggcagaatcttgctctatcacccaggctggagtgcagtggcacgatcttggctcaccacaacctctgcctctccggttcaagcaattcttgtgcttcagcctcccgagtagctgggaccacaggcgtgtgccaccacgcctgccacccgtgggacacggtcatccaggcggccatgcgcaagtacccgaacccgatgaacccgagcgtgctgggcgtggatgtgctacagcgccgcgtggacggccgcggccgcctgcacagcttgcgcctgctcagcaccgagtgggggctgcccagcctcgtgagagcgattttgggaaccagtaggacattgacatacatccgagaacattctgtggtggatccagtggaaaagaaaatggaactttgttctaccaatatcacactcacaaatttggtgtcagttaatgagaggttggtgtacacacctcatccagagaaccca

SEQ ID NO: 168875 - DNA, 2626 bp, Homo sapiens
  Payload ID: 13246
  Gene Symbol: PRELID3B
  Gene Name: PRELI domain containing 3B
  Uniprot ID: Q9Y3B1
  ENST ID: ENST00000355937
  CDS Start-End: 180-764
aaaacccgggccgggatagggcgtggggccgcgcgtctggacgtccctcgcgtcgggcccgacagcgcctgcgcactgcgccgccggctggggtgctgggggcggggcaggggcaggtgtagcctctgtgcctcgttgtcccctggcgctacccggacatctctcagggtgccggcaccatgaagatctggacttcggagcacgtctttgaccacccgtgggaaactgttacaacagctgcaatgcagaaatacccaaaccctatgaacccaagtgtggttggagttgatgtgttggacagacatatagatccctctggaaagttgcacagccacagacttctcagcacagagtggggactgccttccattgtgaagtctcttattggtgcagcaagaacgaaaacatatgtgcaagaacattctgtagttgatcctgtagagaaaacaatggaacttaaatctactaatatttcatttacaaacatggtttcagtagatgagagacttatatacaaaccacatcctcaggatccagaaaaaactgttttgacacaagaagccataattaccgtgaaaggagttagcctcagcagttaccttgaaggactgatggcaagtacgatatcctcaaatgctagtaaaggccgagaagcaatggaatgggtaatacataaattaaatgctgagattgaagaactgacagcctcagcaagaggaaccataaggactccaatggcagcagcagcgtttgcagagaagtgatcgtgacagttggtagacaacatcgggtactccaggtctctccaaactgactatatatttatttgttattttaaaaatacaactatattttgggtagtttttttttttttttttttgataagttggtgtaaggctatgtgacttgatcaaaacagatgcagggcctctaaataaaagggatcatctgaaattaatgttgtttgaaattactatctgattttgagggttccagtatttctgtgaaaattcaacaagaactccttggaaactggtattgatattcagtctccttaaggtagatttttcaagcttttcatacattggaactccacctgactttggaccaaccccagaacagagcagagccacctcctatagacgcccattgccctgctgctgtacacttcagcagcttgcacaagggagctcacttaaaaggagaaattgtgtagttttaaaatatattttgtgtaaaataccttactatgctataaaccaccattaaaaaccagtgttttgatttggtacttaaatatttttggagtgaaaattatcactaaagtaacatgactccaacaaaagtatggtttcattataaaagagtactgtattgatttgcccaagttttgtaacttagtaaaggtattaacttccttggatttgtactttgtgatttagtatgctgtatcgtgggctggttatgttaactgaaaaaaataaagtcattacctgagttttgcagtgctctaacttaaacagaagaacagctgttcacatcttttagcattttacatttgcctaacttaaaaattgccatgtgtcaaaatcatggttttgtaattgctaaggcatgatatgtcaggttatttgaatataattactttttgaagtaattgtgaccacaaaacatcttttttacatgaaggagctgtgtatcatttgaaattactcaaatgatgtcttgctctgaggcataaatcccaggtacttagtgtttttaataatatggtgccactgcaggatttgggggcggtggggaagaacaagcataatggtagggggaggcttggcctgaaactaaccactgagtgaattgcactgcaggttttacttaacgggaattccttatttgggatgtcaagagggcagctgcaaactgaaaaacaatccagtaaatgtactttgttttatgtattgtagcaggcaattaactactaaataatagctttgacatttgcaattgttgcatagagactatttttgctagaagatgattagctcttgcctttattttacagtgcttagtgtgataaacttctagtcatgtttcctatccaagagaccagttaatatatgtacataaaccacagaaatagtataacacactatttttaaattatcgttttcctacttaaattttgtttagcttaagacttcttaggacatttgtaaaagcaggttaaatttaataaggtttctgatttttttttgtaaccggagatagtttttacaagtgaaataacatttcagctaaataaaacatcgctaaataattgatatttgatgaaaatctgctttgtataatttctgtaaattatccttgttctgaaaaaggtgtaatgccctaatatttttaaatccttatcctttgattttttaaaaactgacctattgataaaactataaattttcattttccagtgcagttagttacctttttaaacataaatgcacaacaagcaaatgaatttaagagaactaaactggaataagtgttcataaatgaaacccttggactatttaataaagttgaaatgtgaattaaggaaaacttttgttaataaaaactttcttttaagtga

SEQ ID NO: 168876 - DNA, 943 bp, Homo sapiens
  Payload ID: 13246
  Gene Symbol: PRELID3B
  Gene Name: PRELI domain containing 3B
  Uniprot ID: Q9Y3B1
  ENST ID: ENST00000371033
  CDS Start-End: 76-570
gggcaggggcaggtgtagcctctgtgcctcgttgtcccctggcgctacccggacatctctcagggtgccggcaccatgaagatctggacttcggagcacgtctttgaccacccgtgggaaactgttacaacagctgcaatgcagaaatacccaaaccctatgaacccaagtgtggttggagttgatgtgttggacagacatatagatccctctggaaagttgcacagccacagacttctcagcacagagtggggactgccttccattgtgaagtctatttcatttacaaacatggtttcagtagatgagagacttatatacaaaccacatcctcaggatccagaaaaaactgttttgacacaagaagccataattaccgtgaaaggagttagcctcagcagttaccttgaaggactgatggcaagtacgatatcctcaaatgctagtaaaggccgagaagcaatggaatgggtaatacataaattaaatgctgagattgaagaactgacagcctcagcaagaggaaccataaggactccaatggcagcagcagcgtttgcagagaagtgatcgtgacagttggtagacaacatcgggtactccaggtctctccaaactgactatatatttatttgttattttaaaaatacaactatattttgggtagtttttttttttttttttttgataagttggtgtaaggctatgtgacttgatcaaaacagatgcagggcctctaaataaaagggatcatctgaaattaatgttgtttgaaattactatctgattttgagggttccagtatttctgtgaaaattcaacaagaactccttggaaactggtattgatattcagtctccttaaggtagatttttcaagcttttcatacattggaactccacctgactttggaccaaccccagaacagagcagagccacctcc

SEQ ID NO: 168877 - DNA, 704 bp, Homo sapiens
  Payload ID: 13246
  Gene Symbol: PRELID3B
  Gene Name: PRELI domain containing 3B
  ENST ID: ENST00000463057
  CDS Start-End: 3-209
ccatgaagatctggacttcggagcacgtctttgaccacccgtgggaaactgttacaacagctgcaatgcagaaatacccaaaccctatgaacccaagtgtggttggagttgatgtgttggacagacatatagatccctctggaaagttgcacagccacagacttctcagcacagagtggggactgccttccattgtgaagtctttctgaatgttttacttagcttattggtgcagcaagaacgaaaacatatgtgcaagaacattctgtagttgatcctgtagagaaaacaatggaacttaaatctactaatatttcatttacaaacatggtttcagtagatgagagacttatatacaaaccacatcctcaggatccagaaaaaactgttttgacacaagaagccataattaccgtgaaaggagttagcctcagcagttaccttgaaggactgatggcaagtacgatatcctcaaatgctagtaaaggccgagaagcaatggaatgggtaatacataaattaaatgctgagattgaagaactgacagcctcagcaagaggaaccataaggactccaatggcagcagcagcgtttgcagagaagtgatcgtgacagttggtagacaacatcgggtactccaggtctctccaaactgactatatatttatttgttattttaaaaatacaactatattttgggtagt

SEQ ID NO: 168878 - DNA, 3941 bp, Homo sapiens
  Payload ID: 13247
  Gene Symbol: POF1B
  Gene Name: premature ovarian failure, 1B
  Uniprot ID: Q8WVV4
  ENST ID: ENST00000262753
  CDS Start-End: 147-1916
accatttcctggagcaatgtcacagggtggctccattttccatttgagctcaaatattttgctgcttcctctgtagctgccagacctgctcttgctgctgctcaggtagaacatctgggaggtcccttgctgaccactggaagaagatgagctcgagctattggagtgagacgagcagcagcagctgtggaacccagcagctcccagaggtgctgcagtgccagccccagcattaccactgctaccatcagtcaagccaagcccagcagcctccagaaaaaaatgtagtgtatgagcgagtgaggacctacagtgggcccatgaacaaggtggtgcaggccttggaccccttcaactcacgggaagtgctctcccctctcaaaaccacctcctcctaccaaaatttggtttggagcgaccattctcaggaactccattctccaactttaaaaatatctacatgtgccccaagtactctacatataacccaaaatactgaacaggaacttcattctccaacagtgaaacttactacatatccacagaccactattaggaaatatgtagtacaaaatcctgaacaggaaccactgtctcaattcctaagaggaagccatttcttcccaggaaacaatgttatttatgaaaaaacaataagaaaagtggagaagctaaatactgatcaggggtgccatcctcaggctcaatgccatcatcacattatccaacagccccaggtcatccactctgcacactggcaacaacctgattctagccagcaaatccaagccatcacaggaaataatccaatttctacacatattggaaatgaactgtgccatagtggatcaagccagatttgtgagcaggtgataattcaggatgatggccctgaaaaattggaccccagatattttggagagttgcttgctgatctgagccgtaagaatacggatctatatcactgcttattagaacatttgcagagaattggaggaagcaaacaggactttgagtctacagatgagtcggaagacattgaatcattgattcctaaaggattatcagagtttacaaaacagcaaatacgctacattctgcagatgaggggtatgtctgataagtcactccgactagtgctgtccacatttagcaacatacgggaggagcttggacatcttcaaaatgatatgacatcactggaaaatgacaagatgagacttgagaaagatttatcattcaaagacactcaattaaaagagtacgaagaactcttggcatcagtgagagcaaataatcaccagcagcagcaaggacttcaagactcaagttcaaaatgccaggcattggaagaaaacaatctctctcttcgacatacactatcagacatggaatacagactaaaagaactggaatattgtaaacgtaatttagagcaagagaatcaaaaccttagaatgcaggtttctgagacttgcacaggcccaatgttgcaggctaaaatggatgagattggcaaccactacacggagatggtaaaaaacttgagaatggagaaagatagagagatctgcagactgaggtcccaattaaaccagtaccataaagatgtttcaaagagagaaggaagttgtagtgacttccaatttaagcttcatgaactgacaagcttgctggaagagaaggattccctcataaagcgtcagtcagaggaactctccaagttgcggcaagaaatatattcctctcataaccaaccctccactggtggaaggactactattaccactaaaaagtacaggacacaatatccaatcctaggcctcctatatgatgactacgaatatataccaccaggtagtgaaacacagactattgtgattgagaaaacagaagacaaatacacttgtccatgaatggatccactttaaagtattacaactcaaagccgttttttttttgtgtgtgtgtctctgcattagtactttgttatttttccatcactaaaggccaatcagaatttggaaccatgctgctacccaagaaatctaatggaatgaattagttctgtagatgacaatttcttcacccatttatgagacctaaatcttttccataacactcatgtattcagtataacaacatactaactgaaagagggacctgattgtttaaagtttgattgcagacactgtagaacataactcattatgtttcagataaggtaactcctagatatcaaactaatttgttggggtagagattttacaagtcatgccattagaagattttctctgatattatatgtgcagttcagttacaagatgaaatcatgtttttttaacaaaagagataaaatacaattgaagcaaaaaataacagctagtatataatatatacagtctgtatttgcttttcacagtaggcctgatgactaaaagatatgctttattacacgctattttcacctcttgaaagtcaaaggtgatgattaatttcatttagcagggaagtggaataatatcttttgaaataactaagtccactaaattatacagtatgctattctggttctaagtacatattagtcccttggcaaatctgttctttcaaagcataccttccccaaatgagcctacctacttcttaaaaaacatataacacaatgtggtagtagtaggtgtaaggaaggtaagttttttcatagtggtatgcaaacatatcattgaaatattacatagatataaagacttagggaataaaaatagcagcaacaaatacttgatagatttatcctacttgggagaaatattttgtagcagagtatttagtatacttagaagttgatttagcaattaggctttaatgaccttacaaagtgaacataactgaacacaagtattttttcaatgcaagatgaggatgaaaattttacatttcaacccatctggctaaagttaagacttagcaaaaattaaaatgttgcctttgtccaagtatagattaaggcaacaaacatatttgggtgtgtaatttgaagttttggactgaaatatctttgcaagtatccacataaaattctgtaatgccttataattatattctaataattatgcattatactaagacaccattaagaacagttgaggcactacactaaatcaaaccataaatgaggaaaaaacttttaatgttcttttctagaagtgttcaaataggtcttgatatgaagctaaaagccttatttatattatcttaatatttcggctaaaatgttaagctccataacatgaattgatacaattccaattttatcaatattttgtgatagaaaaatgttaatattattcatgagctatacagtccttacattttttcccttggtgtaggaacaacggaggagtttctcctctgctaactattcatatatgtaactgtaacaaaagtgtactatgttatgcacacattacaaataatataaggggaagttttattagcttagtaggaaattgttattattaaggtttaaaaatgagaacaggtgtgagttttccaaaatacttaaaaataatagtgtcaaaaattcaggggcagttaaggagtcatggatggaactagaggtcactatattaagtgacataagccagaaacagacaaacattgcatgttctcaattatttgcgggatctaaaagtcaaaacaattgaactcatggatatagagagtagaaggatggttactagtggctgggaaaaggggtgtgcgaggggaactggggatgcttaatgtgtacaaaaactatgtagttagaaagtataaataagacctagtatttgatagcacaaccgggtgagtatagtcaataatagcttaattgtacaaataactaagagtataattggattgtttgtaacacaaataaatacttgagtggatggata

SEQ ID NO: 168879 - DNA, 1972 bp, Homo sapiens
  Payload ID: 13247
  Gene Symbol: POF1B
  Gene Name: premature ovarian failure, 1B
  Uniprot ID: Q8WVV4
  ENST ID: ENST00000373145
  CDS Start-End: 121-1908
gtggctccattttccatttgagctcaaatattttgctgcttcctctgtagctgccagacctgctcttgctgctgctcaggtagaacatctgggaggtcccttgctgaccactggaagaagatgagctcgagctattggagtgagacgagcagcagcagctgtggaacccagcagctcccagaggtgctgcagtgccagccccagcattaccactgctaccatcagtcaagccaagcccagcagcctccagaaaaaaatgtagtgtatgagcgagtgaggacctacagtgggcccatgaacaaggtggtgcaggccttggaccccttcaactcacgggaagtgctctcccctctcaaaaccacctcctcctaccaaaatttggtttggagcgaccattctcaggaactccattctccaactttaaaaatatctacatgtgccccaagtactctacatataacccaaaatactgaacaggaacttcattctccaacagtgaaacttactacatatccacagaccactattaggaaatatgtagtacaaaatcctgaacaggaaccactgtctcaattcctaagaggaagccatttcttcccaggaaacaatgttatttatgaaaaaacaataagaaaagtggagaagctaaatactgatcaggggtgccatcctcaggctcaatgccatcatcacattatccaacagccccaggtcatccactctgcacactggcaacaacctgattctagccagcaaatccaagccatcacaggaaataatccaatttctacacatattggaaatgaactgtgccatagtggatcaagccagatttgtgagcaggtgataattcaggatgatggccctgaaaaattggaccccagatattttggagagttgcttgctgatctgagccgtaagaatacggatctatatcactgcttattagaacatttgcagagaattggaggaagcaaacaggactttgagtctacagatgagtcggaagacattgaatcattgattcctaaaggattatcagagtttacaaaacagcaaatacgctacattctgcagatgaggggtatgtctgataagtcactccgactagtgctgtccacatttagcaacatacgggaggagcttggacatcttcaaaatgatatgacatcactggaaaatgacaagatgagacttgagaaagatttatcattcaaagacactcaattaaaagagtacgaagaactcttggcatcagtgagagcaaataatcaccagcagcagcaaggacttcaagactcaagttcaaaatgccaggcattggaagaaaacaatctctctcttcgacatacactatcagacatggaatacagactaaaagaactggaatattgtaaacgtaatttagagcaagagaatcaaaaccttagaatgcaggtttctgagacttgcacaggcccaatgttgcaggctaaaatggatgagattggcaaccactacacggagatggtaaaaaacttgagaatggagaaagatagagagatctgcagactgaggtcccaattaaaccagtaccataaagatgtttcaaagagagaaggaagttgtagtgacttccaatttaagcttcatgaactgacaagcttgctggaagagaaggattccctcataaagcgtcagtcagaggaactctccaagttgcggcaagaaatatattcctctcataaccaaccctccactggtggaaggactactattaccactaaaaagtacaggacacaatatccaatcctaggcctcctatatgatgactacgaatatataccaccaggtagtgaaacacagactattgtgattgagaaaacagaagacaaatacacttgtgtaagttcacttgggcatttttagccctattttgacgatatatgtacagccttttaaaattgaggtaaaatatcaaatgaactaaaaa

SEQ ID NO: 168880 - DNA, 2127 bp, Homo sapiens
  Payload ID: 13248
  Gene Symbol: PMEL
  Gene Name: premelanosome protein
  Uniprot ID: P40967
  ENST ID: ENST00000449260
  CDS Start-End: 12-2018
ggaagaacacaatggatctggtgctaaaaagatgccttcttcatttggctgtgataggtgctttgctggctgtgggggctacaaaagtacccagaaaccaggactggcttggtgtctcaaggcaactcagaaccaaagcctggaacaggcagctgtatccagagtggacagaagcccagagacttgactgctggagaggtggtcaagtgtccctcaaggtcagtaatgatgggcctacactgattggtgcaaatgcctccttctctattgccttgaacttccctggaagccaaaaggtattgccagatgggcaggttatctgggtcaacaataccatcatcaatgggagccaggtgtggggaggacagccagtgtatccccaggaaactgacgatgcctgcatcttccctgatggtggaccttgcccatctggctcttggtctcagaagagaagctttgtttatgtctggaagacctggggccaatactggcaagttctagggggcccagtgtctgggctgagcattgggacaggcagggcaatgctgggcacacacaccatggaagtgactgtctaccatcgccggggatcccggagctatgtgcctcttgctcattccagctcagccttcaccattactgaccaggtgcctttctccgtgagcgtgtcccagttgcgggccttggatggagggaacaagcacttcctgagaaatcagcctctgacctttgccctccagctccatgaccccagtggctatctggctgaagctgacctctcctacacctgggactttggagacagtagtggaaccctgatctctcgggcacttgtggtcactcatacttacctggagcctggcccagtcactgcccaggtggtcctgcaggctgccattcctctcacctcctgtggctcctccccagttccaggcaccacagatgggcacaggccaactgcagaggcccctaacaccacagctggccaagtgcctactacagaagttgtgggtactacacctggtcaggcgccaactgcagagccctctggaaccacatctgtgcaggtgccaaccactgaagtcataagcactgcacctgtgcagatgccaactgcagagagcacaggtatgacacctgagaaggtgccagtttcagaggtcatgggtaccacactggcagagatgtcaactccagaggctacaggtatgacacctgcagaggtatcaattgtggtgctttctggaaccacagctgcacaggtaacaactacagagtgggtggagaccacagctagagagctacctatccctgagcctgaaggtccagatgccagctcaatcatgtctacggaaagtattacaggttccctgggccccctgctggatggtacagccaccttaaggctggtgaagagacaagtccccctggattgtgttctgtatcgatatggttccttttccgtcaccctggacattgtccagggtattgaaagtgccgagatcctgcaggctgtgccgtccggtgagggggatgcatttgagctgactgtgtcctgccaaggcgggctgcccaaggaagcctgcatggagatctcatcgccagggtgccagccccctgcccagcggctgtgccagcctgtgctacccagcccagcctgccagctggttctgcaccagatactgaagggtggctcggggacatactgcctcaatgtgtctctggctgataccaacagcctggcagtggtcagcacccagcttatcatgcctgtgcctgggattcttctcacaggtcaagaagcaggccttgggcaggttccgctgatcgtgggcatcttgctggtgttgatggctgtggtccttgcatctctgatatataggcgcagacttatgaagcaagacttctccgtaccccagttgccacatagcagcagtcactggctgcgtctaccccgcatcttctgctcttgtcccattggtgagaacagccccctcctcagtgggcagcaggtctgagtactctcatatgatgctgtgattttcctggagttgacagaaacacctatatttcccccagtcttccctgggagactactattaactgaaataaatactcagagcctga

SEQ ID NO: 168881 - DNA, 568 bp, Homo sapiens
  Payload ID: 13248
  Gene Symbol: PMEL
  Gene Name: premelanosome protein
  ENST ID: ENST00000549418
  CDS Start-End: 116-568
aagtttggttcttgggggctagacaagtttcttccccggtggggcggctgaacactcttcccaagggcctatcccagtccccccagtgcctttggttgctggagggaagaacacaatggatctggtgctaaaaagatgccttcttcatttggctgtgataggtgctttgctggctgtgggggctacaaaagtacccagaaaccaggactggcttggtgtctcaaggcaactcagaaccaaagcctggaacaggcagctgtatccagagtggacagaagcccagagacttgactgctggagaggtggtcaagtgtccctcaaggtcagtaatgatgggcctacactgattggtgcaaatgcctccttctctattgccttgaacttccctggaagccaaaaggtattgccagatgggcaggttatctgggtcaacaataccatcatcaatgggagccaggtgtggggaggacagccagtgtatccccaggaaactgacgatgcctgcatcttccctgatggtggaccttgcccatctggctcttggtctcagaagagaagctttgtttat

SEQ ID NO: 168882 - DNA, 912 bp, Homo sapiens
  Payload ID: 13248
  Gene Symbol: PMEL
  Gene Name: premelanosome protein
  ENST ID: ENST00000546543
  CDS Start-End: 16-912
ggagggaagaacacaatggatctggtgctaaaaagatgccttcttcatttggctgtgataggtgctttgctggctgtgggggctacaaaagtacccagaaaccaggactggcttggtgtctcaaggcaactcagaaccaaagcctggaacaggcagctgtatccagagtggacagaagcccagagacttgactgctggagagggagccaggtgtggggaggacagccagtgtatccccaggaaactgacgatgcctgcatcttccctgatggtggaccttgcccatctggctcttggtctcagaagagaagctttgtttatgtctggaagacctggggccaatactggcaagttctagggggcccagtgtctgggctgagcattgggacaggcagggcaatgctgggcacacacaccatggaagtgactgtctaccatcgccggggatcccggagctatgtgcctcttgctcattccagctcagccttcaccattactgaccaggtgcctttctccgtgagcgtgtcccagttgcgggccttggatggagggaacaagcacttcctgagaaatcagcctctgacctttgccctccagctccatgaccccagtggctatctggctgaagctgacctctcctacacctgggactttggagacagtagtggaaccctgatctctcgggcacttgtggtcactcatacttacctggagcctggcccagtcactgcccaggtggtcctgcaggctgccattcctctcacctcctgtggctcctccccagttccaggcaccacagatgggcacaggccaactgcagaggcccctaacaccacagctggccaagtgcctactacagaagttgtgggtactacacctggtcaggcgccaactgcagagccctctggaacc

SEQ ID NO: 168883 - DNA, 2204 bp, Homo sapiens
  Payload ID: 13248
  Gene Symbol: PMEL
  Gene Name: premelanosome protein
  Uniprot ID: P40967
  ENST ID: ENST00000548493
  CDS Start-End: 111-2096
tcaacgtcagagccggggggcgagcccagcgctcctccccgcaaatgatcccgccccaggggcctatcccagtccccccagtgcctttggttgctggagggaagaacacaatggatctggtgctaaaaagatgccttcttcatttggctgtgataggtgctttgctggctgtgggggctacaaaagtacccagaaaccaggactggcttggtgtctcaaggcaactcagaaccaaagcctggaacaggcagctgtatccagagtggacagaagcccagagacttgactgctggagaggtggtcaagtgtccctcaaggtcagtaatgatgggcctacactgattggtgcaaatgcctccttctctattgccttgaacttccctggaagccaaaaggtattgccagatgggcaggttatctgggtcaacaataccatcatcaatgggagccaggtgtggggaggacagccagtgtatccccaggaaactgacgatgcctgcatcttccctgatggtggaccttgcccatctggctcttggtctcagaagagaagctttgtttatgtctggaagacctggggccaatactggcaagttctagggggcccagtgtctgggctgagcattgggacaggcagggcaatgctgggcacacacaccatggaagtgactgtctaccatcgccggggatcccggagctatgtgcctcttgctcattccagctcagccttcaccattactgaccaggtgcctttctccgtgagcgtgtcccagttgcgggccttggatggagggaacaagcacttcctgagaaatcagcctctgacctttgccctccagctccatgaccccagtggctatctggctgaagctgacctctcctacacctgggactttggagacagtagtggaaccctgatctctcgggcacttgtggtcactcatacttacctggagcctggcccagtcactgcccaggtggtcctgcaggctgccattcctctcacctcctgtggctcctccccagttccaggcaccacagatgggcacaggccaactgcagaggcccctaacaccacagctggccaagtgcctactacagaagttgtgggtactacacctggtcaggcgccaactgcagagccctctggaaccacatctgtgcaggtgccaaccactgaagtcataagcactgcacctgtgcagatgccaactgcagagagcacaggtatgacacctgagaaggtgccagtttcagaggtcatgggtaccacactggcagagatgtcaactccagaggctacaggtatgacacctgcagaggtatcaattgtggtgctttctggaaccacagctgcacaggtaacaactacagagtgggtggagaccacagctagagagctacctatccctgagcctgaaggtccagatgccagctcaatcatgtctacggaaagtattacaggttccctgggccccctgctggatggtacagccaccttaaggctggtgaagagacaagtccccctggattgtgttctgtatcgatatggttccttttccgtcaccctggacattgtccagggtattgaaagtgccgagatcctgcaggctgtgccgtccggtgagggggatgcatttgagctgactgtgtcctgccaaggcgggctgcccaaggaagcctgcatggagatctcatcgccagggtgccagccccctgcccagcggctgtgccagcctgtgctacccagcccagcctgccagctggttctgcaccagatactgaagggtggctcggggacatactgcctcaatgtgtctctggctgataccaacagcctggcagtggtcagcacccagcttatcatgcctggtcaagaagcaggccttgggcaggttccgctgatcgtgggcatcttgctggtgttgatggctgtggtccttgcatctctgatatataggcgcagacttatgaagcaagacttctccgtaccccagttgccacatagcagcagtcactggctgcgtctaccccgcatcttctgctcttgtcccattggtgagaacagccccctcctcagtgggcagcaggtctgagtactctcatatgatgctgtgattttcctggagttgacagaaacacctatatttcccccagtcttccctgggagactactattaactgaaataaatactcagagcctg

SEQ ID NO: 168884 - DNA, 895 bp, Homo sapiens
  Payload ID: 13248
  Gene Symbol: PMEL
  Gene Name: premelanosome protein
  ENST ID: ENST00000548803
  CDS Start-End: 8-895
gaacacaatggatctggtgctaaaaagatgccttcttcatttggctgtgataggtgctttgctggctgtgggggctacaaaagtacccagaaaccaggactggcttggtgtctcaaggcaactcagaaccaaagcctggaacaggcagctgtatccagagtggacagaagcccagagacttgactgctggagaggtggtcaagtgtccctcaaggtcagtaatgatgggcctacactgattggtgcaaatgcctccttctctattgccttgaacttccctggaagccaaaaggtattgccagatgggcaggttatctgggtcaacaataccatcatcaatgggagccaggtgtggggaggacagccagtgtatccccaggaaactgacgatgcctgcatcttccctgatggtggaccttgcccatctggctcttggtctcagaagagaagctttgtttatgtctggaagacctgggttccaggcaccacagatgggcacaggccaactgcagaggcccctaacaccacagctggccaagtgcctactacagaagttgtgggtactacacctggtcaggcgccaactgcagagccctctggaaccacatctgtgcaggtgccaaccactgaagtcataagcactgcacctgtgcagatgccaactgcagagagcacagctgcacaggtaacaactacagagtgggtggagaccacagctagagagctacctatccctgagcctgaaggtccagatgccagctcaatcatgtctacggaaagtattacaggttccctgggccccctgctggatggtacagccaccttaaggctggtgaagagacaagtccccctggattgtgttctgtatcgatatggttccttttccgtcaccctg

SEQ ID NO: 168885 - DNA, 901 bp, Homo sapiens
  Payload ID: 13248
  Gene Symbol: PMEL
  Gene Name: premelanosome protein
  ENST ID: ENST00000550447
  CDS Start-End: 15-887
gagggaagaacacaatggatctggtgctaaaaagatgccttcttcatttggctgtgataggtgctttgctggctgtgggggctacaaaaggtggtcaagtgtccctcaaggtcagtaatgatgggcctacactgattggtgcaaatgcctccttctctattgccttgaacttccctggaagccaaaaggtattgccagatgggcaggttatctgggtcaacaataccatcatcaatgggagccaggtgtggggaggacagccagtgtatccccaggaaactgacgatgcctgcatcttccctgatggtggaccttgcccatctggctcttggtctcagaagagaagctttgtttatgtctggaagacctgggagggtattgaaagtgccgagatcctgcaggctgtgccgtccggtgagggggatgcatttgagctgactgtgtcctgccaaggcgggctgcccaaggaagcctgcatggagatctcatcgccagggtgccagccccctgcccagcggctgtgccagcctgtgctacccagcccagcctgccagctggttctgcaccagatactgaagggtggctcggggacatactgcctcaatgtgtctctggctgataccaacagcctggcagtggtcagcacccagcttatcatgcctggtcaagaagcaggccttgggcaggttccgctgatcgtgggcatcttgctggtgttgatggctgtggtccttgcatctctgatatataggcgcagacttatgaagcaagacttctccgtaccccagttgccacatagcagcagtcactggctgcgtctaccccgcatcttctgctcttgtcccattggtgagaacagccccctcctcagtgggcagcaggtctgagtactctcatatga

SEQ ID NO: 168886 - DNA, 2757 bp, Homo sapiens
  Payload ID: 13248
  Gene Symbol: PMEL
  Gene Name: premelanosome protein
  Uniprot ID: P40967
  ENST ID: ENST00000548747
  CDS Start-End: 664-2649
agtttggttcttgggggctagacaagtttcttccccggtggggcggctgaacactcttcccaagtacctgctttgggtccaagtttcctacctatgtctctagtctgtagggatttcttgatttctaactcactattttcaccaatcctggggaaaatatgtatcgacctaaggttaaattccacctggcccaggagcctcctttggaaaccaggaagccgggaatctcgttgcaaaggaatcctgggcctcagaggagtcgttgcctctgcctcatagcataccccgacactgtctctgttttgggatgcagggttctgtttctgtctttttgagaagttcctggtttaattcactctcccatgataaactgttgtgtctggtatgtgttacgcagctgcctttcagttagctcttgcccgggagtgcatcaagatgagagtgacccagtgaaaccagaaactgtcattgagtagcaggatgggaaagcaatgtctagggaccaggatccctttgtcagtttttcctttttcctctcctccggcccctcccaggccttctctgagggagaagaggaagggctatgcaaatgagcacccttttcttatataggggcctatcccagtccccccagtgcctttggttgctggagggaagaacacaatggatctggtgctaaaaagatgccttcttcatttggctgtgataggtgctttgctggctgtgggggctacaaaagtacccagaaaccaggactggcttggtgtctcaaggcaactcagaaccaaagcctggaacaggcagctgtatccagagtggacagaagcccagagacttgactgctggagaggtggtcaagtgtccctcaaggtcagtaatgatgggcctacactgattggtgcaaatgcctccttctctattgccttgaacttccctggaagccaaaaggtattgccagatgggcaggttatctgggtcaacaataccatcatcaatgggagccaggtgtggggaggacagccagtgtatccccaggaaactgacgatgcctgcatcttccctgatggtggaccttgcccatctggctcttggtctcagaagagaagctttgtttatgtctggaagacctggggccaatactggcaagttctagggggcccagtgtctgggctgagcattgggacaggcagggcaatgctgggcacacacaccatggaagtgactgtctaccatcgccggggatcccggagctatgtgcctcttgctcattccagctcagccttcaccattactgaccaggtgcctttctccgtgagcgtgtcccagttgcgggccttggatggagggaacaagcacttcctgagaaatcagcctctgacctttgccctccagctccatgaccccagtggctatctggctgaagctgacctctcctacacctgggactttggagacagtagtggaaccctgatctctcgggcacttgtggtcactcatacttacctggagcctggcccagtcactgcccaggtggtcctgcaggctgccattcctctcacctcctgtggctcctccccagttccaggcaccacagatgggcacaggccaactgcagaggcccctaacaccacagctggccaagtgcctactacagaagttgtgggtactacacctggtcaggcgccaactgcagagccctctggaaccacatctgtgcaggtgccaaccactgaagtcataagcactgcacctgtgcagatgccaactgcagagagcacaggtatgacacctgagaaggtgccagtttcagaggtcatgggtaccacactggcagagatgtcaactccagaggctacaggtatgacacctgcagaggtatcaattgtggtgctttctggaaccacagctgcacaggtaacaactacagagtgggtggagaccacagctagagagctacctatccctgagcctgaaggtccagatgccagctcaatcatgtctacggaaagtattacaggttccctgggccccctgctggatggtacagccaccttaaggctggtgaagagacaagtccccctggattgtgttctgtatcgatatggttccttttccgtcaccctggacattgtccagggtattgaaagtgccgagatcctgcaggctgtgccgtccggtgagggggatgcatttgagctgactgtgtcctgccaaggcgggctgcccaaggaagcctgcatggagatctcatcgccagggtgccagccccctgcccagcggctgtgccagcctgtgctacccagcccagcctgccagctggttctgcaccagatactgaagggtggctcggggacatactgcctcaatgtgtctctggctgataccaacagcctggcagtggtcagcacccagcttatcatgcctggtcaagaagcaggccttgggcaggttccgctgatcgtgggcatcttgctggtgttgatggctgtggtccttgcatctctgatatataggcgcagacttatgaagcaagacttctccgtaccccagttgccacatagcagcagtcactggctgcgtctaccccgcatcttctgctcttgtcccattggtgagaacagccccctcctcagtgggcagcaggtctgagtactctcatatgatgctgtgattttcctggagttgacagaaacacctatatttcccccagtcttccctgggagactactattaactgaaataaatactcagagcctg

SEQ ID NO: 168887 - DNA, 1047 bp, Homo sapiens
  Payload ID: 13248
  Gene Symbol: PMEL
  Gene Name: premelanosome protein
  ENST ID: ENST00000547137
  CDS Start-End: 16-1047
ggagggaagaacacaatggatctggtgctaaaaagatgccttcttcatttggctgtgataggtgctttgctggctgtgggggctacaaaagtacccagaaaccaggactggcttggtgtctcaaggcaactcagaaccaaagcctggaacaggcagctgtatccagagtggacagaagcccagagacttgactgctggagaggtggtcaagtgtccctcaaggtcagtaatgatgggcctacactgattggtgcaaatgcctccttctctattgccttgaacttccctggaagccaaaaggtattgccagatgggcaggttatctgggtcaacaataccatcatcaatgggagccaggtgtggggaggacagccagtgtatccccaggaaactgacgatgcctgcatcttccctgatggtggaccttgcccatctggctcttggtctcagaagagaagctttgtttatgtctggaagacctgggaccaggtgcctttctccgtgagcgtgtcccagttgcgggccttggatggagggaacaagcacttcctgagaaatcagcctctgacctttgccctccagctccatgaccccagtggctatctggctgaagctgacctctcctacacctgggactttggagacagtagtggaaccctgatctctcgggcacttgtggtcactcatacttacctggagcctggcccagtcactgcccaggtggtcctgcaggctgccattcctctcacctcctgtggctcctccccagttccaggcaccacagatgggcacaggccaactgcagaggcccctaacaccacagctggccaagtgcctactacagaagttgtgggtactacacctggtcaggcgccaactgcagagccctctggaaccacatctgtgcaggtgccaaccactgaagtcataagcactgcacctgtgcagatgccaactgcagagagcacaggtatgacacctgagaaggtgccagtttcagaggtcatgggtaccacactggcagagatgtcaactccagaggctaca

SEQ ID NO: 168888 - DNA, 573 bp, Homo sapiens
  Payload ID: 13248
  Gene Symbol: PMEL
  Gene Name: premelanosome protein
  ENST ID: ENST00000549233
  CDS Start-End: 170-573
ggaaaacttttctgtctgtgatatgaaacagaaaggaaaaacggcgggcttactgggaaatgcagtgtcgaaagagttggctggccaagactagaagagtccgaaagatccggaagagctggtcaatctcagaatctccagggaatagggcccggcgagtcacctgaaaatggggaaagaggaaataccaagacccacgttgacgtcagtcaaaactctcctctatacaaaggagttcccacagacagtaaaagtacccagaaaccaggactggcttggtgtctcaaggcaactcagaaccaaagcctggaacaggcagctgtatccagagtggacagaagcccagagacttgactgctggagaggtggtcaagtgtccctcaaggtcagtaatgatgggcctacactgattggtgcaaatgcctccttctctattgccttgaacttccctggaagccaaaaggtattgccagatgggcaggttatctgggtcaacaataccatcatcaatgggagccaggtgtggggaggacagccagtgtatccccaggaaactgacgatgcctgcatctt

SEQ ID NO: 168889 - DNA, 1355 bp, Homo sapiens
  Payload ID: 13248
  Gene Symbol: PMEL
  Gene Name: premelanosome protein
  ENST ID: ENST00000549404
  CDS Start-End: 1-1355
ccaggtgtggggaggacagccagtgtatccccaggaaactgacgatgcctgcatcttccctgatggtggaccttgcccatctggctcttggtctcagaagagaagctttgtttatgtctggaagacctggggccaatactggcaagttctagggggcccagtgtctgggctgagcattgggacaggcagggcaatgctgggcacacacaccatggaagtgactgtctaccatcgccggggatcccggagctatgtgcctcttgctcattccagctcagccttcaccattactgaccaggtgcctttctccgtgagcgtgtcccagttgcgggccttggatggagggaacaagcacttcctgagaaatcagcctctgacctttgccctccagctccatgaccccagtggctatctggctgaagctgacctctcctacacctgggactttggagacagtagtggaaccctgatctctcgggcacttgtggtcactcatacttacctggagcctggcccagtcactgcccaggtggtcctgcaggctgccattcctctcacctcctgtggctcctccccagttccaggcaccacagatgggcacaggccaactgcagaggcccctaacaccacagctggccaagtgcctactacagaagttgtgggtactacacctggtcaggcgccaactgcagagccctctggaaccacatctgtgcaggtgccaaccactgaagtcataagcactgcacctgtgcagatgccaactgcagagagcacagctgcacaggtaacaactacagagtgggtggagaccacagctagagagctacctatccctgagcctgaaggtccagatgccagctcaatcatgtctacggaaagtattacaggttccctgggccccctgctggatggtacagccaccttaaggctggtgaagagacaagtccccctggattgtgttctgtatcgatatggttccttttccgtcaccctggacattgtccagggtattgaaagtgccgagatcctgcaggctgtgccgtccggtgagggggatgcatttgagctgactgtgtcctgccaaggcgggctgcccaaggaagcctgcatggagatctcatcgccagggtgccagccccctgcccagcggctgtgccagcctgtgctacccagcccagcctgccagctggttctgcaccagatactgaagggtggctcggggacatactgcctcaatgtgtctctggctgataccaacagcctggcagtggtcagcacccagcttatcatgcctgtgcctgggattcttctcacaggtcaagaagcaggccttgggcaggttccgctgatcg

SEQ ID NO: 168890 - DNA, 2516 bp, Homo sapiens
  Payload ID: 13248
  Gene Symbol: PMEL
  Gene Name: premelanosome protein
  Uniprot ID: P40967
  ENST ID: ENST00000552882
  CDS Start-End: 422-2407
gggggctagacaagtttcttccccggtggggcggctgaacactcttcccaagtacctgctttgggtccaagtttcctacctatgtctctagtctgtagggatttcttgatttctaactcactattttcaccaatcctggggaaaatatgtatcgacctaaggttaaattccacctggcccaggagcctcctttggaaaccaggaagccgggaatctcgttgcaaaggaatcctgggcctcagaggagtcgttgcctctgcctcatagcataccccgacactgtctctgttttgggatgcagggttctgtttctgtctttttgagaagttcctggtttaattcactctcccatgataaactgttgtgtctggggcctatcccagtccccccagtgcctttggttgctggagggaagaacacaatggatctggtgctaaaaagatgccttcttcatttggctgtgataggtgctttgctggctgtgggggctacaaaagtacccagaaaccaggactggcttggtgtctcaaggcaactcagaaccaaagcctggaacaggcagctgtatccagagtggacagaagcccagagacttgactgctggagaggtggtcaagtgtccctcaaggtcagtaatgatgggcctacactgattggtgcaaatgcctccttctctattgccttgaacttccctggaagccaaaaggtattgccagatgggcaggttatctgggtcaacaataccatcatcaatgggagccaggtgtggggaggacagccagtgtatccccaggaaactgacgatgcctgcatcttccctgatggtggaccttgcccatctggctcttggtctcagaagagaagctttgtttatgtctggaagacctggggccaatactggcaagttctagggggcccagtgtctgggctgagcattgggacaggcagggcaatgctgggcacacacaccatggaagtgactgtctaccatcgccggggatcccggagctatgtgcctcttgctcattccagctcagccttcaccattactgaccaggtgcctttctccgtgagcgtgtcccagttgcgggccttggatggagggaacaagcacttcctgagaaatcagcctctgacctttgccctccagctccatgaccccagtggctatctggctgaagctgacctctcctacacctgggactttggagacagtagtggaaccctgatctctcgggcacttgtggtcactcatacttacctggagcctggcccagtcactgcccaggtggtcctgcaggctgccattcctctcacctcctgtggctcctccccagttccaggcaccacagatgggcacaggccaactgcagaggcccctaacaccacagctggccaagtgcctactacagaagttgtgggtactacacctggtcaggcgccaactgcagagccctctggaaccacatctgtgcaggtgccaaccactgaagtcataagcactgcacctgtgcagatgccaactgcagagagcacaggtatgacacctgagaaggtgccagtttcagaggtcatgggtaccacactggcagagatgtcaactccagaggctacaggtatgacacctgcagaggtatcaattgtggtgctttctggaaccacagctgcacaggtaacaactacagagtgggtggagaccacagctagagagctacctatccctgagcctgaaggtccagatgccagctcaatcatgtctacggaaagtattacaggttccctgggccccctgctggatggtacagccaccttaaggctggtgaagagacaagtccccctggattgtgttctgtatcgatatggttccttttccgtcaccctggacattgtccagggtattgaaagtgccgagatcctgcaggctgtgccgtccggtgagggggatgcatttgagctgactgtgtcctgccaaggcgggctgcccaaggaagcctgcatggagatctcatcgccagggtgccagccccctgcccagcggctgtgccagcctgtgctacccagcccagcctgccagctggttctgcaccagatactgaagggtggctcggggacatactgcctcaatgtgtctctggctgataccaacagcctggcagtggtcagcacccagcttatcatgcctggtcaagaagcaggccttgggcaggttccgctgatcgtgggcatcttgctggtgttgatggctgtggtccttgcatctctgatatataggcgcagacttatgaagcaagacttctccgtaccccagttgccacatagcagcagtcactggctgcgtctaccccgcatcttctgctcttgtcccattggtgagaacagccccctcctcagtgggcagcaggtctgagtactctcatatgatgctgtgattttcctggagttgacagaaacacctatatttcccccagtcttccctgggagactactattaactgaaataaatactcagagcctga

SEQ ID NO: 168891 - DNA, 1867 bp, Homo sapiens
  Payload ID: 13248
  Gene Symbol: PMEL
  Gene Name: premelanosome protein
  Uniprot ID: P40967
  ENST ID: ENST00000550464
  CDS Start-End: 32-1759
agtgcctttggttgctggagggaagaacacaatggatctggtgctaaaaagatgccttcttcatttggctgtgataggtgctttgctggctgtgggggctacaaaagggagccaggtgtggggaggacagccagtgtatccccaggaaactgacgatgcctgcatcttccctgatggtggaccttgcccatctggctcttggtctcagaagagaagctttgtttatgtctggaagacctggggccaatactggcaagttctagggggcccagtgtctgggctgagcattgggacaggcagggcaatgctgggcacacacaccatggaagtgactgtctaccatcgccggggatcccggagctatgtgcctcttgctcattccagctcagccttcaccattactgaccaggtgcctttctccgtgagcgtgtcccagttgcgggccttggatggagggaacaagcacttcctgagaaatcagcctctgacctttgccctccagctccatgaccccagtggctatctggctgaagctgacctctcctacacctgggactttggagacagtagtggaaccctgatctctcgggcacttgtggtcactcatacttacctggagcctggcccagtcactgcccaggtggtcctgcaggctgccattcctctcacctcctgtggctcctccccagttccaggcaccacagatgggcacaggccaactgcagaggcccctaacaccacagctggccaagtgcctactacagaagttgtgggtactacacctggtcaggcgccaactgcagagccctctggaaccacatctgtgcaggtgccaaccactgaagtcataagcactgcacctgtgcagatgccaactgcagagagcacaggtatgacacctgagaaggtgccagtttcagaggtcatgggtaccacactggcagagatgtcaactccagaggctacaggtatgacacctgcagaggtatcaattgtggtgctttctggaaccacagctgcacaggtaacaactacagagtgggtggagaccacagctagagagctacctatccctgagcctgaaggtccagatgccagctcaatcatgtctacggaaagtattacaggttccctgggccccctgctggatggtacagccaccttaaggctggtgaagagacaagtccccctggattgtgttctgtatcgatatggttccttttccgtcaccctggacattgtccagggtattgaaagtgccgagatcctgcaggctgtgccgtccggtgagggggatgcatttgagctgactgtgtcctgccaaggcgggctgcccaaggaagcctgcatggagatctcatcgccagggtgccagccccctgcccagcggctgtgccagcctgtgctacccagcccagcctgccagctggttctgcaccagatactgaagggtggctcggggacatactgcctcaatgtgtctctggctgataccaacagcctggcagtggtcagcacccagcttatcatgcctggtcaagaagcaggccttgggcaggttccgctgatcgtgggcatcttgctggtgttgatggctgtggtccttgcatctctgatatataggcgcagacttatgaagcaagacttctccgtaccccagttgccacatagcagcagtcactggctgcgtctaccccgcatcttctgctcttgtcccattggtgagaacagccccctcctcagtgggcagcaggtctgagtactctcatatgatgctgtgattttcctggagttgacagaaacacctatatttcccccagtcttccctgggagactactattaactgaaataaatactcagagcctg

SEQ ID NO: 168892 - DNA, 788 bp, Homo sapiens
  Payload ID: 13249
  Gene Symbol: PRPF18
  Gene Name: pre-mRNA processing factor 18
  ENST ID: ENST00000320054
  CDS Start-End: 286-788
tgttctcaggtgtttgggcttgttgttccgtatactcagtgggttcgcggccgccggcccagtgaggctgggttcgaggagctggagcgggaaactggagcttaaattctggcggcgagatggacattctgaaatcagagatccttcggaagcggcagctggtggaggacaggaacctgctggtgaggaactcgattgaggaccagaggtccagtcacaagtaacaagccactagccaggtgcttcaggaagaccgccctcttgcctctgtggaatccagtgaggatgatcagaacgttccccggggaaaataaaaaatatttcaagcgtagtgagctcgccaaaaaagaagaggaagcatattttgaaagatgtggctacaagatacagccaaaagaggaggaccagaaaccattaacttcatcgaatccagtgttagaacttgaactggcagaggaaaaattacctatgacgctttctaggcaagaggtcatcagaagattgagagaaagaggagaaccaatcagactatttggagagactgattatgatgcttttcaacgtttaaggaaaatagagatcctcacaccagaagttaacaagggattgaggaatgatttgaaagcagccttggataagattgatcagcagtacctcaatgaaatcgtcggcggtcaggagcctggagaggaagacacacagaatgatctgaaagttcatgaggaaaacaccacaattgaagagttagaggcgcttggagagtccttagggaaaggcgatgatcataa

SEQ ID NO: 168893 - DNA, 1717 bp, Homo sapiens
  Payload ID: 13249
  Gene Symbol: PRPF18
  Gene Name: pre-mRNA processing factor 18
  Uniprot ID: Q99633
  ENST ID: ENST00000378572
  CDS Start-End: 161-1189
ctctctcatcccagcttccgccggaagcggctcctgtcagttgttctcaggtgtttgggcttgttgttccgtatactcagtgggttcgcggccgccggcccagtgaggctgggttcgaggagctggagcgggaaactggagcttaaattctggcggcgagatggacattctgaaatcagagatccttcggaagcggcagctggtggaggacaggaacctgctggtggaaaataaaaaatatttcaagcgtagtgagctcgccaaaaaagaagaggaagcatattttgaaagatgtggctacaagatacagccaaaagaggaggaccagaaaccattaacttcatcgaatccagtgttagaacttgaactggcagaggaaaaattacctatgacgctttctaggcaagaggtcatcagaagattgagagaaagaggagaaccaatcagactatttggagagactgattatgatgcttttcaacgtttaaggaaaatagagatcctcacaccagaagttaacaagggattgaggaatgatttgaaagcagccttggataagattgatcagcagtacctcaatgaaatcgtcggcggtcaggagcctggagaggaagacacacagaatgatctgaaagttcatgaggaaaacaccacaattgaagagttagaggcgcttggagagtccttagggaaaggcgatgatcataaagacatggacatcatcaccaaattcctgaagtttcttcttggcgtttgggctaaagaattgaatgccagagaagattatgtgaaacgcagtgtgcagggtaaactgaacagtgcgacccagaaacagaccgagtcctacctaagaccactttttagaaagctacggaaaaggaatcttcctgctgatattaaagaatcaataacggatattattaaattcatgttgcagagagaatacgtgaaggcaaatgatgcttatcttcagatggccattggaaatgcgccttggcccatcggtgtcactatggttggtatccatgccagaactggcagagaaaagattttttccaagcatgttgcacatgttttaaatgacgaaactcagcggaaatatattcagggattgaagaggttaatgaccatttgccagaaacactttcctacagacccatccaaatgtgtggagtacaatgcactgtgagatctgtgtatggtgtgttaataacaataagaaacttagggaagcaggctgtggacttctggaattaccaacaggaatgaggaaagaagaaaactggagtttccagtctctgagttctacctgatgtaactcttgattggttttaagaactttgttggccttcatttcatatctgactgcaagctgatttttctttcttgctttcattttaattagtccaaaattaagttttaaagatttttcctcacaatttaaatccatagacaacagaagggggtttaaaatgacctttttttcagttgacccgaaagttgtggttagatgattaaaaagaaacatttgaggatggacttaattatttcagtaaaatattataatttgcctattgtcttttatgtaatatttatataaaatatttttatatatttcaaaaacatgggaccattgaatgaaactttatagtccttaaatgttgctgaacttttgctgtcttgcaatagaatttgaatgtaaatattattactggta

SEQ ID NO: 168894 - DNA, 1062 bp, Homo sapiens
  Payload ID: 13249
  Gene Symbol: PRPF18
  Gene Name: pre-mRNA processing factor 18
  ENST ID: ENST00000417658
  CDS Start-End: 315-1062
agcttccgccggaagcggctcctgtcagttgttctcaggtgtttgggcttgttgttccgtatactcagtgggttcgcggccgccggcccagtgaggctgggttcgaggagctggagcgggaaactggagcttaaattctggcggcgagatggacattctgaaatcagagatccttcggaagcggcagctggtggaggacaggaacctgctggtgaggaactcgattgaggaccagaggtccagtcacaagtaacaagccactagccaggtgcttcaggaagaccgccctcttgcctctgtggaatccagtgaggatgatcagaacgttccccggggaaaataaaaaatatttcaagcgtagtgagctcgccaaaaaagaagaggaagcatattttgaaagatgtggctacaagcctataaatgagaagccatctggagagatacagccaaaagaggaggaccagaaaccattaacttcatcgaatccagtgttagaacttgaactggcagaggaaaaattacctatgacgctttctaggcaagaggtcatcagaagattgagagaaagaggagaaccaatcagactatttggagagactgattatgatgcttttcaacgtttaaggaaaatagagatcctcacaccagaagttaacaagggattgaggaatgatttgaaagcagccttggataagattgatcagcagtacctcaatgaaatcgtcggcggtcaggagcctggagaggaagacacacagaatgatctgaaagttcatgaggaaaacaccacaattgaagagttagaggcgcttggagagtccttagggaaaggcgatgatcataaagacatggacatcatcaccaaattcctgaagtttcttcttggcgtttgggctaaagaattgaatgccagagaagattatgtgaaacgcagtgtgcagggtaaactgaacagtgcgacccagaaacagaccgagtcctacctaagaccactttttagaaagctacggaaaaggaatcttcctgctgatattaaagaatcaataacggatattattaaat

SEQ ID NO: 168895 - DNA, 2157 bp, Homo sapiens
  Payload ID: 13250
  Gene Symbol: PRPF19
  Gene Name: pre-mRNA processing factor 19
  Uniprot ID: Q9UMS4
  ENST ID: ENST00000227524
  CDS Start-End: 207-1721
ggcaatttccgttaggtgctgaaggctgtggcgcgcggctgtccccattcccacgtgaagcgctacgctagcatcgctcggctggcggctcccagctcgccgcggagcagtcccggcagcagcgggggaccggaagtggctcgcggaggctcagaagctagtcccggagcccggcgtgtggcgcctcggagcacggtgacggcgccatgtccctaatctgctccatctctaacgaagtgccggagcacccatgtgtatcccctgtctctaatcatgtttatgagcggcggctcatcgagaagtacattgcggagaatggtaccgaccccatcaacaaccagcctctctccgaggagcagctcatcgacatcaaagttgctcacccaatccggcccaagcctccctcagccaccagcatcccggccattctgaaagctttgcaggatgagtgggatgcagtcatgctgcacagcttcactctgcgccagcagctgcagacaacccgccaagagctgtcacacgctctgtaccagcacgatgccgcctgccgtgtcattgcccgtctcaccaaggaagtcactgctgcccgagaagctctggctaccctgaaaccacaggctggcctcattgtgccccaggctgtgccaagttcccaaccaagtgttgtgggtgcgggtgagccaatggatttgggtgagctggtgggaatgaccccagagattattcagaagcttcaagacaaagccactgtgctaaccacggagcgcaagaagagagggaagactgtgcctgaggagctggtgaagccagaagagctcagcaaataccggcaggtggcatcccacgtggggttgcacagtgccagcattcctgggatcctggccctggacctctgcccgtccgacaccaacaagatcctcactggtggggcggataaaaatgtcgttgtgtttgacaaaagttctgaacaaatcctggctaccctcaaaggccataccaagaaggtcaccagcgtggtgtttcacccttcccaggacctggtgttttctgcttcccccgatgccactatcaggatttggtcggtccccaatgcctcttgtgtacaggtggttcgggcccatgagagtgctgtgacaggcctcagccttcatgccactggcgactatctcctgagctcctccgatgatcagtactgggctttctctgacatccagacagggcgtgtgctcaccaaggtgacagatgagacctccggctgctctctcacctgtgcacagttccaccctgacggactcatctttggaacaggaaccatggactctcagatcaagatctgggacttgaaggaacgtactaatgtggccaacttccctggccactcgggccccatcactagcatcgccttctctgagaatggttactacctggctacagcggctgatgactcctctgtcaagctctgggatctgcgcaagcttaagaactttaagactttgcagctggataacaactttgaggtaaagtcactgatctttgaccagagtggtacctacctggctcttgggggcacggatgtccagatctacatctgcaaacaatggacggagattcttcactttacagagcatagcggcctgaccacaggggtggccttcgggcatcacgccaagttcatcgcttcaacaggcatggacagaagcctcaagttctacagcctgtaggccctggcccttctgatggaagctgggcctcatctcagtagaggggtagaattagggtttgggggggggggtggggggaatctatggggggagggggctctgtggggtgggacattcacatcatttcactctggtctgagtggtggcctgagaaccatggtggcatggaccaccctcatccatgcaactccaggccccatgggaacggatgtggaaggaagaactgtcaccctcttaaggcccagggtcggagcccagggcctctcccttcctgtcgttcaatggacgtggtggtggctgttccacacccattttgttgcagttcctgtgagacaggagaggctgagccaagggaactgtgaaggggatgggcaggagggcttgtgcagggttttgtaagcagtgatctagtttcattaaaaaaagaaaacaataa

SEQ ID NO: 168896 - DNA, 943 bp, Homo sapiens
  Payload ID: 13250
  Gene Symbol: PRPF19
  Gene Name: pre-mRNA processing factor 19
  ENST ID: ENST00000541371
  CDS Start-End: 188-943
tgaaggctgtggcgcgcggctgtccccattcccacgtgaagcgctacgctagcatcgctcggctggcggctcccagctcgccgcggagcagtcccggcagcagcgggggaccggaagtggctcgcggaggctcagaagctagtcccggagcccggcgtgtggcgcctcggagcacggtgacggcgccatgtccctaatctgctccatctctaacgaagtgccggagcacccatgtgtatcccctgtctctaatcatgtttatgagcggcggctcatcgagaagtacattgcggagaatggtaccgaccccatcaacaaccagcctctctccgaggagcagctcatcgacatcaaagttgctcacccaatccggcccaagcctccctcagccaccagcatcccggccattctgaaagctttgcaggatgagtgggatgcagtcatgctgcacagcttcactctgcgccagcagctgcagacaacccgccaagagctgtcacacgctctgtaccagcacgatgccgcctgccgtgtcattgcccgtctcaccaaggaagtcactgctgcccgagaagctctggctaccctgaaaccacaggctggcctcattgtgccccaggctgtgccaagttcccaaccaagtgttgtgggtgcgggtgagccaatggatttgggtgagctggtgggaatgaccccagagattattcagaagcttcaagacaaagccactgtgctaaccacggagcgcaagaagagagggaagactgtgcctgaggagctggtgaagccagaagagctcagcaaataccggcaggtggcatcccacgtggggttgcacagtgccagcattcctgggatcctggccctggacctctgcccgtccgacaccaacaagatcctcactggaaccatggactctcagatcaagatctgggacttgaag

SEQ ID NO: 168897 - DNA, 169 bp, Homo sapiens
  Payload ID: 13250
  Gene Symbol: PRPF19
  Gene Name: pre-mRNA processing factor 19
  ENST ID: ENST00000540473
  CDS Start-End: 1-138
attattcagaagcttcaagacaaagccactgtgctaaccacggagcgcaagaagagagggaagactgtgcctgaggagctggtgaagccagaagagctcagcaaataccggcaggagggcttgtgcagggttttgtaagcagtgatctagtttcattaaaaaaagaaaa

SEQ ID NO: 168898 - DNA, 779 bp, Homo sapiens
  Payload ID: 13250
  Gene Symbol: PRPF19
  Gene Name: pre-mRNA processing factor 19
  ENST ID: ENST00000535326
  CDS Start-End: 1-360
tactgggctttctctgacatccagacagggcgtgtgctcaccaaggtgacagatgagacctccggctgctctctcacctgtgcacagttccaccctgacggactcatctttggaacaggaaccatggactctcagatcaagatctgggacttgaaggtaaagtcactgatctttgaccagagtggtacctacctggctcttgggggcacggatgtccagatctacatctgcaaacaatggacggagattcttcactttacagagcatagcggcctgaccacaggggtggccttcgggcatcacgccaagttcatcgcttcaacaggcatggacagaagcctcaagttctacagcctgtaggccctggcccttctgatggaagctgggcctcatctcagtagaggggtagaattagggtttgggggggggggtggggggaatctatggggggagggggctctgtggggtgggacattcacatcatttcactctggtctgagtggtggcctgagaaccatggtggcatggaccaccctcatccatgcaactccaggccccatgggaacggatgtggaaggaagaactgtcaccctcttaaggcccagggtcggagcccagggcctctcccttcctgtcgttcaatggacgtggtggtggctgttccacacccattttgttgcagttcctgtgagacaggagaggctgagccaagggaactgtgaaggggatgggcaggagggcttgtgcagggttttgtaagcagtgatctagtttcatta

SEQ ID NO: 168899 - DNA, 814 bp, Homo sapiens
  Payload ID: 13250
  Gene Symbol: PRPF19
  Gene Name: pre-mRNA processing factor 19
  ENST ID: ENST00000546152
  CDS Start-End: 503-814
ttcccacgtgaagcgctacgctagcatcgctcggctggcggctcccagctcgccgcggagcagtcccggcagcagcgggggaccggaagtggctcgcggaggctcagaagctagtcccggagcccggcgtgtggcgcctcggagcacggtgacggcgccatgtccctaatctgctccaaacctgtacattgatccaaagagggggaagaaggaagggaaatgatggaaaaggaatccctcactttgaagaaattacagctcgcaaatctctaacgaagtgccggagcacccatgtgtatcccctgtctctaatcatgtttatgagcggcggctcatcgagaagtacattgcggagaatggtaccgaccccatcaacaaccagcctctctccgaggagcagctcatcgacatcaaagttgctcacccaatccggcccaagcctccctcagccaccagcatcccggccattctgaaagctttgcaggatgagtgggatgcagtcatgctgcacagcttcactctgcgccagcagctgcagacaacccgccaagagctgtcacacgctctgtaccagcacgatgccgcctgccgtgtcattgcccgtctcaccaaggaagtcactgctgcccgagaagctctggctaccctgaaaccacaggctggcctcattgtgccccaggctgtgccaagttcccaaccaagtgttgtgggtgcgggtgagccaatggatttgggtgagctggtgggaatgaccccagagattattcagaagcttcaagacaaagccactgtgctaaccacggagcgcaagaag

SEQ ID NO: 168900 - DNA, 2433 bp, Homo sapiens
  Payload ID: 13251
  Gene Symbol: PRPF3
  Gene Name: pre-mRNA processing factor 3
  Uniprot ID: O43395
  ENST ID: ENST00000324862
  CDS Start-End: 166-2217
ggagacagcggcgtggcggcggcggtggcggtagcgacggcacgccgtagggcggtcagaaggtttccggttccggtgtaacgttcgggctccgtctcaggggctgaagtttgtgaggtgtagtattgagtcctgtttgagctattgttctctttttcctgaaaaatggcactgtcaaagagggagctggatgagctgaaaccatggatagagaagacagtgaagagggtcctgggtttctcagagcctacggtggtcacagcagcattgaactgtgtggggaagggcatggacaagaagaaggcagccgatcatctgaaaccttttcttgatgattctactctccgatttgtggacaaactgtttgaggctgtggaggaaggccgaagctctaggcattccaagtctagcagtgacaggagcagaaaacgagagctaaaggaggtgtttggtgatgactctgagatctctaaagaatcatcaggagtaaagaagcgacgaataccccgttttgaggaggtggaagaagagccagaggtgatccctgggcctccatcagagagccctggcatgctgactaagctccagatcaaacagatgatggaggcagcaacacgacaaatcgaggagaggaaaaaacagctgagcttcattagcccccctacacctcagccaaagactccttcttcctcccaaccagaacgacttcctattggcaacactattcagccctcccaggctgccactttcatgaatgatgccattgagaaggcaaggaaagcagctgaactgcaagctcgaatccaagcccagctggcactgaagccaggactcatcggcaatgccaacatggtgggcctggctaatctccatgccatgggcattgctcccccgaaggtggagttaaaagaccaaacgaaacctacaccactgatcctggatgagcaagggcgcactgtagatgcaacaggcaaggagattgagctgacacaccgcatgcctactctgaaagccaatattcgtgctgtgaagagggaacaattcaagcaacaactaaaggaaaagccatcagaagacatggaatccaataccttttttgacccccgagtctccattgccccttcccagcgccagagacgcacttttaaattccatgacaagggcaaatttgagaagattgctcagcgattacggacaaaggctcaactggagaagctacaggcagagatttcacaagcagctcgaaaaacaggcatccatacttcgactaggcttgccctcattgctcctaagaaggagctaaaggaaggagatattcctgaaattgagtggtgggactcttacataatccccaatggctttgatcttacagaggaaaatcccaagagagaagattattttggaatcacaaatcttgttgaacatccagcccagctcaatcctccagttgacaatgacacaccagttactctgggagtatatcttaccaagaaggaacagaaaaaacttcggagacaaacaaggagggaagcacagaaggaactacaagaaaaagtcaggctgggcctgatgcctcctccagaacccaaagtgagaatttctaatttgatgcgagtattaggaacagaagctgttcaagaccccacgaaggtagaagcccacgtcagagctcagatggcaaaaagacagaaagcgcatgaagaggccaacgctgcccgaaaactcacagcagaacagagaaaggtcaagaaaattaaaaagcttaaagaagacatttcacagggggtacacatatctgtatatagagttcgaaatttgagcaacccagccaagaagttcaagattgaagccaatgctgggcaactgtacctgacaggggtggtggtactgcacaaggatgtcaacgtggtagtagtggaagggggccccaaggcccagaagaaatttaagcgtcttatgctgcatcggataaagtgggatgaacagacatctaacacaaagggagatgatgatgaggagtctgatgaggaagctgtgaagaaaaccaacaaatgtgtactagtctgggagggtacagccaaagaccggagctttggagagatgaagtttaaacagtgtcctacagagaacatggctcgtgagcatttcaaaaagcatggggctgaacactactgggaccttgcgctgagtgaatctgtgttagagtccactgattgagactactgcaagcccttgcctctcctcccttgcctttgtctcttcagtcctctcacttattctatttcccaaccccctcccacttgtttgtgtgatctcagaactgtgccaagcagacactgggacaaagggagaatatcttgctcccctcctgagtcagcctggtgttgccctttattccccttatgtgcatatgattaaagagttatttttaaa

SEQ ID NO: 168901 - DNA, 2126 bp, Homo sapiens
  Payload ID: 13252
  Gene Symbol: PRPF31
  Gene Name: pre-mRNA processing factor 31
  Uniprot ID: Q8WWY3
  ENST ID: ENST00000321030
  CDS Start-End: 350-1849
cgaatccctgcttaaaggccttgctttcttgtctaacgccgcaaccagtcctctgagttgccaacgtctttcttcttgtctcgacgccccgtcgtccggccacagcgattctctgcttagcaggatcggtccacagcgggacgtgagtccctttcctcctcgcggcttaccgcctctctccgcctagtgccaggtgctaataaagttgttgtttcaaatgcggccaggaacatcgcgagcggggaccaatcagagagtagctttgcctctataacggcgcgagagtgagacgtcatcggtgagcgactaacgctagaaacagtggtgcgcggagaggagaggcctcgggatgtctctggcagatgagctcttagctgatctcgaagaggcagcagaagaggaggaaggaggaagctatggggaggaagaagaggagccagcgatcgaggatgtgcaggaggagacacagctggatctttccggggattcagtcaagaccatcgccaagctatgggatagtaagatgtttgctgagattatgatgaagattgaggagtatatcagcaagcaagccaaagcttcagaagtgatgggaccagtggaggccgcgcctgaataccgcgtcatcgtggatgccaacaacctgaccgtggagatcgaaaacgagctgaacatcatccataagttcatccgggataagtactcaaagagattccctgaactggagtccttggtccccaatgcactggattacatccgcacggtcaaggagctgggcaacagcctggacaagtgcaagaacaatgagaacctgcagcagatcctcaccaatgccaccatcatggtcgtcagcgtcaccgcctccaccacccaggggcagcagctgtcggaggaggagctggagcggctggaggaggcctgcgacatggcgctggagctgaacgcctccaagcaccgcatctacgagtatgtggagtcccggatgtccttcatcgcacccaacctgtccatcattatcggggcatccacggccgccaagatcatgggtgtggccggcggcctgaccaacctctccaagatgcccgcctgcaacatcatgctgctcggggcccagcgcaagacgctgtcgggcttctcgtctacctcagtgctgccccacaccggctacatctaccacagtgacatcgtgcagtccctgccaccggatctgcggcggaaagcggcccggctggtggccgccaagtgcacactggcagcccgtgtggacagtttccacgagagcacagaagggaaggtgggctacgaactgaaggatgagatcgagcgcaaattcgacaagtggcaggagccgccgcctgtgaagcaggtgaagccgctgcctgcgcccctggatggacagcggaagaagcgaggcggccgcaggtaccgcaagatgaaggagcggctggggctgacggagatccggaagcaggccaaccgtatgagcttcggagagatcgaggaggacgcctaccaggaggacctgggattcagcctgggccacctgggcaagtcgggcagtgggcgtgtgcggcagacacaggtaaacgaggccaccaaggccaggatctccaagacgctgcagcggaccctgcagaagcagagcgtcgtatatggcgggaagtccaccatccgcgaccgctcctcgggcacggcctccagcgtggccttcaccccactccagggcctggagattgtgaacccacaggcggcagagaagaaggtggctgaggccaaccagaagtatttctccagcatggctgagttcctcaaggtcaagggcgagaagagtggccttatgtccacctgaatgactgcgtgtgtccaaggtggcttcccactgaagggacacagaggtccagtccttctgaagggctaggatcgggttctggcagggagaacctgccctgccactggccccattgctgggactgcccagggaggaggccttggaagagtccggcctggcctcccccaggaccgagatcaccgcccagtatgggctagagcaggtcttcatcatgccttgtcttttttaactgagaaaggagattttttgaaaagagtacaattaaaaggacattgtc

SEQ ID NO: 168902 - DNA, 1767 bp, Homo sapiens
  Payload ID: 13252
  Gene Symbol: PRPF31
  Gene Name: pre-mRNA processing factor 31
  ENST ID: ENST00000391755
  CDS Start-End: 9-1490
gcctcgggatgtctctggcagatgagctcttagctgatctcgaagaggcagcagaagaggaggaaggaggaagctatggggaggaagaagaggagccagcgatcgaggatgtgcaggaggagacacagctggatctttccggggattcagtcaagaccatcgccaagctatgggatagtaagatgtttgctgagattatgatgaagattgaggagtatatcagcaagcaagccaaagcttcagaagtgatgggaccagtggaggccgcgcctgaataccgcgtcatcgtggatgccaacaacctgaccgtggagatcgaaaacgagctgaacatcatccataagttcatccgggataagtactcaaagagattccctgaactggagtccttggtccccaatgcactggattacatccgcacggtcaaggagctgggcaacagcctggacaagtgcaagaacaatgagaacctgcagcagatcctcaccaatgccaccatcatggtcgtcagcgtcaccgcctccaccacccaggggcagcagctgtcggaggaggagctggagcggctggaggaggcctgcgacatggcgctggagctgaacgcctccaagcaccgcatctacgagtatgtggagtcccggatgtccttcatcgcacccaacctgtccatcattatcggggcatccacggccgccaagatcatgggtgtggccggcggcctgaccaacctctccaagatgcccgcctgcaacatcatgctgctcggggcccagcgcaagacgctgtcgggcttctcgtctacctcagtgctgccccacaccggctacatctaccacagtgacatcgtgcagtccctgccaccggatctgcggcggaaagcggcccggctggtggccgccaagtgcacactggcagcccgtgtggacagtttccacgagagcacagaagggaaggatgagatcgagcgcaaattcgacaagtggcaggagccgccgcctgtgaagcaggtgaagccgctgcctgcgcccctggatggacagcggaagaagcgaggcggccgcaggtaccgcaagatgaaggagcggctggggctgacggagatccggaagcaggccaaccgtatgagcttcggagagatcgaggaggacgcctaccaggaggacctgggattcagcctgggccacctgggcaagtcgggcagtgggcgtgtgcggcagacacaggtaaacgaggccaccaaggccaggatctccaagacgctgcagcggaccctgcagaagcagagcgtcgtatatggcgggaagtccaccatccgcgaccgctcctcgggcacggcctccagcgtggccttcaccccactccagggcctggagattgtgaacccacaggcggcagagaagaaggtggctgaggccaaccagaagtatttctccagcatggctgagttcctcaaggtcaagggcgagaagagtggccttatgtccacctgaatgactgcgtgtgtccaaggtggcttcccactgaagggacacagaggtccagtccttctgaagggctaggatcgggttctggcagggagaacctgccctgccactggccccattgctgggactgcccagggaggaggccttggaagagtccggcctggcctcccccaggaccgagatcaccgcccagtatgggctagagcaggtcttcatcatgccttgtcttttttaactgagaaaggagattttttgaaaagagtacaattaaaaggacattgtc

SEQ ID NO: 168903 - DNA, 854 bp, Homo sapiens
  Payload ID: 13252
  Gene Symbol: PRPF31
  Gene Name: pre-mRNA processing factor 31
  ENST ID: ENST00000447810
  CDS Start-End: 73-854
ggggaccacggggagcgggaggctgggctcctgggtctgggagaagaagtgtgtgaggaaaaaggcctcgggatgtctctggcagatgagctcttagctgatctcgaagaggcagcagaagaggaggaaggaggaagctatggggaggaagaagaggagccagcgatcgaggatgtgcaggaggagacacagctggatctttccggggattcagtcaagaccatcgccaagctatgggatagtaagatgtttgctgagattatgatgaagattgaggagtatatcagcaagcaagccaaagcttcagaagtgatgggaccagtggaggccgcgcctgaataccgcgtcatcgtggatgccaacaacctgaccgtggagatcgaaaacgagctgaacatcatccataagttcatccgggataagtactcaaagagattccctgaactggagtccttggtccccaatgcactggattacatccgcacggtcaaggagctgggcaacagcctggacaagtgcaagaacaatgagaacctgcagcagatcctcaccaatgccaccatcatggtcgtcagcgtcaccgcctccaccacccaggggcagcagctgtcggaggaggagctggagcggctggaggaggcctgcgacatggcgctggagctgaacgcctccaagcaccgcatctacgagtatgtggagtcccggatgtccttcatcgcacccaacctgtccatcattatcggggcatccacggccgccaagatcatgggtgtggccggcggcctgaccaacctctccaagatgcccgcctgcaacatcatgctgctcggggcccagcgcaagacgctgtcggg

SEQ ID NO: 168904 - DNA, 928 bp, Homo sapiens
  Payload ID: 13252
  Gene Symbol: PRPF31
  Gene Name: pre-mRNA processing factor 31
  ENST ID: ENST00000445811
  CDS Start-End: 76-928
ggtgagcgactaacgctagaaacagtggtgcgcggagaggagagggaacgctgctgtccctccccaggcctcgggatgtctctggcagatgagctcttagctgatctcgaagaggcagcagaagaggaggaaggaggaagctatggggaggaagaagaggagccagcgatcgaggatgtgcaggaggagacacagctggatctttccggggattcagtcaagaccatcgccaagctatgggatagtaagatgtttgctgagattatgatgaagattgaggagtatatcagcaagcaagccaaagcttcagaagtgatgggaccagtggaggccgcgcctgaataccgcgtcatcgtggatgccaacaacctgaccgtggagatcgaaaacgagctgaacatcatccataagttcatccgggataagtactcaaagagattccctgaactggagtccttggtccccaatgcactggattacatccgcacggtcaaggagctgggcaacagcctggacaagtgcaagaacaatgagaacctgcagcagatcctcaccaatgccaccatcatggtcgtcagcgtcaccgcctccaccacccaggggcagcagctgtcggaggaggagctggagcggctggaggaggcctgcgacatggcgctggagctgaacgcctccaagcaccgcatctacgagtatgtggagtcccggatgtccttcatcgcacccaacctgtccatcattatcggggcatccacggccgccaagatcatgggtgtggccggcggcctgaccaacctctccaagatgcccgcctgcaacatcatgctgctcggggcccagcgcaagacgctgtcgggcttctcgtctacctcagtgctgccccacaccggctacatctaccacagtgacatcgtgcagtccctgccac

SEQ ID NO: 168905 - DNA, 2269 bp, Homo sapiens
  Payload ID: 13252
  Gene Symbol: PRPF31
  Gene Name: pre-mRNA processing factor 31
  Uniprot ID: Q8WWY3
  ENST ID: ENST00000419967
  CDS Start-End: 397-1872
tagtttcctgtttccggcttcgcttcggcccacccccacgtccaccccgaatccctgcttaaaggccttgctttcttgtctaacgccgcaaccagtcctctgagttgccaacgtctttcttcttgtctcgacgccccgtcgtccggccacagcgattctctgcttagcaggatcggtccacagcgggacgtgagtccctttcctcctcgcggcttaccgcctctctccgcctagtgccaggtgctaataaagttgttgtttcaaatgcggccaggaacatcgcgagcggggaccaatcagagagtagctttgcctctataacggcgcgagagtgagacgtcatcggtgagcgactaacgctagaaacagtggtgcgcggagaggagaggcctcgggatgtctctggcagatgagctcttagctgatctcgaagaggcagcagaagaggaggaaggaggaagctatggggaggaagaagaggagccagcgatcgaggatgtgcaggaggagacacagctggatctttccggggattcagtcaagaccatcgccaagctatgggatagtaagatgtttgctgagattatgatgaagattgaggagtatatcagcaagcaagccaaagcttcagaagtgatgggaccagtggaggccgcgcctgaataccgcgtcatcgtggatgccaacaacctgaccgtggagatcgaaaacgagctgaacatcatccataagttcatccgggataagtactcaaagagattccctgaactggagtccttggtccccaatgcactggattacatccgcacggtcaaggagctgggcaacagcctggacaagtgcaagaacaatgagaacctgcagcagatcctcaccaatgccaccatcatggtcgtcagcgtcaccgcctccaccacccaggggcagcagctgtcggaggaggagctggagcggctggaggaggcctgcgacatggcgctggagctgaacgcctccaagcaccgcatctacgagtatgtggagtcccggatgtccttcatcgcacccaacctgtccatcattatcggggcatccacggccgccaagatcatgggtgtggccggcggcctgaccaacctctccaagatgcccgcctgcaacatcatgctgctcggggcccagcgcaagacgctgtcgggcttctcgtctacctcagtgctgccccacaccggctacatctaccacagtgacatcgtgcagtccctgccaccggatctgcggcggaaagcggcccggctggtggccgccaagtgcacactggcagcccgtgtggacagtttccacgagagcacagaagggaaggtgggctacgaactgaaggatgagatcgagcgcaaattcgacaagtggcaggagccgccgcctgtgaagcaggtgaagccgctgcctgcgcccctggatggacagcggaagaagcgaggcggccgcaggtaccgcaagatgaaggagcggctggggctgacggagatccggaagcaggccaaccgtatgagcttcggagagatcgaggaggacgcctaccaggaggacctgggattcagcctgggccacctgggcaagtcgggcagtgggcgtgtgcggcagacacaggtaaacgaggccaccaaggccaggatctccaagacgctgcaggtatgggccagacccaggtggggctggggaccgagggacacaaggtggggggagcccagatcgcagcctccctgtcctccccacagcggaccctgcagaagcagagcgtcgtatatggcgggaagtccaccatccgcgaccgctcctcgggcacggcctccagcgtggccttcaccccactccagggcctggagattgtgaacccacaggcggcagagaagaaggtggctgaggccaaccagaagtatttctccagcatggctgagttcctcaaggtcaagggcgagaagagtggccttatgtccacctgaatgactgcgtgtgtccaaggtggcttcccactgaagggacacagaggtccagtccttctgaagggctaggatcgggttctggcagggagaacctgccctgccactggccccattgctgggactgcccagggaggaggccttggaagagtccggcctggcctcccccaggaccgagatcaccgcccagtatgggctagagcaggtcttcatcatgccttgtcttttttaactgagaaaggagattttttgaaaagagtacaattaaaaggacattgtcaagatctgtc

SEQ ID NO: 168906 - DNA, 886 bp, Homo sapiens
  Payload ID: 13252
  Gene Symbol: PRPF31
  Gene Name: pre-mRNA processing factor 31
  ENST ID: ENST00000445124
  CDS Start-End: 58-886
tggtgcgcggagaggagagtttttagggaacgctgctgtccctccccaggcctcgggatgtctctggcagatgagctcttagctgatctcgaagaggcagcagaagaggaggaaggaggaagctatggggaggaagaagaggagccagcgatcgaggatgtgcaggaggagacacagctggatctttccggggattcagtcaagaccatcgccaagctatgggatagtaagatgtttgctgagattatgatgaagattgaggagtatatcagcaagcaagccaaagcttcagaagtgatgggaccagtggaggccgcgcctgaataccgcgtcatcgtggatgccaacaacctgaccgtggagatcgaaaacgagctgaacatcatccataagttcatccgggataagtactcaaagagattccctgaactggagtccttggtccccaatgcactggattacatccgcacggtcaaggagctgggcaacagcctggacaagtgcaagaacaatgagaacctgcagcagatcctcaccaatgccaccatcatggtcgtcagcgtcaccgcctccaccacccaggggcagcagctgtcggaggaggagctggagcggctggaggaggcctgcgacatggcgctggagctgaacgcctccaagcaccgcatctacgagtatgtggagtcccggatgtccttcatcgcacccaacctgtccatcattatcggggcatccacggccgccaagatcatgggtgtggccggcggcctgaccaacctctccaagatgcccgcctgcaacatcatgctgctcggggcccagcgcaagacgctgtcgggcttctcgtctacctcagtgctgccccacaccggctacatctaccaca

SEQ ID NO: 168907 - DNA, 2269 bp, Homo sapiens; identical to SEQ ID NO: 168905
  Payload ID: 13252
  Gene Symbol: PRPF31
  Gene Name: pre-mRNA processing factor 31
  ENST ID: ENST00000622636
  CDS Start-End: 397-1872

SEQ ID NO: 168908 - DNA, 886 bp, Homo sapiens; identical to SEQ ID NO: 168906
  Payload ID: 13252
  Gene Symbol: PRPF31
  Gene Name: pre-mRNA processing factor 31
  ENST ID: ENST00000613020
  CDS Start-End: 58-886

SEQ ID NO: 168909 - DNA, 851 bp, Homo sapiens
  Payload ID: 13252
  Gene Symbol: PRPF31
  Gene Name: pre-mRNA processing factor 31
  ENST ID: ENST00000622164
  CDS Start-End: 70-851
gaccacggggagcgggaggctgggctcctgggtctgggagaagaagtgtgtgaggaaaaaggcctcgggatgtctctggcagatgagctcttagctgatctcgaagaggcagcagaagaggaggaaggaggaagctatggggaggaagaagaggagccagcgatcgaggatgtgcaggaggagacacagctggatctttccggggattcagtcaagaccatcgccaagctatgggatagtaagatgtttgctgagattatgatgaagattgaggagtatatcagcaagcaagccaaagcttcagaagtgatgggaccagtggaggccgcgcctgaataccgcgtcatcgtggatgccaacaacctgaccgtggagatcgaaaacgagctgaacatcatccataagttcatccgggataagtactcaaagagattccctgaactggagtccttggtccccaatgcactggattacatccgcacggtcaaggagctgggcaacagcctggacaagtgcaagaacaatgagaacctgcagcagatcctcaccaatgccaccatcatggtcgtcagcgtcaccgcctccaccacccaggggcagcagctgtcggaggaggagctggagcggctggaggaggcctgcgacatggcgctggagctgaacgcctccaagcaccgcatctacgagtatgtggagtcccggatgtccttcatcgcacccaacctgtccatcattatcggggcatccacggccgccaagatcatgggtgtggccggcggcctgaccaacctctccaagatgcccgcctgcaacatcatgctgctcggggcccagcgcaagacgctgtcggg

SEQ ID NO: 168910 - DNA, 2269 bp, Homo sapiens; identical to SEQ ID NO: 168905
  Payload ID: 13252
  Gene Symbol: PRPF31
  Gene Name: pre-mRNA processing factor 31
  Uniprot ID: Q8WWY3
  ENST ID: ENST00000612749
  CDS Start-End: 397-1872

SEQ ID NO: 168911 - DNA, 1767 bp, Homo sapiens; identical to SEQ ID NO: 168902
  Payload ID: 13252
  Gene Symbol: PRPF31
  Gene Name: pre-mRNA processing factor 31
  ENST ID: ENST00000616532
  CDS Start-End: 9-1490

SEQ ID NO: 168912 - DNA, 2269 bp, Homo sapiens; identical to SEQ ID NO: 168905
  Payload ID: 13252
  Gene Symbol: PRPF31
  Gene Name: pre-mRNA processing factor 31
  ENST ID: ENST00000615175
  CDS Start-End: 397-1872

SEQ ID NO: 168913 - DNA, 2183 bp, Homo sapiens
  Payload ID: 13252
  Gene Symbol: PRPF31
  Gene Name: pre-mRNA processing factor 31
  ENST ID: ENST00000618937
  CDS Start-End: 397-1896
tagtttcctgtttccggcttcgcttcggcccacccccacgtccaccccgaatccctgcttaaaggccttgctttcttgtctaacgccgcaaccagtcctctgagttgccaacgtctttcttcttgtctcgacgccccgtcgtccggccacagcgattctctgcttagcaggatcggtccacagcgggacgtgagtccctttcctcctcgcggcttaccgcctctctccgcctagtgccaggtgctaataaagttgttgtttcaaatgcggccaggaacatcgcgagcggggaccaatcagagagtagctttgcctctataacggcgcgagagtgagacgtcatcggtgagcgactaacgctagaaacagtggtgcgcggagaggagaggcctcgggatgtctctggcagatgagctcttagctgatctcgaagaggcagcagaagaggaggaaggaggaagctatggggaggaagaagaggagccagcgatcgaggatgtgcaggaggagacacagctggatctttccggggattcagtcaagaccatcgccaagctatgggatagtaagatgtttgctgagattatgatgaagattgaggagtatatcagcaagcaagccaaagcttcagaagtgatgggaccagtggaggccgcgcctgaataccgcgtcatcgtggatgccaacaacctgaccgtggagatcgaaaacgagctgaacatcatccataagttcatccgggataagtactcaaagagattccctgaactggagtccttggtccccaatgcactggattacatccgcacggtcaaggagctgggcaacagcctggacaagtgcaagaacaatgagaacctgcagcagatcctcaccaatgccaccatcatggtcgtcagcgtcaccgcctccaccacccaggggcagcagctgtcggaggaggagctggagcggctggaggaggcctgcgacatggcgctggagctgaacgcctccaagcaccgcatctacgagtatgtggagtcccggatgtccttcatcgcacccaacctgtccatcattatcggggcatccacggccgccaagatcatgggtgtggccggcggcctgaccaacctctccaagatgcccgcctgcaacatcatgctgctcggggcccagcgcaagacgctgtcgggcttctcgtctacctcagtgctgccccacaccggctacatctaccacagtgacatcgtgcagtccctgccaccggatctgcggcggaaagcggcccggctggtggccgccaagtgcacactggcagcccgtgtggacagtttccacgagagcacagaagggaaggtgggctacgaactgaaggatgagatcgagcgcaaattcgacaagtggcaggagccgccgcctgtgaagcaggtgaagccgctgcctgcgcccctggatggacagcggaagaagcgaggcggccgcaggtaccgcaagatgaaggagcggctggggctgacggagatccggaagcaggccaaccgtatgagcttcggagagatcgaggaggacgcctaccaggaggacctgggattcagcctgggccacctgggcaagtcgggcagtgggcgtgtgcggcagacacaggtaaacgaggccaccaaggccaggatctccaagacgctgcagcggaccctgcagaagcagagcgtcgtatatggcgggaagtccaccatccgcgaccgctcctcgggcacggcctccagcgtggccttcaccccactccagggcctggagattgtgaacccacaggcggcagagaagaaggtggctgaggccaaccagaagtatttctccagcatggctgagttcctcaaggtcaagggcgagaagagtggccttatgtccacctgaatgactgcgtgtgtccaaggtggcttcccactgaagggacacagaggtccagtccttctgaagggctaggatcgggttctggcagggagaacctgccctgccactggccccattgctgggactgcccagggaggaggccttggaagagtccggcctggcctcccccaggaccgagatcaccgcccagtatgggctagagcaggtcttcatcatgccttgtcttttttaactgagaaaggagattttttgaaaagagtacaattaaaaggacattgtcaagatctgtc

SEQ ID NO: 168914 - DNA, 2269 bp, Homo sapiens; identical to SEQ ID NO: 168905
  Payload ID: 13252
  Gene Symbol: PRPF31
  Gene Name: pre-mRNA processing factor 31
  Uniprot ID: Q8WWY3
  ENST ID: ENST00000619391
  CDS Start-End: 397-1872

SEQ ID NO: 168915 - DNA, 2183 bp, Homo sapiens; identical to SEQ ID NO: 168913
  Payload ID: 13252
  Gene Symbol: PRPF31
  Gene Name: pre-mRNA processing factor 31
  ENST ID: ENST00000619439
  CDS Start-End: 397-1896

SEQ ID NO: 168916 - DNA, 2183 bp, Homo sapiens; identical to SEQ ID NO: 168913
  Payload ID: 13252
  Gene Symbol: PRPF31
  Gene Name: pre-mRNA processing factor 31
  ENST ID: ENST00000620861
  CDS Start-End: 397-1896

SEQ ID NO: 168917 - DNA, 2183 bp, Homo sapiens; identical to SEQ ID NO: 168913
  Payload ID: 13252
  Gene Symbol: PRPF31
  Gene Name: pre-mRNA processing factor 31
  ENST ID: ENST00000619956
  CDS Start-End: 397-1896

SEQ ID NO: 168918 - DNA, 2183 bp, Homo sapiens; identical to SEQ ID NO: 168913
  Payload ID: 13252
  Gene Symbol: PRPF31
  Gene Name: pre-mRNA processing factor 31
  ENST ID: ENST00000622300
  CDS Start-End: 397-1896

SEQ ID NO: 168919 - DNA, 2269 bp, Homo sapiens; identical to SEQ ID NO: 168905
  Payload ID: 13252
  Gene Symbol: PRPF31
  Gene Name: pre-mRNA processing factor 31
  Uniprot ID: Q8WWY3
  ENST ID: ENST00000621588
  CDS Start-End: 397-1872

SEQ ID NO: 168920 - DNA, 2183 bp, Homo sapiens; identical to SEQ ID NO: 168913
  Payload ID: 13252
  Gene Symbol: PRPF31
  Gene Name: pre-mRNA processing factor 31
  ENST ID: ENST00000620142
  CDS Start-End: 397-1896

SEQ ID NO: 168921 - DNA, 2269 bp, Homo sapiens; identical to SEQ ID NO: 168905
  Payload ID: 13252
  Gene Symbol: PRPF31
  Gene Name: pre-mRNA processing factor 31
  ENST ID: ENST00000618595
  CDS Start-End: 397-1872

SEQ ID NO: 168922 - DNA, 928 bp, Homo sapiens; identical to SEQ ID NO: 168904
  Payload ID: 13252
  Gene Symbol: PRPF31
  Gene Name: pre-mRNA processing factor 31
  ENST ID: ENST00000618333
  CDS Start-End: 76-928

SEQ ID NO: 168923 - DNA, 2126 bp, Homo sapiens; identical to SEQ ID NO: 168901
  Payload ID: 13252
  Gene Symbol: PRPF31
  Gene Name: pre-mRNA processing factor 31
  Uniprot ID: Q8WWY3
  ENST ID: ENST00000613693
  CDS Start-End: 350-1849

SEQ ID NO: 168924 - DNA, 2269 bp, Homo sapiens; identical to SEQ ID NO: 168905
  Payload ID: 13252
  Gene Symbol: PRPF31
  Gene Name: pre-mRNA processing factor 31
  ENST ID: ENST00000622387
  CDS Start-End: 397-1872

SEQ ID NO: 168925 - DNA, 2269 bp, Homo sapiens; identical to SEQ ID NO: 168905
  Payload ID: 13252
  Gene Symbol: PRPF31
  Gene Name: pre-mRNA processing factor 31
  ENST ID: ENST00000614518
  CDS Start-End: 397-1872

SEQ ID NO: 168926 - DNA, 2269 bp, Homo sapiens; identical to SEQ ID NO: 168905
  Payload ID: 13252
  Gene Symbol: PRPF31
  Gene Name: pre-mRNA processing factor 31
  ENST ID: ENST00000619220
  CDS Start-End: 397-1872

SEQ ID NO: 168927 - DNA, 2183 bp, Homo sapiens; identical to SEQ ID NO: 168913
  Payload ID: 13252
  Gene Symbol: PRPF31
  Gene Name: pre-mRNA processing factor 31
  Uniprot ID: Q8WWY3
  ENST ID: ENST00000610903
  CDS Start-End: 397-1896

SEQ ID NO: 168928 - DNA, 2183 bp, Homo sapiens; identical to SEQ ID NO: 168913
  Payload ID: 13252
  Gene Symbol: PRPF31
  Gene Name: pre-mRNA processing factor 31
  Uniprot ID: Q8WWY3
  ENST ID: ENST00000616732
  CDS Start-End: 397-1896

SEQ ID NO: 168929 - DNA, 5274 bp, Homo sapiens
  Payload ID: 13253
  Gene Symbol: PRPF38A
  Gene Name: pre-mRNA processing factor 38A
  Uniprot ID: Q8NAV1
  ENST ID: ENST00000257181
  CDS Start-End: 187-1125
attgattcgataggcgacgcggggagcggaagccctttacactacggtgtttccggcttcaagatggtcgcctaagctgtttagtgaaacttcttccacctttctccattcctctaggtgctttttctgaacctggatgtgaggcattaaaggatccgacggaaatagaattgaaggcattctaaaatggctaaccgtacagtgaaggatgcgcacagcatccatggcaccaaccctcaatatctggtggagaagatcattcgaacgcgaatctatgagtccaagtactggaaagaggagtgctttggacttacagctgaacttgtagtcgataaagccatggagttaaggtttgtgggtggcgtctatggtggcaacataaaaccaacaccctttctgtgtttaaccttgaagatgcttcaaattcaacccgagaaggatatcattgtagagtttatcaaaaatgaagatttcaagtatgtccgcatgctgggggcactttacatgaggctgacaggcactgcaattgattgctacaagtacttggaacctttgtacaatgactatcgaaaaatcaagagccagaaccgaaatggggagtttgaattgatgcatgttgatgagtttattgatgaactattgcacagtgagagagtctgtgatatcattctgccccgactacagaaacgctatgtattagaggaagctgagcaactggagcctcgagttagtgctctggaagaggacatggatgatgtggagtccagtgaagaggaagaagaggaggatgagaagttggaaagagtgccatcacctgatcaccgccggagaagctaccgagacttggacaagccccgtcgctctcccacactgcgctacaggaggagtaggagccggtctcccagaaggcggagtcgatctcccaaaaggagaagcccctcccctcgccgagaaaggcatcggagcaagagtccaagacgtcaccgcagcaggtcccgagatcggcggcacagatcccgttccaagtccccaggtcatcaccgtagtcacagacacaggagccactcaaagtctcccgaaaggtctaagaagagccacaagaagagccggagagggaatgagtaatggactcagtttggttttagtccacatggcctcctgtggatataaggatatctgtatgtggaaggattaagatctcccccaggcagctataagaatattttagtttttttcttatcaagtttctcaacctttatttttaatgaaggaggtgctgagttttgtatctttttaatcataatcaacatcagtttttgacccaactaaccttgactgtattcaaacttatgagagtataaaggatctggaggttggggatatgactgacaaggaaaggctgtggccacctgatgaccctttccctttttattaaaccggacacacctgtttcccatttcgctgtagtttagtttttggtttgttgtggttggaactgctttgagaatcctgggatttgtgctgctgctgttattcaaagatcaaaggagtaaaacatagttgctcctaacttttttccagcagcagcaagtggtaataaacatgaaaactggtttgtagcagttttgaaagaatagaatgcattcaaatgtaaggctgcttctggatcattaaagccagtttcatcaaacagttcaacagagagcagcacttaataccctttatacagcccattttttcatagtttcatttgttcttgcccacaagcttgaaatccaggttaaggtatccagcctttatcatataagcattgacattatccaggcctagtcagtagcagtagggtaacgggattgaaaaagatttgatggagaggaaagtatctaatattagtcatggttttgacctaaattgctagacagtcgtgccattcacaaagtcagaaaatacagcaggaagagacagcttttagaggggcagagaattagaggatggtggtagtaatgaaaatgatgcattcagtttaacaagtttaatttgagacagctatggtatagctaaaaacaaaagcccataaagttggagatagggaccagagtttaacatagcgatctaggccagaattgacaatgtttaagtaatggtggaatctgtcaataagacttcccagagtgttaatatatatcagaaatgcacacaacagaaccataggcaacaccaacacaggaagaaatagaagtcacctattgaaaactggaatggcccattcagaaagacaggagaattaggagagagtgagtgaaagaagccaagggtcaagaatgcagaagcaaaggaaggactaaaaagcctccacggacatcgataatcaagagattattaagatctttgctagaagagttcctttacctgtacttaactcccttaaaaagagaaaagtgatggaatgacttctgcaactgtagtcccagcaggaactgtgaagaccagctgccctgcaggatccagtttttcttgggaggttgtatctggtcataaggtaaacattctatatattctatgcctgctctagaattgaaagacttcagcagtattaaagcattttttaatcttatttgagctttcatattcttcaatggttcctttcgtaatacctgagttaataaaagtggtctgaaagagctcttacggtttctgatagaactatataggactaccttttaagattaaatataagcatctgtacgtaaatgtattacagtgtcatagcagttatttctttatgaaagtgatctaggtagaaagaaatgtcttctggcatggacagaaatgacccatggaccaaccaagctgtcatccagtacactcttaaaataaaactttgtcttaaaatatgttttaaagtaaaaataaacccacgcacaaagcccaataaattttagtaacagaaataaacctccctaaacaaacattaaaacatacttgtttagacatatggtaatatgtggaccaaaattgaggtaccacagccaatcaatagcaggaaagagaatgtccctattctttaattagaagaaggaggtaagagtaagacatgttgcatgtctgtagatatcgttttgataaaattacacaggagatggagcttgaggacaaaccttgctgtaaggctctttctgtcatctatgtgcttgcctatggatgaagcattttaaactttttgactacagcatacattttaaaaacgtattttacatcttacctctgtacacatctgtattctgtactgagacaaatttcaggaaagaatacttactatgcaaagtgaattctggtgtttcctacttgttaacagtttttaatattggatgaaaccacttaatcgatttcacttccaataatttgaaatacactgacttaaaagctttgccatagggcacaatcgccttttaatactaagaaagtaagggagatgtgttccaaggggcaaaagaaataatgcatttttggccaggtgcggtggctcacgcctgtaatcccagcactttgggaggccgaggcgggcagatcacctgaggtcgggagtttgagaccagcctggccaacatggagaaaccctgtctctactaaaaaatacaaaattagccgggcatggtggcgcatgcctgtaatcccagttacttgggaggctgaggcaggagaatcgcttgaacctgggaggcagaggatgcggtgagctgagatcgtgccactgcacttcagcctgggcaaaaagagcgaaactccatctcaaaaaaaaaaaaaaaagaagaagaagaatgggtttggtgagagggttccaatattaacaacccaacttcaagctcattcctctaacctcttcctgtttgttattcttcagtagaccgaagtttaaataagcattatttagaaaagaacgatcacagattgcccactccctcaaaaaggttaatgtgacagaaattctccacctgctcaaaaaagacagcagacatgatctctttaaaaaaaaaaagttcaaaagagattaagagatgaaaaataagattggtggagtttaaaggccttatactagaaaccacaaaacataaaacagcacagagaaaataggctggaggaaataaaaaatggaaaagagaaatatgtagaataaagaaatattctgatggtttaaaaagaattggccgggtgcggtggctcacgcctgtaatcccagcactttgggaggccgaggcagacggatcatgaggtcaggagatcgagaccatccaggctaacacagtgaaacccgtctctactaaaaatacaaaaaattagctgggtgtgctggcgggtagagctactagggaggctgaggcaggagaatggcgtgaatccgggaggcggagctttcagtgagccgagatcgcgccattgcactccagcctgggcaacagagtgagactccgtctcaaaaagaaaaaagaattaaatggggtcaggatggtctcagatcttataacaagaaggcaatgaagcaaaaggctccaaaggtttgagaaaaagtgccaggaattttatactttgccaaagttgtcttaaaatacaaaggctatagatgttctcaagtttgtaagaacttaaaagtacaaatcatgagtctttgggaaaaaaccgcccaataatgaaattcaactaaagaagaaatgaatcaaattaaggacttaggaacaaagaatcagtaaaaggagtgttagtaaacacttcagaaactttaaaaataatgggcaatgattataaagtcaaatattatgaacactgtctatatagaaataacaagtagagtgtgctggtttcatctttcatagcaggaatcacgtacagtctctaattaaaacatacatgaagctagaaaaaaaaatagcctctttattgttttccgtaattgtccttaattttaggagaaatcttacaagactagattctcttgtggggaaaaaagtatttaaattgagcattttttcagtttcacacttgttttccttttgttaatttgctatatttgttaaatatagcatatgagcccacttttgtaaaactatttgtatatatgtgcctgtatgattaagagagatggttggaatgaatgaagttcaccagatagtacttctttctggctgatgaacttttgaatgatttttaaactttgtacttttatataatgcttattttctttttacaataaacatgttaatttctacaaggaagaaatga

SEQ ID NO: 168930 - DNA, 3728 bp, Homo sapiens
  Payload ID: 13254
  Gene Symbol: PRPF38B
  Gene Name: pre-mRNA processing factor 38B
  ENST ID: ENST00000370021
  CDS Start-End: 638-1945
atcgagctccctggctgccggctcgccttctgcgtggagttctcgcggtctgggtttcgctgtctgctcttggcccggggtcattttgtcggcgtcgggtgccctctcttgcccagctggggcacagcgaggcggccccttctcccgacgacgttcgatggagtagggtcccagaccgttgtcccgaagagcgagatcgagcttggccccctcccccccctccttccctccctccttccttccgccgcaacatggctaacaacagccccgcgctgacaggcaactcgcagccgcagcaccaggcggctgcagctgcggctcagcaacagcagcagtgcggcggcggcggcgctaccaagccggcggtctccggcaagcagggcaatgtgctcccgctctggggcaacgagaagaccatgaacctcaaccccatgatcctgaccaacatcctgtcgtcgccttacttcaaagtacagctctacgagctcaagacctaccacgaggtggtggacgagatctactttaaggattgactcagtcttgcagcgaggctcggagcagcccagggtcgcaggtagaggtcacgcacgttgaaccatgggagaaaggaagcaggaaaacagcgggccagacagggatgtgcggaggggttcgaggtgttggaacaggaggaattgtttctacagcattttgcctgttatacaaattatttaccctgaagttaactcgaaagcaagtgatgggtcttataacacacacagactctccatatattagagcgcttggatttatgtatataagatatacacagccccctacagatctgtgggactggtttgaatccttccttgatgatgaagaggacctagatgtgaaggctggtggaggctgtgtaatgaccattggagaaatgctacgatcttttctcacaaaactggagtggttttctaccttgtttccaagaattccagttccagttcaaaagaatattgatcaacagattaaaacccgacctagaaaaatcaagaaagatgggaaggaaggtgctgaggaaatagacagacatgttgaacgcagacgttcaaggtctccaaggagatctctgagtccacggaggtccccaagaaggtcaagaagtagaagtcatcatcgggagggccatgggtcttctagttttgacagagaattagaaagagagaaagaacgccagcgactagagcgtgaagccaaagaaagggagaaagaacggcgaagatcccgaagtattgaccgggggttagaacgcaggcgcagcagaagtagggaaaggcatagaagtcgcagtcgaagtcgtgataggaaaggggatagaagggacagggatcgagaaagagagaaagaaaatgagagaggtagaagacgagatcgtgactatgataaggaaagaggaaatgaacgagaaaaagagagagagcgatcaagagaaaggtccaaggaacagagaagtaggggagaggtagaagagaagaaacataaagaagacaaagatgataggcggcacagagatgacaaaagagattccaagaaagagaaaaaacacagtagaagcagaagcagagaaaggaaacacagaagtaggagtcgaagtagaaatgcagggaaacgaagtagaagtagaagcaaagagaaatcaagtaaacataaaaatgaaagtaaagaaaaatcaaataaacgaagtcgaagtggcagtcaaggaagaactgacagtgttgaaaaatcaaaaaaacgggaacatagtcccagcaaagaaaaatctagaaagcgtagtagaagcaaagaacgttcccacaaacgagatcacagtgatagtaaggaccagtcagacaaacatgatcgtcgaaggagccaaagtatagaacaagagagccaagaaaaacagcataaaaacaaagatgagactgtgtgaaaatattttgtaaaagtggatcacattgaatcctataaatgattaaatctgcttttttcccccacgttgagattgtgcagtagttcgcactcctcaagctctccctgtaggctgcattttcatttcctctttcgtgtagggaagtgcctttgtaattccatttattgcattggtgttttcacccaattgttaagtttgatacatgatgcacagattgttcttgcatttttattgtttgtttttgaaatgtacagtctgtacatatgtcctgaaaatgttttaattcctttggcatggttgccatgttggttaaatttgtataaggcaataaactgccactaatctatttttgttttgtaggtgtgggattatggtttgtgtactgaagttagcatggctgtgcttttcgtaatagaatgctaaagactttgagaatggatcttggatgtctattataggagaagtatgtgctgccaatgtacaagaaggcagcattgtaggattaacattcttgtctactgtatattatcttggaaggctcttgttaatatgttacacttaatattctccacagttacctttagagagaatttatgagaagttagtttctgatgcagaggtttttaggctgtgatttcatcaaaagtccttttagcattctacctcaaagggacacttagtatgcctaaaatttattcacttagttttccttttttatttgaaaaaatacatgacatgtaatctttttttcttgaattctttctcagattttaaagtactatattaaagaaaaaaattaatgtctaaagcctagcattcttgcagaaccctatactaacatgtaatggggagagggtggggcagatgagtagagaaacagattcaagcctcaagcttccaaagcatttttataaatggaaaatccttaaattatgaaacagcttgatatagtgtcctttttttaaaattcagaactttttttattgataatggagattgctgtttgagtttttaaacttaatctagaacagaggagtattaaaagtaatgctgtgctgcattatttaagactatcagcaaattatttgatagattgttcttacaacttgtattctgattacagaaccatcatgagtgtggaataaatactggattaaatcctttatcctgggtcttggcttttcccccatttgttaaatttttttagcatatttatattgtggaaattgatgaaacgtcagtagagtcacactttgtgtacagggatgtcttagtgcccagatgacaagtgaattttggagaaatgcatagactgggattgggcatgtggtaatcaataatctttattagaatacttgataatggcagttccctttgtcagtggttgttacatgtgtcatttgattactttgttccatgtcaaagacgtttattgggataccttttacttggacaatatgttagcattttttaaaatttggacttgaaattctttaagataattcacccaattctttttagaaaagaaaatagaggcccaaagtaatgatgtcagtgctagggctaaaactcagtattctgacagtgtagtgaacctggcacgcacattgaggtttgttttatctcactggttatactggccaactaatgcgcactcagaagccaccttgcaaaaatgttaaatggagcaaacgagtacacttgcaagagtcctccatatgtgggcttaacatatgtaccactccattttagaaaaatctcattaaatgaattcttctaaaaa

SEQ ID NO: 168931 - DNA, 1591 bp, Homo sapiens
  Payload ID: 13254
  Gene Symbol: PRPF38B
  Gene Name: pre-mRNA processing factor 38B
  Uniprot ID: Q5VTL8
  ENST ID: ENST00000370022
  CDS Start-End: 269-841
ggcagttggcggaagagatcgagctccctggctgccggctcgccttctgcgtggagttctcgcggtctgggtttcgctgtctgctcttggcccggggtcattttgtcggcgtcgggtgccctctcttgcccagctggggcacagcgaggcggccccttctcccgacgacgttcgatggagtagggtcccagaccgttgtcccgaagagcgagatcgagcttggccccctcccccccctccttccctccctccttccttccgccgcaacatggctaacaacagccccgcgctgacaggcaactcgcagccgcagcaccaggcggctgcagctgcggctcagcaacagcagcagtgcggcggcggcggcgctaccaagccggcggtctccggcaagcagggcaatgtgctcccgctctggggcaacgagaagaccatgaacctcaaccccatgatcctgaccaacatcctgtcgtcgccttacttcaaagtacagctctacgagctcaagacctaccacgaggtggtggacgagatctactttaaggtcacgcacgttgaaccatgggagaaaggaagcaggaaaacagcgggccagacagggatgtgcggaggggttcgaggtgttggaacaggaggaattgtttctacagcattttgcctgttatacaaattatttaccctgaagttaactcgaaagcaagtgatgggtcttataacacacacagactctccatatattagagcgcttggatttatgtatataagatatacacagccccctacagatctgtgggactggtttgaatccttccttgatgatgaagagttcttcaccctctagcttcttccaaatatcagtattcccacttgcatagaagtgcagaattgaagagttgggtgttacataaataggctaagtgtttggatgacttgttcaaggtgacaaaattttaattccagttttctgactcctagtacaccacacacacctttaaaaaagaaattttttaaattgtaattcgagtctccctaatttgaaatctgaaatactaagttagatttaaatcgtgtatgcattggctgggcgtggtggctcacattgtaatcccaacacttcgagagttcaagaccagcctgagcaatatagtgagacctcatctctacaaaaaaaagtttaaaaattagctgagcatagaggtatgcatcttagtcccacctacttgggaggctggggtgggaggatcacttgagcccaggagacagaatttgctgtgagccaagatcattgccactgcattccagcctgggtaacacagtaagaccctttctcaaaacaaaacaaaatatcatatatgcattaatttacttgcatggtgaagtccaacatgtcaaaaatgaaatgatgagctgtattgtccctatgtctacccagtctactactttgtgttttaaggttcataagactttttgagtgctatgtgtcagtagtctatttacagagttcatccaaagaatttattgaattaaaggatggttctaatggaaatctattgtgttttgttattacatgcacacctaaaaaaaaaaaaaa

SEQ ID NO: 168932 - DNA, 3693 bp, Homo sapiens
  Payload ID: 13254
  Gene Symbol: PRPF38B
  Gene Name: pre-mRNA processing factor 38B
  Uniprot ID: Q5VTL8
  ENST ID: ENST00000370025
  CDS Start-End: 270-1910
gggcagttggcggaagagatcgagctccctggctgccggctcgccttctgcgtggagttctcgcggtctgggtttcgctgtctgctcttggcccggggtcattttgtcggcgtcgggtgccctctcttgcccagctggggcacagcgaggcggccccttctcccgacgacgttcgatggagtagggtcccagaccgttgtcccgaagagcgagatcgagcttggccccctcccccccctccttccctccctccttccttccgccgcaacatggctaacaacagccccgcgctgacaggcaactcgcagccgcagcaccaggcggctgcagctgcggctcagcaacagcagcagtgcggcggcggcggcgctaccaagccggcggtctccggcaagcagggcaatgtgctcccgctctggggcaacgagaagaccatgaacctcaaccccatgatcctgaccaacatcctgtcgtcgccttacttcaaagtacagctctacgagctcaagacctaccacgaggtggtggacgagatctactttaaggtcacgcacgttgaaccatgggagaaaggaagcaggaaaacagcgggccagacagggatgtgcggaggggttcgaggtgttggaacaggaggaattgtttctacagcattttgcctgttatacaaattatttaccctgaagttaactcgaaagcaagtgatgggtcttataacacacacagactctccatatattagagcgcttggatttatgtatataagatatacacagccccctacagatctgtgggactggtttgaatccttccttgatgatgaagaggacctagatgtgaaggctggtggaggctgtgtaatgaccattggagaaatgctacgatcttttctcacaaaactggagtggttttctaccttgtttccaagaattccagttccagttcaaaagaatattgatcaacagattaaaacccgacctagaaaaatcaagaaagatgggaaggaaggtgctgaggaaatagacagacatgttgaacgcagacgttcaaggtctccaaggagatctctgagtccacggaggtccccaagaaggtcaagaagtagaagtcatcatcgggagggccatgggtcttctagttttgacagagaattagaaagagagaaagaacgccagcgactagagcgtgaagccaaagaaagggagaaagaacggcgaagatcccgaagtattgaccgggggttagaacgcaggcgcagcagaagtagggaaaggcatagaagtcgcagtcgaagtcgtgataggaaaggggatagaagggacagggatcgagaaagagagaaagaaaatgagagaggtagaagacgagatcgtgactatgataaggaaagaggaaatgaacgagaaaaagagagagagcgatcaagagaaaggtccaaggaacagagaagtaggggagaggtagaagagaagaaacataaagaagacaaagatgataggcggcacagagatgacaaaagagattccaagaaagagaaaaaacacagtagaagcagaagcagagaaaggaaacacagaagtaggagtcgaagtagaaatgcagggaaacgaagtagaagtagaagcaaagagaaatcaagtaaacataaaaatgaaagtaaagaaaaatcaaataaacgaagtcgaagtggcagtcaaggaagaactgacagtgttgaaaaatcaaaaaaacgggaacatagtcccagcaaagaaaaatctagaaagcgtagtagaagcaaagaacgttcccacaaacgagatcacagtgatagtaaggaccagtcagacaaacatgatcgtcgaaggagccaaagtatagaacaagagagccaagaaaaacagcataaaaacaaagatgagactgtgtgaaaatattttgtaaaagtggatcacattgaatcctataaatgattaaatctgcttttttcccccacgttgagattgtgcagtagttcgcactcctcaagctctccctgtaggctgcattttcatttcctctttcgtgtagggaagtgcctttgtaattccatttattgcattggtgttttcacccaattgttaagtttgatacatgatgcacagattgttcttgcatttttattgtttgtttttgaaatgtacagtctgtacatatgtcctgaaaatgttttaattcctttggcatggttgccatgttggttaaatttgtataaggcaataaactgccactaatctatttttgttttgtaggtgtgggattatggtttgtgtactgaagttagcatggctgtgcttttcgtaatagaatgctaaagactttgagaatggatcttggatgtctattataggagaagtatgtgctgccaatgtacaagaaggcagcattgtaggattaacattcttgtctactgtatattatcttggaaggctcttgttaatatgttacacttaatattctccacagttacctttagagagaatttatgagaagttagtttctgatgcagaggtttttaggctgtgatttcatcaaaagtccttttagcattctacctcaaagggacacttagtatgcctaaaatttattcacttagttttccttttttatttgaaaaaatacatgacatgtaatctttttttcttgaattctttctcagattttaaagtactatattaaagaaaaaaattaatgtctaaagcctagcattcttgcagaaccctatactaacatgtaatggggagagggtggggcagatgagtagagaaacagattcaagcctcaagcttccaaagcatttttataaatggaaaatccttaaattatgaaacagcttgatatagtgtcctttttttaaaattcagaactttttttattgataatggagattgctgtttgagtttttaaacttaatctagaacagaggagtattaaaagtaatgctgtgctgcattatttaagactatcagcaaattatttgatagattgttcttacaacttgtattctgattacagaaccatcatgagtgtggaataaatactggattaaatcctttatcctgggtcttggcttttcccccatttgttaaatttttttagcatatttatattgtggaaattgatgaaacgtcagtagagtcacactttgtgtacagggatgtcttagtgcccagatgacaagtgaattttggagaaatgcatagactgggattgggcatgtggtaatcaataatctttattagaatacttgataatggcagttccctttgtcagtggttgttacatgtgtcatttgattactttgttccatgtcaaagacgtttattgggataccttttacttggacaatatgttagcattttttaaaatttggacttgaaattctttaagataattcacccaattctttttagaaaagaaaatagaggcccaaagtaatgatgtcagtgctagggctaaaactcagtattctgacagtgtagtgaacctggcacgcacattgaggtttgttttatctcactggttatactggccaactaatgcgcactcagaagccaccttgcaaaaatgttaaatggagcaaacgagtacacttgcaagagtcctccatatgtgggcttaacatatgtaccactccattttagaaaaatctcattaaatgaattcttctaaaaa

SEQ ID NO: 168933 - DNA, 2868 bp, Homo sapiens
  Payload ID: 13255
  Gene Symbol: PRPF39
  Gene Name: pre-mRNA processing factor 39
  Uniprot ID: Q86UA1
  ENST ID: ENST00000355765
  CDS Start-End: 171-2180
actgacgcatgcgcatcgtgccctggaccaggcggccgtggcgcgggtggcggctgctgtgctggctgtggggacggaggcggtgaagtgccatcttcggctaggtcgtcacaggctccggctcatggcatcaagtggcatccatcataagatcgttaactgaagacaatatgcaaaattctcacatggatgaatacagaaattctagtaatggcagcacaggcaacagttcagaggtagtggtagaacatcctactgatttcagtactgagattatgaacgttacagaaatggaacagtcacctgatgactctcccaatgtgaatgcatctacagaagaaactgaaatggcaagtgctgtggaccttccagtgacgctgacagaaacagaagcaaatttccctccagaatatgaaaaattttggaaaactgtagaaaataatcctcaggattttacaggctgggtatatttgcttcaatatgtagaacaggagaatcacttgatggctgccaggaaggcatttgacagatttttcatacactatccgtattgctatggttactggaaaaagtatgcagaccttgaaaagcggcacgacaacattaaaccatcagatgaggtttatcggcgggggcttcaggcaatacctcttagtgttgacctttggatacattatataaacttcttaaaagaaacattggaccctggtgatcctgagacaaacaatacaataagaggaacttttgagcatgctgttctagctgcaggaacagatttccgttctgacagactgtgggaaatgtatataaactgggaaaatgagcagggaaacctgagagaagttacagctatatatgatcgtattcttggtattccaacacagctgtatagtcatcattttcagagatttaaagaacatgtacagaataatttgcctagagatcttttaactggtgaacagtttattcagttgcgaagggaattagcttctgtaaatggtcatagtggtgatgatggtcctcctggtgatgatctaccatcgggaattgaagacataaccgatcctgcaaagctaattacagaaatagaaaacatgagacatagaatcattgagattcatcaagaaatgtttaattataatgagcatgaagttagtaaaaggtggacatttgaagaaggtattaaaagaccttactttcatgtgaaacctttggaaaaggcacaactaaaaaactggaaagaatacttagaatttgaaattgaaaatgggactcatgaacgagttgtggttctctttgaaagatgtgtcatatcatgtgccctctatgaggagttttggattaagtatgccaagtacatggaaaaccatagcattgaaggagtgaggcatgtcttcagcagagcttgtactatacatctcccaaagaaacccatggtgcatatgctttgggcagcttttgaggaacagcagggtaatattaatgaagccaggaatatcttgaaaacatttgaagaatgtgttctaggattggcaatggttcgtttacgaagagtaagtttagaacgacggcatggaaatctggaagaagctgaacatttgcttcaggatgccattaagaatgccaaatcaaataatgaatcttcattttatgctgtcaaactagcccggcatcttttcaaaatacagaaaaaccttccaaaatcaagaaaggtgcttttggaagcaatcgaaagagacaaagagaacacaaagttatacctcaatttacttgaaatggaatatagtggtgacctcaaacaaaatgaagaaaatatcctaaattgttttgacaaagctgtacatggttcattacctattaaaatgagaattacattttctcagagaaaagtggaatttcttgaagattttggttccgatgttaataagcttctgaatgcttatgatgaacatcaaacactcctgaaagaacaggattctttaaaaaggaaagcagaaaatggatcagaagaaccagaggaaaagaaagcacatacagaagatacaacttcatcatctacacagatgattgatggtgatttacaggcaaaccaagctgtatataattatagtgcgtggtatcaatacaattatcagaatccttggaattatggacaatattatcctccccctccaacctgatgggaaaaatgtaaatttcaaatgcagtgtgtgaaaagtatgaaattattattttttttaatgagggatgtaaacagtataagcttgttgtatttgataacctgtcttccttgtttctgtgtaacatgatttgtttagtaatagggggaaaatgtcaattagtagcttaccacagatactgtttcctaccatttataaaatttactttttattgaaaaactattttttgatttttgcattaagtggtctagaattcttttgcaatgcatttgcaacagaattttgtagccttaaggggtaggaagaaaaacctgactgcaaatcatgtcagtgtagtacaaaattctgaaaacacataagggctggttatttacctccttttttttttttttttttaaagaaaaaaggacttttaacctttgctgacaaggttttgtctgtttcagttatacttgtgaattgtgatctaactgcagaaaggatacattattaaaatactttgccttggaatagattataaatgagaaaatggaatgtttgcatccctttaaaaatgaaaatcatatcaaaagtatgttgtttcaggagactttgtatttagaatattcatgtaaaacttgtgaacaagctttcattttgatcaaactgatcttcatttttgtaataaaacggaagactcatccagtaa

SEQ ID NO: 168934 - DNA, 3174 bp, Homo sapiens
  Payload ID: 13255
  Gene Symbol: PRPF39
  Gene Name: pre-mRNA processing factor 39
  ENST ID: ENST00000424478
  CDS Start-End: 142-600
aggcggccgtggcgcgggtggcggctgctgtgctggctgtggggacggaggcggtgaagtgccatcttcggctaggtcgtcacaggctccggctcatggcatcaagtggcatccatcataagatcgttaactgaagacaatatgcaaaattctcacatggatgaatacagaaattctagtaatggcagcacaggcaacagttcagaggtagtggtagaacatcctactgatttcagtactgagattatgaacgttacagaaatggaacagtcacctgatgactctcccaatgtgaatgcatctacagaagaaactgaaatggcaagtgctgtggaccttccagtgacgctgacagaaacagaagcaaatttccctccagaatatgaaaaattttggaaaactgtagaaaataatcctcaggattttacaggctgggtatatttgcttcaatatgtagaacaggagaatcacttgatggctgccaggaaggcatttgacagatttttcatacactatccgtattgctatggttactggaaaaagtatgcagaccttgaaaagcggcacgacaacattaaaccatcagatgaggtgcgttaaacctctacagtttgtcaagctttgcagtgcaagcctctgtattacactgcagcttaacaagtagggcagggcttttctctcacttacatttatttctcattttccaaacaatatagttggtttgctagtcacatttgctacgtcttattgcatttttggtcagacgctgtcattgatgctctaatgggtctgtgccctatggtctgtaacccaaagcctgcccacacaacccggtcagaatgcagggactgctgcgctttgaagatcaagactctgcacgtggggatcagaacattgccatgttctatccaacctccacccaaatggtttatcggcgggggcttcaggcaatacctcttagtgttgacctttggatacattatataaacttcttaaaagaaacattggaccctggtgatcctgagacaaacaatacaataagaggaacttttgagcatgctgttctagctgcaggaacagatttccgttctgacagactgtgggaaatgtatataaactgggaaaatgagcagggaaacctgagagaagttacagctatatatgatcgtattcttggtattccaacacagctgtatagtcatcattttcagagatttaaagaacatgtacagaataatttgcctagagatcttttaactggtgaacagtttattcagttgcgaagggaattagcttctgtaaatggtcatagtggtgatgatggtcctcctggtgatgatctaccatcgggaattgaagacataaccgatcctgcaaagctaattacagaaatagaaaacatgagacatagaatcattgagattcatcaagaaatgtttaattataatgagcatgaagttagtaaaaggtggacatttgaagaaggtattaaaagaccttactttcatgtgaaacctttggaaaaggcacaactaaaaaactggaaagaatacttagaatttgaaattgaaaatgggactcatgaacgagttgtggttctctttgaaagatgtgtcatatcatgtgccctctatgaggagttttggattaagtatgccaagtacatggaaaaccatagcattgaaggagtgaggcatgtcttcagcagagcttgtactatacatctcccaaagaaacccatggtgcatatgctttgggcagcttttgaggaacagcagggtaatattaatgaagccaggaatatcttgaaaacatttgaagaatgtgttctaggattggcaatggttcgtttacgaagagtaagtttagaacgacggcatggaaatctggaagaagctgaacatttgcttcaggatgccattaagaatgccaaatcaaataatgaatcttcattttatgctgtcaaactagcccggcatcttttcaaaatacagaaaaaccttccaaaatcaagaaaggtgcttttggaagcaatcgaaagagacaaagagaacacaaagttatacctcaatttacttgaaatggaatatagtggtgacctcaaacaaaatgaagaaaatatcctaaattgttttgacaaagctgtacatggttcattacctattaaaatgagaattacattttctcagagaaaagtggaatttcttgaagattttggttccgatgttaataagcttctgaatgcttatgatgaacatcaaacactcctgaaagaacaggattctttaaaaaggaaagcagaaaatggatcagaagaaccagaggaaaagaaagcacatacagaagatacaacttcatcatctacacagatgattgatggtgatttacaggcaaaccaagctgtatataattatagtgcgtggtatcaatacaattatcagaatccttggaattatggacaatattatcctccccctccaacctgatgggaaaaatgtaaatttcaaatgcagtgtgtgaaaagtatgaaattattattttttttaatgagggatgtaaacagtataagcttgttgtatttgataacctgtcttccttgtttctgtgtaacatgatttgtttagtaatagggggaaaatgtcaattagtagcttaccacagatactgtttcctaccatttataaaatttactttttattgaaaaactattttttgatttttgcattaagtggtctagaattcttttgcaatgcatttgcaacagaattttgtagccttaaggggtaggaagaaaaacctgactgcaaatcatgtcagtgtagtacaaaattctgaaaacacataagggctggttatttacctccttttttttttttttttttaaagaaaaaaggacttttaacctttgctgacaaggttttgtctgtttcagttatacttgtgaattgtgatctaactgcagaaaggatacattattaaaatactttgccttggaatagattataaatgagaaaatggaatgtttgcatccctttaaaaatgaaaatcatatcaaaagtatgttgtttcaggagactttgtatttagaatattcatgtaaaacttgtgaacaagctttcattttgatcaaactgatcttcatttttgtaataaaacggaagactcatccagtaa

SEQ ID NO: 168935 - DNA, 2977 bp, Homo sapiens
  Payload ID: 13255
  Gene Symbol: PRPF39
  Gene Name: pre-mRNA processing factor 39
  ENST ID: ENST00000554429
  CDS Start-End: 2-460
tatgcaaaattctcacatggatgaatacagaaattctagtaatggcagcacaggcaacagttcagaggtagtggtagaacatcctactgatttcagtactgagattatgaacgttacagaaatggaacagtcacctgatgactctcccaatgtgaatgcatctacagaagaaactgaaatggcaagtgctgtggaccttccagtgacgctgacagaaacagaagcaaatttccctccagaatatgaaaaattttggaaaactgtagaaaataatcctcaggattttacaggctgggtatatttgcttcaatatgtagaacaggagaatcacttgatggctgccaggaaggcatttgacagatttttcatacactatccgtattgctatggttactggaaaaagtatgcagaccttgaaaagcggcacgacaacattaaaccatcagatgaggtgcgttaaacctctacagtttgtcaagctttgcagtgcaagcctctgtattacactgcagcttaacaaacgctgtcattgatgctctaatgggtctgtgccctatggtctgtaacccaaagcctgcccacacaacccggtcagaatgcagggactgctgcgctttgaagatcaagactctgcacgtggggatcagaacattgccatgttctatccaacctccacccaaatggtttatcggcgggggcttcaggcaatacctcttagtgttgacctttggatacattatataaacttcttaaaagaaacattggaccctggtgatcctgagacaaacaatacaataagaggaacttttgagcatgctgttctagctgcaggaacagatttccgttctgacagactgtgggaaatgtatataaactgggaaaatgagcagggaaacctgagagaagttacagctatatatgatcgtattcttggtattccaacacagctgtatagtcatcattttcagagatttaaagaacatgtacagaataatttgcctagagatcttttaactggtgaacagtttattcagttgcgaagggaattagcttctgtaaatggtcatagtggtgatgatggtcctcctggtgatgatctaccatcgggaattgaagacataaccgatcctgcaaagctaattacagaaatagaaaacatgagacatagaatcattgagattcatcaagaaatgtttaattataatgagcatgaagttagtaaaaggtggacatttgaagaaggtattaaaagaccttactttcatgtgaaacctttggaaaaggcacaactaaaaaactggaaagaatacttagaatttgaaattgaaaatgggactcatgaacgagttgtggttctctttgaaagatgtgtcatatcatgtgccctctatgaggagttttggattaaggagatggtctgcttgcaaccagatttgactgctgcatatgccaacctcgttgcctctcttcgtccttccttacagaaactagtctagtggttcaataaagtatgccaagtacatggaaaaccatagcattgaaggagtgaggcatgtcttcagcagagcttgtactatacatctcccaaagaaacccatggtgcatatgctttgggcagcttttgaggaacagcagggattggcaatggttcgtttacgaagagtaagtttagaacgacggcatggaaatctggaagaagctgaacatttgcttcaggatgccattaagaatgccaaatcaaataatgaatcttcattttatgctgtcaaactagcccggcatcttttcaaaatacagaaaaaccttccaaaatcaagaaaggtgcttttggaagcaatcgaaagagacaaagagaacacaaagttatacctcaatttacttgaaatggaatatagtggtgacctcaaacaaaatgaagaaaatatcctaaattgttttgacaaagctgtacatggttcattacctattaaaatgagaattacattttctcagagaaaagtggaatttcttgaagattttggttccgatgttaataagcttctgaatgcttatgatgaacatcaaacactcctgaaagaacaggattctttaaaaaggaaagcagaaaatggatcagaagaaccagaggaaaagaaagcacatacagaagatacaacttcatcatctacacagatgattgatggtgatttacaggcaaaccaagctgtatataattatagtgcgtggtatcaatacaattatcagaatccttggaattatggacaatattatcctccccctccaacctgatgggaaaaatgtaaatttcaaatgcagtgtgtgaaaagtatgaaattattattttttttaatgagggatgtaaacagtataagcttgttgtatttgataacctgtcttccttgtttctgtgtaacatgatttgtttagtaatagggggaaaatgtcaattagtagcttaccacagatactgtttcctaccatttataaaatttactttttattgaaaaactattttttgatttttgcattaagtggtctagaattcttttgcaatgcatttgcaacagaattttgtagccttaaggggtaggaagaaaaacctgactgcaaatcatgtcagtgtagtacaaaattctgaaaacacataagggctggttatttacctccttttttttttttttttttaaagaaaaaaggacttttaacctttgctgacaaggttttgtctgtttcagttatacttgtgaattgtgatctaactgcagaaaggatacattattaaaatactttgccttggaatagattataaatgagaaaatggaatgtttgcatccctttaaaaatgaaaatcatatcaaaagtatgttgtttcaggagactttgtatttagaatattcatgtaaaacttgtgaacaagctttcattttgatcaaactgatcttcatttttgtaataaaacggaagactcatccagtaa

SEQ ID NO: 168936 - DNA, 2982 bp, Homo sapiens
  Payload ID: 13255
  Gene Symbol: PRPF39
  Gene Name: pre-mRNA processing factor 39
  ENST ID: ENST00000554439
  CDS Start-End: 20-478
atcgttaactgaagacaatatgcaaaattctcacatggatgaatacagaaattctagtaatggcagcacaggcaacagttcagaggtagtggtagaacatcctactgatttcagtactgagattatgaacgttacagaaatggaacagtcacctgatgactctcccaatgtgaatgcatctacagaagaaactgaaatggcaagtgctgtggaccttccagtgacgctgacagaaacagaagcaaatttccctccagaatatgaaaaattttggaaaactgtagaaaataatcctcaggattttacaggctgggtatatttgcttcaatatgtagaacaggagaatcacttgatggctgccaggaaggcatttgacagatttttcatacactatccgtattgctatggttactggaaaaagtatgcagaccttgaaaagcggcacgacaacattaaaccatcagatgaggtgcgttaaacctctacagtttgtcaagctttgcagtgcaagcctctgtattacactgcagcttaacaaacgctgtcattgatgctctaatgggtctgtgccctatggtctgtaacccaaagcctgcccacacaacccggtcagaatgcagggactgctgcgctttgaagatcaagactctgcacgtggggatcagaacattgccatgttctatccaacctccacccaaatggtttatcggcgggggcttcaggcaatacctcttagtgttgacctttggatacattatataaacttcttaaaagaaacattggaccctggtgatcctgagacaaacaatacaataagaggaacttttgagcatgctgttctagctgcaggaacagatttccgttctgacagactgtgggaaatgtatataaactgggaaaatgagcagggaaacctgagagaagttacagctatatatgatcgtattcttggtattccaacacagctgtatagtcatcattttcagagatttaaagaacatgtacagaataatttgcctagagatcttttaactggtgaacagtttattcagttgcgaagggaattagcttctgtaaatggtcatagtggtgatgatggtcctcctggtgatgatctaccatcgggaattgaagacataaccgatcctgcaaagctaattacagaaatagaaaacatgagacatagaatcattgagattcatcaagaaatgtttaattataatgagcatgaagttagtaaaaggtggacatttgaagaaggtattaaaagaccttactttcatgtgaaacctttggaaaaggcacaactaaaaaactggaaagaatacttagaatttgaaattgaaaatgggactcatgaacgagttgtggttctctttgaaagatgtgtcatatcatgtgccctctatgaggagttttggattaagtatgccaagtacatggaaaaccatagcattgaaggagtgaggcatgtcttcagcagagcttgtactatacatctcccaaagaaacccatggtgcatatgctttgggcagcttttgaggaacagcagggtaatattaatgaagccaggaatatcttgaaaacatttgaagaatgtgttctaggattggcaatggttcgtttacgaagagtaagtttagaacgacggcatggaaatctggaagaagctgaacatttgcttcaggatgccattaagaatgccaaatcaaataatgaatcttcattttatgctgtcaaactagcccggcatcttttcaaaatacagaaaaaccttccaaaatcaagaaaggtgcttttggaagcaatcgaaagagacaaagagaacacaaagttatacctcaatttacttgaaatggaatatagtggtgacctcaaacaaaatgaagaaaatatcctaaattgttttgacaaagctgtacatggttcattacctattaaaatgagaattacattttctcagagaaaagtggaatttcttgaagattttggttccgatgttaataagcttctgaatgcttatgatgaacatcaaacactcctgaaagaacaggattctttaaaaaggaaagcagaaaatggatcagaagaaccagaggaaaagaaagcacatacagaagatacaacttcatcatctacacagatgattgatggtgatttacaggcaaaccaagctgtatataattatagtgcgtggtatcaatacaattatcagaatccttggaattatggacaatattatcctccccctccaacctgatgggaaaaatgtaaatttcaaatgcagtgtgtgaaaagtatgaaattattattttttttaatgagggatgtaaacagtataagcttgttgtatttgataacctgtcttccttgtttctgtgtaacatgatttgtttagtaatagggggaaaatgtcaattagtagcttaccacagatactgtttcctaccatttataaaatttactttttattgaaaaactattttttgatttttgcattaagtggtctagaattcttttgcaatgcatttgcaacagaattttgtagccttaaggggtaggaagaaaaacctgactgcaaatcatgtcagtgtagtacaaaattctgaaaacacataagggctggttatttacctccttttttttttttttttttaaagaaaaaaggacttttaacctttgctgacaaggttttgtctgtttcagttatacttgtgaattgtgatctaactgcagaaaggatacattattaaaatactttgccttggaatagattataaatgagaaaatggaatgtttgcatccctttaaaaatgaaaatcatatcaaaagtatgttgtttcaggagactttgtatttagaatattcatgtaaaacttgtgaacaagctttcattttgatcaaactgatcttcatttttgtaataaaacggaagactcatccagtaattgtttatgaatttattttggggggatcaatta

SEQ ID NO: 168937 - DNA, 3223 bp, Homo sapiens
  Payload ID: 13255
  Gene Symbol: PRPF39
  Gene Name: pre-mRNA processing factor 39
  ENST ID: ENST00000554081
  CDS Start-End: 1-52
gcggcacgacaacattaaaccatcagatgagacgctgtcattgatgctctaatgggtctgtgccctatggtctgtaacccaaagcctgcccacacaacccggtcagaatgcagggactgctgcgctttgaagatcaagactctgcacgtggggatcagaacattgccatgttctatccaacctccacccaaatggtttatcggcgggggcttcaggcaatacctcttagtgttgacctttggatacattatataaacttcttaaaagaaacattggaccctggtgatcctgagacaaacaatacaataagaggaacttttgagcatgctgttctagctgcaggaacagatttccgttctgacagactgtgggaaatgtatataaactgggaaaatgagcagggaaacctgagagaagttacagctatatatgatcgtattcttggtattccaacacagctgtatagtcatcattttcagagatttaaagaacatgtacagaataatttgcctagagatcttttaactggtgaacagtttattcagttgcgaagggaattagcttctgtaaatggtcatagtggtgatgatggtcctcctggtgatgatctaccatcgggaattgaagacataaccgatcctgcaaagctaattacagaaatagaaaacatgagacatagaatcattgagattcatcaagaaatgtttaattataatgagcatgaagttagtaaaaggtggacatttgaagaaggtattaaaagaccttactttcatgtgaaacctttggaaaaggcacaactaaaaaactggaaagaatacttagaatttgaaattgaaaatgggactcatgaacgagttgtggttctctttgaaagatgtgtcatatcatgtgccctctatgaggagttttggattaaggagatggtctgcttgcaaccagatttgactgctgcatatgccaacctcgttgcctctcttcgtccttccttacagaaactagtctagtggttcaataaagtatgccaagtacatggaaaaccatagcattgaaggagtgaggcatgtcttcagcagagcttgtactatacatctcccaaagaaacccatggtgcatatgctttgggcagcttttgaggaacagcagggtaatattaatgaagccaggaatatcttgaaaacatttgaagaatgtgttctaggattggcaatggttcgtttacgaagagtaagtttagaacgacggcatggaaatctggaagaagctgaacatttgcttcaggatgccattaagaatgccaaatcaaataatgaatcttcattttatgctgtcaaactagcccggcatcttttcaaaatacagaaaaaccttccaaaatcaagaaaggtgcttttggaagcaatcgaaagagacaaagagaacacaaagttatacctcaatttacttgaaatggaatatagtggtgacctcaaacaaaatgaagaaaatatcctaaattgttttgacaaagctgtacatggttcattacctattaaaatgagaattacattttctcagagaaaagtggaatttcttgaagattttggttccgatgttaataagcttctgaatgcttatgatgaacatcaaacactcctgaaagaacaggattctttaaaaaggaaagcagaaaatggatcagaagaaccagaggaaaagaaagcacatacagaagatacaacttcatcatctacacagatgattgatggtgatttacaggcaaaccaagctgtatataattatagtgcgtggtatcaatacaattatcagaatccttggaattatggacaatattatcctccccctccaacctgatgggaaaaatgtaaatttcaaatgcagtgtgtgaaaagtatgaaattattattttttttaatgagggatgtaaacagtataagcttgttgtatttgataacctgtcttccttgtttctgtgtaacatgatttgtttagtaatagggggaaaatgtcaattagtagcttaccacagatactgtttcctaccatttataaaatttactttttattgaaaaactattttttgatttttgcattaagtggtctagaattcttttgcaatgcatttgcaacagaattttgtagccttaaggggtaggaagaaaaacctgactgcaaatcatgtcagtgtagtacaaaattctgaaaacacataagggctggttatttacctccttttttttttttttttttaaagaaaaaaggacttttaacctttgctgacaaggttttgtctgtttcagttatacttgtgaattgtgatctaactgcagaaaggatacattattaaaatactttgccttggaatagattataaatgagaaaatggaatgtttgcatccctttaaaaatgaaaatcatatcaaaagtatgttgtttcaggagactttgtatttagaatattcatgtaaaacttgtgaacaagctttcattttgatcaaactgatcttcatttttgtaataaaacggaagactcatccagtaattgtttatgaatttattttggggggatcaattagtaatattaaccttatgttcacctttattagtggctcattggttttgaagtacaccttttctaaattcaggtcttgatcttcctgccaagatttttctgcttttagcattttgtttcccctcaagccttatgcttttgccttctcattatacaggcaatctgtccagataattttactgggagttactccctggtttgatgaggtccttagttccaattccctaatcagaacaataatatattaacaccaaacaaatcacagtcagatcaagacagtggatcaatttttattgagccacttaagtttacaacatgaggtaaaaggaaaaagttctccttgaccagtattttacacagctgtaggaaagtattttagaccagggattcataagggatttatctctcaaaagctgggaccaagtaaacaaattttattaactccttgaattttccagttgactcttcctttacaatagtaacaagttctaactagttgtgtaaatttcttcaaggccaagttttatcattgttgctaatatccttagagctgaagcactgctatttcaatcaatatccactaattccacttcaaaagtgagttttgcatttggtggaattctgttgaagaagtcaaggtacatttgataa

SEQ ID NO: 168938 - DNA, 582 bp, Homo sapiens
  Payload ID: 13255
  Gene Symbol: PRPF39
  Gene Name: pre-mRNA processing factor 39
  ENST ID: ENST00000553605
  CDS Start-End: 163-582
atgcgcatcgtgccctggaccaggcggccgtggcgcgggtggcggctgctgtgctggctgtggggacggaggcggtgaagtgccatcttcggctaggtcgtcacaggctccggctcatggcatcaagtggcatccatcataagatcgttaactgaagacaatatgcaaaattctcacatggatgaatacagaaattctagtaatggcagcacaggcaacagttcagaggtagtggtagaacatcctactgatttcagtactgagattatgaacgttacagaaatggaacagtcacctgatgactctcccaatgtgaatgcatctacagaagaaactgaaatggcaagtgctgtggaccttccagtgacgctgacagaaacagaagcaaatttccctccagaatatgaaaaattttggaaaactgtagaaaataatcctcaggattttacaggctggaatcacttgatggctgccaggaaggcatttgacagatttttcatacactatccgtattgctatggttactggaaaaagtatgcagaccttgaaaagcggcacgacaacattaaaccatcagatgag

SEQ ID NO: 168939 - DNA, 724 bp, Homo sapiens
  Payload ID: 13255
  Gene Symbol: PRPF39
  Gene Name: pre-mRNA processing factor 39
  ENST ID: ENST00000557477
  CDS Start-End: 1-272
aggcaatacctcttagtgttgacctttggatacattatataaacttcttaaaagaaacattggaccctggtgatcctgagacaaacaatacaataagaggaacttttgagcatgctgttctagctgcaggaacagatttccgttctgacagactgtgggaaatgtatataaactgggaaaatgagcagggaaacctgagagaagttacagctatatatgatcgtattcttggtattccaacacagctgtatagtcatcattttcagagctaattacagaaatagaaaacatgagacatagaatcattgagattcatcaagaaatgtttaattataatgagcatgaagttagtaaaaggtggacatttgaagaaggtattaaaagaccttactttcatgtgaaacctttggaaaaggcacaactaaaaaactggaaagaatacttagaatttgaaattgaaaatgggactcatgaacgagttgtggttctctttgaaagatgtgtcatatcatgtgccctctatgaggagttttggattaaggagatggtctgcttgcaaccagatttgactgctgcatatgccaacctcgttgcctctcttcgtccttccttacagaaactagtctagtggttcaataaagtatgccaagtacatggaaaaccatagcattgaaggagtgaggcatgtcttcagcagagcttgtactatacatctcccaaagaa

SEQ ID NO: 168940 - DNA, 2787 bp, Homo sapiens
  Payload ID: 13256
  Gene Symbol: PRPF4
  Gene Name: pre-mRNA processing factor 4
  Uniprot ID: O43172
  ENST ID: ENST00000374198
  CDS Start-End: 103-1671
acttcctgtcagtgacgcacttcccctctgctgggcgcgcggtggacggtctgaaagggagtgttcgggtttcgctggggcctcgcggctccagagcccagcatggcttcctcgcgagcctcttccacgcaggcaaccaaaactaaagcacccgacgacttagttgctccggtcgtgaagaaaccacacatctattatggaagtttggaagagaaggagagggagcgtctggccaaaggagagtctgggattttggggaaagacggacttaaagcagggatcgaagctggaaatattaatataacctctggagaagtgtttgaaattgaagagcatatcagcgagcgacaggcagaagtattggctgagtttgagagaaggaagcgagcccggcagatcaatgtttccacagatgactcagaggtcaaagcttgccttagagccttgggggaacccatcacactttttggagagggtcctgctgaaagaagagaaaggttaagaaatatcctctcagttgtcggtactgatgccttgaaaaagaccaaaaaggatgatgagaagtctaaaaagtccaaagaagagtatcagcaaacctggtatcatgaaggaccaaatagcttgaaggtggcaagactatggattgctaattattcgttgcccagggcaatgaaacgcttggaagaggcccgactccataaggagattcctgagacaacaaggacctcccagatgcaagagctgcacaagtctctccggtctttgaataatttttgcagtcagattggggatgatcggcctatctcctactgtcactttagtcccaattccaagatgctggccacagcttgttggagtgggctttgcaagctctggtctgttcctgattgcaacctccttcacactcttcgagggcataacacaaatgtaggagcaattgtattccatcccaaatccactgtctccttggacccaaaagatgtcaacctggcctcttgtgcggctgatggctctgtgaagctttggagtctcgacagtgatgaaccagtggcagatattgaaggccatacagtgcgtgtggcgcgggtaatgtggcatccttcaggacgtttcctgggcaccacctgctatgaccgttcatggcgcttatgggatttggaggctcaagaggagatcctgcatcaggaaggccatagcatgggtgtgtatgacattgccttccatcaagatggctctttggctggcactgggggactggatgcatttggtcgagtttgggacctacgcacaggacgttgtatcatgttcttagaaggccacctgaaagaaatctatggaataaatttctcccccaatggctatcacattgcaaccggcagtggtgacaacacctgcaaagtgtgggacctccgacagcggcgttgcgtctacaccatccctgctcatcagaacttagtgactggtgtcaagtttgagcctatccatgggaacttcttgcttactggtgcctatgataacacagccaagatctggacgcacccaggctggtccccgctgaagactctggctggccacgaaggcaaagtgatgggcctagatatttcttccgatgggcagctcatagccacttgctcatatgacaggaccttcaagctgtggatggctgaatagatgacaatgggaaaaggacttgaacctcaagctctctctaaggagctgttttcctcaaacgagaagaattgaagtgtttagttctatcatgttttctgccaattaccatgcatagaccctcagtagaattggatttccatgtcagcccccactccaggaaggcagcccaatccctaggtgatggggaacccctctcacggttgaaaatttattacctttttacgccctgccacgaactgtgtagacattgtttttattaatcttttgtttggccgggcgtggtggctcacgcctgtaatcctagcactttgggaggccgaggtgggtagatcgcttgagctcaggagttcaagacgagcctgggcaacatggcaaatgccgtctctgcaaaaaaatactaaaattagctggtcgcggtggcttctgcctgtgattccggctacttgggaggctgaggtgggagggattgcttaagcctgggaggcagaggttgcagtgagccgagattgcgccattgcactctagcctgtgtgacagagcaagaccctgtctcaaaaaaaaaaaaaatttgttcgaatgccttatagccttcctcacagcacccaggattgtgactgactctgcatttttaattcttgaaacttggctttccataacatggtacatgcttcaggactacatatgacccagagagcaaggtggctgaactatagtctggaagccctcaggtaaagaggcacatctcaccactcattggttaaacaatgcatcatagcgagcacttttcctttccctggagaatgggatgtgaagcagtagaccgcagccacgccgatggttatacagtgaagaagacttcacctcttcctattgagtttgcttggaatgctgacagcatcaggcaactctgaactgaacatttgctttgtcagaaaatatctttttttttactttgaagtttggcaaccttcatgttaccccaaagcaaaaccattgtgtcaggagtcaaacaaatgtttagaaagcaaacatgacgtctctattgtacaacctcctttctcttggctgtttaaaggatgtacttcgtgtattaaagggtactttatgttgaagtaa

SEQ ID NO: 168941 - DNA, 3212 bp, Homo sapiens
  Payload ID: 13256
  Gene Symbol: PRPF4
  Gene Name: pre-mRNA processing factor 4
  Uniprot ID: O43172
  ENST ID: ENST00000374199
  CDS Start-End: 402-1967
cagagttcagccccgagccgcgcgagtcgactcacctacctcttttcaagccggcctagccccttcccggaacctcggctcccccccaacgaaactactgctaagccaactggactacacttcccagactgcttggagcctctctctccgcagaacctcgtcttccgcgagcttttcctggaggttctaggagggatgcccctcaatgccacgacgccatttcctactacgacttccatcatgctccgcgccgctccgggggcggtgacccctcttggcccacgtcttgtcagtgacgcacttcctgtcagtgacgcacttcccctctgctgggcgcgcggtggacggtctgaaagggagtgttcgggtttcgctggggcctcgcggctccagagcccagcatggcttcctcgcgagcctcttccacggcaaccaaaactaaagcacccgacgacttagttgctccggtcgtgaagaaaccacacatctattatggaagtttggaagagaaggagagggagcgtctggccaaaggagagtctgggattttggggaaagacggacttaaagcagggatcgaagctggaaatattaatataacctctggagaagtgtttgaaattgaagagcatatcagcgagcgacaggcagaagtattggctgagtttgagagaaggaagcgagcccggcagatcaatgtttccacagatgactcagaggtcaaagcttgccttagagccttgggggaacccatcacactttttggagagggtcctgctgaaagaagagaaaggttaagaaatatcctctcagttgtcggtactgatgccttgaaaaagaccaaaaaggatgatgagaagtctaaaaagtccaaagaagagtatcagcaaacctggtatcatgaaggaccaaatagcttgaaggtggcaagactatggattgctaattattcgttgcccagggcaatgaaacgcttggaagaggcccgactccataaggagattcctgagacaacaaggacctcccagatgcaagagctgcacaagtctctccggtctttgaataatttttgcagtcagattggggatgatcggcctatctcctactgtcactttagtcccaattccaagatgctggccacagcttgttggagtgggctttgcaagctctggtctgttcctgattgcaacctccttcacactcttcgagggcataacacaaatgtaggagcaattgtattccatcccaaatccactgtctccttggacccaaaagatgtcaacctggcctcttgtgcggctgatggctctgtgaagctttggagtctcgacagtgatgaaccagtggcagatattgaaggccatacagtgcgtgtggcgcgggtaatgtggcatccttcaggacgtttcctgggcaccacctgctatgaccgttcatggcgcttatgggatttggaggctcaagaggagatcctgcatcaggaaggccatagcatgggtgtgtatgacattgccttccatcaagatggctctttggctggcactgggggactggatgcatttggtcgagtttgggacctacgcacaggacgttgtatcatgttcttagaaggccacctgaaagaaatctatggaataaatttctcccccaatggctatcacattgcaaccggcagtggtgacaacacctgcaaagtgtgggacctccgacagcggcgttgcgtctacaccatccctgctcatcagaacttagtgactggtgtcaagtttgagcctatccatgggaacttcttgcttactggtgcctatgataacacagccaagatctggacgcacccaggctggtccccgctgaagactctggctggccacgaaggcaaagtgatgggcctagatatttcttccgatgggcagctcatagccacttgctcatatgacaggaccttcaagctgtggatggctgaatagatgacaatgggaaaaggacttgaacctcaagctctctctaaggagctgttttcctcaaacgagaagaattgaagtgtttagttctatcatgttttctgccaattaccatgcatagaccctcagtagaattggatttccatgtcagcccccactccaggaaggcagcccaatccctaggtgatggggaacccctctcacggttgaaaatttattacctttttacgccctgccacgaactgtgtagacattgtttttattaatcttttgtttggccgggcgtggtggctcacgcctgtaatcctagcactttgggaggccgaggtgggtagatcgcttgagctcaggagttcaagacgagcctgggcaacatggcaaatgccgtctctgcaaaaaaatactaaaattagctggtcgcggtggcttctgcctgtgattccggctacttgggaggctgaggtgggagggattgcttaagcctgggaggcagaggttgcagtgagccgagattgcgccattgcactctagcctgtgtgacagagcaagaccctgtctcaaaaaaaaaaaaaatttgttcgaatgccttatagccttcctcacagcacccaggattgtgactgactctgcatttttaattcttgaaacttggctttccataacatggtacatgcttcaggactacatatgacccagagagcaaggtggctgaactatagtctggaagccctcaggtaaagaggcacatctcaccactcattggttaaacaatgcatcatagcgagcacttttcctttccctggagaatgggatgtgaagcagtagaccgcagccacgccgatggttatacagtgaagaagacttcacctcttcctattgagtttgcttggaatgctgacagcatcaggcaactctgaactgaacatttgctttgtcagaaaatatctttttttttactttgaagtttggcaaccttcatgttaccccaaagcaaaaccattgtgtcaggagtcaaacaaatgtttagaaagcaaacatgacgtctctattgtacaacctcctttctcttggctgtttaaaggatgtacttcgtgtattaaagggtactttatgttgaagtaacgaaaaaaccctaatgggtgttcctaaacctaaaccttttctttattccacatttgctacggtaaaatcctgttacaaaactaccctataaagaattattttctatagttaagcattttctgaatccta

SEQ ID NO: 168942 - DNA, 4415 bp, Homo sapiens
  Payload ID: 13257
  Gene Symbol: PRPF4B
  Gene Name: pre-mRNA processing factor 4B
  Uniprot ID: Q13523
  ENST ID: ENST00000337659
  CDS Start-End: 101-3124
ggcacatgcgcggcagctcttttccttcttcctccacttcccctaccctccaccgtccgggagccgccgccaccgccgccgaggagtcaggaagttcaagatggccgccgcggagacccagtcgctacgggagcagccagagatggaagatgctaattctgaaaagagtataaatgaagaaaatggagaagtatcagaagaccagtctcaaaataagcacagtcgtcacaaaaaaaagaagcataaacacagaagtaaacataagaaacataaacattcctcagaagaagacaaggataaaaaacataaacataagcataaacataagaaacacaaaagaaaagagattattgatgcttctgataaagagggtatgtctccagcaaaaagaactaaacttgatgatttagctttgctagaagacttggaaaaacagagagccttgattaaggccgaacttgataatgagttaatggaaggaaaggtccagtctggtatggggctcattttgcaaggttatgagtctggctctgaagaagagggggaaattcatgaaaaggcaagaaatggaaataggtctagtactagatcttcaagtacaaaggggaaacttgaacttgtggacaataaaattactacaaagaaacgaagtaaaagcagatccaaagaacggactagacataggtctgataaaaagaaaagtaaggggggtattgaaatcgttaaagagaaaacaactaggagcaagtcaaaggagaggaaaaaatctaaaagcccatccaaaagaagtaagtctcaagatcaagcaaggaaatcaaaatcccctacccttagaaggcgatctcaagagaaaattggtaaggccagatctcctactgatgataaggttaaaattgaagataaaagtaaatcaaaagataggaaaaaatccccaattataaatgaaagtagaagtcgcgatcgaggtaaaaaatccagatccccagttgatttaagaggtaaatccaaagacagaaggtcacggtccaaagagagaaaatcaaaacggtctgaaactgataaagaaaagaagccaattaaatctccctctaaagatgcttcatctgggaaagaaaataggtcacccagcagaagacctggtcgtagtcctaaaagaagaagtttgtctccaaaaccacgtgataaatcaagaagaagcaggtctccacttttgaatgatagaagatctaagcagagcaaatccccctcgcggacactgtctcctgggagaagagccaagagccgatccttagaaagaaaacgacgagaaccagagaggagacgactttcttctccaagaacacgacctcgagatgatatcctcagtagacgtgaaagatcaaaagatgccagccccatcaatagatggtctccaacccgaagaagaagtagatctcccattagaaggaggtctcgttccccactcagacgtagcaggtctccaagaagaagaagcagatctcctcggagaagggacagaggtcggaggagcagatcacgcttgcgaaggcggtctcgatcacgcggtggtcgtagacgaaggagcagaagcaaagtaaaggaagataaatttaaaggaagtctttctgaaggaatgaaagttgagcaggaatcttcgtctgatgataaccttgaagactttgatgtagaggaagaagatgaagaagccctaatagaacagagaagaatccaaaggcaggcaattgttcagaaatataaataccttgctgaagatagcaacatgtctgtgccatctgaaccaagcagcccccagagcagtacgagaacacgatcaccatctccagatgacattctggagcgagtagctgctgatgttaaagagtatgaacgggaaaatgttgatacatttgaggcctcagtgaaagccaagcataatctaatgacagttgaacagaataatggttcatctcagaagaagttgttggcacctgatatgtttacagaatctgatgatatgtttgctgcgtattttgatagtgctcgtcttcgggccgctggcattggaaaagatttcaaagagaatcccaacctcagagataactggaccgatgcagaaggctattatcgtgtgaacataggtgaagtcctagataaacgttacaatgtgtatggctacactgggcaaggtgtattcagtaatgttgtacgagccagagataatgcaagagccaaccaagaagtggctgtaaagatcatcagaaacaatgagctcatgcaaaagactggtttaaaagaattagagttcttgaaaaaacttaatgatgctgatcctgatgacaaatttcattgtctgagactcttcaggcacttctatcacaagcagcatctttgtctggtattcgagcctctcagcatgaacttacgagaggtgttaaaaaaatatggtaaagatgttggtcttcatattaaagctgtaagatcctatagtcagcagttgttcctggcattgaaactccttaaaagatgcaatatcctacatgcagatatcaagccagacaatatcctggttaatgaatccaaaactattttaaagctttgcgattttgggtcggcttcacatgttgcggataatgacataacaccttatcttgtcagtagattttatcgtgctcctgaaatcattataggtaaaagctatgactatggtatagatatgtggtctgtaggttgcaccttatacgaactctatactggaaaaattttattccctggcaaaaccaataaccatatgctgaagcttgcaatggatctcaaaggaaagatgccaaataagatgattcgaaaaggtgtgttcaaagatcagcattttgatcaaaatctcaacttcatgtacatagaagttgataaagtaacagagagggagaaagttactgttatgagcaccattaatccaactaaggacctgttggctgacttgattgggtgccagagacttcctgaagaccaacgtaagaaagtacaccagctaaaggacttgttggaccagattctgatgttggacccagctaaacgaattagcatcaaccaggccctacagcacgccttcatccaggaaaaaatttaaacaagatgaagaaactccaagggtttgagtaaatacaaagactgaagaaatttcacagcagtttattaatgtatataaacttataaatatttctccagcaaatttgaggaagcatgatatatttgaattaacaccaagggtgatatttcttttagagatgttagttaatctgttttgtgtcttacgtgaaatttcactgtagactgttttaaattgccaagactgcacaaaattacagtgctaatgtatatggttgcagttcacataaagacaaaagcatctgttatgaaatgagtagtaatattgggtggttgatttgttcttagcagacttggcttcattttggtcttgagataaaatggccagcataaatgctgtttatattcacgttttcctaggtgtgtgtgtgcaggccacagcagcatgcccttggtgtagtcagtgccgaaaggggtctgttccttcttgagcctgcctgcagggatggtctccttttaaagcaggttgtgtgcagcattcagtacactgaaggtaagctaaaccatcaacatctctggtgttttaagatgttattttattggaacaactgacaaatgagggatgttagctttgtggcagaattccctgcatgtgtgataactgatcttgttttattttttggcattgcaactgtggcatagttacaatttctgtttgttcatcacatttaaaattggaagagaacgcgcttgatggatagagcgccttcagtgtactgtttcttattaactttactttttttaaatcaacttgctatagactttatatacattttgttaaatatagttcctagtgacatagaaacgatgcgtagttttcatttactaattacaaatgttgaggcctaattctgaaagtcctcatatttaaaggctagacaacgtaatgaaatttttaactatttgtatgtcattttgaaagtgtactgctttatggtaaaagtgtttttcatttgttcattgttttcattatttgtgatcatgttgtctttcaatacaggcataaaccttccactcttgaacaaagcagctgctttttaaaagcggtaattgcttctttaccttttatttcttttgtaaatgaagcttttctttaagaatgtgactttaaagtgttgtctattgcataaaacagttgacactcacttattgtaaagtgaagattgttctactgcatgtgaagtggaccatgcagatttctgtatgttctcagtatgcatcactagataataaagtcttttgtgaacaaggca

SEQ ID NO: 168943 - DNA, 6775 bp, Homo sapiens
  Payload ID: 13257
  Gene Symbol: PRPF4B
  Gene Name: pre-mRNA processing factor 4B
  Uniprot ID: Q13523
  ENST ID: ENST00000480058
  CDS Start-End: 160-3183
ggggttttatatccggattcttagcgcggactcagaacccagctcttccctacacggtcggcacatgcgcggcagctcttttccttcttcctccacttcccctaccctccaccgtccgggagccgccgccaccgccgccgaggagtcaggaagttcaagatggccgccgcggagacccagtcgctacgggagcagccagagatggaagatgctaattctgaaaagagtataaatgaagaaaatggagaagtatcagaagaccagtctcaaaataagcacagtcgtcacaaaaaaaagaagcataaacacagaagtaaacataagaaacataaacattcctcagaagaagacaaggataaaaaacataaacataagcataaacataagaaacacaaaagaaaagagattattgatgcttctgataaagagggtatgtctccagcaaaaagaactaaacttgatgatttagctttgctagaagacttggaaaaacagagagccttgattaaggccgaacttgataatgagttaatggaaggaaaggtccagtctggtatggggctcattttgcaaggttatgagtctggctctgaagaagagggggaaattcatgaaaaggcaagaaatggaaataggtctagtactagatcttcaagtacaaaggggaaacttgaacttgtggacaataaaattactacaaagaaacgaagtaaaagcagatccaaagaacggactagacataggtctgataaaaagaaaagtaaggggggtattgaaatcgttaaagagaaaacaactaggagcaagtcaaaggagaggaaaaaatctaaaagcccatccaaaagaagtaagtctcaagatcaagcaaggaaatcaaaatcccctacccttagaaggcgatctcaagagaaaattggtaaggccagatctcctactgatgataaggttaaaattgaagataaaagtaaatcaaaagataggaaaaaatccccaattataaatgaaagtagaagtcgcgatcgaggtaaaaaatccagatccccagttgatttaagaggtaaatccaaagacagaaggtcacggtccaaagagagaaaatcaaaacggtctgaaactgataaagaaaagaagccaattaaatctccctctaaagatgcttcatctgggaaagaaaataggtcacccagcagaagacctggtcgtagtcctaaaagaagaagtttgtctccaaaaccacgtgataaatcaagaagaagcaggtctccacttttgaatgatagaagatctaagcagagcaaatccccctcgcggacactgtctcctgggagaagagccaagagccgatccttagaaagaaaacgacgagaaccagagaggagacgactttcttctccaagaacacgacctcgagatgatatcctcagtagacgtgaaagatcaaaagatgccagccccatcaatagatggtctccaacccgaagaagaagtagatctcccattagaaggaggtctcgttccccactcagacgtagcaggtctccaagaagaagaagcagatctcctcggagaagggacagaggtcggaggagcagatcacgcttgcgaaggcggtctcgatcacgcggtggtcgtagacgaaggagcagaagcaaagtaaaggaagataaatttaaaggaagtctttctgaaggaatgaaagttgagcaggaatcttcgtctgatgataaccttgaagactttgatgtagaggaagaagatgaagaagccctaatagaacagagaagaatccaaaggcaggcaattgttcagaaatataaataccttgctgaagatagcaacatgtctgtgccatctgaaccaagcagcccccagagcagtacgagaacacgatcaccatctccagatgacattctggagcgagtagctgctgatgttaaagagtatgaacgggaaaatgttgatacatttgaggcctcagtgaaagccaagcataatctaatgacagttgaacagaataatggttcatctcagaagaagttgttggcacctgatatgtttacagaatctgatgatatgtttgctgcgtattttgatagtgctcgtcttcgggccgctggcattggaaaagatttcaaagagaatcccaacctcagagataactggaccgatgcagaaggctattatcgtgtgaacataggtgaagtcctagataaacgttacaatgtgtatggctacactgggcaaggtgtattcagtaatgttgtacgagccagagataatgcaagagccaaccaagaagtggctgtaaagatcatcagaaacaatgagctcatgcaaaagactggtttaaaagaattagagttcttgaaaaaacttaatgatgctgatcctgatgacaaatttcattgtctgagactcttcaggcacttctatcacaagcagcatctttgtctggtattcgagcctctcagcatgaacttacgagaggtgttaaaaaaatatggtaaagatgttggtcttcatattaaagctgtaagatcctatagtcagcagttgttcctggcattgaaactccttaaaagatgcaatatcctacatgcagatatcaagccagacaatatcctggttaatgaatccaaaactattttaaagctttgcgattttgggtcggcttcacatgttgcggataatgacataacaccttatcttgtcagtagattttatcgtgctcctgaaatcattataggtaaaagctatgactatggtatagatatgtggtctgtaggttgcaccttatacgaactctatactggaaaaattttattccctggcaaaaccaataaccatatgctgaagcttgcaatggatctcaaaggaaagatgccaaataagatgattcgaaaaggtgtgttcaaagatcagcattttgatcaaaatctcaacttcatgtacatagaagttgataaagtaacagagagggagaaagttactgttatgagcaccattaatccaactaaggacctgttggctgacttgattgggtgccagagacttcctgaagaccaacgtaagaaagtacaccagctaaaggacttgttggaccagattctgatgttggacccagctaaacgaattagcatcaaccaggccctacagcacgccttcatccaggaaaaaatttaaacaagatgaagaaactccaagggtttgagtaaatacaaagactgaagaaatttcacagcagtttattaatgtatataaacttataaatatttctccagcaaatttgaggaagcatgatatatttgaattaacaccaagggtgatatttcttttagagatgttagttaatctgttttgtgtcttacgtgaaatttcactgtagactgttttaaattgccaagactgcacaaaattacagtgctaatgtatatggttgcagttcacataaagacaaaagcatctgttatgaaatgagtagtaatattgggtggttgatttgttcttagcagacttggcttcattttggtcttgagataaaatggccagcataaatgctgtttatattcacgttttcctaggtgtgtgtgtgcaggccacagcagcatgcccttggtgtagtcagtgccgaaaggggtctgttccttcttgagcctgcctgcagggatggtctccttttaaagcaggttgtgtgcagcattcagtacactgaaggtaagctaaaccatcaacatctctggtgttttaagatgttattttattggaacaactgacaaatgagggatgttagctttgtggcagaattccctgcatgtgtgataactgatcttgttttattttttggcattgcaactgtggcatagttacaatttctgtttgttcatcacatttaaaattggaagagaacgcgcttgatggatagagcgccttcagtgtactgtttcttattaactttactttttttaaatcaacttgctatagactttatatacattttgttaaatatagttcctagtgacatagaaacgatgcgtagttttcatttactaattacaaatgttgaggcctaattctgaaagtcctcatatttaaaggctagacaacgtaatgaaatttttaactatttgtatgtcattttgaaagtgtactgctttatggtaaaagtgtttttcatttgttcattgttttcattatttgtgatcatgttgtctttcaatacaggcataaaccttccactcttgaacaaagcagctgctttttaaaagcggtaattgcttctttaccttttatttcttttgtaaatgaagcttttctttaagaatgtgactttaaagtgttgtctattgcataaaacagttgacactcacttattgtaaagtgaagattgttctactgcatgtgaagtggaccatgcagatttctgtatgttctcagtatgcatcactagataataaagtcttttgtgaacaaggcatttgtagccatttttaaaagtttttgtcttcagtgctggtaagtcaggtaaaccataaatagttaaaagcaaccttttgtttttttcctgaaagtttttaattgaaagtattattagttaaagatgtaaacctagccaaaattaccagtttattaataattaggatcctaattatttcaaaaaatcctacaaatattgtcagctttcagtgtagtgagattattcctgtaggttatggggtataattcaggatttaactaatgtttctgctattttctcacttttccttttgatggtgcggaaagagaaaaaggaaaacggggcacaggccattcgacgccttctccaaggggtctgatttgctgagacaccagcttcaccttcttaacaaggtgcagctcagtggaagatgatgacaaccagaagacatgagctaaggtttctgtcctataaaagatttattaaaaaacaatccttcatttattttttgtctaattttttagttttcagcattatgatttgggttttattggtgtttggtatttagaattagtgctgttgtggagtgcgtctgtaaagtgcttgttttatcatacttcctgcctctcccctcccccagtttctcctcccctaaaataaaaatagtggtcaactttagtaatataaaaggctgctggatgctgagattccacataacacatggttgtcaaaattggatgttaaggattcttagaaaaacagcaaccaccagaatagcatatatctgaaagtagtcttcagctttaggcagatgcaaaagaatacaaactggaatattaagaatactgttcaactcctttagtatctgttccccaacttaccctgtagaaacctcgttattaaccagtgttccagtcttaaagtagacaaaatattcagagccattttttttaagggaaatgaaaaagatactctgggttttttatactccccaatttagcatatctagactacctatttgaaaggaaccctatcaactgtcttatgtacgttacatgattttcctacactctgtaattttgctgaggtgcaatttggaactctgcaagacctactagattgaatttatttagtgaatgctcctgaataaatgtgcattcctcttttagagtagctgtatgcttttcaaatgctatctgccgtgaattttttgcttttattatactttatggcaaaagtgatatcaagtgattgtcagacttgagggctcatagaagtgttaggtacggctctcaaagatgttacagttttttctagggttgggagaatagttgagatctggaaagcatagacattttttacactctggatagactttattcttgaagatcatcagaaatgaggttggaatttcgaggttttgagcagggggagcatcttatattcacccttaaatcgttattaatacatcctgttttcttcattccctgatagctatctcatttcactctactgtctcaaaattttgttttaaaataatagaaatgttttgccattattaagtaccactttattcctaacaaaaataagtactcaggacttttttttcaaaatgaaatatttatgtactgttttatggtatgtggtagagtaagtaaaatgtaatgttctcagttttgttccatatttgcattcctcttatgctttacctgtattttatcatttgtaagcagaactctagctatatggggtagaaataaaatctctgagatgaaacaaaggaatcaacatgataaaatttaggcgaagtagttaagaaatggcccttttgaatgttgaagataggaaagaaagccatatattcaaatatgtaattttcctcatttagttataatgacatctttaccaattgggcttcataaatgtgtttctttcttaatagtatcctagttccagcatatattcaacatgaattttatcattctcctcctaatggaatgtcttccttatagaaatgttcacgacaaattcatttgtgttttttacatgtcaataatgtatgctaaattaaaatgttttccagttattctgatagatgtcattatggcatccttaatttttcttctccttctgtatatagggtaagggactgttctgaagaacctttccatttagtgatcaagatatggaagctgatttctgaaaatgctcagtgtgtactctaattatttatggtaccatttgaattgtaacttgcattttagcagtgcatgtttctaattgacttactgggaaactgaataaaatatgcctcttattatc

SEQ ID NO: 168944 - DNA, 2364 bp, Homo sapiens
  Payload ID: 13257
  Gene Symbol: PRPF4B
  Gene Name: pre-mRNA processing factor 4B
  ENST ID: ENST00000481109
  CDS Start-End: 1-1764
ctcagtagacgtgaaagatcaaaagatgccagccccatcaatagatggtctccaacccgaagaagaagtagatctcccattagaaggaggtctcgttccccactcagacgtagcaggtctccaagaagaagaagcagatctcctcggagaagggacagaggtcggaggagcagatcacgcttgcgaaggcggtctcgatcacgcggtggtcgtagacgaaggagcagaagcaaagtaaaggaagataaatttaaaggaagtctttctgaaggaatgaaagttgagcaggaatcttcgtctgatgataaccttgaagactttgatgtagaggaagaagatgaagaagccctaatagaacagagaagaatccaaaggcaggcaattgttcagaaatataaataccttgctgaagatagcaacatgtctgtgccatctgaaccaagcagcccccagagcagtacgagaacacgatcaccatctccagatgacattctggagcgagtagctgctgatgttaaagagtatgaacgggaaaatgttgatacatttgaggcctcagtgaaagccaagcataatctaatgacagttgaacagaataatggttcatctcagaagaagttgttggcacctgatatgtttacagaatctgatgatatgtttgctgcgtattttgatagtgctcgtcttcgggccgctggcattggaaaagatttcaaagagaatcccaacctcagagataactggaccgatgcagaaggctattatcgtgtgaacataggtgaagtcctagataaacgttacaatgtgtatggctacactgggcaaggtgtattcagtaatgttgtacgagccagagataatgcaagagccaaccaagaagtggctgtaaagatcatcagaaacaatgagctcatgcaaaagactggtttaaaagaattagagttcttgaaaaaacttaatgatgctgatcctgatgacaaatttcattgtctgagactcttcaggcacttctatcacaagcagcatctttgtctggtattcgagcctctcagcatgaacttacgagaggtgttaaaaaaatatggtaaagatgttggtcttcatattaaagctgtaagatcctatagtcagcagttgttcctggcattgaaactccttaaaagatgcaatatcctacatgcagatatcaagccagacaatatcctggttaatgaatccaaaactattttaaagctttgcgattttgggtcggcttcacatgttgcggataatgacataacaccttatcttgtcagtagattttatcgtgctcctgaaatcattataggtaaaagctatgactatggtatagatatgtggtctgtaggttgcaccttatacgaactctatactggaaaaattttattccctggcaaaaccaataaccatatgctgaagcttgcaatggatctcaaaggaaagatgccaaataagatgattcgaaaaggtgtgttcaaagatcagcattttgatcaaaatctcaacttcatgtacatagaagttgataaagtaacagagagggagaaagttactgttatgagcaccattaatccaactaaggacctgttggctgacttgattgggtgccagagacttcctgaagaccaacgtaagaaagtacaccagctaaaggacttgttggaccagattctgatgttggacccagctaaacgaattagcatcaaccaggccctacagcacgccttcatccaggaaaaaatttaaacaagatgaagaaactccaagggtttgagtgtgtgtgtgcaggccacagcagcatgcccttggtgtagtcagtgccgaaaggggtctgttccttcttgagcctgcctgcagggatggtctccttttaaagcaggttgtgtgcagcattcagtacactgaaggcataaaccttccactcttgaacaaagcagctgctttttaaaagcgagaaaaaggaaaacggggcacaggccattcgacgccttctccaaggggtctgatttgctgagacaccagcttcaccttcttaacaaggcacctaattacaacaagcatgcacattttggtgcattcaagaatggaaaatcagaatagcagcattgattcttctggtgcagctcagtggaagatgatgacaaccagaagacatgagctaagggtaagggactgttctgaagaacctttccatttagtgatcaagatatggaagctgatttctgaaaatgctcagtgtgtactctaattatttatggtaccatttgaattgtaacttgcattttagcagtgcatgtttctaattgacttactgggaaactgaataaaatatgcctcttattatca

SEQ ID NO: 168945 - DNA, 3044 bp, Homo sapiens
  Payload ID: 13258
  Gene Symbol: PRPF6
  Gene Name: pre-mRNA processing factor 6
  Uniprot ID: O94906
  ENST ID: ENST00000266079
  CDS Start-End: 112-2937
ggcgacactttgctacggagtgcatcggacgtcgaagcctagagtctctgcgtctttccctcttccgctgcctcattcctttccttcctagccttggtcgtcgccgccaccatgaacaagaagaagaaaccgttcctagggatgcccgcgcccctcggctacgtgccggggctgggccggggcgccactggcttcaccacgcggtcagacattgggcccgcccgtgatgcaaatgaccctgtggatgatcgccatgcacccccaggcaagagaaccgttggggaccagatgaagaaaaatcaggctgctgacgatgacgacgaggatctaaatgacaccaattacgatgagtttaatggctatgctgggagcctcttctcaagtggaccctacgagaaagatgatgaggaagcagatgctatctatgcagccctggataaaaggatggatgaaagaagaaaagaaagacgggagcaaagggagaaagaagaaatagagaaatatcgtatggaacgccccaaaatccaacagcagttctcagacctcaagaggaagttggcagaagtcacagaagaagagtggctgagcatccccgaggttggcgatgccagaaataaacgtcagcggaacccacgctatgagaagctgacccctgttcctgacagtttctttgccaaacatttacagaccggagagaaccatacctcagtggatccccgacaaactcaatttggaggtcttaacacaccctatccaggtggactaaacactccatacccaggtggaatgacgccaggactgatgacacctggcacaggtgagctggacatgaggaagattggccaagcgaggaacactctgatggacatgaggctgagccaggtgtctgactccgtgagtggacagaccgtcgttgaccccaaaggctacctgacggatttaaattccatgatcccgacacacggaggagacatcaatgatatcaagaaggcgcgactgctcctcaagtctgttcgggagacgaaccctcatcacccgccagcctggattgcatcagcccgcctggaagaagtcactgggaagctacaagtagctcggaaccttatcatgaaggggacggagatgtgccccaagagtgaagatgtctggctggaagcagccaggttgcagcctggggacacagccaaggccgtggtagcccaagctgtccgtcatctcccacagtctgtcaggatttacatcagagccgcagagctggaaacggacattcgtgcaaagaagcgggttcttcggaaagccctcgagcatgttccaaactcggttcgcttgtggaaagcagccgttgagctggaagaacctgaagatgctagaatcatgctgagccgagctgtggagtgctgccccaccagcgtggagctctggcttgctctggcaaggctggagacctatgaaaatgcccgcaaggtcttgaacaaggcgcgggagaacattcctacagaccgacatatctggatcacggctgctaagctggaggaagccaatgggaacacgcagatggtggagaagatcatcgaccgagccatcacctcgctgcgggccaacggtgtggagatcaaccgtgagcagtggatccaggatgccgaggaatgtgacagggctgggagtgtggccacctgccaggccgtcatgcgtgccgtgattgggattgggattgaggaggaagatcggaagcatacctggatggaggatgctgacagttgtgtagcccacaatgccctggagtgtgcacgagccatctacgcctacgccctgcaggtgttccccagcaagaagagtgtgtggctgcgcgccgcgtacttcgagaagaaccatggcactcgggagtccctggaagcactcctgcagagggctgtggcccactgccccaaagcagaggtgctgtggctcatgggcgccaagtccaagtggctggcaggggatgtgcctgcagcaaggagcatcctggccctggccttccaggccaaccccaacagtgaggagatctggctggcagccgtgaagctggagtccgagaatgatgagtacgagcgggcccggaggctgctggccaaggcgcggagcagtgcccccaccgcccgggtgttcatgaagtctgtgaagctggagtgggtgcaagacaacatcagggcagcccaagatctgtgcgaggaggccctgcggcactatgaggacttccccaagctgtggatgatgaaggggcagatcgaggagcagaaggagatgatggagaaggcgcgggaagcctataaccaggggttgaagaagtgtccccactccacacccctgtggcttttgctctctcggctggaggagaagattgggcagcttactcgagcacgggccattttggaaaagtctcgtctgaagaacccaaagaaccctgggctgtggttggagtccgtgcggctggagtaccgtgcggggctgaagaacatcgcaaatacactcatggccaaggcgctgcaggagtgccccaactccggtatcctgtggtctgaggccatcttcctcgaggcaaggccccagaggaggaccaagagcgtggatgccctgaagaagtgtgagcatgacccccatgtgctcctggccgtggccaagctgttttggagtcagcggaagatcaccaaggccagggagtggttccaccgcactgtgaagattgactcggacctgggggatgcctgggccttcttctacaagtttgagctgcagcatggcactgaggagcagcaggaggaggtgaggaagcgctgtgagagtgcagagcctcggcatggggagctgtggtgcgccgtgtccaaggacatcgccaactggcagaagaagatcggggacatccttaggctggtggccggccgcatcaagaacaccttctgattgagcggttgccatggccggtctccgtggggcagggttgggccgcatgtggaagggctctgagctgtgtcctccttcattaaaagtttttatgtctcgtgtcagaa

SEQ ID NO: 168946 - DNA, 7295 bp, Homo sapiens
  Payload ID: 13259
  Gene Symbol: PRPF8
  Gene Name: pre-mRNA processing factor 8
  Uniprot ID: Q6P2Q9
  ENST ID: ENST00000304992
  CDS Start-End: 115-7122
gaactcgggttgcgcacttcccggcgctgggaacgcggagcggacgcagtctggccgccattgcgctgcggggaaagcggcctcttgtgtgagggcctgtgggattctccggatatggccggagtgtttccttatcgagggccgggtaacccggtgcctggccctctagccccgctaccggactacatgtcggaggagaagctgcaggagaaagctcgaaaatggcagcaattgcaggccaagcgctatgcagaaaagcggaagtttgggtttgtggatgcccagaaggaagacatgcccccagaacatgtcaggaagatcattcgagaccatggagacatgaccaacaggaagttccgccatgacaaaagggtttacttgggtgccctaaagtacatgccccacgcagtcctcaaactcctggagaacatgcctatgccttgggagcagattcgggatgtgcctgtgctgtaccacatcactggagccatttccttcgtcaatgagattccctgggtcattgaacctgtctacatctcccagtgggggtcaatgtggattatgatgcgccgagaaaaaagagataggaggcatttcaagaggatgcgttttcccccttttgatgatgaggagccgcccttggactatgctgacaacatcctagatgttgagccactggaggccattcagctagagctggaccctgaggaggacgcccctgtgttggactggttctatgaccaccagccgttgagggacagcaggaagtatgtaaatggctccacttaccagcgctggcagttcacactacctatgatgtcgactctctaccgcctggctaatcagctcctgacagacttggtggatgacaactacttctacctgtttgatttgaaggccttctttacgtccaaggcactcaatatggccattcctggaggccccaaatttgaacctcttgttcgagacatcaacctacaggatgaagactggaatgaattcaatgatattaacaagattatcatccggcagcctatccgcactgagtacaagattgcttttccttacttgtacaacaatcttccacaccatgtccacctcacctggtaccatactcccaatgttgtattcatcaaaactgaggatcctgacttgccagctttctactttgaccctttgatcaacccaatctcccataggcactcagtcaagagccaggaaccattgccggatgatgatgaggaatttgagctcccggagtttgtggagcccttcctgaaggacacacccctctatacagacaatacagccaatggcattgccctgctctgggccccgcggcccttcaacctacgctctggtcgcacccgtcgggccctggacataccccttgtcaagaactggtatcgggagcattgtcctgccgggcagcctgtgaaagtgagggtctcctaccagaagctgcttaagtactatgtgctgaatgccctgaagcatcggccccctaaggctcaaaagaagaggtatttgttccgctccttcaaagccaccaaattctttcagtccacaaagctggactgggtggaggttgggctccaggtttgccgccagggctacaacatgctcaaccttctcattcaccgcaaaaacctcaactacctgcacctggactacaacttcaacctcaagcctgtgaaaacgctcaccaccaaggaaagaaagaaatctcgttttgggaatgctttccacctgtgtcgggaagttctgcgtttgactaagctggtggtggatagtcacgtgcagtatcggctgggcaatgtggatgccttccagctggcagatggattgcagtatatatttgcccatgttgggcagttgacgggcatgtatcgatacaaatacaagctgatgcgacagattcgcatgtgcaaggacctgaagcatctcatctattatcgtttcaacacgggccctgtagggaagggtcctggctgtggcttctgggctgccggttggcgagtctggctctttttcatgcgtggcattacccctttattagagcgatggcttggcaacctcctggcccggcagtttgaaggtcgacactcaaagggggtggcaaagacagtaacaaagcagcgagtggagtcacattttgaccttgagctgcgggcagctgtgatgcatgatattctggacatgatgcctgaggggatcaagcagaacaaggcccggacaatcctgcagcacctcagtgaagcctggcgctgctggaaagccaacattccctggaaggtccctgggctgccgacgcccatagagaatatgatccttcgatacgtgaaggccaaggctgactggtggaccaacactgcccactacaaccgagaacggatccgccgaggggccactgtggacaagactgtttgtaaaaagaatctgggccgcctcacccggctctatctgaaggcagaacaggagcggcagcacaactacctgaaggacgggccttacatcacagcggaggaagcagtggcagtatataccaccacagtgcattggttggaaagccgcaggttttcacccatcccattccccccactctcctataagcatgacaccaagttgctcatcttggcattggagcggctcaaggaagcttatagtgtgaagtctcggttgaaccagtctcagagggaggagctaggtctgatcgagcaggcctacgataacccccacgaggcgctgtcccgcatcaagcgtcacctcctcacacagagagccttcaaagaggtgggcattgagttcatggatctgtatagccacctcgttccagtatatgatgttgagcccctggagaagataactgatgcttacctggaccagtacctgtggtatgaagccgacaagcgccgcctgttcccaccctggattaagcctgcagacacagaaccacctccgctgcttgtttacaagtggtgtcaaggcatcaataacctgcaggacgtgtgggagacgagtgaaggcgagtgcaatgtcatgctggaatcccgctttgagaagatgtatgagaagatcgacttgactctgctcaacaggctgctgcgcctcatcgtggaccacaacatagccgactacatgacagccaagaacaacgtcgtcatcaactataaggacatgaaccatacgaattcatatgggatcatcagaggcctgcagtttgcctcattcatcgtgcagtattatggcctggtgatggatttgcttgtattgggattgcaccgggccagtgagatggctgggccccctcagatgccaaatgactttctcagtttccaggacatagccactgaggctgcccaccccatccgtctcttctgcagatacattgatcgcatccatatttttttcaggttcacagcagatgaggctcgggacctgattcaacgttacctgacagagcaccctgaccccaataatgaaaacatcgttggctataataacaagaagtgctggccccgagatgcccgcatgcgcctcatgaaacatgatgttaacttaggccgggcggtattctgggacatcaagaaccgcttgccacggtcagtgactacagttcagtgggagaacagcttcgtgtctgtgtacagtaaggacaaccccaacctgctgttcaacatgtgtggcttcgagtgccgcatcctgcctaagtgccgcaccagctatgaggagttcacccacaaggacggggtctggaacctgcagaatgaggttactaaggagcgcacagctcagtgtttcctgcgtgtggacgatgagtcaatgcagcgcttccacaaccgcgtgcgtcagattctcatggcctctgggtccaccaccttcaccaagattgtgaataagtggaatacagctctcattggccttatgacatactttcgggaggctgtggtgaacacccaagagctcttggacttactggtgaagtgtgagaacaaaatccagacacgtatcaagattggactcaactccaagatgccaagtcggttccccccggttgtgttctacacccctaaggagttgggtggactcggcatgctctcaatgggccatgtgctcatcccccaatccgacctcaggtggtccaaacagacagatgtaggtatcacacactttcgttcaggaatgagccatgaagaagaccagctcattcccaacttgtaccgctacatacagccatgggagagcgagttcattgattctcagcgggtctgggctgagtacgcactcaagaggcaagaggccattgctcagaacagacgcctgactttagaagacctagaagattcatgggatcgtggcattcctcgaatcaataccctcttccagaaggaccggcacacactggcttatgataagggctggcgtgtcagaactgactttaagcagtatcaggttttgaagcagaatccgttctggtggacacaccagcggcatgatgggaagctctggaacctgaacaactaccgtacagacatgatccaggccctgggcggtgtggaaggcattctggaacacacactctttaagggcacttacttccctacctgggaggggcttttctgggagaaggccagtggctttgaggaatctatgaagtggaagaagctaactaatgctcagcgatcaggactgaaccagattcccaatcgtagattcaccctctggtggtccccgaccattaatcgagccaatgtatatgtaggctttcaggtgcagctagacctgacgggtatcttcatgcacggcaagatccccacgctgaagatctctctcatccagatcttccgagctcacttgtggcagaagatccatgagagcattgttatggacttatgtcaggtgtttgaccaggaacttgatgcactggaaattgagacagtacaaaaggagacaatccatccccgaaagtcatataagatgaactcttcctgtgcagatatcctgctctttgcctcctataagtggaatgtctcccggccctcattgctggctgactccaaggatgtgatggacagcaccaccacccagaaatactggattgacatccagttgcgctggggggactatgattcccacgacattgagcgctacgcccgggccaagttcctggactacaccaccgacaacatgagtatctacccttcgcccacaggtgtactcatcgccattgacctggcctataacttgcacagtgcctatggaaactggttcccaggcagcaagcctctcatacaacaggccatggccaagatcatgaaggcaaaccctgccctgtatgtgttacgtgaacggatccgcaaggggctacagctctattcatctgaacccactgagccttatttgtcttctcagaactatggtgagctcttctccaaccagattatctggtttgtggatgacaccaacgtctacagagtgactattcacaagacctttgaagggaacttgacaaccaagcccatcaacggagccatcttcatcttcaacccacgcacagggcagctgttcctcaagataatccacacgtccgtgtgggcgggacagaagcgtttggggcagttggctaagtggaagacagctgaggaggtggccgccctgatccgatctctgcctgtggaggagcagcccaagcagatcattgtcaccaggaagggcatgctggacccactggaggtgcacttactggacttccccaatattgtcatcaaaggatcggagctccaactccctttccaggcgtgtctcaaggtggaaaaattcggggatctcatccttaaagccactgagccccagatggttctcttcaacctctatgacgactggctcaagactatttcatcttacacggccttctcccgtctcatcctgattctgcgtgccctacatgtgaacaacgatcgggcaaaagtgatcctgaagccagacaagactactattacagaaccacaccacatctggcccactctgactgacgaagaatggatcaaggtcgaggtgcagctcaaggatctgatcttggctgactacggcaagaaaaacaatgtgaacgtggcatcactgacacaatcagaaattcgagacatcatcctgggtatggagatctcggcaccgtcacagcagcggcagcagatcgctgagatcgagaagcagaccaaggaacaatcgcagctgacggcaacacagactcgcactgtcaacaagcatggcgatgagatcatcacctccaccaccagcaactatgagacccagactttctcatccaagactgagtggagggtcagggccatctctgctgccaacctgcacctaaggaccaatcacatctatgtttcatctgacgacatcaaggagactggctacacctacatccttcccaagaatgtgcttaagaagttcatctgcatatctgaccttcgggcccaaattgcaggatacctatatggggtgagcccaccagataacccccaggtgaaggagatccgctgcattgtgatggtgccgcagtggggcactcaccagaccgtgcacctgcctggccagctgccccagcatgagtacctcaaggagatggaacccttaggttggatccacactcagcccaatgagtccccgcagttatcaccccaggatgtcaccacccatgccaagatcatggctgacaacccatcttgggatggcgagaagaccattatcatcacatgcagcttcacgccaggctcctgtacactgacggcctacaagctgacccccagtggctacgaatggggccgccagaacacagacaagggcaacaaccccaagggctacctgccttcacactatgagagggtgcagatgctgctgtcggaccgtttccttggcttcttcatggtccctgcccagtcctcgtggaactacaacttcatgggtgttcggcatgaccccaacatgaaatatgagctacagctggcgaaccccaaagagttctaccacgaggtgcacaggccctctcacttcctcaactttgctctcctgcaggagggggaggtttactctgcggatcgggaggacctgtatgcctgaccgtttccctgcctcctgcttcagcctcccgaggccgaagcctcagcccctccagacaggccgctgacattcagcagtttggcctctttccctctgtctgtgcttgtgttgttgacctcctgatggcttgtcatcctgaataaaatataataataaattttgtataaatagga

SEQ ID NO: 168947 - DNA, 3274 bp, Homo sapiens
  Payload ID: 13259
  Gene Symbol: PRPF8
  Gene Name: pre-mRNA processing factor 8
  ENST ID: ENST00000577001
  CDS Start-End: 237-3274
agcggcctcttgtgtgagggcctgtggggtgcgtggcaggcgtttaaggccgggctgcgggaggcgtggtcgggtcgggccgagtgaccgaaggggttaggccgggcggggctggatgcactgtgtggcgggactgcaggccggggtccccggacgcctttctgctgcgcttcttgtgggcccgggcctgtggttagtgaatttttctatcccgccgctccccagattctccggatatggccggagtgtttccttatcgagggccgggtaacccggtgcctggccctctagccccgctaccggactacatgtcggaggagaagctgcaggagaaagctcgaaaatggcagcaattgcaggccaagcgctatgcagaaaagcggaagtttgggtttgtggatgcccagaaggaagacatgcccccagaacatgtcaggaagatcattcgagaccatggagacatgaccaacaggaagttccgccatgacaaaagggtttacttggggtcaatgtggattatgatgcgccgagaaaaaagagataggaggcatttcaagaggatgcgttttcccccttttgatgatgaggagccgcccttggactatgctgacaacatcctagatgttgagccactggaggccattcagctagagctggaccctgaggaggacgcccctgtgttggactggttctatgaccaccagccgttgagggacagcaggaagtatgtaaatggctccacttaccagcgctggcagttcacactacctatgatgtcgactctctaccgcctggctaatcagctcctgacagacttggtggatgacaactacttctacctgtttgatttgaaggccttctttacgtccaaggcactcaatatggccattcctggaggccccaaatttgaacctcttgttcgagacatcaacctacaggatgaagactggaatgaattcaatgatattaacaagattatcatccggcagcctatccgcactgagtacaagattgcttttccttacttgtacaacaatcttccacaccatgtccacctcacctggtaccatactcccaatgttgtattcatcaaaactgaggatcctgacttgccagctttctactttgaccctttgatcaacccaatctcccataggcactcagtcaagagccaggaaccattgccggatgatgatgaggaatttgagctcccggagtttgtggagcccttcctgaaggacacacccctctatacagacaatacagccaatggcattgccctgctctgggccccgcggcccttcaacctacgctctggtcgcacccgtcgggccctggacataccccttgtcaagaactggtatcgggagcattgtcctgccgggcagcctgtgaaagtgagggtctcctaccagaagctgcttaagtactatgtgctgaatgccctgaagcatcggccccctaaggctcaaaagaagaggtatttgttccgctccttcaaagccaccaaattctttcagtccacaaagctggactgggtggaggttgggctccaggtttgccgccagggctacaacatgctcaaccttctcattcaccgcaaaaacctcaactacctgcacctggactacaacttcaacctcaagcctgtgaaaacgctcaccaccaaggaaagaaagaaatctcgttttgggaatgctttccacctgtgtcgggaagttctgcgtttgactaagctggtggtggatagtcacgtgcagtatcggctgggcaatgtggatgccttccagctggcagatggattgcagtatatatttgcccatgttgggcagttgacgggcatgtatcgatacaaatacaagctgatgcgacagattcgcatgtgcaaggacctgaagcatctcatctattatcgtttcaacacgggccctgtagggaagggtcctggctgtggcttctgggctgccggttggcgagtctggctctttttcatgcgtggcattacccctttattagagcgatggcttggcaacctcctggcccggcagtttgaaggtcgacactcaaagggggtggcaaagacagtaacaaagcagcgagtggagtcacattttgaccttgagctgcgggcagctgtgatgcatgatattctggacatgatgcctgaggggatcaagcagaacaaggcccggacaatcctgcagcacctcagtgaagcctggcgctgctggaaagccaacattccctggaaggtccctgggctgccgacgcccatagagaatatgatccttcgatacgtgaaggccaaggctgactggtggaccaacactgcccactacaaccgagaacggatccgccgaggggccactgtggacaagactgtttgtaaaaagaatctgggccgcctcacccggctctatctgaaggcagaacaggagcggcagcacaactacctgaaggacgggccttacatcacagcggaggaagcagtggcagtatataccaccacagtgcattggttggaaagccgcaggttttcacccatcccattccccccactctcctataagcatgacaccaagttgctcatcttggcattggagcggctcaaggaagcttatagtgtgaagtctcggttgaaccagtctcagagggaggagctaggtctgatcgagcaggcctacgataacccccacgaggcgctgtcccgcatcaagcgtcacctcctcacacagagagccttcaaagaggtgggcattgagttcatggatctgtatagccacctcgttccagtatatgatgttgagcccctggagaagataactgatgcttacctggaccagtacctgtggtatgaagccgacaagcgccgcctgttcccaccctggattaagcctgcagacacagaaccacctccgctgcttgtttacaagtggtgtcaaggcatcaataacctgcaggacgtgtgggagacgagtgaaggcgagtgcaatgtcatgctggaatcccgctttgagaagatgtatgagaagatcgacttgactctgctcaacaggctgctgcgcctcatcgtggaccacaacatagccgactacatgacagccaagaacaacgtcgtcatcaactataaggacatgaaccatacgaattcatatgggatcatcagaggcctgcagtttgcctcattcatcgtgcagtattatggcctggtgatggatttgcttgtattgggattgcaccgggccagtgagatggctgggccccctcagatgcc

SEQ ID NO: 168948 - DNA, 380 bp, Homo sapiens
  Payload ID: 13259
  Gene Symbol: PRPF8
  Gene Name: pre-mRNA processing factor 8
  ENST ID: ENST00000571958
  CDS Start-End: 1-350
cccccagtggctacgaatggggccgccagaacacagacaagggcaacaaccccaagggctacctgccttcacactatgagagggtgcagatgctgctgtcggaccgtttccttggcttcttcatggtccctgcccagtcctcgtggaactacaacttcatgggagggggaggtttactctgcggatcgggaggacctgtatgcctgaccgtttccctgcctcctgcttcagcctcccgaggccgaagcctcagcccctccagacaggccgctgacattcagcagtttggcctctttccctctgtctgtgcttgtgttgttgacctcctgatggcttgtcatcctgaataaaatataataataaattttgtataaatagga

SEQ ID NO: 168949 - DNA, 7445 bp, Homo sapiens
  Payload ID: 13259
  Gene Symbol: PRPF8
  Gene Name: pre-mRNA processing factor 8
  Uniprot ID: Q6P2Q9
  ENST ID: ENST00000572621
  CDS Start-End: 267-7274
gcagtctggccgccattgcgctgcggggaaagcggcctcttgtgtgagggcctgtggggtgcgtggcaggcgtttaaggccgggctgcgggaggcgtggtcgggtcgggccgagtgaccgaaggggttaggccgggcggggctggatgcactgtgtggcgggactgcaggccggggtccccggacgcctttctgctgcgcttcttgtgggcccgggcctgtggttagtgaatttttctatcccgccgctccccagattctccggatatggccggagtgtttccttatcgagggccgggtaacccggtgcctggccctctagccccgctaccggactacatgtcggaggagaagctgcaggagaaagctcgaaaatggcagcaattgcaggccaagcgctatgcagaaaagcggaagtttgggtttgtggatgcccagaaggaagacatgcccccagaacatgtcaggaagatcattcgagaccatggagacatgaccaacaggaagttccgccatgacaaaagggtttacttgggtgccctaaagtacatgccccacgcagtcctcaaactcctggagaacatgcctatgccttgggagcagattcgggatgtgcctgtgctgtaccacatcactggagccatttccttcgtcaatgagattccctgggtcattgaacctgtctacatctcccagtgggggtcaatgtggattatgatgcgccgagaaaaaagagataggaggcatttcaagaggatgcgttttcccccttttgatgatgaggagccgcccttggactatgctgacaacatcctagatgttgagccactggaggccattcagctagagctggaccctgaggaggacgcccctgtgttggactggttctatgaccaccagccgttgagggacagcaggaagtatgtaaatggctccacttaccagcgctggcagttcacactacctatgatgtcgactctctaccgcctggctaatcagctcctgacagacttggtggatgacaactacttctacctgtttgatttgaaggccttctttacgtccaaggcactcaatatggccattcctggaggccccaaatttgaacctcttgttcgagacatcaacctacaggatgaagactggaatgaattcaatgatattaacaagattatcatccggcagcctatccgcactgagtacaagattgcttttccttacttgtacaacaatcttccacaccatgtccacctcacctggtaccatactcccaatgttgtattcatcaaaactgaggatcctgacttgccagctttctactttgaccctttgatcaacccaatctcccataggcactcagtcaagagccaggaaccattgccggatgatgatgaggaatttgagctcccggagtttgtggagcccttcctgaaggacacacccctctatacagacaatacagccaatggcattgccctgctctgggccccgcggcccttcaacctacgctctggtcgcacccgtcgggccctggacataccccttgtcaagaactggtatcgggagcattgtcctgccgggcagcctgtgaaagtgagggtctcctaccagaagctgcttaagtactatgtgctgaatgccctgaagcatcggccccctaaggctcaaaagaagaggtatttgttccgctccttcaaagccaccaaattctttcagtccacaaagctggactgggtggaggttgggctccaggtttgccgccagggctacaacatgctcaaccttctcattcaccgcaaaaacctcaactacctgcacctggactacaacttcaacctcaagcctgtgaaaacgctcaccaccaaggaaagaaagaaatctcgttttgggaatgctttccacctgtgtcgggaagttctgcgtttgactaagctggtggtggatagtcacgtgcagtatcggctgggcaatgtggatgccttccagctggcagatggattgcagtatatatttgcccatgttgggcagttgacgggcatgtatcgatacaaatacaagctgatgcgacagattcgcatgtgcaaggacctgaagcatctcatctattatcgtttcaacacgggccctgtagggaagggtcctggctgtggcttctgggctgccggttggcgagtctggctctttttcatgcgtggcattacccctttattagagcgatggcttggcaacctcctggcccggcagtttgaaggtcgacactcaaagggggtggcaaagacagtaacaaagcagcgagtggagtcacattttgaccttgagctgcgggcagctgtgatgcatgatattctggacatgatgcctgaggggatcaagcagaacaaggcccggacaatcctgcagcacctcagtgaagcctggcgctgctggaaagccaacattccctggaaggtccctgggctgccgacgcccatagagaatatgatccttcgatacgtgaaggccaaggctgactggtggaccaacactgcccactacaaccgagaacggatccgccgaggggccactgtggacaagactgtttgtaaaaagaatctgggccgcctcacccggctctatctgaaggcagaacaggagcggcagcacaactacctgaaggacgggccttacatcacagcggaggaagcagtggcagtatataccaccacagtgcattggttggaaagccgcaggttttcacccatcccattccccccactctcctataagcatgacaccaagttgctcatcttggcattggagcggctcaaggaagcttatagtgtgaagtctcggttgaaccagtctcagagggaggagctaggtctgatcgagcaggcctacgataacccccacgaggcgctgtcccgcatcaagcgtcacctcctcacacagagagccttcaaagaggtgggcattgagttcatggatctgtatagccacctcgttccagtatatgatgttgagcccctggagaagataactgatgcttacctggaccagtacctgtggtatgaagccgacaagcgccgcctgttcccaccctggattaagcctgcagacacagaaccacctccgctgcttgtttacaagtggtgtcaaggcatcaataacctgcaggacgtgtgggagacgagtgaaggcgagtgcaatgtcatgctggaatcccgctttgagaagatgtatgagaagatcgacttgactctgctcaacaggctgctgcgcctcatcgtggaccacaacatagccgactacatgacagccaagaacaacgtcgtcatcaactataaggacatgaaccatacgaattcatatgggatcatcagaggcctgcagtttgcctcattcatcgtgcagtattatggcctggtgatggatttgcttgtattgggattgcaccgggccagtgagatggctgggccccctcagatgccaaatgactttctcagtttccaggacatagccactgaggctgcccaccccatccgtctcttctgcagatacattgatcgcatccatatttttttcaggttcacagcagatgaggctcgggacctgattcaacgttacctgacagagcaccctgaccccaataatgaaaacatcgttggctataataacaagaagtgctggccccgagatgcccgcatgcgcctcatgaaacatgatgttaacttaggccgggcggtattctgggacatcaagaaccgcttgccacggtcagtgactacagttcagtgggagaacagcttcgtgtctgtgtacagtaaggacaaccccaacctgctgttcaacatgtgtggcttcgagtgccgcatcctgcctaagtgccgcaccagctatgaggagttcacccacaaggacggggtctggaacctgcagaatgaggttactaaggagcgcacagctcagtgtttcctgcgtgtggacgatgagtcaatgcagcgcttccacaaccgcgtgcgtcagattctcatggcctctgggtccaccaccttcaccaagattgtgaataagtggaatacagctctcattggccttatgacatactttcgggaggctgtggtgaacacccaagagctcttggacttactggtgaagtgtgagaacaaaatccagacacgtatcaagattggactcaactccaagatgccaagtcggttccccccggttgtgttctacacccctaaggagttgggtggactcggcatgctctcaatgggccatgtgctcatcccccaatccgacctcaggtggtccaaacagacagatgtaggtatcacacactttcgttcaggaatgagccatgaagaagaccagctcattcccaacttgtaccgctacatacagccatgggagagcgagttcattgattctcagcgggtctgggctgagtacgcactcaagaggcaagaggccattgctcagaacagacgcctgactttagaagacctagaagattcatgggatcgtggcattcctcgaatcaataccctcttccagaaggaccggcacacactggcttatgataagggctggcgtgtcagaactgactttaagcagtatcaggttttgaagcagaatccgttctggtggacacaccagcggcatgatgggaagctctggaacctgaacaactaccgtacagacatgatccaggccctgggcggtgtggaaggcattctggaacacacactctttaagggcacttacttccctacctgggaggggcttttctgggagaaggccagtggctttgaggaatctatgaagtggaagaagctaactaatgctcagcgatcaggactgaaccagattcccaatcgtagattcaccctctggtggtccccgaccattaatcgagccaatgtatatgtaggctttcaggtgcagctagacctgacgggtatcttcatgcacggcaagatccccacgctgaagatctctctcatccagatcttccgagctcacttgtggcagaagatccatgagagcattgttatggacttatgtcaggtgtttgaccaggaacttgatgcactggaaattgagacagtacaaaaggagacaatccatccccgaaagtcatataagatgaactcttcctgtgcagatatcctgctctttgcctcctataagtggaatgtctcccggccctcattgctggctgactccaaggatgtgatggacagcaccaccacccagaaatactggattgacatccagttgcgctggggggactatgattcccacgacattgagcgctacgcccgggccaagttcctggactacaccaccgacaacatgagtatctacccttcgcccacaggtgtactcatcgccattgacctggcctataacttgcacagtgcctatggaaactggttcccaggcagcaagcctctcatacaacaggccatggccaagatcatgaaggcaaaccctgccctgtatgtgttacgtgaacggatccgcaaggggctacagctctattcatctgaacccactgagccttatttgtcttctcagaactatggtgagctcttctccaaccagattatctggtttgtggatgacaccaacgtctacagagtgactattcacaagacctttgaagggaacttgacaaccaagcccatcaacggagccatcttcatcttcaacccacgcacagggcagctgttcctcaagataatccacacgtccgtgtgggcgggacagaagcgtttggggcagttggctaagtggaagacagctgaggaggtggccgccctgatccgatctctgcctgtggaggagcagcccaagcagatcattgtcaccaggaagggcatgctggacccactggaggtgcacttactggacttccccaatattgtcatcaaaggatcggagctccaactccctttccaggcgtgtctcaaggtggaaaaattcggggatctcatccttaaagccactgagccccagatggttctcttcaacctctatgacgactggctcaagactatttcatcttacacggccttctcccgtctcatcctgattctgcgtgccctacatgtgaacaacgatcgggcaaaagtgatcctgaagccagacaagactactattacagaaccacaccacatctggcccactctgactgacgaagaatggatcaaggtcgaggtgcagctcaaggatctgatcttggctgactacggcaagaaaaacaatgtgaacgtggcatcactgacacaatcagaaattcgagacatcatcctgggtatggagatctcggcaccgtcacagcagcggcagcagatcgctgagatcgagaagcagaccaaggaacaatcgcagctgacggcaacacagactcgcactgtcaacaagcatggcgatgagatcatcacctccaccaccagcaactatgagacccagactttctcatccaagactgagtggagggtcagggccatctctgctgccaacctgcacctaaggaccaatcacatctatgtttcatctgacgacatcaaggagactggctacacctacatccttcccaagaatgtgcttaagaagttcatctgcatatctgaccttcgggcccaaattgcaggatacctatatggggtgagcccaccagataacccccaggtgaaggagatccgctgcattgtgatggtgccgcagtggggcactcaccagaccgtgcacctgcctggccagctgccccagcatgagtacctcaaggagatggaacccttaggttggatccacactcagcccaatgagtccccgcagttatcaccccaggatgtcaccacccatgccaagatcatggctgacaacccatcttgggatggcgagaagaccattatcatcacatgcagcttcacgccaggctcctgtacactgacggcctacaagctgacccccagtggctacgaatggggccgccagaacacagacaagggcaacaaccccaagggctacctgccttcacactatgagagggtgcagatgctgctgtcggaccgtttccttggcttcttcatggtccctgcccagtcctcgtggaactacaacttcatgggtgttcggcatgaccccaacatgaaatatgagctacagctggcgaaccccaaagagttctaccacgaggtgcacaggccctctcacttcctcaactttgctctcctgcaggagggggaggtttactctgcggatcgggaggacctgtatgcctgaccgtttccctgcctcctgcttcagcctcccgaggccgaagcctcagcccctccagacaggccgctgacattcagcagtttggcctctttccctctgtctgtgcttgtgttgttgacctcctgatggcttgtcatcctgaataaaatataataataaattttgtataaatag

SEQ ID NO: 168950 - DNA, 749 bp, Homo sapiens
  Payload ID: 13259
  Gene Symbol: PRPF8
  Gene Name: pre-mRNA processing factor 8
  ENST ID: ENST00000573725
  CDS Start-End: 1-749
cacgtatcaagattggactcaactccaagatgccaagtcggttccccccggttgtgttctacacccctaaggagttgggtggactcggcatgctctcaatgggccatgtgctcatcccccaatccgacctcagacgcctgactttagaagacctagaagattcatgggatcgtggcattcctcgaatcaataccctcttccagaaggaccggcacacactggcttatgataagggctggcgtgtcagaactgactttaagcagtatcaggttttgaagcagaatccgttctggtggacacaccagcggcatgatgggaagctctggaacctgaacaactaccgtacagacatgatccaggccctgggcggtgtggaaggcattctggaacacacactctttaagggcacttacttccctacctgggaggggcttttctgggagaaggccagtggctttgaggaatctatgaagtggaagaagctaactaatgctcagcgatcaggactgaaccagattcccaatcgtagattcaccctctggtggtccccgaccattaatcgagccaatgtatatgtaggctttcaggtgcagctagacctgacgggtatcttcatgcacggcaagatccccacgctgaagatctctctcatccagatcttccgagctcacttgtggcagaagatccatgagagcattgttatggacttatgtcaggtgtttgaccaggaacttgatgcactggaaatt

SEQ ID NO: 168951 - DNA, 7295 bp, Homo sapiens; identical to SEQ ID NO: 168946
  Payload ID: 13259
  Gene Symbol: PRPF8
  Gene Name: pre-mRNA processing factor 8
  Uniprot ID: Q6P2Q9
  ENST ID: ENST00000614672
  CDS Start-End: 115-7122

SEQ ID NO: 168952 - DNA, 3274 bp, Homo sapiens; identical to SEQ ID NO: 168947
  Payload ID: 13259
  Gene Symbol: PRPF8
  Gene Name: pre-mRNA processing factor 8
  ENST ID: ENST00000631647
  CDS Start-End: 237-3274

SEQ ID NO: 168953 - DNA, 7445 bp, Homo sapiens; identical to SEQ ID NO: 168949
  Payload ID: 13259
  Gene Symbol: PRPF8
  Gene Name: pre-mRNA processing factor 8
  Uniprot ID: Q6P2Q9
  ENST ID: ENST00000634039
  CDS Start-End: 267-7274

SEQ ID NO: 168954 - DNA, 1626 bp, Homo sapiens
  Payload ID: 13260
  Gene Symbol: PDSS1
  Gene Name: prenyl (decaprenyl) diphosphate synthase, subunit 1
  Uniprot ID: Q5T2R2
  ENST ID: ENST00000376215
  CDS Start-End: 54-1301
atcgcgggccagaggcggagccgccgccctgccgcgactttcagactccgaccatggcctcgcgctggtggcggtggcggcgcggctgctcctggaagccggcggcgcggagccccgggcccggctcccccggccgtgcgggaccgttggggccgagcgccgctgccgaagtccgcgcgcaggttcataggcggaagggacttgacttgtctcagataccctatattaatcttgtgaagcatttaacatctgcctgtccaaatgtatgtcgtatatcacggtttcatcacacaaccccagacagtaaaacacacagtggtgaaaaatacaccgatcctttcaaactcggttggagagacttgaaaggtctgtatgaggacattagaaaggaactgcttatatcaacatcagaacttaaggaaatgtctgagtactactttgatgggaaagggaaagcctttcgaccaattattgtggcgctaatggcccgagcatgcaatattcatcataacaactcccgacatgtgcaagccagccagcgcgccatagccttaattgcagaaatgatccacactgctagtctggttcacgatgacgttattgacgatgcaagttctcgaagaggaaaacacacagttaataagatctggggtgaaaagaaggctgttcttgctggagatttaattctttctgcagcatctatagctctggcacgaattggaaatacaactgttatatctattttaacccaagttattgaagatttggtgcgtggtgaatttcttcagctcgggtcaaaagaaaatgagaatgaaagatttgcacactaccttgagaagacattcaagaagaccgccagcctgatagccaacagttgtaaagcagtctctgttctaggatgtcccgacccagtggtgcatgagatcgcctatcagtacggaaaaaatgtaggaatagcttttcagctaatagatgatgtattggacttcacctcgtgttctgaccagatgggcaaaccaacatcagctgatctgaagctcgggttagccactggtcctgtcctgtttgcctgtcagcagttcccagaaatgaatgctatgatcatgcgacggttcagtttgcctggagatgtagacagagctcgacagtatgtactacagagtgatggtgtgcaacaaacaacctacctcgcccagcagtactgccatgaagcaataagagagatcagtaaacttcgaccatccccagaaagagatgccctcattcagctttcagaaattgtactcacaagagataaatgacaactctttctgttctttctggcagctatcttaccagactgtgcctaaagaattttgtggaatacactttgtttgcttcatgtgcagataaccaaaaatcattttaaaagatatcaaacttattgatgggcaatttatttttttttattgcaaaagttttttcagaaaactttttaaatgtaattaataaaccacctgaatctgtcattctagtcctataaattataatcaaggtatcttgatggttatatgtggtattgtttacactgttaatatccacatgtaaggccattacacaaataaataaccaatgttaaaattcaaa

SEQ ID NO: 168955 - DNA, 897 bp, Homo sapiens
  Payload ID: 13260
  Gene Symbol: PDSS1
  Gene Name: prenyl (decaprenyl) diphosphate synthase, subunit 1
  ENST ID: ENST00000491711
  CDS Start-End: 1-476
tctggggtgaaaagaaggctgttcttgctggagatttaattctttctgcagcatctatagctctggcacgaattggaaatacaactgttatatctattttaacccaagttattgaagatttggtgcgtggtgaatttcttcagctcgggtcaaaagaaaatgagaatgaaagatttgcacactaccttgagaagacattcaagaagaccgccagcctgatagccaacagttgtaaagcagtctctgttctaggatgtcccgacccagtggtgcatgagatcgcctatcagtacggaaaaaatgtaggaatagcttttcagctaatagatgatgtattggacttcacctcgtgttctgaccagatgggcaaaccaacatcagctgatctgaagctcgggttagccactggtcctgtcctgtttgcctgtcagcaggttcactgccagggaaaaactggcagctgctgtaagcactgacgtggccaaaatcaaacacatcttacctcttccgtggagccatagactgttagagctcaagggcttccagtcatgaagatgagaagcctaagaccccaggggctaaggaagtcactcggctgtggcagctgttcccagaaatgaatgctatgatcatgcgacggttcagtttgcctggagatgtagacagagctcgacagtatgtactacagagtgatggtgtgcaacaaacaacctacctcgcccagcagtactgccatgaagcaataagagagatcagtaaacttcgaccatccccagaaagagatgccctcattcagctttcagaaattgtactcacaagagataaatgacaactctttctgttctttctggcagctatcttaccagactgtgcctaaagaattttgtggaatacact

SEQ ID NO: 168956 - DNA, 1236 bp, Homo sapiens
  Payload ID: 13261
  Gene Symbol: PDSS2
  Gene Name: prenyl (decaprenyl) diphosphate synthase, subunit 2
  Uniprot ID: Q86YH6
  ENST ID: ENST00000369031
  CDS Start-End: 280-1002
atgcctccaatatggcgtcctccacataggcagtggctgtggtttctaccccgggtggccgggggcagtgctgagctgggactgttgtttgcccagcctgggctgcagaaagcagcagttaaagttcgtttctggtcactgctccaggaagccaccttactctgagggtcaagaattgccgcttccttttagttactgtaagttcctcctctgcccctggtttgtttcccgcggcacttctggatacccccaggtcccagacccttccagactcaaaccatgaactttcggcagctgctgttgcacttgccacgttatcttggagcctcgggttccccgcgtcgcctgtggtggtccccgtccctcgacaccatctcctcggtgggctcttggcgtggtcggtcctccaagtccccggcccactggaatcaggtagtgtcagaggcggagaagatcgtggggtaccccacgtccttcatgagccttcgctgcctgctgagcgacgagctcagcaacatcgctatgcaggtgcggaagctggtgggcactcagcaccctctgcttaccacagccagggggcttgtacatgacagctggaatagcctccagttgaggggcttggtggtgctccttatctctaaagcagctgggcccagcagcgtgaacacttcatgtcagaactatgacatggtcagtgggatctactcatgtcaaagaagtttggcagagatcacggagctaattcatattgctctccttgtacatcgtgggatagtaaatttaaatgagttgcaatcatctgatggtccactgaaagacatgcaatttggaaataaaattgctatcctgagtggagactttcttctagcaaatgcctgcaatggactagctctgctacagaacaccaagtcattttcatttaatggacctattgctatatatcagatgggagactgtgagtcagcctggatcttgtctaaacacccaagagcattgtcatgatgtcactcctggaggttgttctattaagcattagtgatttatacttccggataaccagtggcacagatgtactctttacatagctgatgtatttccttatgttaactttgttttcctaaaggcgtaaatatgttgtttaaaatgaagtattttgtttgtacaaatatgctcaatttatgcatataaatctccctttacaccatctatatagtttaataaagatgctattgtcta

SEQ ID NO: 168957 - DNA, 3540 bp, Homo sapiens
  Payload ID: 13261
  Gene Symbol: PDSS2
  Gene Name: prenyl (decaprenyl) diphosphate synthase, subunit 2
  Uniprot ID: Q86YH6
  ENST ID: ENST00000369037
  CDS Start-End: 279-1478
tgcctccaatatggcgtcctccacataggcagtggctgtggtttctaccccgggtggccgggggcagtgctgagctgggactgttgtttgcccagcctgggctgcagaaagcagcagttaaagttcgtttctggtcactgctccaggaagccaccttactctgagggtcaagaattgccgcttccttttagttactgtaagttcctcctctgcccctggtttgtttcccgcggcacttctggatacccccaggtcccagacccttccagactcaaaccatgaactttcggcagctgctgttgcacttgccacgttatcttggagcctcgggttccccgcgtcgcctgtggtggtccccgtccctcgacaccatctcctcggtgggctcttggcgtggtcggtcctccaagtccccggcccactggaatcaggtagtgtcagaggcggagaagatcgtggggtaccccacgtccttcatgagccttcgctgcctgctgagcgacgagctcagcaacatcgctatgcaggtgcggaagctggtgggcactcagcaccctctgcttaccacagccagggggcttgtacatgacagctggaatagcctccagttgaggggcttggtggtgctccttatctctaaagcagctgggcccagcagcgtgaacacttcatgtcagaactatgacatggtcagtgggatctactcatgtcaaagaagtttggcagagatcacggagctaattcatattgctctccttgtacatcgtgggatagtaaatttaaatgagttgcaatcatctgatggtccactgaaagacatgcaatttggaaataaaattgctatcctgagtggagactttcttctagcaaatgcctgcaatggactagctctgctacagaacaccaaggttgtggaacttttagcaagtgctcttatggacttggtacaaggagtatatcatgaaaattctacttcaaaggaaagttatatcacagatgatattggaatatcgacttggaaggagcagacttttctctcccatggtgccttactagcaaagagctgccaagctgcaatggaattagcaaagcatgatgctgaggttcagaatatggcatttcagtatgggaagcacatggccatgagtcataagataaattctgatgtccagccttttattaaagaaaagaccagtgactccatgacttttaatctaaactcagctcctgtagtcttacatcaggaatttcttggaagagatttgtggattaaacagatcggagaggctcaagaaaaaggaagattggactatgctaagttgcgagaaagaatcaaagctggcaaaggtgtgacttcagctattgacctgtgtcgttaccatggaaacaaggcactggaggccctggagagctttcctccctcggaggccagatctgctttagaaaacattgtgtttgctgtgaccagattttcatgacatcaaattaaaaagacactattgttagttagctgaaaatcctagggaatgaggttgattgggagcgctttcacgatgcgttaatgacttttaaaacatatgcatttttccttccttttatcacattgctaaatgagttctgctttctttttggaactgctacaaacaaaattagaagaaaaaaaggtcaagcagttttcacttgtcacgccagaagcacacttgaggctgcagtcgcagaaataattaatgagattcgctcctgtgacctcagcaaatggacaggaaataagtccttattgattggaccgagccagggatggcgccagggcggtggcctgtggtttttcctgctagagaggacaaagcaagttggaagctgcaggtgtcaagagaaatgctctcaataccaaccagggaggattgtctaatcaaaaactagtgaccaatttgtcataatggagagtagttcaatggattgagaaaaatatgttttatttgttggcttgtaattatgtctctggattattattattttttttttagatgtagttttgctcttgttgcccaggctggagtgcaatggtgcagttttgactcactgcaacctccgcctcctgggttcaagtgattctcctgcctcagcctcccgagtagctggaattacaggcacctgccaccacgcctggctaattttgtatttttagtagagatggggtttcactatgttggtcaggctagtctcgaactcctgacctcaggtgatccgcctgcctcggcctcccaaagtgctgggattagaggcttgagccactgcacctggcctcatgtctctggatttataatgcagtatgaatatactttgtgctttatggtttttataatgtctttttggagaaattgccgaaaagttgccaaatacttgaagtaggagattaaaatgttatcaaatgttaaattggttatattaggaatagtctgtttttctttcctgaagatcagtttttttattcaaacacatttcaaagaaccaaattttttttttctttaaggaaaaaggagctttttttcaagtgaaatgtattcatttgtaatactttggtttaaggcatactttaatttttacgagtttcagaaacagaatttttgtactagggaattcattggtgagagtgttcttttaacctcagaatgtcaaattttggtcttgaaccacagacatccaattacagaaagaatataagcaatctcacaggcctgcaatcggacactgtctctgtgtggttcataggagatgatttttgaggtttgcactcatgcaatttgagaacaccgttgacaagaaggctgagtttacataaatgatctagattgaaactcagctacctttcttcctcatgtggtgtaattacagccctatctggagacagcgaatacagcaaacagattttattacctagttcgctcaaacactacatgaagttattttagttaaagccctcccccaaaagttataaaaccattttatcagggcccaacatgtggcatgcaatgaagagaaaatgtaaagctacagaggttaatgtattgtattataaaatattttaagtgtactcaaaatatcataattgtacagtttatgccaccataatttgaggcctatagatttagcttaagagaacactgttctgtttgaaatgctttctgtcactgaaattggcttaattagtaaccatggataagatgctttagatcagactaggttttaatcattaacttccacaaagaagtcatactttgcgttaggtgtgctggttggatgtgcaggaacttcagcaagcagtaggttttactaagcagatggtcgggcactgcagggcaccaggcaggatcctagggcgcctcttattctgcgttagcatctggtttgctgtatgaccttgcacaagtcacttccttctgagcctcaattttctcatctgtacaatgagattcaaaagttgacctgaaagtcaagtgtgaaaaaaaaaaagagattaaacaagataattatgaaattctt

SEQ ID NO: 168958 - DNA, 241 bp, Homo sapiens
  Payload ID: 13261
  Gene Symbol: PDSS2
  Gene Name: prenyl (decaprenyl) diphosphate synthase, subunit 2
  ENST ID: ENST00000449027
  CDS Start-End: 1-241
gttcagaatatggcatttcagtatgggaagcacatggccatgagtcataagataaattctgatgtccagccttttattaaagaaaagaccagtgactccatgacttttaatctaaactcagctcctgtagtcttacatcaggaatttcttggaagagatttgtggattaaacagatcggagagtcttcaagtacagaagttcaactttctaactttcaacaaatgctactttcaacactct

SEQ ID NO: 168959 - DNA, 2959 bp, Homo sapiens
  Payload ID: 13262
  Gene Symbol: PCYOX1
  Gene Name: prenylcysteine oxidase 1
  ENST ID: ENST00000264441
  CDS Start-End: 17-898
agagcttgtggaggccatggggcgcgtcgtcgcggagctcgtctcctcgctgctggggttgtggctgttgctgtgcagctgcggatgccccgagggcgccgagctgcgtgctccgccagataaaatcgcgattattggagccggaattggtggcacttcagcagcctattacctgcggcagaaatttgggaaagatgtgaagatagacctgtttgaaagagaagaggtcgggggccgcctggctaccatgatggtgcaggggcaagaatacgaggcaggaggttctgtcatccatcctttaaatctgcacatgaaacgttttgtcaaagacctgggtctctctgctgttcaggcctctggtggcctactggggatatataatggagagactctggtatttgaggagagcaactggttcataattaacgtgattaaattagtttggcgctatggatttcaatccctccgtatgcacatgtgggtagaggacgtgttagacaagttcatgaggatctaccgctaccagtctcatgactatgccttcagtagtgtcgaaaaattacttcatgctctaggaggagatgacttccttggaatgcttaatcgaacacttcttgaaaccttgcaaaaggccggcttttctgagaagttcctcaatgaaatgattgctcctgttatgagggtcaattatggccaaagcacggacatcaatgcctttgtgggggcggtgtcactgtcctgttctgattctggcctttgggcagtagaaggtggcaataaacttgtttgctcagggcttctgcaggcatccaaaagcaatcttatatctggctcagtaatgtacatcgaggagaaaacaaagaccaagtacacagtattgggattgtgccctctgtgagagaaaaggaagatcctgagccatcaacagatggaacatatgtttggaagatcttttcccaagaaactcttactaaagcacaaattttaaagctctttctgtcctatgattatgctgtgaagaagccatggcttgcatatcctcactataagcccccggagaaatgcccctctatcattctccatgatcgactttattacctcaatggcatagagtgtgcagcaagtgccatggagatgagtgccattgcagcccacaacgctgcactccttgcctatcaccgctggaacgggcacacagacatgattgatcaggatggcttatatgagaaacttaaaactgaactatgaagtgacacactcctttttcccctcctagttccaaatgactatcagtggcaaaaaagaacaaaatctgagcagagatgattttgaaccagatattttgccattatcattgtttaataaaagtaatccctgctggtcataggaaaacacacggttctaattaagtgtgaaggtatagctattgcacttatgccatctccaaaatttcttaagtattctttcactatccattaggagtttttcttaaacttgtctgataataagaatcacctggagttaggaggtggtggttgcagtgagccaatctcaccattgcacttcagcctgagcaacacgagcaaaactccgtctcaaaagtaaataaaaataatcacctggagtttgttaaaccatatggattctcaagctcctctcttgaagattctgattcagtaggtctgggagtggcgcgctggattttgatcaaaattgtagagcattttaaggtgagtacctgagggagaacttaaagacatcttagttggggagtagtccttttgaattttacagctagatataatcttcagtcagataaaatttatgggagctggtgtcttatgcctgactcttagtaatttcataccggtttgaagtacgtgtgcccatgcctaaagccttgactttcagaatgttgtcttttgattcttctgtcttgatttgattaggggtgaaatttagaagtcttagtaatgtaacttgaagatgttaaacaaaaatctcaagtaaaatgaaaagcaaatatgggctactgaattaagaaactggcattctagtattaaatcctcacttcaggagcttttaaaaatactgagacccccccataaccagagattcagattcaaagactgaggataggaccttagcattgtagctatttaaagtttctaatgtgcacccagggttgggaatcaccaatgtgggtgtgaaaatgcctacaaagggttttagtgccttagaagtcctaagaagcccaatctgtatcaaagcagatccattttgcaaggatctttcttttagaactttctcagttctcttagtaagaactttagaagtaatcttgataataagcacagacagcctaacagcagaggcaacttaaataactcctgagcagttggcactagaacagaatacttggaatgacaccaaagttaaccaagtccagcatatgtccaaagagttaagtgtttcatttactgtagcattctgggtgagaaattggttgctgaaatcttaagacagtggtctcaaccttggctgcacattggaatcacctgtagggttttaaagcatccaaatggtaattaacaggcagcaaaacttcagaactagttctgcatctactgtgcaaagatcatgattaactgtcaagacactggtagaacagaacaagcaaaagattaagagttcaaaagtaaatgcaaccaatttaacatgtagtgttattaaaaaattacaaaggcctagaccagcctgggcaacatggtgaaaccccatctctacaaaaaatttttaaaaagttggccaggcatggtaatgcgcgcctgtggtcccagctgctcgggaggctgaggtgggaggatcacttgagccttggaggtcaaggctgcagtgaatcatgatcatgccactgtactccagcctgggcaacagagaccatcttaaaaaaaaaaaa

SEQ ID NO: 168960 - DNA, 5345 bp, Homo sapiens
  Payload ID: 13262
  Gene Symbol: PCYOX1
  Gene Name: prenylcysteine oxidase 1
  Uniprot ID: Q9UHG3
  ENST ID: ENST00000433351
  CDS Start-End: 29-1546
gaggccagctgcagagcttgtggaggccatggggcgcgtcgtcgcggagctcgtctcctcgctgctggggttgtggctgttgctgtgcagctgcggatgccccgagggcgccgagctgcgtgctccgccagataaaatcgcgattattggagccggaattggtggcacttcagcagcctattacctgcggcagaaatttgggaaagatgtgaagatagacctgtttgaaagagaagaggtcgggggccgcctggctaccatgatggtgcaggggcaagaatacgaggcaggaggttctgtcatccatcctttaaatctgcacatgaaacgttttgtcaaagacctgggtctctctgctgttcaggcctctggtggcctactggggatatataatggagagactctggtatttgaggagagcaactggttcataattaacgtgattaaattagtttggcgctatggatttcaatccctccgtatgcacatgtgggtagaggacgtgttagacaagttcatgaggatctaccgctaccagtctcatgactatgccttcagtagtgtcgaaaaattacttcatgctctaggaggagatgacttccttggaatgcttaatcgaacacttcttgaaaccttgcaaaaggccggcttttctgagaagttcctcaatgaaatgattgctcctgttatgagggtcaattatggccaaagcacggacatcaatgcctttgtgggggcggtgtcactgtcctgttctgattctggcctttgggcagtagaaggtggcaataaacttgtttgctcagggcttctgcaggcatccaaaagcaatcttatatctggctcagtaatgtacatcgaggagaaaacaaagaccaagtacacaggaaatccaacaaagatgtatgaagtggtctaccaaattggaactgagactcgttcagacttctatgacatcgtcttggtggccactccgttgaatcgaaaaatgtcgaatattacttttctcaactttgatcctccaattgaggaattccatcaatattatcaacatatagtgacaactttagttaagggggaattgaatacatctatctttagctctagacccatagataaatttggccttaatacagttttaaccactgataattcagatttgttcattaacagtattgggattgtgccctctgtgagagaaaaggaagatcctgagccatcaacagatggaacatatgtttggaagatcttttcccaagaaactcttactaaagcacaaattttaaagctctttctgtcctatgattatgctgtgaagaagccatggcttgcatatcctcactataagcccccggagaaatgcccctctatcattctccatgatcgactttattacctcaatggcatagagtgtgcagcaagtgccatggagatgagtgccattgcagcccacaacgctgcactccttgcctatcaccgctggaacgggcacacagacatgattgatcaggatggcttatatgagaaacttaaaactgaactatgaagtgacacactcctttttcccctcctagttccaaatgactatcagtggcaaaaaagaacaaaatctgagcagagatgattttgaaccagatattttgccattatcattgtttaataaaagtaatccctgctggtcataggaaaacacacggttctaattaagtgtgaaggtatagctattgcacttatgccatctccaaaatttcttaagtattctttcactatccattaggagtttttcttaaacttgtctgataataagaatcacctggagttaggaggtggtggttgcagtgagccaatctcaccattgcacttcagcctgagcaacacgagcaaaactccgtctcaaaagtaaataaaaataatcacctggagtttgttaaaccatatggattctcaagctcctctcttgaagattctgattcagtaggtctgggagtggcgcgctggattttgatcaaaattgtagagcattttaaggtgagtacctgagggagaacttaaagacatcttagttggggagtagtccttttgaattttacagctagatataatcttcagtcagataaaatttatgggagctggtgtcttatgcctgactcttagtaatttcataccggtttgaagtacgtgtgcccatgcctaaagccttgactttcagaatgttgtcttttgattcttctgtcttgatttgattaggggtgaaatttagaagtcttagtaatgtaacttgaagatgttaaacaaaaatctcaagtaaaatgaaaagcaaatatgggctactgaattaagaaactggcattctagtattaaatcctcacttcaggagcttttaaaaatactgagacccccccataaccagagattcagattcaaagactgaggataggaccttagcattgtagctatttaaagtttctaatgtgcacccagggttgggaatcaccaatgtgggtgtgaaaatgcctacaaagggttttagtgccttagaagtcctaagaagcccaatctgtatcaaagcagatccattttgcaaggatctttcttttagaactttctcagttctcttagtaagaactttagaagtaatcttgataataagcacagacagcctaacagcagaggcaacttaaataactcctgagcagttggcactagaacagaatacttggaatgacaccaaagttaaccaagtccagcatatgtccaaagagttaagtgtttcatttactgtagcattctgggtgagaaattggttgctgaaatcttaagacagtggtctcaaccttggctgcacattggaatcacctgtagggttttaaagcatccaaatggtaattaacaggcagcaaaacttcagaactagttctgcatctactgtgcaaagatcatgattaactgtcaagacactggtagaacagaacaagcaaaagattaagagttcaaaagtaaatgcaaccaatttaacatgtagtgttattaaaaaattacaaaggcctagaccagcctgggcaacatggtgaaaccccatctctacaaaaaatttttaaaaagttggccaggcatggtaatgcgcgcctgtggtcccagctgctcgggaggctgaggtgggaggatcacttgagccttggaggtcaaggctgcagtgaatcatgatcatgccactgtactccagcctgggcaacagagaccatcttaaaaaaaaaaaatccttccattgaatagaaacttcaaagtccttcatcagatcatggcattagctactttagcaaaatagtgtaaactttggttctgagtaaaaatgacttcttccctaccacagttgtgaatgttaatatgctgataaaactgccaagatatatttgataggtaggggattaaactcatggtttgtcaaaagagtgtttttttctagttttattcttaacagatatgttgaggtattcatatttgtttccttttgtggttttaatgaagacaatttgtaaagtaatactgttatgtatatgctaaatgttggtaaatactaattaatttccatcatttgtagacttgttttgcaatgggatatatttttacttataataccaatttaggctgggcgcagtggctcacgcctgtaatcccagcactttgggaggccaaggcaaacggatcacgaggtcaggagatcaagaccatcctggccaacatggtgaaaccccatctctactgaatacacaaaaattggctggacatggtggcgcatgtctgtaatcccagctactgtaatctcagctacttgggaggctgaggcaggagaattgcctcaaccgggaggcggaggttgcagtgagccaagatcgcaccactgcactccagcctggcaacagagcgagactctgtctcagaaaaaaaaaacaaaaaccagtttaggctgggtatggtggctcaccagcactttgggaggctgaggcaggtggatctcttgaggtcgggagtttgagaccagcctggccaacatggtgaaaccctgtctttactaaaaatacaaaaattagccaggcatggtggcgtgtgccagtaatcccagctacttgggaggctgaggcgcgagaatcgcttgaaccctggagatggaggttgcagtgagcagagatcgcaccactgcactccagcctgggcaagagtgagactgtgtctcaaaaggaaaaaaaaaaaattaaaaatgttgctggtattacatcaaacctactctggataaattttccagtagggcatctgaaattgctttggcaaaagcaaaacaggttatcaatacaccaaggacatcaagtagttttaatgcaactacagtgttgagtgcttttttactgggagaaaaatcctagcagaacctgctactctgggcgcattaggtagttttatgcaactatagtattaagagttttattggaagaaaaaacactgtcagagcttactgctccagacctttttttttaatagaagagactggtaaaaatgatgcaggggctgaatgaaagccagctctgctccagtggctctctgagttgagcatgcatcagttaccttaagggcttgttaaaacatcgctaggctccaccctgtttattcaataagtttgttatgggatataagaagatgcattttattaagttccccagtgatgctgctgttctactataggaaccacacttgaagaactagttctacaattcagctgtatgttgtaaaggagtcaagtcaatgaaggagttataaagagttgctgaaaaatggagtaacagtgtatgggacttcacatcagttctccttattgattgttagtttgatccctcttgttcttttgttgtaaacattttctataattaggaaatgccatttaagagtgagagaggtatatatctatgagccattgtgtttggtgttttacaagaactttaccatactggtgtgtagtccattctgtacagtttaaaagtgattcacgatttgcaggctttttatcagatcacaaaaaaatcagtctttaagcatttgcttggtaaggtttcttaagattaggtttataatacaaccatctgtaatgtatctctcgtttgagcttgtgggccatacaattcattaactagatgaatacattgtggacagcatcctcactacccctctctactcactcacaaagaaccatgatacactggaatgtttttctctggaatcctctttctactcttgtattaaaatttttccccacttcatgattatattcaaaataaacaactacatcattacttctt

SEQ ID NO: 168961 - DNA, 556 bp, Homo sapiens
  Payload ID: 13262
  Gene Symbol: PCYOX1
  Gene Name: prenylcysteine oxidase 1
  ENST ID: ENST00000422380
  CDS Start-End: 168-556
acccattcacggagaaccttacagttctcgcaacagggtgatcactcacgattattggagccggaattggtggcacttcagcagcctattacctgcggcagaaatttgggaaagatgtgaagatagacctgtttgaaagagaagaggtcgggggccgcctggctaccatgatggtgcaggggcaagaatacgaggcaggaggttctgtcatccatcctttaaatctgcacatgaaacgttttgtcaaagacctgggtctctctgctgttcaggcctctggtggcctactggggatatataatggagagactctggtatttgaggagagcaactggttcataattaacgtgattaaattagtttggcgctatggatttcaatccctccgtatgcacatgtgggtagaggacgtgttagacaagttcatgaggatctaccgctaccagtctcatgactatgccttcagtagtgtcgaaaaattacttcatgctctaggaggagatgacttccttggaatgcttaatcgaacacttcttgaaaccttgcaaaaggccgg
